United States Patent Application Publication US 2011/0182862 A1 - sequence listing, part 11

SEQ ID NO: 15167 - protein, 434 aa, Muscodor strobelii
  misc_feature: SGI Peptide ID NO. 565017
  misc_feature (22)..(284): Pfam Id: PF03372 Pfam Desc: Endonuclease/Exonuclease/phosphatase family
  misc_feature (14)..(431): NCBI GI: 119497479 Blast Desc: endonuclease/exonuclease/phosphatase family protein [Neosartorya fischeri NRRL 181] gi|119413660|gb|EAW23601.1| endonuclease/exonuclease/phosphatase family protein [Neosartorya
  misc_feature (18)..(434): NCBI GI: 39951489 Blast Desc: MGG_01387 [Magnaporthe grisea 70-15] gi|145020783|gb|EDK04912.1| MGG_01387 [Magnaporthe grisea 70-15]
  misc_feature (14)..(431): NCBI GI: 70990110 Blast Desc: endonuclease/exonuclease/phosphatase family protein [Aspergillus fumigatus Af293] gi|66847536|gb|EAL87866.1| endonuclease/exonuclease/phosphatase family protein [Aspergillus
  misc_feature (1)..(434): NCBI GI: 238502697 Blast Desc: endonuclease/exonuclease/phosphatase family protein [Aspergillus flavus NRRL3357] gi|220691392|gb|EED47740.1| endonuclease/exonuclease/phosphatase family protein [Aspergillus
  misc_feature (1)..(434): NCBI GI: 169776017 Blast Desc: [Aspergillus oryzae RIB40] gi|83771210|dbj|BAE61342.1| protein product [Aspergillus oryzae]
  misc_feature (1)..(431): NCBI GI: 159124775 Blast Desc: endonuclease/exonuclease/phosphatase family protein [Aspergillus fumigatus A1163]
  misc_feature (18)..(434): NCBI GI: 116205379 Blast Desc: CHGG_10573 [Chaetomium globosum CBS 148.51] gi|88176701|gb|EAQ84169.1| CHGG_10573 [Chaetomium globosum CBS 148.51]
  misc_feature (1)..(431): NCBI GI: 121703439 Blast Desc: endonuclease/exonuclease/phosphatase family protein [Aspergillus clavatus NRRL 1] gi|119398127|gb|EAW08558.1| endonuclease/exonuclease/phosphatase family protein [Aspergillus
  misc_feature (18)..(434): NCBI GI: 171677163 Blast Desc: protein product [Podospora anserina] gi|170936649|emb|CAP61308.1| protein product [Podospora anserina]
  misc_feature (5)..(432): NCBI GI: 255953047 Blast Desc: Pc21g02110 [Penicillium chrysogenum Wisconsin 54-1255] gi|211588987|emb|CAP95108.1| Pc21g02110 [Penicillium chrysogenum Wisconsin 54-1255]
  misc_feature: Useful for introducing or modulating the production of volatile compounds
MRFRIIVSLVLGKAFAATSGSFNVLSMNVAGLPAFLQDNDVPGDKTTNSGTIGSKFAEYDYDIIHVQEDFNYHAYIYATDTHPYRTATSGGVPFGSGLNTLANYDWVDFTRVGWDTCSDASGSDCLTPKGFTSMRVALSDGVYIDVYNLHTDAGTEAADEIARDANIQQVADYIDNRSIGNAVLVFGDTNSRYTRADDNIRVFATQNDLVDTWVELVHDGVIPSIENVCDNPANTTACETVDKIFYRSSALLDLTATFWKYETPKFLQTDGSILSDHNPITTNFTWATSASLQQSDFHGGSHGAWFSDVPILAAKTGPKASVLSFKGGSRLDSISLTLADGTVLSHGGTGGTEGTLTLASGEFWNSAKLCQGQYNGDTRNFYILATTNSGRTLAAGTATTDCRTFTAPSGWGIVGFLGQDGDEIDQLAFVYAPK

SEQ ID NO: 15168 - DNA, 2567 bp, Muscodor strobelii
  misc_feature: SGI EST ID NO. CUFF.36177.0
  misc_feature: Variant of the nucleotide sequence at SEQ ID NO 15166
agcgagtgcagcttctacgactttcagaatgcgtgggcggaccatttacgaaatatgatctctgcacgtggcgagtcttgtgaaacaagcacagtctgagccttatgcaggtgtccggacggggaatgtcgcatcaagatccggcacgttgataagtatgtgtgtgcctataatcttgggaggctattgccgaagcgagagatgctttgccgtatcttaagggagtgttcatccaacattatagtatgattgtgcctatctgatgagggcttggtgagctgtctatttttctttgaggagtttcgctactacatgtgctcatggaggcatgctgcattacgaatcgccggagcggggtattacacggctgactttgaacagactcaacacccgtatcgtgtatttcaattctaggtcttatccgacttcataaaagatgtcgatgtgacgacggcggattttccggaaaggttgacgaatgctacactgtataataccacagtcctattgtgtatttatcctccaagcaaaaccgtcttacacagtaaggtgaatacaaggtatcccacagccaagtgaatgagtctatgcgactccacgtgccgcgcttgcttggatgaccaaaattcccggtccatctcagagccgctctatcgggaagttgagtccggttggcgccgggctgatgctcgaagaagggaatctcaacaccggtcgtaatctgtttggacgtttaaatcaagtaacatcgacttctactcatcgcttctttacgcgttaacagggttggtgccaaatattgactctcactccctcaagtatttaaagggtcgtgaattggaccagcctgaggaacaatatatcttgcacaaatttcttcagttgatgactgagtgacgataacaatgaggttcagaattattgtgtcgcttgtgttggggaaagcatttgccgccactagtggatccttcaacgttctgagtatgaatgtggcaggattgcccgcctttctgcaagacaatgatgttcctggagacaaaacaacgaattcagggacaatagggtccaaattcgccgaatacgactatgacataatccatgttcaggaggacttcaactaccatgcctacatctacgcaacggacacccatccctaccgtacggctacatcaggcggagtgccgttcggctctggcttgaatacgctggccaactatgactgggtagacttcacgcgtgttggatgggatacttgttctgatgcttccggttccgactgtttgacaccgaaagggttcacatccatgcgcgtggctttatcagacggcgtgtacatcgatgtctacaacttacataccgatgctggaaccgaagctgctgacgagattgcacgcgatgcgaacatccagcaggttgctgactacatagataaccgcagcattggcaatgcagtgctcgtatttggcgacaccaacagtcgatacacgagagctgatgacaatattcgtgtgtttgcaactcagaatgatctcgtcgacacatgggtggagctagttcatgatggtgtaataccctctatagagaatgtgtgcgacaatccagcaaatacgacggcgtgcgagactgttgataagatattttatcgcagtagcgcattgcttgatctcacggcaactttctggaagtatgaaacgccgaaatttctccaaactgatggaagtatattgtctgatcataacccaatcaccacaaactttacatgggcaaccagtgcgtctttgcagcagtctgatttccacggcggatcgcacggcgcatggttctctgatgtaccgattcttgcggccaagacgggaccaaaggcaagcgtgttatccttcaaaggcggctcgcgacttgatagcatcagtcttacattagctgatggcacggttctctcccatggtggcaccggcggcacggaaggtaccctgacactcgcaagtggcgagttctggaattccgcaaagctctgtcaggggcaatacaatggagatacacgaaacttctacattcttgctacaacgaatagtggtaggaccttagcagctgggacagcaacaaccgactgcagaacatttactgcgcctagtgggtggggcattgtcgggtttttaggtcaagatggtgatgaaatcgaccagctagcatttgtatacgcgcctaaataaggaggaggctttgttcacaagcgatgtgtgatgaaccatgacttgacgttttcacggatcgttggactgaatctatcgtatcggagtttggtcgatgctccgccgtagcagtcatgctaagcatagtcatgagtaatggggctgtaggcttggtactacctgttttgagagggcatcagaggcgagtgtaccaagacgctggttctgcaagcaatgcaagcccgtttcggaagatagggtcggagatttggtcgcagaatcttgggatgctcgtggatgaggctctataacaggcaccatcaaaccgggtcgcgccggcaagcaaagcattacaaatgcgacaaatttcctaagagg

SEQ ID NO: 15169 - DNA, 3597 bp, Muscodor strobelii
  misc_feature: SGI cDNA ID NO. 565018
  misc_feature: Reduced expression when VOC is produced
  misc_feature: Encodes the peptide sequence at SEQ ID NO 15170
atgacgctggatttacaagccgtgcggacaagtttgcaagtggcacccctttcgatattaaaaagccgctccggttccgtgagcagcagctcgcaagatgaggtggctcctaatcacgcaacaagcttgtattcccaggcacaactgacaccgccatcgacgccgaacgaatctcaagaggaacttgtctccgagcctcagtcatccgatcctattttccacaactttcttcgcgcgttctatccgttccagccggcagttacagtaaccgattcaaccattactcttccacttagtgaaggtgacgttgtactggtacattcgatccacaccaatggctgggcagatgggaccttgcttgccactggatccagaggatggctgcccacaaactactgtgaggcatacgagcctgaagagatgaggaatcttttgaaagcgctacttaatttctgggatcttcttaggagctcggtcacagatgatcaagacattttcgagaaccaggaattcatgaaaggcatcattgcaggtgtccgctatcttcttgagcgtacacattgcttgacccgcgaggcggcaactattcagaggagcgacacattaagacggggtcgtaagggcttattgtctgagctatcatcgctagtgaaaacggcgaaacgattgcaagaattgcttagactctcagcgcacttcactgatgatgctaacgacatcatcgacgaaatgattttgaaagccttcaaagtcgttgtcagaggtgtacgattcctagacttgttagacgaggatagacgtcacagagctccagcggtaacggtcatggcgacggtcatggaagaatcttttgtgccatcggctccgctagtatcagaaacgagcaatgtccacagcgaagaacatacacagaatgcaggtttccgagtagatggcgataagatgacacatgagttgtcaggcgaggacactcgaaacggtgaatcaacaccccagtttgattcgtttgctcaatcgatggcaaacgtaccaggcgataggatgtctcagagatacccactatcttccaatcgacactcggcttctgtttcacatcgagtgtctctttctagtcatcttcctccatcgcagtcgcaaaatctggtttcagagcaacttaataattgtcatgacaattttctttctcatttcagctcgttgattggtcgcctacgacttcagtctctttcccggtctgagttcgcatcagccataaagttgtctgccacatcaggtggagcactttgggctgttgtcaccgtagtgtgcgagcataacacattggtttcagaacctttggaaacggcccgggttgcgatgtccactcacatttgcgacttagtcttatctgcacgaggcatacttagtagcgatgtcgaggcggaacatgtggtcatgccgcaagatgttcttcagcaagctgccattcactgcgtcaaggcagccggcgagtgtgtagcacgaacgagactggttctcgaaaagataggcgacttcgaattcgagatcacatgcactggcttagatcttgatcttagtctgcttgaggtaatatctgaaagtcgcccacgaactccggagagggcagctatcgcagacatcaagacatcgccaccctcgtcggtggtcgctcctcctgtccatctatcaatagacaagccactgcccgagatccccccgagtacgccaagagccgagaaagtggatgtatcagaaatctcacccccgccgtccaggccacaatccgcagcagctgatgactatgcgccaagcaccaaatcctcagtatcatctataaggccgttattaccgcctctacccaagctcactaccgctttattggatgataatacatacgggtctgccgatataacccaggatacagaattaaatacgtcgtttcgatcagacactggaactgcaacgagctctggtacaagcgcctcgtacgctagtcgggactctgagtccagtttggtctctcagacatctacacgtgccacgactccagagagcactgtagcacccaaaccccagccctcactatctgatcttagtactgcagcgagtacgactctgagtgaagaagtcgaggaggttgaatccaagctattagaaaagacattcgcacacgagcttatgttcaacaaggaaggccatgtgattggcggctctttacctgcgcttgttgaaaggcttacgactcacgaaactacaccagatgctgtattcgtgtccgccttctacttaaccttcagactcttctgtacaccgatcaagttggttgaggtccttgtcgagcggtttgatcacgtaggggatttgcccagcatagcgagcgcggtgcggctacgtgtttataatgtcctcaagggctggctagaatcacattggcgagaacagactgacacagaggcgatagcatcagtagctcacttcgctgagttcaaattggggcccatcatcccttcagctggtaagcggcttacagagttggtgcagcgcgtttcttcagcagaatatatacccgtatcccgtttagtctcctctatgggcaagacaaatacttcaaccgctgtcttcgtaccggctgatgtgccaatcccaccgtccaacctctcaaggagccagcagcacttgctcacaaactggaaaacgggaggaagctgtccctcgatccttgatttcgatccgttggaaatcgcacggcagctcactatgaagcaaatggcagtgttttgctccattttacctgaggagctccttggatcgcagtggatgaagaaaggcggtgtcgagtcgccaaatgtcaaatccatgtccagcttttccaatgatctttccaatctcgttgcagacaccatcttgcagcattgcgaggttaagaagcgtgccgccatgatcaaacaatggatcaaagtagcaagtcaatgtcttgagctgaacaactacgacggtctgatggccattatctgcagtctcaatagctctataattagtcgactgcgcaaaacttgggaccttgtgagcccaaaacgacgagaactattcaagactctccaagcaattgttgagccttccaacaacaataaggtacttcgagcacgattacaaggccacgtgccaccgtgtctaccctttctggggatgttcttgactgatctcacctttgtcgacattggcaatccgcctacgaaacagcttcctggagtcgggcctcatggccaaggtcttactattgtcaacttcgacaagcacagccggactgcaaaaataatcggtgatctgcaacgatttcagattccttaccgtttcactgagcttcccgacatgcaagagtggctacaggctcaaatcatccgcgtgaaggagttggatcaaagcaatgtccaagttagttactatcggaagagcttactcctcgagcctagagagatgacgggtttaaagactcctgttgaaggacagccgccaactccccaacttgggacaaaacctgatctttttggctggatatcccgggaccgacataacaccacagctgctgtcgcaatttag

SEQ ID NO: 15170 - protein, 1198 aa, Muscodor strobelii
  misc_feature: SGI Peptide ID NO. 565018
  misc_feature (907)..(1101): Pfam Id: PF00617 Pfam Desc: RasGEF domain
  misc_feature (733)..(826): Pfam Id: PF00618 Pfam Desc: Guanine nucleotide exchange factor for Ras-like GTPases; N-terminal motif
  misc_feature (75)..(136): Pfam Id: PF00018 Pfam Desc: SH3 domain
  misc_feature (96)..(136): Pfam Id: PF00018 Pfam Desc: SH3 domain
  misc_feature (6)..(1193): NCBI GI: 46138749 Blast Desc: FG10889.1 [Gibberella zeae PH-1]
  misc_feature (49)..(1189): NCBI GI: 256728899 Blast Desc: [Nectria haematococca mpVI 77-13-4]
  misc_feature (3)..(1194): NCBI GI: 171677161 Blast Desc: protein product [Podospora anserina] gi|170936648|emb|CAP61307.1| protein product [Podospora anserina]
  misc_feature (37)..(1161): NCBI GI: 39975309 Blast Desc: MGG_00199 [Magnaporthe grisea 70-15] gi|145018941|gb|EDK03220.1| MGG_00199 [Magnaporthe grisea 70-15]
  misc_feature (3)..(1168): NCBI GI: 116205377 Blast Desc: CHGG_10572 [Chaetomium globosum CBS 148.51] gi|88176700|gb|EAQ84168.1| CHGG_10572 [Chaetomium globosum CBS 148.51]
  misc_feature (9)..(1192): NCBI GI: 156043829 Blast Desc: SS1G_10918 [Sclerotinia sclerotiorum 1980] gi|154695305|gb|EDN95043.1| SS1G_10918 [Sclerotinia sclerotiorum 1980]
  misc_feature (71)..(1192): NCBI GI: 154317049 Blast Desc: BC1G_03942 [Botryotinia fuckeliana B05.10] gi|150845554|gb|EDN20747.1| BC1G_03942 [Botryotinia fuckeliana B05.10]
  misc_feature (8)..(1191): NCBI GI: 85089976 Blast Desc: NCU09758 [Neurospora crassa OR74A] gi|28919534|gb|EAA28962.1| [Neurospora crassa OR74A]
  misc_feature (9)..(1197): NCBI GI: 212528604 Blast Desc: Ras guanine-nucleotide exchange protein, [Penicillium marneffei ATCC 18224] gi|210073857|gb|EEA27944.1| Ras guanine-nucleotide exchange protein, [Penicillium marneffei ATCC
  misc_feature (13)..(1184): NCBI GI: 119501214 Blast Desc: Ras guanine-nucleotide exchange protein, [Neosartorya fischeri NRRL 181] gi|119415529|gb|EAW25467.1| Ras guanine-nucleotide exchange protein, [Neosartorya fischeri NRRL
  misc_feature: Useful for introducing or modulating the production of volatile compounds
MTLDLQAVRTSLQVAPLSILKSRSGSVSSSSQDEVAPNHATSLYSQAQLTPPSTPNESQEELVSEPQSSDPIFHNFLRAFYPFQPAVTVTDSTITLPLSEGDVVLVHSIHTNGWADGTLLATGSRGWLPTNYCEAYEPEEMRNLLKALLNFWDLLRSSVTDDQDIFENQEFMKGIIAGVRYLLERTHCLTREAATIQRSDTLRRGRKGLLSELSSLVKTAKRLQELLRLSAHFTDDANDIIDEMILKAFKVVVRGVRFLDLLDEDRRHRAPAVTVMATVMEESFVPSAPLVSETSNVHSEEHTQNAGFRVDGDKMTHELSGEDTRNGESTPQFDSFAQSMANVPGDRMSQRYPLSSNRHSASVSHRVSLSSHLPPSQSQNLVSEQLNNCHDNFLSHFSSLIGRLRLQSLSRSEFASAIKLSATSGGALWAVVTVVCEHNTLVSEPLETARVAMSTHICDLVLSARGILSSDVEAEHVVMPQDVLQQAAIHCVKAAGECVARTRLVLEKIGDFEFEITCTGLDLDLSLLEVISESRPRTPERAAIADIKTSPPSSVVAPPVHLSIDKPLPEIPPSTPRAEKVDVSEISPPPSRPQSAAADDYAPSTKSSVSSIRPLLPPLPKLTTALLDDNTYGSADITQDTELNTSFRSDTGTATSSGTSASYASRDSESSLVSQTSTRATTPESTVAPKPQPSLSDLSTAASTTLSEEVEEVESKLLEKTFAHELMFNKEGHVIGGSLPALVERLTTHETTPDAVFVSAFYLTFRLFCTPIKLVEVLVERFDHVGDLPSIASAVRLRVYNVLKGWLESHWREQTDTEAIASVAHFAEFKLGPIIPSAGKRLTELVQRVSSAEYIPVSRLVSSMGKTNTSTAVFVPADVPIPPSNLSRSQQHLLTNWKTGGSCPSILDFDPLEIARQLTMKQMAVFCSILPEELLGSQWMKKGGVESPNVKSMSSFSNDLSNLVADTILQHCEVKKRAAMIKQWIKVASQCLELNNYDGLMAIICSLNSSIISRLRKTWDLVSPKRRELFKTLQAIVEPSNNNKVLRARLQGHVPPCLPFLGMFLTDLTFVDIGNPPTKQLPGVGPHGQGLTIVNFDKHSRTAKIIGDLQRFQIPYRFTELPDMQEWLQAQIIRVKELDQSNVQVSYYRKSLLLEPREMTGLKTPVEGQPPTPQLGTKPDLFGWISRDRHNTTAAVAI

SEQ ID NO: 15171 - DNA, 5183 bp, Muscodor strobelii
  misc_feature: SGI EST ID NO. CUFF.36300.1
  misc_feature: Variant of the nucleotide sequence at SEQ ID NO 15169
tcccgatatcacagatgatattattctcgtttcatttctacatacccatatactcgcagtctttacccagaccctcgatatactccacgatcctttgtctcacttcatattgacttcctctacgctacttgccagtctatgtacaattttgtagatcgctattgtcaacgcgggaaattctggattatctaccattgagcacgtcttacgcacgatcgagcaataagtgaacagcgaggtagtaaagaagctacagttcagaaagagagtggaatttaggcgagatataggaagaagaataataagccgaagagcacgagaccgggaaagaagggaaaaggaaacagcctgtcaccaatccggcgcccattcaccgggtagccacaactgatacgtgagattcactgcacgttagcattgggtcgcgtttcctgcctatcgaccgattctcgtcgctatccgtatgctggatgcgactactggcgatccgctgctagaactaagtcttcaggctcctggatgtcacaattgatcaagcaacttgatcgaactcactagttgggtgcaccttgttgactacgagattctacgctgtatttccagccgcattgagccctcatggtgcctcacaccacttctccacagcagtcatgacgctggatttacaagccgtgcggacaagtttgcaagtggcacccctttcgatattaaaaagccgctccggttccgtgagcagcagctcgcaagatgaggtggctcctaatcacgcaacaagcttgtattcccaggcacaactgacaccgccatcgacgccgaacgaatctcaagaggaacttgtctccgagcctcagtcatccgatcctattttccacaactttcttcgcgcgttctatccgttccagccggcagttacagtaaccgattcaaccattactcttccacttagtgaaggtgacgttgtactggtacattcgatccacaccaatggctgggcagatgggaccttgcttgccactggatccagaggatggctgcccacaaactactgtgaggcatacgagcctgaagagatgaggaatcttttgaaagcgctacttaatttctgggatcttcttaggagctcggtcacagatgatcaagacattttcgagaaccaggaattcatgaaaggcatcattgcaggtgtccgctatcttcttgagcgtacacattgcttgacccgcgaggcggcaactattcagaggagcgacacattaagacggggtcgtaagggcttattgtctgagctatcatcgctagtgaaaacggcgaaacgattgcaagaattgcttagactctcagcgcacttcactgatgatgctaacgacatcatcgacgaaatgattttgaaagccttcaaagtcgttgtcagaggtgtacgattcctagacttgttagacgaggatagacgtcacagagctccagcggtaacggtcatggcgacggtcatggaagaatcttttgtgccatcggctccgctagtatcagaaacgagcaatgtccacagcgaagaacatacacagaatgcaggtttccgagtagatggcgataagatgacacatgagttgtcaggcgaggacactcgaaacggtgaatcaacaccccagtttgattcgtttgctcaatcgatggcaaacgtaccaggcgataggatgtctcagagatacccactatcttccaatcgacactcggcttctgtttcacatcgagtgtctctttctagtcatcttcctccatcgcagtcgcaaaatctggtttcagagcaacttaataattgtcatgacaattttctttctcatttcagctcgttgattggtcgcctacgacttcagtctctttcccggtctgagttcgcatcagccataaagttgtctgccacatcaggtggagcactttgggctgttgtcaccgtagtgtgcgagcataacacattggtttcagaacctttggaaacggcccgggttgcgatgtccactcacatttgcgacttagtcttatctgcacgaggcatacttagtagcgatgtcgaggcggaacatgtggtcatgccgcaagatgttcttcagcaagctgccattcactgcgtcaaggcagccggcgagtgtgtagcacgaacgagactggttctcgaaaagataggcgacttcgaattcgagatcacatgcactggcttagatcttgatcttagtctgcttgaggtaatatctgaaagtcgcccacgaactccggagagggcagctatcgcagacatcaagacatcgccaccctcgtcggtggtcgctcctcctgtccatctatcaatagacaagccactgcccgagatccccccgagtacgccaagagccgagaaagtggatgtatcagaaatctcacccccgccgtccaggccacaatccgcagcagctgatgactatgcgccaagcaccaaatcctcagtatcatctataaggccgttattaccgcctctacccaagctcactaccgctttattggatgataatacatacgggtctgccgatataacccaggatacagaattaaatacgtcgtttcgatcagacactggaactgcaacgagctctggtacaagcgcctcgtacgctagtcgggactctgagtccagtttggtctctcagacatctacacgtgccacgactccagagagcactgtagcacccaaaccccagccctcactatctgatcttagtactgcagcgagtacgactctgagtgaagaagtcgaggaggttgaatccaagctattagaaaagacattcgcacacgagcttatgttcaacaaggaaggccatgtgattggcggctctttacctgcgcttgttgaaaggcttacgactcacgaaactacaccagatgctgtattcgtgtccgccttctacttaaccttcagactcttctgtacaccgatcaagttggttgaggtccttgtcgagcggtttgatcacgtaggggatttgcccagcatagcgagcgcggtgcggctacgtgtttataatgtcctcaagggctggctagaatcacattggcgagaacagactgacacagaggcgatagcatcagtagctcacttcgctgagttcaaattggggcccatcatcccttcagctggtaagcggcttacagagttggtgcagcgcgtttcttcagcagaatatatacccgtatcccgtttagtctcctctatgggcaagacaaatacttcaaccgctgtcttcgtaccggctgatgtgccaatcccaccgtccaacctctcaaggagccagcagcacttgctcacaaactggaaaacgggaggaagctgtccctcgatccttgatttcgatccgttggaaatcgcacggcagctcactatgaagcaaatggcagtgttttgctccattttacctgaggagctccttggatcgcagtggatgaagaaaggcggtgtcgagtcgccaaatgtcaaatccatgtccagcttttccaatgatctttccaatctcgttgcagacaccatcttgcagcattgcgaggttaagaagcgtgccgccatgatcaaacaatggatcaaagtagcaagtcaatgtcttgagctgaacaactacgacggtctgatggccattatctgcagtctcaatagctctataattagtcgactgcgcaaaacttgggaccttgtgagcccaaaacgacgagaactattcaagactctccaagcaattgttgagccttccaacaacaataaggtacttcgagcacgattacaaggccacgtgccaccgtgtctaccctttctggggatgttcttgactgatctcacctttgtcgacattggcaatccgcctacgaaacagcttcctggagtcgggcctcatggccaaggtcttactattgtcaacttcgacaagcacagccggactgcaaaaataatcggtgatctgcaacgatttcagattccttaccgtttcactgagcttcccgacatgcaagagtggctacaggctcaaatcatccgcgtgaaggagttggatcaaagcaatgtccaagttagttactatcggaagagcttactcctcgagcctagagagatgacgggtttaaagactcctgttgaaggacagccgccaactccccaacttgggacaaaacctgatctttttggctggatatcccgggaccgacataacaccacagctgctgtcgcaatttagacgcagtagctcatcgcgaagtcatccatcaccttaactacattcaatcctctacaacacaacagcagaatttcccagtcacagtaacgcgtctctttagtctctccgcatctatgatacccatatcttttactgtccgtgccatacatatttccttttcacgaaaaatttcggattgcaacccataagtgcactcggcataaactaccatttacgtatatgacgccacatgccggtgtccacagagatatttcgatgccgacttcttacgttttatcatcgacatatgtttacgcaactactatcatgtcagcgcaagggcttgctgcaaagcacctgccttgtggctaggtattgctttcttcgccccaccggcttaacgccttcagctgcctatcgaatgggcaagtgaacaggcgcctgcctcgacgaaagcatacctcatggcatgatgacacacttaacgtattgtgctacgaatgagcacatgctattgtataatgtgtataggaatttttggaacaattttgtagaaaagcaggaagctgtccgggttaagggtggtctaaaacggcatggtcttggattcggatttcagcacacagaattgacggatcggtctttgtgggaatgcctctttgagtggcatttttttctcgcttaaccatttggctgttaggcgtgcattgttttatcccgcgtcacgatgacacgaaagctcttgtggtactgaaaaactttagcgcttcgcagaatttgtgtcatggctcgcgcctcctttatagcattgcctacctgtatgtaggaacggacaggaaaggaaacagataggtccgctgttttgagtcaggttcgggtcacagtaatggggccttcttgtacacgagtccatcggaatccaaaatccaatttgcaatcacttccaatgccttctct

SEQ ID NO: 15172 - DNA, 1512 bp, Muscodor strobelii
  misc_feature: SGI cDNA ID NO. 565019
  misc_feature: Encodes the peptide sequence at SEQ ID NO 15173
atggcaagcaaggaggagtcgcacgtccagacgggcgatgtcgaggcaccaccgccgtcatatgagggcaccactatcgcccgccctgccggatggatgtataagggtatctcgctcggccgcggcaaagagatctggtacgcttcgcccagagcccagctgctcatggtctcgttcgtctgcttcttgtgccccggtctgtacaatgctctcagtggtctcggcggcggcggccaggtcgaccagcacatccaggctgacgcctcgaccgccacctacgccgtcttcgccatcattggtttcttctccggttccttcgccaacaagatgggcatcaaggtcactctctccctcggtagtgtcggttatgccatctactctgccagcttcttgagctacaaccacaccaaaaacaggggcttcgtcatttttgccggtgctcttctcggtttctgcgctggcttgctgtggaccgcccagggtgccatcatgttggcctaccctctcgagaagaacaagggtcgatacatcagcactttctggatcatcttcaacttcggcggtgttattggcgccctgattgtcctcgcccagaacctgcacaacaactccggaactgtcaccgatggcacctacgctgccttcattgtcctcatgttcctcggcgccgtcatcgctctgttcctcgtgaacgctgacaaggtgatccgtgaggacggctccaaggttatcatcatgaaggagcctacctggaagtccgaattcattggcttgtgggagtgtatctacaatgcgccctgggtcattctcctcttccccatgttcttcgcctccaacatcttctacacataccagcagaatggtgtcaacttcgtcagcttcaacctgcgatcccgttcactgaactccctgctctattggcttgcacagattctgggcgccatggtttatggttactgcctcgactactccggtattcgacgctctgtccgtgccaagatctccatcgtcgtcctgtttgttctcacattcgtcatctggggaggtggttacgcttttgagaaggatcagccaccccgaaccgtcaaagtgccagaggaggacaagcttgactttacggaccgagcctatctcggccccgctttcctctacatcttctacggcttctacgatgcttgctggcaggcctcgacctactggtggatcggcgctctttccaactcaggtcgccgaactgccaacatggctggtttctacaaaggcatccagtccggtggtgctgccattttctgggccctggatggtgcttcagtctcctaccgcactctgtatgccgcaactttcgccatctgcgctgcctctatcgtgattgcctcaccggttgtctggttgcgtatcaaggacaccactgacatcgaggaggatctgaagttcagtgatgaaacccttgaggacgtcgctcccactgccatgctcgaggagaagcgagctcatattgatgagactatttaa

SEQ ID NO: 15173 - protein, 503 aa, Muscodor strobelii
  misc_feature: SGI Peptide ID NO. 565019
  misc_feature (55)..(206): Pfam Id: PF05978 Pfam Desc: Eukaryotic protein of function (DUF895)
  misc_feature (54)..(431): Pfam Id: PF07690 Pfam Desc: Major Facilitator Superfamily
  misc_feature (88)..(431): Pfam Id: PF07690 Pfam Desc: Major Facilitator Superfamily
  misc_feature (1)..(489): NCBI GI: 46138747 Blast Desc: FG10888.1 [Gibberella zeae PH-1]
  misc_feature (26)..(489): NCBI GI: 116205381 Blast Desc: CHGG_10574 [Chaetomium globosum CBS 148.51] gi|88176702|gb|EAQ84170.1| CHGG_10574 [Chaetomium globosum CBS 148.51]
  misc_feature (6)..(495): NCBI GI: 39977405 Blast Desc: MGG_06605 [Magnaporthe grisea 70-15] gi|145015949|gb|EDK00439.1| MGG_06605 [Magnaporthe grisea 70-15]
  misc_feature (5)..(486): NCBI GI: 85090310 Blast Desc: NCU09771 [Neurospora crassa OR74A] gi|28919711|gb|EAA29119.1| NCU09771 [Neurospora crassa OR74A]
  misc_feature (8)..(499): NCBI GI: 261354391 Blast Desc: DUF895 domain membrane protein [Verticillium albo-atrum VaMs.102]
  misc_feature (3)..(495): NCBI GI: 242794906 Blast Desc: DUF895 domain membrane protein [Talaromyces stipitatus ATCC 10500] gi|218719059|gb|EED18479.1| DUF895 domain membrane protein [Talaromyces stipitatus ATCC 10500]
  misc_feature (1)..(503): NCBI GI: 159123777 Blast Desc: DUF895 domain membrane protein [Aspergillus fumigatus A1163]
  misc_feature (19)..(495): NCBI GI: 212536120 Blast Desc: DUF895 domain membrane protein [Penicillium marneffei ATCC 18224] gi|210070615|gb|EEA24705.1| DUF895 domain membrane protein [Penicillium marneffei ATCC 18224]
  misc_feature (1)..(503): NCBI GI: 70983382 Blast Desc: DUF895 domain membrane protein [Aspergillus fumigatus Af293] gi|66844844|gb|EAL85180.1| DUF895 domain membrane protein [Aspergillus fumigatus Af293]
  misc_feature (1)..(503): NCBI GI: 119484108 Blast Desc: NFIA_096820 [Neosartorya fischeri NRRL 181] gi|119410113|gb|EAW20060.1| conserved [Neosartorya fischeri NRRL 181]
MASKEESHVQTGDVEAPPPSYEGTTIARPAGWMYKGISLGRGKEIWYASPRAQLLMVSFVCFLCPGLYNALSGLGGGGQVDQHIQADASTATYAVFAIIGFFSGSFANKMGIKVTLSLGSVGYAIYSASFLSYNHTKNRGFVIFAGALLGFCAGLLWTAQGAIMLAYPLEKNKGRYISTFWIIFNFGGVIGALIVLAQNLHNNSGTVTDGTYAAFIVLMFLGAVIALFLVNADKVIREDGSKVIIMKEPTWKSEFIGLWECIYNAPWVILLFPMFFASNIFYTYQQNGVNFVSFNLRSRSLNSLLYWLAQILGAMVYGYCLDYSGIRRSVRAKISIVVLFVLTFVIWGGGYAFEKDQPPRTVKVPEEDKLDFTDRAYLGPAFLYIFYGFYDACWQASTYWWIGALSNSGRRTANMAGFYKGIQSGGAAIFWALDGASVSYRTLYAATFAICAASIVIASPVVWLRIKDTTDIEEDLKFSDETLEDVAPTAMLEEKRAHIDETI

SEQ ID NO: 15174 - DNA, 2131 bp, Muscodor strobelii
  misc_feature: SGI EST ID NO. CUFF.36162.0
  misc_feature: Variant of the nucleotide sequence at SEQ ID NO 15172
ctaggacacacgcctccccactttcactacggccaatgttgcatgcgccagagcaccaaagcatccatacctagctccctctttcgttgataataataagattacatccgtctcctcgccagattttattcttttctcttcttctcggtaacctctgcttcctggcaacgaagacggttcgacgccagacaccagcctgccgggagactataagcttctcaagctatccccgaagaacttagccccgctaatatctcgactttaaaatcccccgcggatcaagatagtcagcagctatggcaagcaaggaggagtcgcacgtccagacgggcgatgtcgaggcaccaccgccgtcatatgagggcaccactatcgcccgccctgccggatggatgtataagggtatctcgctcggccgcggcaaagagatctggtacgcttcgcccagagcccagctgctcatggtctcgttcgtctgcttcttgtgccccggtctgtacaatgctctcagtggtctcggcggcggcggccaggtcgaccagcacatccaggctgacgcctcgaccgccacctacgccgtcttcgccatcattggtttcttctccggttccttcgccaacaagatgggcatcaaggtcactctctccctcggtagtgtcggttatgccatctactctgccagcttcttgagctacaaccacaccaaaaacaggggcttcgtcatttttgccggtgctcttctcggtttctgcgctggcttgctgtggaccgcccagggtgccatcatgttggcctaccctctcgagaagaacaagggtcgatacatcagcactttctggatcatcttcaacttcggcggtgttattggcgccctgattgtcctcgcccagaacctgcacaacaactccggaactgtcaccgatggcacctacgctgccttcattgtcctcatgttcctcggcgccgtcatcgctctgttcctcgtgaacgctgacaaggtgatccgtgaggacggctccaaggttatcatcatgaaggagcctacctggaagtccgaattcattggcttgtgggagtgtatctacaatgcgccctgggtcattctcctcttccccatgttcttcgcctccaacatcttctacacataccagcagaatggtgtcaacttcgtcagcttcaacctgcgatcccgttcactgaactccctgctctattggcttgcacagattctgggcgccatggtttatggttactgcctcgactactccggtattcgacgctctgtccgtgccaagatctccatcgtcgtcctgtttgttctcacattcgtcatctggggaggtggttacgcttttgagaaggatcagccaccccgaaccgtcaaagtgccagaggaggacaagcttgactttacggaccgagcctatctcggccccgctttcctctacatcttctacggcttctacgatgcttgctggcaggcctcgacctactggtggatcggcgctctttccaactcaggtcgccgaactgccaacatggctggtttctacaaaggcatccagtccggtggtgctgccattttctgggccctggatggtgcttcagtctcctaccgcactctgtatgccgcaactttcgccatctgcgctgcctctatcgtgattgcctcaccggttgtctggttgcgtatcaaggacaccactgacatcgaggaggatctgaagttcagtgatgaaacccttgaggacgtcgctcccactgccatgctcgaggagaagcgagctcatattgatgagactatttaatcatcctgcttcagttggatcaaactggaagaatcggggtggatttgcttttggagttatgagcggtgtatatggatgaacttgtcatacggatcttgaggtcaagattccgttgcatcgagaaaattataccctgttttgtattgcatacaagacaacataataattgagcgtatttcgcatctcaagatatatccagtgttacgtttgcgtgattgtcaccacgtggctctagtatctacagtgtctaccactttagcgcatcgtgaagtgattcagtccgtgttatgcggacgatccaatggatcaatagtgcagttaag

SEQ ID NO: 15175 - DNA, 708 bp, Muscodor strobelii
  misc_feature: SGI cDNA ID NO. 565020
  misc_feature: Encodes the peptide sequence at SEQ ID NO 15176
atgaagcttattgttactggagcatctggatatgtgggaagagaggtaatccgacaaagcctttcgcgccgtgaaatcacgtctgttgttgccgtcgcaagatcttccgtcacggcaccagaaaagctcgatgccgcttctgatgcatcgaagctcaaaagcgtcatcattcaggattacgagcactactcggatgaggtgaaaaaggagtttgcagacgcgaatgcctgtatctggacggtagcaattacgccgagtaaatccaaagcctatgaattctccgaagtgaaacgcatctgtcaaacttccaccgtcaactgtctaaatgcaatacaagaagccgaacctgccaagccatttcgctttctctatataagcggtgcggcggccgagcgagaccagacaaagacgccctcttttcaaccccaatactctctcatgcgtggtgagacggagaaccaggtattagctcttgctaagaaatacggcatggaggcatcagttgcaaaaccgggattcatcacgcaacctggagattggggaaggattgctatgggtggttttgtgcgtgttgttgctggtattccgtccatttatgttgcggatctcgcaggtgtgatgttagaccaggtcattaatgggtttgacagagatcctttgatgccgaaggacttggcggagatcgcgacgagggtttcgaaggcatag

SEQ ID NO: 15176 - protein, 235 aa, Muscodor strobelii
  misc_feature: SGI Peptide ID NO. 565020
  misc_feature (5)..(215): Pfam Id: PF07993 Pfam Desc: Male sterility protein
  misc_feature (1)..(232): NCBI GI: 225555395 Blast Desc: conserved [Ajellomyces capsulatus G186AR]
  misc_feature (1)..(232): NCBI GI: 240273860 Blast Desc: conserved [Ajellomyces capsulatus H143]
  misc_feature (1)..(231): NCBI GI: 171676565 Blast Desc: protein product [Podospora anserina] gi|170936349|emb|CAP61007.1| protein product [Podospora anserina]
  misc_feature (1)..(232): NCBI GI: 154286950 Blast Desc: [Ajellomyces capsulatus NAm1] gi|150407911|gb|EDN03452.1| [Ajellomyces capsulatus NAm1]
  misc_feature (1)..(232): NCBI GI: 212545931 Blast Desc: nucleoside-diphosphate-sugar epimerase, [Penicillium marneffei ATCC 18224] gi|210064639|gb|EEA18734.1| nucleoside-diphosphate-sugar epimerase, [Penicillium marneffei
  misc_feature (1)..(235): NCBI GI: 256726681 Blast Desc: NECHADRAFT_102411 [Nectria haematococca mpVI 77-13-4]
  misc_feature (1)..(231): NCBI GI: 255939145 Blast Desc: Pc15g01170 [Penicillium chrysogenum Wisconsin 54-1255] gi|211584964|emb|CAP83003.1| Pc15g01170 [Penicillium chrysogenum Wisconsin 54-1255]
  misc_feature (1)..(232): NCBI GI: 154323101 Blast Desc: BC1G_00893 [Botryotinia fuckeliana B05.10] gi|150848227|gb|EDN23420.1| BC1G_00893 [Botryotinia fuckeliana B05.10]
  misc_feature (1)..(148): NCBI GI: 261356619 Blast Desc: conserved [Verticillium albo-atrum VaMs.102]
  misc_feature (1)..(231): NCBI GI: 46122755 Blast Desc: FG05755.1 [Gibberella zeae PH-1]
MKLIVTGASGYVGREVIRQSLSRREITSVVAVARSSVTAPEKLDAASDASKLKSVIIQDYEHYSDEVKKEFADANACIWTVAITPSKSKAYEFSEVKRICQTSTVNCLNAIQEAEPAKPFRFLYISGAAAERDQTKTPSFQPQYSLMRGETENQVLALAKKYGMEASVAKPGFITQPGDWGRIAMGGFVRVVAGIPSIYVADLAGVMLDQVINGFDRDPLMPKDLAEIATRVSKA

SEQ ID NO: 15177 - DNA, 1640 bp, Muscodor strobelii
  misc_feature: SGI EST ID NO. CUFF.36135.0
  misc_feature: Variant of the nucleotide sequence at SEQ ID NO 15175
taaatatcgtgtgcaagtgtgctacgtacatggacccatgctagtacatgatagtttctctatttttatcatttacttgtcgttgttgtcaagtgcaatggtgttgatctgtgctcttgagatgtcaagacggtttagcttcacctagcgcttggacaaacctggctggctgggcgaatgtgattgatctgtataaaactctctcccttgcgtcctcctgtacattctcaaggatgttttcaattagcacagcttatatgacatcaaccgaaatcattaattcaacatgaagcttattgttactggagcatctggatatgtgggaagagaggtaatccgacaaagcctttcgcgccgtgaaatcacgtctgttgttgccgtcgcaagatcttccgtcacggcaccagaaaagctcgatgccgcttctgatgcatcgaagctcaaaagcgtcatcattcaggattacgagcactactcggatgaggtgaaaaaggagtttgcagacgcgaatgcctgtatctggacggtagcaattacgccgagtaaatccaaagcctatgaattctccgaagtgaaacgcatctgtcaaacttccaccgtcaactgtctaaatgcaatacaagaagccgaacctgccaagccatttcgctttctctatataagcggtgcggcggccgagcgagaccagacaaagacgccctcttttcaaccccaatactctctcatgcgtggtgagacggagaaccaggtattagctcttgctaagaaatacggcatggaggcatcagttgcaaaaccgggattcatcacgcaacctggagattggggaaggattgctatgggtggttttgtgcgtgttgttgctggtattccgtccatttatgttgcggatctcgcaggtgtgatgttagaccaggtcattaatgggtttgacagagatcctttgatgccgaaggacttggcggagatcgcgacgagggtttcgaaggcatagcagacaagatcaaaacgatgagaaagaaattaattcaagttactagtgggttaacgtaagcgaggtaaacccattaacctagcggttgagtgggcgcaaatactatgaaacgagcagtaattgaaacagatgatatttcgactgccgtacgacgaaaatgcaagcaatgtattgggaaatgttttgcaacgatgttgtggctttagatggaaaattctgggaaacgtttttcatatcactcgataaacaatggggatgtcccgacttcaggagtttgaaagcaaggtttggtcggcttctggagtatatccggattggtgaactaccgtccgatgctttatacgccagaaatattttgcgacatgcgttggcggacacggtatttaaggactcgaaacacccatatgatatcgtcacttgaatccagatatttctcaagaatgggtagtcgggtttctaacagcaaacggtgcagtggccaccattgaagcaagcatccgggaacatatggatggggtttcctatcaaagggttctgttactcctttggtatacttgttgcggatgtttgggaagacgcaacgtactcacagggcatgccgaatcctactcctctttcgcatgaagttgttatgcatgacagccag

SEQ ID NO: 15178 - DNA, 852 bp, Muscodor strobelii
  misc_feature: SGI cDNA ID NO. 565021
  misc_feature: Encodes the peptide sequence at SEQ ID NO 15179
atgctttctgccgcgatcgtaagtattgccgcactgtcggcgctgtcgccaatcgttgtcgccgagtgcaacaggaccgcattactcgaattcgcggacgcctatgttgaagcgcatgaaactggacaagtcggcaatcttgacaacatcgctgataacttcacttatatcgaaaataacaaaaccggctcgatcacaagcggcatattcttcaatgccttcgtaatcgaccatcgtcacacgatttcggacgtagtggaatgtgccacttacacggagctaatcatcacacataacgtgtccggagcagctgcaccacatgtaatcggtacgcaaatccgccacaactcagtggatatgagttgctatctcatcgacctcatcgtctccagcccggggtcctggctcttcaacgcaactcaaacactctactgggcacaaagagaaaactggacattgatcgacgaggcaaaacgcgacaagcgtgagaccttaaaggctgctgcggatgcatatctcgacatgtggagtgacaagactgcagagagccgtgtaccatggggaacaccttgtgcgcgtctcgagggcagtgcttacacaggtaacggctcaccgacggatagctgcaagcctggcattccgacgaacaataatcaggcgccgaatgattttcgtcggtatgttattgatgagacttatggctctattgatgttctttgtatctttgagcatctccagaaggcgcccgatagtcatgagttccgcttggagaatgggaagttgaggtatgtacataccatcacactggcgaatagcggagctcctagtccccgatggctggaggctgcttga

SEQ ID NO: 15179 - protein, 283 aa, Muscodor strobelii
  misc_feature: SGI Peptide ID NO. 565021
  misc_feature (4)..(268): NCBI GI: 171678034 Blast Desc: protein product [Podospora anserina] gi|170937086|emb|CAP61744.1| protein product [Podospora anserina]
  misc_feature (7)..(272): NCBI GI: 116200452 Blast Desc: CHGG_10771 [Chaetomium globosum CBS 148.51] gi|88175485|gb|EAQ82953.1| CHGG_10771 [Chaetomium globosum CBS 148.51]
  misc_feature (21)..(269): NCBI GI: 169854321 Blast Desc: CC1G_01512 [Coprinopsis cinerea okayama7#130] gi|116504970|gb|EAU87865.1| CC1G_01512 [Coprinopsis cinerea okayama7#130]
  misc_feature (2)..(258): NCBI GI: 116201669 Blast Desc: CHGG_08719 [Chaetomium globosum CBS 148.51] gi|88177237|gb|EAQ84705.1| CHGG_08719 [Chaetomium globosum CBS 148.51]
  misc_feature (8)..(269): NCBI GI: 169598118 Blast Desc: SNOG_01857 [Phaeosphaeria nodorum SN15] gi|111068949|gb|EAT90069.1| SNOG_01857 [Phaeosphaeria nodorum SN15]
  misc_feature (9)..(263): NCBI GI: 169601696 Blast Desc: SNOG_03720 [Phaeosphaeria nodorum SN15] gi|111067805|gb|EAT88925.1| SNOG_03720 [Phaeosphaeria nodorum SN15]
  misc_feature (23)..(269): NCBI GI: 169869949 Blast Desc: CC1G_13257 [Coprinopsis cinerea okayama7#130] gi|116497398|gb|EAU80293.1| CC1G_13257 [Coprinopsis cinerea okayama7#130]
  misc_feature (13)..(268): NCBI GI: 189194003 Blast Desc: conserved [Pyrenophora tritici-repentis Pt-1C-BFP] gi|187978904|gb|EDU45530.1| conserved [Pyrenophora tritici-repentis Pt-1C-BFP]
  misc_feature (1)..(273): NCBI GI: 171694471 Blast Desc: protein product [Podospora anserina] gi|170947184|emb|CAP73989.1| protein product [Podospora anserina]
  misc_feature (22)..(268): NCBI GI: 169854317 Blast Desc: CC1G_01510 [Coprinopsis cinerea okayama7#130] gi|116504968|gb|EAU87863.1| CC1G_01510 [Coprinopsis cinerea okayama7#130]
MLSAAIVSIAALSALSPIVVAECNRTALLEFADAYVEAHETGQVGNLDNIADNFTYIENNKTGSITSGIFFNAFVIDHRHTISDVVECATYTELIITHNVSGAAAPHVIGTQIRHNSVDMSCYLIDLIVSSPGSWLFNATQTLYWAQRENWTLIDEAKRDKRETLKAAADAYLDMWSDKTAESRVPWGTPCARLEGSAYTGNGSPTDSCKPGIPTNNNQAPNDFRRYVIDETYGSIDVLCIFEHLQKAPDSHEFRLENGKLRYVHTITLANSGAPSPRWLEAA

SEQ ID NO: 15180 - DNA, 3201 bp, Muscodor strobelii
  misc_feature: SGI cDNA ID NO. 565022
  misc_feature: Encodes the peptide sequence at SEQ ID NO 15181
atggcgccaaaggctaaagctacagctcggaaagcccaggctactctcgatgataagtctcatcagataatctcatcgtatttcataggtcctcaggccgagaacttgcctttcttcaaagaaaacatatctattattcttgaagagttagagaatgcaagaacgaagtatttccctggagatggcaaattcatcgatgaagacacacagaagtcgcctgcctttattgcagcgacagaaaagatgaagaatgctgtacgcaaagcttccaatatcctgggaagaacaagtataccgttttggaacccacgttatgaggcacatatgttagttgcgtccactaccatggcgtcactcctgggctactttatgacaatgctgtataacccaaacaatgtggcaatcgaagcaagtcctttgtccaccgtagcagagatcgaagtcggcgagcagctatgtgagctatttggctattctatcgaccaagacgacaccgaaagccctaccggatggggtcatgtaacgtgtgatggtactgttgcaaacctcgaatcaatttgggtcgcacgaaatctgaagttctatcctctttcactacggagggcatttgagaaagacaagccacttgacttcctaacagatgcgttctatgtggatacttgcaagggcgagcgcaaactcttctcgtcgctctcaagctgggagttgttgaacttgaaaccgactgacgtccttgacctcccggatagattgtatcaggagcatggcatctcgaactcttttctgtcagagatgatgaacgagttcacaattcagtctactggcaaggactgtttggagaaagagttcaaagtcaagccagcacagtacatgttggcaaacactcgtcattattcctggccaaaaggcgctgcaatctgtgggcttgggtcggacaacgtagttggcataccagtagatctcggcgcgcgtctcgatctcgatgagcttgaggcgacgttaagggaaaacttgaagaatgagcacccggtatatgcggtggtggccataattgggtcaacagaggagggagcagtcgatcctctgagcggcgtacttgcattacgtaaacagcttcaagcggaagggctttcttttctcgttcacgccgacgccgcttggggaggttacttctgttcgatgcttccaaaagactttcgacccggtgacatcgtcaccctgcctaaggaaacaggcaaatttgctgacgggtttgttcctgatgccagtctgcgagctcaaacccaggaagatctatttgcaatgcgttttgctgactcgattaccgttgatcctcataaggcgggctacataccttatccagcgggtggtctctgttatcgtgatggacgtacgcgttttttggttacctggacaagtccctacttatcgcgtggatccgttacctcgatcggcatctatggcgtcgagggaagtaaaccgggagcatctgccatgtctgcttggctagctaacaaaacaatcggtctgacccaagacggttatggagcactccttggcgaagtcacctggacatgtacacgtctttctgcggaatgggcagcattaactgatgcgtcgagcccctttatttgtgtcccctttaacatgcttccgtctgaactggagagccatcccagcgaagagaagatcgaagcagagaaaagacgcatccgcaatgatatcgtcaacagaacgaacgcaaagatcatcgaagaagacgaaaaacgacaagatgagtataaggcaatgacactgatgcgagaactaggttccgacctgaacatcaatgctttcgccttgaactttcgctatgaggatggaacgctcaatgatgatattgaagaagcgaattaccttatgcaacgagtgatcgagacactatcagttgatagcccgacagacgatccaactaagatccctttgtatctcacctcgactgagttttctgacaaactctatggcaaatgcaaggcaaacttcgtcaagagactcggtcttgaacagagcacacaagacctgatggtgctacggaatgttgtaatgtcgccgttcccgtcggatgggaatttcaccaatgatttggcaagtatattctacgatgtcgttaaaaaggaaactgaggtcgtccgcaagcgcaatacactcgcgcccgacttccattcctttctcattcaagggactgagaaaatctatctcatccatcttcctatgctacacgttgcaaaccatcgtcagcaactcattgtgtcggtcgagtttgacgagaaatcaaagaaaaagtatattgccatgaagaaatcgtatccaacagaaccaatggttctcgttacggcgcagaagacaatgctcaaggatgtagttgagaggaacggtcatttcaaggctcagatcatgacaaaagagagcggcatcgttcttcacaacatcgaggtcaccttgaagaagaccatagtcagtcgagctctaaattcgaagttccggctagaagaattcccttcgacattcatgccattctatctctatggaactccaaacgaggctaatatcgaccatgtaatcactcgagcgcccaacacccagctatccgcaggccgttgtcaattgaaattctacaaggaaccagaggagttgaatctggatagagacgatttaatcttactactagaggacgtccgtgaggcaccgatgcagccatttccaccaaacagcgagattggcagcaagaatggtgctgtcatcacacacgggagcaagtcgcacaatgtgctcaagaaaccggaaatcacagccgccgagaggaatggtagtctcaacggcgacgttactgggacccataaagaggatgtatccgagaaacctcacaaagcggccgaagtcgtgaacagtgagacgcgaagtggtgccgtacgagggtcaaatttcttcttccgcccaggtgccacgttcaaggtcggtgtgtggaaagacaaaaaccgtaagaaccagtcttccaagcacaaaagcttcgagctgggcacgttcatcggtcgcggtacgataactttgggagagagcgtctacgttgatagtgaggctatgaacttcgatcccttcaagaaggtggagaaggttacggaatggcgacatgagttcgatcagattggcaaggagttggaataa

SEQ ID NO: 15181 - protein, 1066 aa, Muscodor strobelii
  misc_feature: SGI Peptide ID NO. 565022
  misc_feature (18)..(914): NCBI GI: 238489009 Blast Desc: pyridoxal-dependent decarboxylase domain protein [Aspergillus flavus NRRL3357] gi|220698130|gb|EED54470.1| pyridoxal-dependent decarboxylase domain protein [Aspergillus
  misc_feature (18)..(914): NCBI GI: 169763142 Blast Desc: [Aspergillus oryzae RIB40] gi|83770499|dbj|BAE60632.1| protein product [Aspergillus oryzae]
  misc_feature (20)..(1066): NCBI GI: 119476578 Blast Desc: pyridoxal-dependent decarboxylase conserved domain protein [Neosartorya fischeri NRRL 181] gi|119407356|gb|EAW17305.1| pyridoxal-dependent decarboxylase
  misc_feature (20)..(1061): NCBI GI: 238492139 Blast Desc: pyridoxal-dependent decarboxylase domain protein [Aspergillus flavus NRRL3357] gi|220695800|gb|EED52142.1| pyridoxal-dependent decarboxylase domain protein [Aspergillus
  misc_feature (24)..(1066): NCBI GI: 46127743 Blast Desc: FG08249.1 [Gibberella zeae PH-1]
  misc_feature (26)..(953): NCBI GI: 256720421 Blast Desc: NECHADRAFT_64964 [Nectria haematococca mpVI 77-13-4]
  misc_feature (61)..(1055): NCBI GI: 171677394 Blast Desc: protein product [Podospora anserina] gi|170936765|emb|CAP61423.1| protein product [Podospora anserina]
  misc_feature (64)..(913): NCBI GI: 145245047 Blast Desc: An11g08250 [Aspergillus niger] gi|134079486|emb|CAK46018.1| protein product [Aspergillus niger]
  misc_feature (115)..(1061): NCBI GI: 169782524 Blast Desc: [Aspergillus oryzae RIB40] gi|83774468|dbj|BAE64591.1| protein product [Aspergillus oryzae]
  misc_feature (24)..(724): NCBI GI: 115437242 Blast Desc: [Aspergillus terreus NIH2624] gi|114188576|gb|EAU30276.1| [Aspergillus terreus NIH2624]
MAPKAKATARKAQATLDDKSHQIISSYFIGPQAENLPFFKENISIILEELENARTKYFPGDGKFIDEDTQKSPAFIAATEKMKNAVRKASNILGRTSIPFWNPRYEAHMLVASTTMASLLGYFMTMLYNPNNVAIEASPLSTVAEIEVGEQLCELFGYSIDQDDTESPTGWGHVTCDGTVANLESIWVARNLKFYPLSLRRAFEKDKPLDFLTDAFYVDTCKGERKLFSSLSSWELLNLKPTDVLDLPDRLYQEHGISNSFLSEMMNEFTIQSTGKDCLEKEFKVKPAQYMLANTRHYSWPKGAAICGLGSDNVVGIPVDLGARLDLDELEATLRENLKNEHPVYAVVAIIGSTEEGAVDPLSGVLALRKQLQAEGLSFLVHADAAWGGYFCSMLPKDFRPGDIVTLPKETGKFADGFVPDASLRAQTQEDLFAMRFADSITVDPHKAGYIPYPAGGLCYRDGRTRFLVTWTSPYLSRGSVTSIGIYGVEGSKPGASAMSAWLANKTIGLTQDGYGALLGEVTWTCTRLSAEWAALTDASSPFICVPFNMLPSELESHPSEEKIEAEKRRIRNDIVNRTNAKIIEEDEKRQDEYKAMTLMRELGSDLNINAFALNFRYEDGTLNDDIEEANYLMQRVIETLSVDSPTDDPTKIPLYLTSTEFSDKLYGKCKANFVKRLGLEQSTQDLMVLRNVVMSPFPSDGNFTNDLASIFYDVVKKETEVVRKRNTLAPDFHSFLIQGTEKIYLIHLPMLHVANHRQQLIVSVEFDEKSKKKYIAMKKSYPTEPMVLVTAQKTMLKDVVERNGHFKAQIMTKESGIVLHNIEVTLKKTIVSRALNSKFRLEEFPSTFMPFYLYGTPNEANIDHVITRAPNTQLSAGRCQLKFYKEPEELNLDRDDLILLLEDVREAPMQPFPPNSEIGSKNGAVITHGSKSHNVLKKPEITAAERNGSLNGDVTGTHKEDVSEKPHKAAEVVNSETRSGAVRGSNFFFRPGATFKVGVWKDKNRKNQSSKHKSFELGTFIGRGTITLGESVYVDSEAMNFDPFKKVEKVTEWRHEFDQIGKELE

SEQ ID NO: 15182 - DNA, 825 bp, Muscodor strobelii
  misc_feature: SGI EST ID NO. CUFF.36145.0
  misc_feature: Variant of the nucleotide sequence at SEQ ID NO 15180
cgtggatccgttacctcgatcggcatctatggcgtcgagggaagtaaaccgggagcatctgccatgtctgcttggctagctaacaaaacaatcggtctgacccaagacggttatggagcactccttggcgaagtcacctggacatgtacacgtgtaagtactggatttcgcgtcatggggctacttaaatctgatagtgcatagctttctgcggaatgggcagcattaactgatgcgtcgagcccctttatttgtgtcccctttaacatgcttccgtctgaactggagagccatcccagcgaagagaagatcgaagcagagaaaagacgcatccgcaatgatatcgtcaacagaacgaacgcaaagatcatcgaagaagacgaaaaacgacaagatgagtataaggcaatgacactgatgcgagaactaggttccgacctgaacatcaatgctttcgccttgaactttcgctatgaggatggaacgctcaatgatgatattgaagaagcgaattaccttatgcaacgagtgatcgagacactatcagttgatagcccgacagacgatccaactaagatccctttgtatctcacctcgactgagttttctgacaaactctatggcaaatgcaaggcaaacttcgtcaagagactcggtcttgaacagagcacacaagacctgatggtgctacggaatgttgtaatgtcgccgttcccgtcggatgggaatttcaccaatgatttggcaagtatattctacgatgtcgttaaaaaggaaactgaggtcgtccgcaagcgcaatacactcgcgcccgacttccattcc

SEQ ID NO: 15183 - DNA, 1611 bp, Muscodor strobelii
  misc_feature: SGI cDNA ID NO. 565023
  misc_feature: Encodes the peptide sequence at SEQ ID NO 15184
atggctagcaacttttcgaagccgtatgtatgcgctcgatgcgctgccaacagcctttctcggcgctttactgcgtccgtgcctcgccgtttcacagcaagttacgcgactaaagctacccgtgcccgatctgctgctgccgacgagtccgagactgcgacagagaagaccactgcggcacaagcgcaatccgatagcctcctagcccgtcgcctcgaagaagccaccgaggaacttttgctgacgggcgggagagctggtcgtcgagccgttgaggatgccggcttctcggaggagctcaaagaacggctgttcgcaaagatcaaggatgctcagtttcgatccgaacatgctgctgcatttgccgaagccggcatgccatcatctgcaaccccttccgcccgtgtcactgcaaccagccgtccctggaccggcgaagaagccacagaggatgccgtcttgcgcatgctgagcgatgctcataaaccgttgtcgcgtgaacttcgcagtcgacctaaactgcctgaccttcacccagtcgacatgcgtatggggaaaacgcagaagctcagtcctgggcataaagcagcgaacgcgagagacaaggcttctgtatacgccgggcttgccatgaaggaattggaagcaggtttaagcgaagaagagaaagaggctatgcgacaggagttccgagaacgcttcaaaccagcctctcgcgccatgcccaacactttgacgggccttacatcactggcaaatgagcgcatcgaagacgcaatcgcgagagggcaatttaagaacatcccgcgagggaaaggagtcgagcgtgatccgaggagtgacaaccctttcatcgatacaacagaatatatcttgaacaagatgatcaagcggcaagatatcgtccccccatggattgagaagcagcaagaactcgcgaaggcgtcacatgtcttccgggctcgtctgcgaagcgattggaagcgccacgctgctcgaatgatagcgagcacgggtggctcgcttgaagatcagatgacaagagcacaaagatacgcgcaagcggaagagcttcacaaccctcgtaaacgcaacgtagaccagatatccgttccgacaaactcgactgatgacgtcgtcatggtgaaagtgcgacagcagaacgatggcaaatcaccaactaacttagaggcatcaacgggagttgagaccggcgcttctactgaaatgcctttaccgccgcctttcagagatcctgactggttgtctatggaaaagtcgtatatggagctctctgtcaataacctcaacaccctggcacgatcttacaatcttatggcgcctgaactagcgaagaagccatatttctccctacaacgggagctggacaattgttatgcggatgtcgctcctcttcttgcgaaagctattcaagagagagcgacgaggcccgcgaaatctctagcggatacggttgtggataaaccaagcagtatcttggaccgatttggtaacagtagtcacagagccaaaatttacgactcaaaagcaccgaattacggctttaaagaaatgtggcgagacctcttcactcgagaaactcctacatga

SEQ ID NO: 15184 - protein, 536 aa, Muscodor strobelii
  misc_feature: SGI Peptide ID NO. 565023
  misc_feature (249)..(328): Pfam Id: PF09350 Pfam Desc: Domain of function (DUF1992)
  misc_feature (68)..(534): NCBI GI: 164423388 Blast Desc: NCU08712 [Neurospora crassa OR74A] gi|16944680|emb|CAB99381.2| conserved [Neurospora crassa] gi|157070071|gb|EAA34337.2| conserved [Neurospora crassa OR74A]
  misc_feature (68)..(533): NCBI GI: 171677137 Blast Desc: protein product [Podospora anserina] gi|170936636|emb|CAP61295.1| protein product [Podospora anserina]
  misc_feature (8)..(530): NCBI GI: 154320965 Blast Desc: BC1G_01357 [Botryotinia fuckeliana B05.10] gi|150851895|gb|EDN27087.1| BC1G_01357 [Botryotinia fuckeliana B05.10]
  misc_feature (68)..(530): NCBI GI: 156054598 Blast Desc: SS1G_06147 [Sclerotinia sclerotiorum 1980] gi|154703927|gb|EDO03666.1| SS1G_06147 [Sclerotinia sclerotiorum 1980]
  misc_feature (8)..(532): NCBI GI: 46138469 Blast Desc: FG10749.1 [Gibberella zeae PH-1]
  misc_feature (8)..(533): NCBI GI: 256728971 Blast Desc: NECHADRAFT_39922 [Nectria haematococca mpVI 77-13-4]
  misc_feature (71)..(381): NCBI GI: 116205423 Blast Desc: CHGG_10595 [Chaetomium globosum CBS 148.51] gi|88176723|gb|EAQ84191.1| CHGG_10595 [Chaetomium globosum CBS 148.51]
  misc_feature (1)..(533): NCBI GI: 169771117 Blast Desc: [Aspergillus oryzae RIB40] gi|83767887|dbj|BAE58026.1| protein product [Aspergillus oryzae]
  misc_feature (17)..(533): NCBI GI: 238486366 Blast Desc: conserved [Aspergillus flavus NRRL3357] gi|220699300|gb|EED55639.1| conserved [Aspergillus flavus NRRL3357]
  misc_feature (9)..(536): NCBI GI: 242802583 Blast Desc: conserved [Talaromyces stipitatus ATCC 10500] gi|218717345|gb|EED16766.1| conserved [Talaromyces stipitatus ATCC 10500]
MASNFSKPYVCARCAANSLSRRFTASVPRRFTASYATKATRARSAAADESETATEKTTAAQAQSDSLLARRLEEATEELLLTGGRAGRRAVEDAGFSEELKERLFAKIKDAQFRSEHAAAFAEAGMPSSATPSARVTATSRPWTGEEATEDAVLRMLSDAHKPLSRELRSRPKLPDLHPVDMRMGKTQKLSPGHKAANARDKASVYAGLAMKELEAGLSEEEKEAMRQEFRERFKPASRAMPNTLTGLTSLANERIEDAIARGQFKNIPRGKGVERDPRSDNPFIDTTEYILNKMIKRQDIVPPWIEKQQELAKASHVFRARLRSDWKRHAARMIASTGGSLEDQMTRAQRYAQAEELHNPRKRNVDQISVPTNSTDDVVMVKVRQQNDGKSPTNLEASTGVETGASTEMPLPPPFRDPDWLSMEKSYMELSVNNLNTLARSYNLMAPELAKKPYFSLQRELDNCYADVAPLLAKAIQERATRPAKSLADTVVDKPSSILDRFGNSSHRAKIYDSKAPNYGFKEMWRDLFTRETPT

SEQ ID NO: 15185 - DNA, 3892 bp, Muscodor strobelii
  misc_feature: SGI EST ID NO. CUFF.36201.1
  misc_feature: Variant of the nucleotide sequence at SEQ ID NO 15183
ttgcttcccatcctgcatacctcttgatcacggcgtcatgcatttcttcatcgcattaccacctctcccaggagatagctatggctagcaacttttcgaagccgtatgtatgcgctcgatgcgctgccaacagcctttctcggcgctttactgcgtccgtgcctcgccgtttcacagcaagttacgcgactaaagctacccgtgcccgatctgctgctgccgacgagtccgagactgcgacagagaagaccactgcggcacaagcgcaatccgatagcctcctagcccgtcgcctcgaagaagccaccgaggaacttttgctgacgggcgggagagctggtcgtcgagccgttgaggatgccggcttctcggaggagctcaaagaacggctgttcgcaaagatcaaggatgctcagtttcgatccgaacatgctgctgcatttgccgaagccggcatgccatcatctgcaaccccttccgcccgtgtcactgcaaccagccgtccctggaccggcgaagaagccacagaggatgccgtcttgcgcatgctgagcgatgctcataaaccgttgtcgcgtgaacttcgcagtcgacctaaactgcctgaccttcacccagtcgacatgcgtatggggaaaacgcagaagctcagtcctgggcataaagcagcgaacgcgagagacaaggcttctgtatacgccgggcttgccatgaaggaattggaagcaggtttaagcgaagaagagaaagaggctatgcgacaggagttccgagaacgcttcaaaccagcctctcgcgccatgcccaacactttgacgggccttacatcactggcaaatgagcgcatcgaagacgcaatcgcgagagggcaatttaagaacatcccgcgagggaaaggagtcgagcgtgatccgaggagtgacaaccctttcatcgatacaacagaatatatcttgaacaagatgatcaagcggcaagatatcgtccccccatggattgagaagcagcaagaactcgcgaaggcgtcacatgtcttccgggctcgtctgcgaagcgattggaagcgccacgctgctcgaatgatagcgagcacgggtggctcgcttgaagatcagatgacaagagcacaaagatacgcgcaagcggaagagcttcacaaccctcgtaaacgcaacgtagaccagatatccgttccgacaaactcgactgatgacgtcgtcatggtgaaagtgcgacagcagaacgatggcaaatcaccaactaacttagaggcatcaacgggagttgagaccggcgcttctactgaaatgcctttaccgccgcctttcagagatcctgactggttgtctatggaaaagtcgtatatggagctctctgtcaataacctcaacaccctggcacgatcttacaatcttatggcgcctgaactagcgaagaagccatatttctccctacaacgggagctggacaattgttatgcggatgtcgctcctcttcttgcgaaagctattcaagagagagcgacgaggcccgcgaaatctctagcggatacggttgtggataaaccaagcagtatcttggaccgatttggtaacagtagtcacagagccaaaatttacgactcaaaagcaccgaattacggctttaaagaaatgtggcgagacctcttcactcgagaaactcctacatgacacctcttggtgtaagaaggatctcaatgtagttcatcccagggtggataggtgcacatgacaccagtactatggcgaaagatgaggccttggaaaaagcttgaatattgtacacttaggaccggcgataaacactatatgtgaatagctccacgactcactttttctgacatttagcacgttcactgccaagtgaaaatgtcaatccttgcggatgatctgctcatgtactggggttcaggtgtttcttttcgacggaagacacggcgactcgtcccccgacgtccgaccaataatctcgctagcgcgccggcactcccgttatacggaatttgaaaccgatacatattccttataagtcattgggataacagtcatctcctacattcatgttagcatctacttctattgtttgagactgtaaattcttcggaagtttaaatcgggttcacatggattctgccaagagcaccacgaaaagacctaagccacaagtttcatgtacactttgcagatccaagaaattgaagtgcgaccggacactaccttgccgaaactgtcagagacggcctccaggaagctgtgtttatacttcaagtataataaatcggaagagcccatcagcatcatctccgcgtaatgaccagtttagtcatatctccaatcggctgaagcagctcgaaaatcttctttccaatgctgctccgggattaaagaacaatctacgagagggtgtaaaatcccttgggcccgacaatgtcaacgccgagcccgttccggttaatttttctcgtgatggtaagcatggtctgtcatcgataccgtcactcgccacaaataaatcggaaactcgtatcgtcgatgcgacacattgggaagcagttcttcgagaggtcagcataatgcaatctgagatgaaagatgttgaggatgcacagcgaacgcatgcatctggtccaatgcgacctgcattgctatttgacggcagacaagacacgtctattgagaatcttgtgaattcgctgccatcacggacagtgacggatcgtctcgtacacatattcacccgctctccagactacccgactgctctgcctattcacttgcccacattcttgagtgattacgccaaattctgggacagcccgagaggcgtcacgttaccttggctctcgatactattctctgtcatcacgattgctctccaattcatacaagagtcaggcgcagattttgaaggtatcacgtttgtagaatctgcctcgcaacagtacgctgcaaaagcagccgaatgtctaagagtgtcagattatgcgaagccaaagcgtctgacggttgaagccatgctcatgtgcttcatggctgaacacatttggatgagagatgatcatttccgggcatcacttatcctcggatttgccatacgcattgctatgcgagctggttaccatcgagacccatccaacttcggcgatatgacccttagtgctttcgacggcgaaatgaggcgacgagtgtggtcgtttatggttctggttgatacgatgtttgcatcagtcttaggtcttccgcctcacatttctaatatccagtatgatacaaaattgcctaggaacgtgcgggagcaagacttgtcaccagaaatggaaacgcttccaccgtgccgcgggcaggatgaatcgtcactgattgggttcctcaatgccaaagctcatgcctgcgcgattctccaaagagtcacggagcacgcaatgatatcgcgggaaatcacgtatgatagagtgctcgaactcgaccgcgctcttatcgatcaaatggatgcacgtccaacttggctcacgatgccgataactaccagcaaaaccacttcaattgacaacttaagtgtgaacagggctgccgaaatcgacatgctgtaccaccgcgcacgtatcacactgcaccgaaaatttctcacccataccgaccaagtctatgcctactcccgcgagagttgcctggctgccgccgtacgcgtacttagacaccgccagaccttgtctggtatttcattcgaagttgacgatatggtcatacctaataatcgccttctttatatcatgtctcaggattttttcctatctgccatgattctttgcgttgatctcgggcaaattctgcgtcataacccgtcagccatgtcaattgaaacagaaaatggc

SEQ ID NO: 15186 - DNA, 1071 bp, Muscodor strobelii
  misc_feature: SGI cDNA ID NO. 565024
  misc_feature: Encodes the peptide sequence at SEQ ID NO 15187
atgcacatatacaagtttatttcgttagtggcttacgctgcgttcggcctctgtcaagatgatacatttgcctggaacacgaatatcacggtagaaacccgaactctcgacgaaattcacgccgccgctctcgaggaaggaggtgtcgtgacgctctggcatggtgggagtgagccgcaccaacaagacgcgctgaaggatgctttcgaagagagatttcctgggatgacattgaatgtcacagtgaaagactcctaccgcctcgctgcgaatatcgaccggcagctggcagcgaaagctgtatatgtcgacaatgtcttcctccaaacagcacaggattatcctcggtggaaacacgatagcgccctcctcaactataaacctcttgacttcgaagaagtatataactctttcaaagaccccgatggtgcgtggggcggctctacggtgaacgcatggagtatagtatacaatgaagacaagttaggagatgcggagccaccgacagtctttctcgatttcctcaagccggcattcaagaacaagctagtgttcatatatcctaatgaggatgatgctgttcttcatacttttgatttgatcatgaagcaacacggcctcactttcttcgagtcgctcctggaacaggatccgaaatgggtggcgcatagtgatgacgtttcgattgcgagcttgcttagccagccaaacacaacctacgcagccaccttcggcaccacgattggattgttctcccaaggcccgctggtggttaaatttccaactgaaggcgcccggttcacatcctgggcacaacgggcagcgattctaaaggatgcgcctcatccagagggcgcgaagctcctgcagaactatgtcatgagtcaagaatatcaaaacgcaacccgctcttggacagttcgtcgtgatgttgcagatcctgctagctttacggatatatgggagacaccgaatacagacccgaacgagtttgtagattggatgagcgatcgggaacgagttgagaggcttcgattctggtttcaagacaagctaggataccctttgtaa

SEQ ID NO: 15187 - protein, 356 aa, Muscodor strobelii
  misc_feature: SGI Peptide ID NO. 565024
  misc_feature (1)..(355): NCBI GI: 256722776 Blast Desc: NECHADRAFT_53189 [Nectria haematococca mpVI 77-13-4]
  misc_feature (3)..(353): NCBI GI: 256722563 Blast Desc: NECHADRAFT_63858 [Nectria haematococca mpVI 77-13-4]
  misc_feature (6)..(353): NCBI GI: 46110763 Blast Desc: FG02263.1 [Gibberella zeae PH-1]
  misc_feature (17)..(353): NCBI GI: 39968899 Blast Desc: MGG_10060 [Magnaporthe grisea 70-15] gi|145015307|gb|EDJ99843.1| MGG_10060 [Magnaporthe grisea 70-15]
  misc_feature (17)..(353): NCBI GI: 261352385 Blast Desc: ABC transporter [Verticillium albo-atrum VaMs.102]
  misc_feature (31)..(353): NCBI GI: 256724157 Blast Desc: NECHADRAFT_51349 [Nectria haematococca mpVI 77-13-4]
  misc_feature (7)..(355): NCBI GI: 189198483 Blast Desc: ABC-type Fe3+ transport system [Pyrenophora tritici-repentis Pt-1C-BFP] gi|187981527|gb|EDU48153.1| ABC-type Fe3+ transport system [Pyrenophora tritici-repentis Pt-1C-BFP]
  misc_feature (20)..(353): NCBI GI: 261358077 Blast Desc: ABC transporter [Verticillium albo-atrum VaMs.102]
  misc_feature (17)..(353): NCBI GI: 169624319 Blast Desc: SNOG_15417 [Phaeosphaeria nodorum SN15] gi|160705149|gb|EAT77082.2| SNOG_15417 [Phaeosphaeria nodorum SN15]
  misc_feature (24)..(345): NCBI GI: 251789617 Blast Desc: extracellular solute-binding protein family 1 [Dickeya zeae Ech1591] gi|247538238|gb|ACT06859.1| extracellular solute-binding protein family 1 [Dickeya zeae Ech1591]
MHIYKFISLVAYAAFGLCQDDTFAWNTNITVETRTLDEIHAAALEEGGVVTLWHGGSEPHQQDALKDAFEERFPGMTLNVTVKDSYRLAANIDRQLAAKAVYVDNVFLQTAQDYPRWKHDSALLNYKPLDFEEVYNSFKDPDGAWGGSTVNAWSIVYNEDKLGDAEPPTVFLDFLKPAFKNKLVFIYPNEDDAVLHTFDLIMKQHGLTFFESLLEQDPKWVAHSDDVSIASLLSQPNTTYAATFGTTIGLFSQGPLVVKFPTEGARFTSWAQRAAILKDAPHPEGAKLLQNYVMSQEYQNATRSWTVRRDVADPASFTDIWETPNTDPNEFVDWMSDRERVERLRFWFQDKLGYPL

SEQ ID NO: 15188 - DNA, 978 bp, Muscodor strobelii
  misc_feature: SGI cDNA ID NO. 565025
  misc_feature: Encodes the peptide sequence at SEQ ID NO 15189
atgtctaactatatcaagaaagttgccatcgttggtgcttctggcacagttgggaagttcattgcccgtgaaatcattaagaagggcaaacaagaagttaccgccatcacgcgtcttgacagccaggggaaaatgcccgagggtgctaaaattgcccaagtatcatacgacgatcctgcatcattgactaaagccctcgagggccacgatgcactgattatcactatgtctgtgaccgcgcctccggaaaatcagatcaagctcattgaggctgcggctgcggccaacgtcccgtatgtgcttcccaatgcttggggtattgagaatcaccatggcacactcggcacagacactttgatggctgccaacatggacgcagcgcgcaagagagttgaggacctcggcaagagctcctggatttccttcgtaacaggatattggtactcatacagtctctcgagcaaggaagcatatggtgtagacttcaagaacagggtcatgacattctttgatgatggaaaccagaagatcaacagtatcacctgggagaagacgggcagagccgtggcagcgctcctatcgcttccgattgaagctgaaaccgctggtgcgccatcgatttccagctataagaacaagcatgtgtacacttcgtcatggttgctgagccagaaagaaatgttcgcttctgtgctcaagaacaccaacacgacagagtcggactggacaatcaagcatgagaactcgaccgaacgatacgaggaggcaaagaagaagctctttgccggtgatcgctctcagttccagcgtctcctttacacgagaaccttctatcctaacaatgacggcaacttccaatctcgccacgagctagatgatgcgaagttgggcattgagggcgctgaggacctcgatgctgctacaaaacttgctatcgagttctctgagtctggatcaacctaccccagaggatcatga

SEQ ID NO: 15189 - protein, 325 aa, Muscodor strobelii
  misc_feature: SGI Peptide ID NO. 565025
  misc_feature (8)..(248): Pfam Id: PF05368 Pfam Desc: NmrA-like family
  misc_feature (3)..(317): NCBI GI: 238839521 Blast Desc: CipA protein [Microsporum canis CBS 113480]
  misc_feature (1)..(321): NCBI GI: 121703423 Blast Desc: oxidoreductase CipA, [Aspergillus clavatus NRRL 1] gi|119398119|gb|EAW08550.1| oxidoreductase CipA, [Aspergillus clavatus NRRL 1]
  misc_feature (1)..(321): NCBI GI: 119497459 Blast Desc: oxidoreductase CipA, [Neosartorya fischeri NRRL 181] gi|119413650|gb|EAW23591.1| oxidoreductase CipA, [Neosartorya fischeri NRRL 181]
  misc_feature (1)..(321): NCBI GI: 159130395 Blast Desc: oxidoreductase CipA-like, [Aspergillus fumigatus A1163]
  misc_feature (1)..(321): NCBI GI: 70990128 Blast Desc: oxidoreductase CipA-like [Aspergillus fumigatus Af293] gi|66847545|gb|EAL87875.1| oxidoreductase CipA-like, [Aspergillus fumigatus Af293]
  misc_feature (3)..(321): NCBI GI: 169785835 Blast Desc: [Aspergillus oryzae RIB40] gi|83776126|dbj|BAE66245.1| protein product [Aspergillus oryzae]
  misc_feature (3)..(321): NCBI GI: 238506735 Blast Desc: oxidoreductase CipA-like, [Aspergillus flavus NRRL3357] gi|220689282|gb|EED45633.1| oxidoreductase CipA-like, [Aspergillus flavus NRRL3357]
  misc_feature (3)..(313): NCBI GI: 242798045 Blast Desc: conserved [Talaromyces stipitatus ATCC 10500] gi|218716433|gb|EED15854.1| conserved [Talaromyces stipitatus ATCC 10500]
  misc_feature (3)..(321): NCBI GI: 46127937 Blast Desc: FG08346.1 [Gibberella zeae PH-1]
  misc_feature (1)..(321): NCBI GI: 145242504 Blast Desc: An09g05140 [Aspergillus niger] gi|134078375|emb|CAK40366.1| protein product [Aspergillus niger]
MSNYIKKVAIVGASGTVGKFIAREIIKKGKQEVTAITRLDSQGKMPEGAKIAQVSYDDPASLTKALEGHDALIITMSVTAPPENQIKLIEAAAAANVPYVLPNAWGIENHHGTLGTDTLMAANMDAARKRVEDLGKSSWISFVTGYWYSYSLSSKEAYGVDFKNRVMTFFDDGNQKINSITWEKTGRAVAALLSLPIEAETAGAPSISSYKNKHVYTSSWLLSQKEMFASVLKNTNTTESDWTIKHENSTERYEEAKKKLFAGDRSQFQRLLYTRTFYPNNDGNFQSRHELDDAKLGIEGAEDLDAATKLAIEFSESGSTYPRGS

SEQ ID NO: 15190 - DNA, 1194 bp, Muscodor strobelii
  misc_feature: SGI cDNA ID NO. 565026
  misc_feature: Elevated expression when VOC is produced
  misc_feature: Encodes the peptide sequence at SEQ ID NO 15191
atgcatcgtgcaccgacaggcaagattcgttccgaaggaaacagttttgcgccactcccacaaacagatatcgaggaacatggaagtgaggagtccgaggagctaagcataggacatcagcggttgtcatccagggagaacttcgtggatcgggtgcggcaagtgatcacacaacacaatgagttcaccgcgcagcaacaggagaccctactgcctgcgcatacctcacccgctttgtcggaggacactcttgttggtgatgattacctgaaccttcctattcaacagttcgacgaggtggatctggcggattataatggacattatgcgccgccacgagccgcagagtataatccaagtatctcatactctcacagcacgaaagttggaaaagatattcaggttcgcgtcgaggaatatccgcttgcgttgtcccctgctctctcaccaggaggactttttgtttacgataatacttcaattgataattcttattttggatctgaaggattcatcgacaaggagtcgtcactcaatatccccccagacgcaagttacaagccagtgcctttaagatggcgtttcttgctacttgtgtttggcttgcttatagcgtttctggggctgacggagatcgtcttgcatctgttacccgaggcttcagcgatggatgagtccatttctgccttccagaatgtatccgagatccgtgtcagattagattcgaatctgctgtacggtgggctcggcggatctcttgataagcgtcatcattctaaggaaccttcagactcacccgcggctgattcgacgactacgtccgaagaacaaagtccttcttctacatcttctacgacacaggaaaccaccagcgcatcaccgtcacccgatgaagctacgaagacaacttctaatcaagatactaaggaaaacaagcgagtcaagctcagtaacacaaccagggggagattctcctccaacaactcacggtggggaccctccttcgacaactaccgatctaggtggcacatggccaacgtctctacctacttcgttacctatatcattgccaacatcattacctatatctctacccatcacagtaccgacgtcgctcccaatatcaatacccacatcgatctccacctcatggccctcgactacgaccacgaccacgcattcgttacctgttga

SEQ ID NO: 15191 - protein, 397 aa, Muscodor strobelii
  misc_feature: SGI Peptide ID NO. 565026
  misc_feature: Useful for introducing or modulating the production of volatile compounds
MHRAPTGKIRSEGNSFAPLPQTDIEEHGSEESEELSIGHQRLSSRENFVDRVRQVITQHNEFTAQQQETLLPAHTSPALSEDTLVGDDYLNLPIQQFDEVDLADYNGHYAPPRAAEYNPSISYSHSTKVGKDIQVRVEEYPLALSPALSPGGLFVYDNTSIDNSYFGSEGFIDKESSLNIPPDASYKPVPLRWRFLLLVFGLLIAFLGLTEIVLHLLPEASAMDESISAFQNVSEIRVRLDSNLLYGGLGGSLDKRHHSKEPSDSPAADSTTTSEEQSPSSTSSTTQETTSASPSPDEATKTTSNQDTKENKRVKLSNTTRGRFSSNNSRWGPSFDNYRSRWHMANVSTYFVTYIIANIITYISTHHSTDVAPNINTHIDLHLMALDYDHDHAFVTC

SEQ ID NO: 15192 - DNA, 1284 bp, Muscodor strobelii
  misc_feature: SGI cDNA ID NO. 565027
  misc_feature: Encodes the peptide sequence at SEQ ID NO 15193
atgccggcgcaaatagactggaacgcgctcctgttcggatctccggcgactgattctacgcaagggattgattctacaacaggacctgactctgactctccacagttcactgagtcagagcaagtagtcgaacctgcgctggagaatgagccagcccaggtcattgagtctgctcagggaattaatatcgccaaagtggatgacccagtacaggtgatcgatccaacgcaggtcgcgtcgccaccgttgccacagatcacggaagcaaagctcgacgcgtcaacaatcattccttgggatctggagaccgtgagcttggaacataagatcgctgccgtcgcagtctttttcggaaccgttctaatatggttatggttgtcgaggagaaggagagtttctgtggcagcgcggcatctgattgaccatgacgaagccctcaacgcagtgaagaaggattacacagatcgcttcgagactttagagcatcaatttgatgaaaggctgaagaatcgggttgatgcactcgaagagcagttcaaacaagcagttcaagagcaatccgagagcattgaagatcatgtgcgcaagagtttcaacaagcgggttgagacccttgaatatcgcataaagctagatcaagaggccctcgaggatgtccatcgcgcgctgagtgagcgtatggaggcttttgaggcttacgtacggtcagtcgacgcgaaacagcttgatcaagaagccgtagacattgcacagcgcgcaattggtcaacggcttaatacgatcgaagaagattttcggaatttggacggcaaagcacgagcctcatctcagagaattgaagctctcgacgacagtgtgcgagttatggacagcagagccaaatctctaagccaacgtgttgaggctgcggaggataatttgaactcaacggacgggcaggtgacgttattgtcccacgacgtgaatcgcggcagctccgtcatagagaagctccagagaacagtaaaaatgctacctgattcagagaaatttaagggcttgtcccgaacttgggaagctaaggtcaagagactagaggccaagctcgatgaaaccatgtggcccaatatacaccagaccgtatgcattctccttcgacggatccactatttcgccttcttcgtccagcgtgcgctcacactctacatccggcagccactctcggtcattttccacggcaagctcttcaccagctacgaatcagcatatgattttaccaatgacaccagagcgcaggcgtattga

SEQ ID NO: 15193 - protein, 427 aa, Muscodor strobelii
  misc_feature: SGI Peptide ID NO. 565027
MPAQIDWNALLFGSPATDSTQGIDSTTGPDSDSPQFTESEQVVEPALENEPAQVIESAQGINIAKVDDPVQVIDPTQVASPPLPQITEAKLDASTIIPWDLETVSLEHKIAAVAVFFGTVLIWLWLSRRRRVSVAARHLIDHDEALNAVKKDYTDRFETLEHQFDERLKNRVDALEEQFKQAVQEQSESIEDHVRKSFNKRVETLEYRIKLDQEALEDVHRALSERMEAFEAYVRSVDAKQLDQEAVDIAQRAIGQRLNTIEEDFRNLDGKARASSQRIEALDDSVRVMDSRAKSLSQRVEAAEDNLNSTDGQVTLLSHDVNRGSSVIEKLQRTVKMLPDSEKFKGLSRTWEAKVKRLEAKLDETMWPNIHQTVCILLRRIHYFAFFVQRALTLYIRQPLSVIFHGKLFTSYESAYDFTNDTRAQAY

SEQ ID NO: 15194 - DNA, 2299 bp, Muscodor strobelii
  misc_feature: SGI EST ID NO. CUFF.36184.0
  misc_feature: Variant of the nucleotide sequence at SEQ ID NO 15192
cgacgtgtcaaactagcagtgcacgcggcgagccgcggtatgaaataggcggcccagccacctcacacttggcaagacagcactcgagacgacccttgccaaggctgatcacctacctctttcgagtcgccgatatatccgacgatttggggcctggagagcttcatccttagccaatttcccatattggtggggctgttccaaattctgttcaagctgtttccttttgttgtttgcgccggccaatatttgttgtgtttgtttgcgattcaagaattcgcagggagtgatgccggcgcaaatagactggaacgcgctcctgttcggatctccggcgactgattctacgcaagggattgattctacaacaggacctgactctgactctccacagttcactgagtcagagcaagtagtcgaacctgcgctggagaatgagccagcccaggtcattgagtctgctcagggaattaatatcgccaaagtggatgacccagtacaggtgatcgatccaacgcaggtcgcgtcgccaccgttgccacagatcacggaagcaaagctcgacgcgtcaacaatcattccttgggatctggagaccgtgagcttggaacataagatcgctgccgtcgcagtctttttcggaaccgttctaatatggttatggttgtcgaggagaaggagagtttctgtggcagcgcggcatctgattgaccatgacgaagccctcaacgcagtgaagaaggattacacagatcgcttcgagactttagagcatcaatttgatgaaaggctgaagaatcgggttgatgcactcgaagagcagttcaaacaagcagttcaagagcaatccgagagcattgaagatcatgtgcgcaagagtttcaacaagcgggttgagacccttgaatatcgcataaagctagatcaagaggccctcgaggatgtccatcgcgcgctgagtgagcgtatggaggcttttgaggcttacgtacggtcagtcgacgcgaaacagcttgatcaagaagccgtagacattgcacagcgcgcaattggtcaacggcttaatacgatcgaagaagattttcggaatttggacggcaaagcacgagcctcatctcagagaattgaagctctcgacgacagtgtgcgagttatggacagcagagccaaatctctaagccaacgtgttgaggctgcggaggataatttgaactcaacggacgggcaggtgacgttattgtcccacgacgtgaatcgcggcagctccgtcatagagaagctccagagaacagtaaaaatgctacctgattcagagaaatttaagggcttgtcccgaacttgggaagctaaggtcaagagactagaggccaagctcgatgagacgcaaaaagctctcgaagagcacctcgctgagccaccacctagtttaacatggtctcatatcgaagctcaggagatagaaccatgtggcccaatatacaccagaccgtatgcattctccttcgacggatccactatttcgccttcttcgtccagcgtgcgctcacactctacatccggcagccactctcggtcattttccacggcaagctcttcaccagctacgaatcagcatatgattttaccaatgacaccagagcgcaggcgtattgatacggccgggtttcgagaaacgacattctcttcgcgacagaagttatctttgtctttgtcgagaggagaaagctggtcatgatgaatgactggtgcgaatgagcaatgtgtacatagaacgataccaatgcatgaatgtttaataggatctatttcactgctttctttctatctttccctaacgatctgagccacctctcgtatgaagtccctgtcaaatccctatgaatataagtagacgtataagatgctcacgtatagaatgcaaaggtatgtgcccttttcaagggactctatcgattagcgcaagtcaagagcaagtctgccgaaagggctagatatactagtgtgggtattagacactaaacatatgcactgtacaatgctctgatcattctatatgcgttaaatagttaatcaagacagttttaaaaatgaaattcaaagccgaacgaactgtccttgcccacaggttgtttcgggtgctgatgactcccgttcaattcgtaggtcagttacaattggttgggttcgtcggacacccctcactccaaatagctccgagtgctccaagctacaaccttggggcgggtgtttctattcccttcttattgccattctcacgctggatatagtcaaatcgcgg

SEQ ID NO: 15195 - DNA, 534 bp, Muscodor strobelii
  misc_feature: SGI cDNA ID NO. 565028
  misc_feature: Reduced expression when VOC is produced
  misc_feature: Encodes the peptide sequence at SEQ ID NO 15196
atgtctctcgccgcgttccgcaaatctgagcaacatgaggatcttggcaagcttgccgaggagcacatgaagcacgacctcgagccctcagatcgtgatgttctcgccaaagcagcttcacgtgttgcaacgcccaccacaatcgggacacttgttggccttggtctaggtatctacgccgcctttaggttaaggaagatacgtggcgacatgttcaatgcgttccgcgctgccgagaagccctcacacgtagtcttttccgatgggaggaaagagcttgtacctgacattactccctacctgagacccacaacatttggcgacatagccacctactttttcttcgggcttggtggtactattctgggcggtgagctcggcttgttgctcggcacttggtccgctgcgcgtgcgatcagccgggacccggcgcggaaagcaagaattgagaaggcgtacagattatttaaggcggatgttctacggcgagaggcagagaggcttgagggcggtggctctgcactcaacctctaa

SEQ ID NO: 15196 - protein, 177 aa, Muscodor strobelii
  misc_feature: SGI Peptide ID NO. 565028
  misc_feature (2)..(176): NCBI GI: 226278254 Blast Desc: conserved [Paracoccidioides brasiliensis Pb01]
  misc_feature (2)..(172): NCBI GI: 261353884 Blast Desc: conserved [Verticillium albo-atrum VaMs.102]
  misc_feature (2)..(173): NCBI GI: 239607661 Blast Desc: conserved [Ajellomyces dermatitidis ER-3]
  misc_feature (2)..(173): NCBI GI: 261197758 Blast Desc: conserved [Ajellomyces dermatitidis SLH14081] gi|239595244|gb|EEQ77825.1| conserved [Ajellomyces dermatitidis SLH14081]
  misc_feature (12)..(169): NCBI GI: 85090387 Blast Desc: NCU07806 [Neurospora crassa OR74A] gi|28919751|gb|EAA29156.1| [Neurospora crassa OR74A]
  misc_feature (13)..(168): NCBI GI: 225679361 Blast Desc: conserved [Paracoccidioides brasiliensis Pb03]
  misc_feature (13)..(168): NCBI GI: 226291083 Blast Desc: conserved [Paracoccidioides brasiliensis Pb18]
  misc_feature (8)..(176): NCBI GI: 119485835 Blast Desc: NFIA_100000 [Neosartorya fischeri NRRL 181] gi|119410416|gb|EAW20363.1| conserved [Neosartorya fischeri NRRL 181]
  misc_feature (2)..(169): NCBI GI: 242774355 Blast Desc: conserved [Talaromyces stipitatus ATCC 10500] gi|218722044|gb|EED21462.1| conserved [Talaromyces stipitatus ATCC 10500]
  misc_feature (2)..(174): NCBI GI: 240275620 Blast Desc: conserved [Ajellomyces capsulatus H143]
  misc_feature: Useful for introducing or modulating the production of volatile compounds
MSLAAFRKSEQHEDLGKLAEEHMKHDLEPSDRDVLAKAASRVATPTTIGTLVGLGLGIYAAFRLRKIRGDMFNAFRAAEKPSHVVFSDGRKELVPDITPYLRPTTFGDIATYFFFGLGGTILGGELGLLLGTWSAARAISRDPARKARIEKAYRLFKADVLRREAERLEGGGSALNL

SEQ ID NO: 15197 - DNA, 2650 bp, Muscodor strobelii
  misc_feature: SGI EST ID NO. CUFF.36212.1
  misc_feature: Variant of the nucleotide sequence at SEQ ID NO 15195
agcaacgacatgagtaggaatatttttatataagagtcgctcctaagtgaacagagaacagaactcaaacctcatcagcttcatcaccaacatcgacagatctatcctgctctcagctccggcaaatcatcttatcttcaaccaccatatccatcaacatgcgttccattgcagcagcagttattgcccttgccggcctcgctactaccagccccgtggctcgcgacgcaacggccgagttcaggttgcacgtcatcactgatccgctatacggatgggctgttgtgaacgcgcactcgggagctgctatgaacgtgctccaggtccagcgccctacagcctatcaatctgatctctcgtatatcaacggaactaggttcttcttcggtgcgttttcacccaacttctaaacctttttgcttccactaatacgctttacgtatagatctcactcccaacggcgctaccttcccgtactcgatggtcgtaccggctgtcgaagatggtaacgtcgggctggtccattcgcaaatcggtgaattcacaacgggtttctcgctgaatgcggacaattaccttgtcttcaacggccagaccacaggctggtacgcttgtgacgttgacggaactttcgaattgtattacggagccaatgctgtcgctgggaacctcccaagcaccaactgccatgagcttgagtttgttgttgagttcgtctagtttttaattggtgatcttggacgtagctgtgaaagcgtgcccagaagttgttgatgttggatagattgtcagcaatgctttagacaatgtcgttttgactgttcaatgagtcaggcgaaacaaaaagtgtttattgtcaactttcagggtattttgtagtttgatgttcggtcaaatatactatctttatacagaatcgttttttcaactgctcaattttataagtgaaaaataattagaaagcgacaatgcgtatctaagaactttgcttgtgcgtttgcgaatcattagcgtacgatcggttgagaatttgatgaaataggtggtgcagaaggcaacatcatcagatagtgaaaagagtgtaatttactgttgttcatcatcctgaaatcaagcaaagcaggcctagtaatgaaatcatcatacgagttgaaggaaataatgtctattagcaatcgagatactcacattcaattttgttcgcacagaggtaagtccacttcaaagtgggcgttctagcgacaagatcaagcttcatggtcattctcgtcgctagctcatcttttggctcgagtacacagtgggaccaagatataatcgtatgtttcaatgtgagacaaatctcgaggctctcaattgaagacagcgtgagcttcaaggaagatgctcgttgtggattgtgacggcaagaagcgaggcgggcggcggggaacctagcagacaatagtgtaaggcatgggccactaaaaccagtgggctgctagtgaacccagaagtcatggtgatgtcaccagcatcggctttcaagtttggtgactgagcttgcaacgctcagaaataattatttcgttttcgcatctcaaagtcaagcttgtttttcagaaattccagatcaacaactcaataccactagaagcaccatcagtattcaccatgtctctcgccgcgttccgcaaatctgagcaacatgaggatcttggcaagcttgccgaggagcacatgaagcacgacctcgagccctcagatcgtgatgttctcgccaaagcagcttcacgtgttgcaacgcccaccacaatcgggacacttgttggccttggtctaggtatctacgccgcctttaggttaaggaagatacgtggcgacatgttcaatgcgttccgcgctgccgagaagccctcacacgtagtcttttccgatgggaggaaagagcttgtacctgacattactccctacctgagacccacaacatttggcgacatagccacctactttttcttcgggcttggtggtactattctgggcggtgagctcggcttgttgctcggcacttggtccgctgcgcgtgcgatcagccgggacccggcgcggaaagcaagaattgagaaggcgtacagattatttaaggcggatgttctacggcgagaggcagagaggcttgagggcggtggctctgcactcaacctctaagcgcgtcgtctcatcgtctaagttgttgagggttggcaacgtgttttgactgtatttgagtatgtgtatgtgtaggattgttacgatacgcttgttcacggttaattcgatgtaatatttccatgcgtggtagttttcataggaattgtgaaggctgaatttcgaatgacacttcatggcgctaaatccaagctggtggaaatggtcacgcacgatgtgccgttccgtaacttgacagcgaaaacagaatttaagatggcatcttccgtgcctctctcttcagctctcacgacacgtcactaatatctatctagcatgtatatgcgaatagatgtttactcaaagccttggctacgagtttcacatgcaagcccctcctgttcatcttgacttaagatgccagcgtgtcgttatagcatctgacatggtagataaatgacttgacaagcaaggattggctgtg

SEQ ID NO: 15198 - DNA, 504 bp, Muscodor strobelii
  misc_feature: SGI cDNA ID NO. 565029
  misc_feature: Encodes the peptide sequence at SEQ ID NO 15199
atgcgttccattgcagcagcagttattgcccttgccggcctcgctactaccagccccgtggctcgcgacgcaacggccgagttcaggttgcacgtcatcactgatccgctatacggatgggctgttgtgaacgcgcactcgggagctgctatgaacgtgctccaggtccagcgccctacagcctatcaatctgatctctcgtatatcaacggaactaggttcttcttcgatctcactcccaacggcgctaccttcccgtactcgatggtcgtaccggctgtcgaagatggtaacgtcgggctggtccattcgcaaatcggtgaattcacaacgggtttctcgctgaatgcggacaattaccttgtcttcaacggccagaccacaggctggtacgcttgtgacgttgacggaactttcgaattgtattacggagccaatgctgtcgctgggaacctcccaagcaccaactgccatgagcttgagtttgttgttgagttcgtctag

SEQ ID NO: 15199 - protein, 167 aa, Muscodor strobelii
  misc_feature: SGI Peptide ID NO. 565029
MRSIAAAVIALAGLATTSPVARDATAEFRLHVITDPLYGWAVVNAHSGAAMNVLQVQRPTAYQSDLSYINGTRFFFDLTPNGATFPYSMVVPAVEDGNVGLVHSQIGEFTTGFSLNADNYLVFNGQTTGWYACDVDGTFELYYGANAVAGNLPSTNCHELEFVVEFV

SEQ ID NO: 15200 - DNA, 2650 bp, Muscodor strobelii; identical to SEQ ID NO: 15197
  misc_feature: SGI EST ID NO. CUFF.36212.1
  misc_feature: Variant of the nucleotide sequence at SEQ ID NO 15198

SEQ ID NO: 15201 - DNA, 1311 bp, Muscodor strobelii
  misc_feature: SGI cDNA ID NO. 565030
  misc_feature: Encodes the peptide sequence at SEQ ID NO 15202
atggcatcagtgtcccctgatcctgagaaagggtctggccctaccaaccatgccgatgcggataggcagaaagaacgccatttccgctctagaatagcctggataatgcaggaagagggaaaagcctttgctatcttccgcagattcgatgaggagaacatgctgctactaatgtcactccaagctgagatactggatttgaaacagcgattcgggaaatgccacgaattcaaagacctagaattgcaagcctcgacgcaggacacagcgcagccttcacggctaaacatcaagcacaacaatatatcagcacaaatcagcatcaacaatctaccggcacatatcagcatcgacaaactatcagccgagatcagcgttcacaatctactagcgcaaattaacgacgacaactcaccggcacagatcaacatcaacaatctacccgcacaaatcagtatcaagagtcttccagagcaaacgagcgacgacaatctaacggcacaattcaacttcaataatataccagcacagatcagtatcaagagtcctccagcgcaaatggacgacaacaatacaacggcacagatcaaagacacaacactatctcaatacgacatttttcaaaagctgaaaaaatcaatgcgcgaatatatgtcacaggtagcggctattgccgaccctcagaagtcccagttgaagcatttcaggaattggctagccagagaatcaatggcaatggagtacgaaaacgaaccggaatatacagaatggagcgtactcgacacggaaaattatttgacaatgccagatccacaagggaggcgagatattgcatcagactggctcaccgatcttgttgggggaatccttcgacggggttttcagaccaaaaaggaaaaagaggagagaagacgagtaaaactaagggaccagatgcgaaggtcaaaagcaaagccagaagagatcgagagcgataaaacaagtcatagtcgattcttctcggcgattagaaaattttcgcctggaaagatgctggacaaacaacagggttatcagatatacaatcacacgaaaccattcatcaacatattcatcgctattgcggcgtcagggttctgccttctcacaatctatgtgctcaacatcctccccacgacaaatctccgaatcctcgcaacgtttggtttcacagttgtgtttgcagctatctcaggatcgatcacttcggtaaccacggccgagatcatcacagcgacagtagcgtttgtagctatagaggtcgttttcatcggcactgcggtcgagaaatag

SEQ ID NO: 15202 - protein, 436 aa, Muscodor strobelii
  misc_feature: SGI Peptide ID NO. 565030
  misc_feature (97)..(202): NCBI GI: 221107933 Blast Desc: : similar to , partial [Hydra magnipapillata]
  misc_feature (97)..(200): NCBI GI: 221107933 Blast Desc: : similar to , partial [Hydra magnipapillata]
  misc_feature (97)..(199): NCBI GI: 221107933 Blast Desc: : similar to , partial [Hydra magnipapillata]
  misc_feature (97)..(202): NCBI GI: 221107933 Blast Desc: : similar to , partial [Hydra magnipapillata]
  misc_feature (97)..(202): NCBI GI: 221107933 Blast Desc: : similar to , partial [Hydra magnipapillata]
  misc_feature (337)..(414): NCBI GI: 171682472 Blast Desc: protein product [Podospora anserina] gi|170941195|emb|CAP66845.1| protein product [Podospora anserina]
  misc_feature (84)..(199): NCBI GI: 50872145 Blast Desc: paternally expressed 3 [Bos taurus] gi|75071528|sp|Q6H236.1|PEG3_BOVIN RecName: Full=Paternally-expressed gene 3 protein paternally expressed 3
  misc_feature (203)..(432): NCBI GI: 256720608 Blast Desc: NECHADRAFT_85466 [Nectria haematococca mpVI 77-13-4]
  misc_feature (96)..(180): NCBI GI: 50872145 Blast Desc: paternally expressed 3 [Bos taurus] gi|75071528|sp|Q6H236.1|PEG3_BOVIN RecName: Full=Paternally-expressed gene 3 protein paternally expressed 3
  misc_feature (84)..(196): NCBI GI: 50872145 Blast Desc: paternally expressed 3 [Bos taurus] gi|75071528|sp|Q6H236.1|PEG3_BOVIN RecName: Full=Paternally-expressed gene 3 protein paternally expressed 3
MASVSPDPEKGSGPTNHADADRQKERHFRSRIAWIMQEEGKAFAIFRRFDEENMLLLMSLQAEILDLKQRFGKCHEFKDLELQASTQDTAQPSRLNIKHNNISAQISINNLPAHISIDKLSAEISVHNLLAQINDDNSPAQININNLPAQISIKSLPEQTSDDNLTAQFNFNNIPAQISIKSPPAQMDDNNTTAQIKDTTLSQYDIFQKLKKSMREYMSQVAAIADPQKSQLKHFRNWLARESMAMEYENEPEYTEWSVLDTENYLTMPDPQGRRDIASDWLTDLVGGILRRGFQTKKEKEERRRVKLRDQMRRSKAKPEEIESDKTSHSRFFSAIRKFSPGKMLDKQQGYQIYNHTKPFINIFIAIAASGFCLLTIYVLNILPTTNLRILATFGFTVVFAAISGSITSVTTAEIITATVAFVAIEVVFIGTAVEK

SEQ ID NO: 15203 - DNA, 2267 bp, Muscodor strobelii
  misc_feature: SGI EST ID NO. CUFF.36196.0
  misc_feature: Variant of the nucleotide sequence at SEQ ID NO 15201
ccagcatgcgtaatgctttacagcttagaagcattttttgttttcacttttttctcacacaacgctggatatcagttgacgtgacaagagcgcaggtacagatattgccctaaacagttgtgttggttgcccccatggccccccactctcaaccaccaaaccagtcatcaacctcagtcccttatacgcgccccaaggtgatattgcttccaaaagatccaggcatagcaggctcgttacacagcgcattggctgctgtttgggtctcatccaaccgattaagccaattgaactagggcagcgaatgataagtagatcatggctcagtttgatgcataccaggtttgaatgtacatgagtactgcatcaaataagcagccatgatagcagattcggtcaagcatgctgacaaactatggagaaaagaaaatatggctcatccgtaagcatgtgaggctctgctatcgtaaaatttgcatacgacctcgtcgaagacattcagtggcccctccgtcaacacgcccgatctcctatgtacttaagatggggtgcgcgtcagaatccgagccgtggaaaattagctgatcctcttcataacgccctgttccatctcttttcttgatgtcactatcgtttctactaggaaactacggacgaacaccgcacgaaatctcggcggtcttcagatgaacagcgcacataatggcatcagtgtcccctgatcctgagaaagggtctggccctaccaaccatgccgatgcggataggcagaaagaacgccatttccgctctagaatagcctggataatgcaggaagagggaaaagcctttgctatcttccgcagattcgatgaggagaacatgctgctactaatgtcactccaagctgagatactggatttgaaacagcgattcgggaaatgccacgaattcaaagacctagaattgcaagcctcgacgcaggacacagcgcagccttcacggctaaacatcaagcacaacaatatatcagcacaaatcagcatcaacaatctaccggcacatatcagcatcgacaaactatcagccgagatcagcgttcacaatctactagcgcaaattaacgacgacaactcaccggcacagatcaacatcaacaatctacccgcacaaatcagtatcaagagtcttccagagcaaacgagcgacgacaatctaacggcacaattcaacttcaataatataccagcacagatcagtatcaagagtcctccagcgcaaatggacgacaacaatacaacggcacagatcaaagacacaacactatctcaatacgacatttttcaaaagctgaaaaaatcaatgcgcgaatatagtatgtgtacactcatgcactggactggcacgaagcgaggctaacatcaaatggatgaacttttgattcaagtgtcacaggtagcggctattgccgaccctcagaagtcccagttgaagcatttcaggaattggctagccagagaatcaatggcaatggagtacgaaaacgaaccggaatatacagaatggagcgtactcgacacggaaaattatttgacaatgccagatccacaagggaggcgagatattgcatcagactggctcaccgatcttgttgggggaatccttcgacggggttttcagaccaaaaaggaaaaagaggagagaagacgagtaaaactaagggaccagatgcgaaggtcaaaagcaaagccagaagagatcgagagcgataaaacaagtcatagtcgattcttctcggcgattagaaaattttcgcctggaaagatgctggacaaacaacagggttatcagatatacaatcacacgaaaccattcatcaacatattcatcgctattgcggcgtcagggttctgccttctcacaatctatgtgctcaacatcctccccacgacaaatctccgaatcctcgcaacgtttggtttcacagttgtgtttgcagctatctcaggatcgatcacttcggtaaccacggccgagatcatcacagcgacagtagcgtttgtagctatagaggtcgttttcatcggcactgcggtcgagaaatagatcattaatatagcagctgttatagtgtttataaagtaatcaattaaaggatcttcttattctccttctttttaggcttgggcaatttgttctcaaaatgctaggggaataaagaaaacgcaagaaaagaataatgcgtagaatacagctatactcggagtactgctggctaagcacgcttt

SEQ ID NO: 15204 - DNA, 3894 bp, Muscodor strobelii
  misc_feature: SGI cDNA ID NO. 565031
  misc_feature: Reduced expression when VOC is produced
  misc_feature: Encodes the peptide sequence at SEQ ID NO 15205
atgccgagcgcactccacccgcaagccaagttcgatcctatacctcccgacctcgatctccatggcctcgtcgatcgcacgccgaacttcgactgggtcacccgcatctctctagctcaaatccgacgactgggccccgtcggcttcgagaagctcgttaccctccatgtcatagacggcggccggcctctggtcatcgaaggctggaataaagttctgccccaagatctcttcagtgccggctggctagagaagcagtatgacaagaagcaggaaagcgtgcgcgacatcaccgccgccacgaatatccccatgaccatgggccactacctccgttccatgcggcagctcaccaaccagtggacccccaccaacttccgagacgagcgcaggcagcgtctttatctcaaggacatcgactgcccggacgagtggtatcaacatctgaagaaggtcatacctcccaatgtcttctacatgaacgagaacgtcggcgagaacccgaaccaagcctcccgcaatgacgacatcttcggtgctcccgagaaagtatcagcaatcgccggtgatctgatgagtagcctcgaggaagaaatgagggcgcagaatctcatgtgctacgtcggccacgagggcacatatactcccgctcatcgagagatgtgcgccagtctgggacagaatatcatggtggaggcttcaggacacgacaacggcgaaaaagaaggcagctctatatggttcatgaccgagacgaaagatcgcgaagtggttagggaatacttcctctcgatgctcggtcacgatgtggagatcgaaaaacactttgcccaagtcaatgcttggaaaaaggccaactttcccgtctatattgttgaacagaaagtaggcgacttcattctagtgccacctttggccccccaccaagtctggaatcgaggaaccagaaccgtcaaagtcgcctggaacagaactacagtcgagactctcgaccttgcgctgcacgaagctttgcccaagactagacttgtctgccgtgatgaacagtacaaaaacaaagccattatttacttcactttggacaagtacagcaaagagctgcaatcattcacagatagttccgaggacaactggcttggtctaggtcaggagctgatgcagaactcgggcagaatgagacagatggcacaagacttcaaaagactgttcaacttttataccgagatactggttgacgaaatgttcggcgacaagcagatgaacgttgagtatgtgcccttcgattcgaacattacgtgctcatactgtcgatccaacattttcaatcgtttcttgacgtgcaagcactgcgtacggcagttaaacaccggcgacgatgacacttacgacatttgcatggaatgctacgctatgggccgatcctgcgtttgcatctctggtctccaatggtgtgagcagtggcaatggtctgatctcgtcgacaaacacgaaatttggcgagggattgtcatagaacaggatggatttgttgacattaacctctctccccagccaatcgaattagcacgcaaactttcgggaaagaagtcagtcgcgcaaatttgtcaagaacagctgagagcacgaccatggaacgatattaccaagccacctgatcgcgaaccagaagattcggacgagccggatgtagatgaagagggtcgcgtgaaaaagaaaaatagatccaagcggaaaaagaagcagggcgaaacccacccttgtcacgtatgctgccacaaggacttcaactacaaactcaaattctgtacgacctgcccggccgcatactgctatggcgtattatggagagcattcgatcaaatgccgcaaactgttatgcagcaggagcattggcaatgcccgagatgtttgaacatctgcaactgtggcggctgtcgacgtacaggcaacactcagccttacatccccaagaacactttgcttggtcacgacacgcgtcctatcgcagatgaccgaagtgttgaatccatagttgactttcgtgttcacaacttgggttggctgaagggagtgggtgaggaaaatcgcagcaaagactcgaaacgaatgaataggctccgagagcaggcggatgcagaaaaagccaaggatccactcacgtccctcgctacgactgaagggccccgtgaaatggactctgcactacaggactctatcgcgaatggctacggagatcagagccacgtcattgatgaagatcatgcaaacgacaacgctgtcgctgaccaattaccaatgtcgcaaggtgctccaggcagtcaagttgaaactgcagacatgtccggtctgcaggatgctgagggcgaacccgctgatctcgacccgtcacaatatccagacccgacaatgctagatcgaggacggatgatggggatgggcttctacgatcaggatgagagcacagacaaaatcttattcgacgcttttcagatgccttcggctgatgcacttgacgacggccctcagatgtctgactttgtgaagaaaacactccgcctcgccaagcgtaaagcaagattggagcatgaccatgaccctgatttcaaagggccgaagtctcaaccacgcaaaaagcccaagaccggcaatgtcgaccagttggccaatttagacccagctctgcttgggctcctcggcgacaatcctccaacgccgacgcaggcaaatggtgccactgaatccacagttccatctgttgatatggaaacagatagacgaaaaggaggacgagatttattaccagtggagccactacgaccgacgctgcggcatgccagacctatgacttcctatgttgaagccgaggacgctccggatgacccagaagatacagttcctgtgagatcagagagaattaccggcacggataagcctgcacgagatgctgtggacctcgctgccgatgcagttcgtgctttgaccggcactcctggtgaggataattcggaggagggagaaacgccgcaggggagcgctaaaaaacgaggaagagcaccacgaaattcgcttggttccgcgccacccacgcagccaaaacgacgcgggcgcccacctggtcgcccaagaaaatcgacactgaacaatgttgagaacgccgaagatactcctatgcctgatgtgccaggtgaagacgaagatcaagatcgcgatagcgtcaccatagacgaaccagaagcacaattagctgaagaactcgagtccacagaagccagcgccccaaagaccccacccaaaagacggggacgtccgcccggacctcgaaagtctcagccagatgtaacagcttctgtggaaccggtcgagaccaatgaagtcgcgacgaaacccgtccagctaatgtctatgagggagcgcatggctttgaaagggaagaagattcgcatcgggcaaaggaaagccaaagactctaaaacgaatagcccaagtgcttcaacacctttaagatctcaagaacttgatcggcctacggcaaagcttgatgaagacacgactagctccactctcaaacgcggccgtgcagagttgattgatgatgacttcgaacctcctcctcctccagttgttgaaagctcaccatctgtgagctcggcgtcagaggatgaaagctcacgtgcgccatcgcgacccctggctagacctgggggcccgactgttgtgaggctggccgtctcggatgacgagaacgacaacggtaacgaaagttcgtcgagtgagtcttcgtttgatcatagtgaggacgatgttattccagctcggaagcctgcagccactgctcgaggaaggggcagaggacgaggacgaggtagagcgagtcgatggactacccgtgcttga

SEQ ID NO: 15205 - protein, 1297 aa, Muscodor strobelii
  misc_feature: SGI Peptide ID NO. 565031
  misc_feature (205)..(324): Pfam Id: PF02373 Pfam Desc: JmjC domain
  misc_feature (283)..(324): Pfam Id: PF02373 Pfam Desc: JmjC domain
  misc_feature (1)..(1153): NCBI GI: 85078924 Blast Desc: NCU01554 [Neurospora crassa OR74A] gi|11595557|emb|CAC18142.1| related to c-module-binding factor [Neurospora crassa] gi|28917312|gb|EAA27021.1| conserved crassa
  misc_feature (1)..(1202): NCBI GI: 171688776 Blast Desc: protein product [Podospora anserina] gi|170944350|emb|CAP70460.1| protein product [Podospora anserina]
  misc_feature (1)..(1273): NCBI GI: 46138433 Blast Desc: FG10731.1 [Gibberella zeae PH-1]
  misc_feature (1)..(1176): NCBI GI: 39973571 Blast Desc: MGG_01068 [Magnaporthe grisea 70-15] gi|145017975|gb|EDK02254.1| MGG_01068 [Magnaporthe grisea 70-15]
  misc_feature (1)..(959): NCBI GI: 256728980 Blast Desc: NECHADRAFT_40091 [Nectria haematococca mpVI 77-13-4]
  misc_feature (1)..(947): NCBI GI: 116199707 Blast Desc: CHGG_08009 [Chaetomium globosum CBS 148.51] gi|88179288|gb|EAQ86756.1| CHGG_08009 [Chaetomium globosum CBS 148.51]
  misc_feature (1)..(1166): NCBI GI: 261355455 Blast Desc: JmjC domain-containing protein [Verticillium albo-atrum VaMs.102]
  misc_feature (1)..(718): NCBI GI: 261197067 Blast Desc: JmjC domain-containing protein [Ajellomyces dermatitidis SLH14081] gi|239595566|gb|EEQ78147.1| JmjC domain-containing protein [Ajellomyces dermatitidis SLH14081]
  misc_feature (1)..(718): NCBI GI: 239606527 Blast Desc: JmjC domain-containing protein [Ajellomyces dermatitidis ER-3]
  misc_feature (1)..(811): NCBI GI: 225560376 Blast Desc: JmjC domain-containing protein [Ajellomyces capsulatus G186AR]
  misc_feature: Useful for introducing or modulating the production of volatile compounds
MPSALHPQAKFDPIPPDLDLHGLVDRTPNFDWVTRISLAQIRRLGPVGFEKLVTLHVIDGGRPLVIEGWNKVLPQDLFSAGWLEKQYDKKQESVRDITAATNIPMTMGHYLRSMRQLTNQWTPTNFRDERRQRLYLKDIDCPDEWYQHLKKVIPPNVFYMNENVGENPNQASRNDDIFGAPEKVSAIAGDLMSSLEEEMRAQNLMCYVGHEGTYTPAHREMCASLGQNIMVEASGHDNGEKEGSSIWFMTETKDREVVREYFLSMLGHDVEIEKHFAQVNAWKKANFPVYIVEQKVGDFILVPPLAPHQVWNRGTRTVKVAWNRTTVETLDLALHEALPKTRLVCRDEQYKNKAIIYFTLDKYSKELQSFTDSSEDNWLGLGQELMQNSGRMRQMAQDFKRLFNFYTEILVDEMFGDKQMNVEYVPFDSNITCSYCRSNIFNRFLTCKHCVRQLNTGDDDTYDICMECYAMGRSCVCISGLQWCEQWQWSDLVDKHEIWRGIVIEQDGFVDINLSPQPIELARKLSGKKSVAQICQEQLRARPWNDITKPPDREPEDSDEPDVDEEGRVKKKNRSKRKKKQGETHPCHVCCHKDFNYKLKFCTTCPAAYCYGVLWRAFDQMPQTVMQQEHWQCPRCLNICNCGGCRRTGNTQPYIPKNTLLGHDTRPIADDRSVESIVDFRVHNLGWLKGVGEENRSKDSKRMNRLREQADAEKAKDPLTSLATTEGPREMDSALQDSIANGYGDQSHVIDEDHANDNAVADQLPMSQGAPGSQVETADMSGLQDAEGEPADLDPSQYPDPTMLDRGRMMGMGFYDQDESTDKILFDAFQMPSADALDDGPQMSDFVKKTLRLAKRKARLEHDHDPDFKGPKSQPRKKPKTGNVDQLANLDPALLGLLGDNPPTPTQANGATESTVPSVDMETDRRKGGRDLLPVEPLRPTLRHARPMTSYVEAEDAPDDPEDTVPVRSERITGTDKPARDAVDLAADAVRALTGTPGEDNSEEGETPQGSAKKRGRAPRNSLGSAPPTQPKRRGRPPGRPRKSTLNNVENAEDTPMPDVPGEDEDQDRDSVTIDEPEAQLAEELESTEASAPKTPPKRRGRPPGPRKSQPDVTASVEPVETNEVATKPVQLMSMRERMALKGKKIRIGQRKAKDSKTNSPSASTPLRSQELDRPTAKLDEDTTSSTLKRGRAELIDDDFEPPPPPVVESSPSVSSASEDESSRAPSRPLARPGGPTVVRLAVSDDENDNGNESSSSESSFDHSEDDVIPARKPAATARGRGRGRGRGRASRWTTRA

SEQ ID NO: 15206 - DNA, 4378 bp, Muscodor strobelii
  misc_feature: SGI EST ID NO. CUFF.36199.0
  misc_feature: Variant of the nucleotide sequence at SEQ ID NO 15204
cggtaagacacatcaactgccttcaccacccacgctctttcctgtctcctgctgctgccaccttgcaatgcagcacactccgaggcactcgaacatcttcattttctatcttgtctgataatgaaacaacaccacttcgattgcgacggccctacactttctcgtgacgtgacgcgctgaggtcgcgacctggtcctcggtagtccaccccacggccggaacttgggtgcgcatcgatacaccaccactcccgttactcctaccacgggtgcgtcgcccgccctacactcaagatgccgagcgcactccacccgcaagccaagttcgatcctatacctcccgacctcgatctccatggcctcgtcgatcgcacgccgaacttcgactgggtcacccgcatctctctagctcaaatccgacgactgggccccgtcggcttcgagaagctcgttaccctccatgtcatagacggcggccggcctctggtcatcgaaggctggaataaagttctgccccaagatctcttcagtgccggctggctagagaagcagtatgacaagaagcaggaaagcgtgcgcgacatcaccgccgccacgaatatccccatgaccatgggccactacctccgttccatgcggcagctcaccaaccagtggacccccaccaacttccgagacgagcgcaggcagcgtctttatctcaaggacatcgactgcccggacgagtggtatcaacatctgaagaaggtcatacctcccaatgtcttctacatgaacgagaacgtcggcgagaacccgaaccaagcctcccgcaatgacgacatcttcggtgctcccgagaaagtatcagcaatcgccggtgatctgatgagtagcctcgaggaagaaatgagggcgcagaatctcatgtgctacgtcggccacgagggcacatatactcccgctcatcgagagatgtgcgccagtctgggacagaatatcatggtggaggcttcaggacacgacaacggcgaaaaagaaggcagctctatatggttcatgaccgagacgaaagatcgcgaagtggttagggaatacttcctctcgatgctcggtcacgatgtggagatcgaaaaacactttgcccaagtcaatgcttggaaaaaggccaactttcccgtctatattgttgaacagaaagtaggcgacttcattctagtgccacctttggccccccaccaagtctggaatcgaggaaccagaaccgtcaaagtcgcctggaacagaactacagtcgagactctcgaccttgcgctgcacgaagctttgcccaagactagacttgtctgccgtgatgaacagtacaaaaacaaagccattatttacttcactttggacaagtacagcaaagagctgcaatcattcacagatagttccgaggacaactggcttggtctaggtcaggagctgatgcagaactcgggcagaatgagacagatggcacaagacttcaaaagactgttcaacttttataccgagatactggttgacgaaatgttcggcgacaagcagatgaacgttgagtatgtgcccttcgattcgaacattacgtgctcatactgtcgatccaacattttcaatcgtttcttgacgtgcaagcactgcgtacggcagttaaacaccggcgacgatgacacttacgacatttgcatggaatgctacgctatgggccgatcctgcgtttgcatctctggtctccaatggtgtgagcagtggcaatggtctgatctcgtcgacaaacacgaaatttggcgagggattgtcatagaacaggatggatttgttgacattaacctctctccccagccaatcgaattagcacgcaaactttcgggaaagaagtcagtcgcgcaaatttgtcaagaacagctgagagcacgaccatggaacgatattaccaagccacctgatcgcgaaccagaagattcggacgagccggatgtagatgaagagggtcgcgtgaaaaagaaaaatagatccaagcggaaaaagaagcagggcgaaacccacccttgtcacgtatgctgccacaaggacttcaactacaaactcaaattctgtacgacctgcccggccgcatactgctatggcgtattatggagagcattcgatcaaatgccgcaaactgttatgcagcaggagcattggcaatgcccgagatgtttgaacatctgcaactgtggcggctgtcgacgtacaggcaacactcagccttacatccccaagaacactttgcttggtcacgacacgcgtcctatcgcagatgaccgaagtgttgaatccatagttgactttcgtgttcacaacttgggttggctgaagggagtgggtgaggaaaatcgcagcaaagactcgaaacgaatgaataggctccgagagcaggcggatgcagaaaaagccaaggatccactcacgtccctcgctacgactgaagggccccgtgaaatggactctgcactacaggactctatcgcgaatggctacggagatcagagccacgtcattgatgaagatcatgcaaacgacaacgctgtcgctgaccaattaccaatgtcgcaaggtgctccaggcagtcaagttgaaactgcagacatgtccggtctgcaggatgctgagggcgaacccgctgatctcgacccgtcacaatatccagacccgacaatgctagatcgaggacggatgatggggatgggcttctacgatcaggatgagagcacagacaaaatcttattcgacgcttttcagatgccttcggctgatgcacttgacgacggccctcagatgtctgactttgtgaagaaaacactccgcctcgccaagcgtaaagcaagattggagcatgaccatgaccctgatttcaaagggccgaagtctcaaccacgcaaaaagcccaagaccggcaatgtcgaccagttggccaatttagacccagctctgcttgggctcctcggcgacaatcctccaacgccgacgcaggcaaatggtgccactgaatccacagttccatctgttgatatggaaacagatagacgaaaaggaggacgagatttattaccagtggagccactacgaccgacgctgcggcatgccagacctatgacttcctatgttgaagccgaggacgctccggatgacccagaagatacagttcctgtgagatcagagagaattaccggcacggataagcctgcacgagatgctgtggacctcgctgccgatgcagttcgtgctttgaccggcactcctggtgaggataattcggaggagggagaaacgccgcaggggagcgctaaaaaacgaggaagagcaccacgaaattcgcttggttccgcgccacccacgcagccaaaacgacgcgggcgcccacctggtcgcccaagaaaatcgacactgaacaatgttgagaacgccgaagatactcctatgcctgatgtgccaggtgaagacgaagatcaagatcgcgatagcgtcaccatagacgaaccagaagcacaattagctgaagaactcgagtccacagaagccagcgccccaaagaccccacccaaaagacggggacgtccgcccggacctcgaaagtctcagccagatgtaacagcttctgtggaaccggtcgagaccaatgaagtcgcgacgaaacccgtccagctaatgtctatgagggagcgcatggctttgaaagggaagaagattcgcatcgggcaaaggaaagccaaagactctaaaacgaatagcccaagtgcttcaacacctttaagatctcaagaacttgatcggcctacggcaaagcttgatgaagacacgactagctccactctcaaacgcggccgtgcagagttgattgatgatgacttcgaacctcctcctcctccagttgttgaaagctcaccatctgtgagctcggcgtcagaggatgaaagctcacgtgcgccatcgcgacccctggctagacctgggggcccgactgttgtgaggctggccgtctcggatgacgagaacgacaacggtaacgaaagttcgtcgagtgagtcttcgtttgatcatagtgaggacgatgttattccagctcggaagcctgcagccactgctcgaggaaggggcagaggacgaggacgaggtagagcgagtcgatggactacccgtgcttgaatgacatgagtattgtatgtgcaattgcgagaatgactatacgtctgggagaggttacgatttgctacaactatcttgatacctgtgcatgcaatcttacttcagcctccaaaatgctctcatggattcgatagaacttagtgtaagctatcaaaagatgggcggctattagtgcaaaatctctcaatgga

SEQ ID NO: 15207 - DNA, 825 bp, Muscodor strobelii
  misc_feature: SGI cDNA ID NO. 565032
  misc_feature: Reduced expression when VOC is produced
  misc_feature: Encodes the peptide sequence at SEQ ID NO 15208
atgcgcggcgctggatgtagcatcaatgacctctgggatagaaacctcgatccgcatgtgacccgcacacgtcaccggcccatcgctcgcggtgctttaacgccctttcgtgccctggccttcacaggtgctcagcttatcacgggtctagggcttctattgcagttaccgacagtgtgtctagtttacggcatccccagcctgctgcttgtggctacctatcctctcgccaagcgcgtgacttactatccgcaattcgtcctgggtcttacgttctcctggggtgccatgatgggattcccagctctcggcgtggatctcctcgcggctgatgcgggagcgttgagggccgcggcagctttgctttacacaagtaacgtcgcctggactgtactatatgatatgatatatgcacacatggacattcgcgatgatgctaaagccggtatcaagagcatcgccctgaagcacgacgcagatacgaaaaaggtcctgaccggcttggctgtcgttcaaatcgggctgctggccggtgcgggaattgcaacaggcgcgggcccggcattcttcatcgggagctgcgggggagcagctctgacgctgggctacatgatcaagaaagtcaacttgaagaatgttagggattgttggtggtggtttgtcaatggctgttggattacgggcggcgcgatcagtcttgggcttggagcagattacttgatccgctacctggacgatgcagaggtctctactaagcctgatgagacaaggatcgagactggaggtgcgtgggctgtaagatattgtaagaaattgctgtcatga

SEQ ID NO: 15208 - protein, 274 aa, Muscodor strobelii
  misc_feature: SGI Peptide ID NO. 565032
  misc_feature (1)..(239): Pfam Id: PF01040 Pfam Desc: UbiA prenyltransferase family
  misc_feature (1)..(247): NCBI GI: 156044602 Blast Desc: SS1G_10405 [Sclerotinia sclerotiorum 1980] gi|154694793|gb|EDN94531.1| SS1G_10405 [Sclerotinia sclerotiorum 1980]
  misc_feature (1)..(257): NCBI GI: 154298136 Blast Desc: BC1G_12033 [Botryotinia fuckeliana B05.10] gi|150858219|gb|EDN33411.1| BC1G_12033 [Botryotinia fuckeliana B05.10]
  misc_feature (1)..(255): NCBI GI: 85078920 Blast Desc: NCU01553 [Neurospora crassa OR74A] gi|11595556|emb|CAC18141.1| related to para-hydroxybenzoate polyprenyltransferase precursor [Neurospora crassa] NCU01553
  misc_feature (1)..(255): NCBI GI: 171688778 Blast Desc: protein product [Podospora anserina] gi|170944351|emb|CAP70461.1| protein product [Podospora anserina]
  misc_feature (1)..(257): NCBI GI: 46138435 Blast Desc: FG10732.1 [Gibberella zeae PH-1]
  misc_feature (1)..(251): NCBI GI: 116199709 Blast Desc: CHGG_08010 [Chaetomium globosum CBS 148.51] gi|88179289|gb|EAQ86757.1| CHGG_08010 [Chaetomium globosum CBS 148.51]
  misc_feature (1)..(255): NCBI GI: 256729186 Blast Desc: [Nectria haematococca mpVI 77-13-4]
  misc_feature (1)..(248): NCBI GI: 169604580 Blast Desc: SNOG_05304 [Phaeosphaeria nodorum SN15] gi|160706599|gb|EAT87695.2| SNOG_05304 [Phaeosphaeria nodorum SN15]
  misc_feature (1)..(240): NCBI GI: 121706448 Blast Desc: para-hydroxybenzoate-polyprenyltransferase Coq2, [Aspergillus clavatus NRRL 1] gi|119399634|gb|EAW10060.1| para-hydroxybenzoate-polyprenyltransferase Coq2, [Aspergillus 1]
  misc_feature (1)..(257): NCBI GI: 39973573 Blast Desc: MGG_01067 [Magnaporthe grisea 70-15] gi|145017976|gb|EDK02255.1| MGG_01067 [Magnaporthe grisea 70-15]
  misc_feature: Useful for introducing or modulating the production of volatile compounds
MRGAGCSINDLWDRNLDPHVTRTRHRPIARGALTPFRALAFTGAQLITGLGLLLQLPTVCLVYGIPSLLLVATYPLAKRVTYYPQFVLGLTFSWGAMMGFPALGVDLLAADAGALRAAAALLYTSNVAWTVLYDMIYAHMDIRDDAKAGIKSIALKHDADTKKVLTGLAVVQIGLLAGAGIATGAGPAFFIGSCGGAALTLGYMIKKVNLKNVRDCWWWFVNGCWITGGAISLGLGADYLIRYLDDAEVSTKPDETRIETGGAWAVRYCKKLLS

SEQ ID NO: 15209 - DNA, 3109 bp, Muscodor strobelii
  misc_feature: SGI EST ID NO. CUFF.36734.0
  misc_feature: Variant of the nucleotide sequence at SEQ ID NO 15207
tggaaatgaaacttgagatctgcctctgaattgcccaacgtctccgtatatcgatgcgagacactaatgctgcatcacagagacgcgatcagtgaggctcattgattggaggcccagagctagaggtgcttgtggcttgtcaggtccagctgaaggcgggatctgttcaatatgtatcggatgagctcgtgccggagcgtcaactcactctctcactctctcatatcagccaaactaccaagattaatacggcgtacatctgttatatcgacctcaaattctagcctaggcaaaacacattcatcacaaacattcgccattggcttctttcgaccaacacatataataccagttaatttcactgccaacaatcaacgagcgtcacatgccctcgcatcatcttcctcaccttctgcagcggcatcatcatcacctgcgccttacacgccaccttcatccggagtactgtctatccttccctcgtcatgggttccttacgcggagctgatacggctcgataaaccagccggcacctggtacctctacttcccatgtctattttccacactgctcgcagcacctgcggccggagcgtcgcctctctccgtgctatggacttctacgctattcctcaccggtgccattatcatgcgcggcgctggatgtagcatcaatgacctctgggatagaaacctcgatccgcatgtgacccgcacacgtcaccggcccatcgctcgcggtgctttaacgccctttcgtgccctggccttcacaggtgctcagcttatcacgggtctagggcttctattgcagttaccgacagtgtgtctagtttacggcatccccagcctgctgcttgtggctacctatcctctcgccaagcgcgtgacttactatccgcaattcgtcctgggtcttacgttctcctggggtgccatgatgggattcccagctctcggcgtggatctcctcgcggctgatgcgggagcgttgagggccgcggcagctttgctttacacaagtaacgtcgcctggactgtactatatgatatgatatatgcacacatggacattcgcgatgatgctaaagccggtatcaagagcatcgccctgaagcacgacgcagatacgaaaaaggtcctgaccggcttggctgtcgttcaaatcgggctgctggccggtgcgggaattgcaacaggcgcgggcccggcattcttcatcgggagctgcgggggagcagctctgacgctgggctacatgatcaagaaagtcaacttgaagaatgttagggattgttggtggtggtttgtcaatggctgttggattacgggcggcgcgatcagtcttgggcttggagcagattacttgatccgctacctggacgatgcagaggtctctactaagcctgatgagacaaggatcgagactggaggtgcgtgggctgtaagatattgtaagaaattgctgtcatgagtggatagacgtctgtataatgtgtacactattaccaggtccatataggaataagaaccacagatccttccggtaaggagtgaaatggcaagcggacgatgaaagctgctattagtcaggtagccatctggaccttagaaaaggttttacgcaaccacgttacattcatcgtgttttggctcttattcgaaatgcgtgcgcattcgaccctcgtctcgtatacaaccactttacaattgtcaggggcatcgatggctgattattagccatacaataaataatgattgccgagaacttatgttacgtggcgacatattctttacagtaggtgattttgcgaagcctggcgattcgtatcttcgtacttctacataagtcttcccttgctccagcattcctgacatcactgtggactggatgacaacattgttcaccgtagaagggctggatagcgtattgaaaaaattgtgtagatggtagacacaagacctctgttttggatctggtttgcctacgaagactgtgtgtaacaaggcccgaacctatgatgcggatggaaaatcaagcaagccgtcggactccgttttcccatgtgaacctttatttcgtcgcgcgaattttcgtcttcatctctcatgacaccccaaatcaatgaccatcccgtctatgatctgggcttctccttcttctccttccacagagccaacagaccgacgccagacaccttgacgaccttgaaacggacaccggggatatcacccttggccttgcccttgcgaccgaaaccggcgaggaggacttcgtcgttctcgtcgacgaagttcaagcaaccgtcattggggactgtgacgcgacatcattagtacagcatggacgcagatttttcataattcatcgcaacaatatccaactctttcctccacaaattcacaaaatctctgactctattgagattggaacgtagagggacgggcgaaatgagatgggtgtcgtaccgaaagcagtgactttcttgccgttcttgatgagctggacacggacacacttgcggatggcggagttgggctgcttggcttcgacaccgaccttctcgaggacgatgcccttggcgtgggaggagccaccgaagggagaggacttgaaggcggtaccgagagcacgcttcttgtatcccagatcggcccagcgctggtccttgcggtgggtgcggagctttctggccgcgttgagaccacgaggcttgcctttacccatgattgctggagggaaactgtgtcagcgggcggttcgatacggatcggtagaggcgggcgggagtgggctgttgatcgagcggtgcagcactgggtcggtcggtcgacggagcagcagagtgcgtcgggtcgtgagagaattggcgatggtgatggcgatagtgacggtgaagttcgtaggagcgggggagagtagacctaccgatttgtgatgtggtatcgctgaatgacggggtggttgatgttggtcgtgacggatgggcttcacttccaatggtttggggtggatgtgaagttgtctcggctaattttgggcggtaggggaaaatttggtaagggtttcttcgccctactggaaaacaggcggagaatgagcaatggtg

SEQ ID NO: 15210 - DNA, 438 bp, Muscodor strobelii
  misc_feature: SGI cDNA ID NO. 565033
  misc_feature: Reduced expression when VOC is produced
  misc_feature: Encodes the peptide sequence at SEQ ID NO 15211
atgggtaaaggcaagcctcgtggtctcaacgcggccagaaagctccgcacccaccgcaaggaccagcgctgggccgatctgggatacaagaagcgtgctctcggtaccgccttcaagtcctctcccttcggtggctcctcccacgccaagggcatcgtcctcgagaaggtcggtgtcgaagccaagcagcccaactccgccatccgcaagtgtgtccgtgtccagctcatcaagaacggcaagaaagtcactgctttcgtccccaatgacggttgcttgaacttcgtcgacgagaacgacgaagtcctcctcgccggtttcggtcgcaagggcaaggccaagggtgatatccccggtgtccgtttcaaggtcgtcaaggtgtctggcgtcggtctgttggctctgtggaaggagaagaaggagaagcccagatcatag

SEQ ID NO: 15211 - protein, 145 aa, Muscodor strobelii
  misc_feature: SGI Peptide ID NO. 565033
  misc_feature (10)..(144): Pfam Id: PF00164 Pfam Desc: Ribosomal protein S12
  misc_feature (1)..(145): NCBI GI: 91983772 Blast Desc: ribosomal protein S28 [Stachybotrys elegans] gi|91983776|gb|ABE68884.1| ribosomal protein S2 [Stachybotrys elegans]
  misc_feature (1)..(145): NCBI GI: 39973575 Blast Desc: MGG_01066 [Magnaporthe grisea 70-15] gi|58257409|gb|AAW69326.1| 40S ribosomal protein S23-like protein [Magnaporthe grisea] gi|145017977|gb|EDK02256.1| MGG_01066 grisea
  misc_feature (1)..(145): NCBI GI: 256728979 Blast Desc: [Nectria haematococca mpVI 77-13-4]
  misc_feature (1)..(145): NCBI GI: 156043531 Blast Desc: 40S ribosomal protein S23 [Sclerotinia sclerotiorum 1980] gi|154695156|gb|EDN94894.1| 40S ribosomal protein S23 [Sclerotinia sclerotiorum 1980]
  misc_feature (1)..(145): NCBI GI: 46138437 Blast Desc: RS23_NEUCR 40S ribosomal protein S23 [Gibberella zeae PH-1]
  misc_feature (1)..(145): NCBI GI: 154316719 Blast Desc: 40S ribosomal protein S23 [Botryotinia fuckeliana B05.10] gi|150845389|gb|EDN20582.1| 40S ribosomal protein S23 [Botryotinia fuckeliana B05.10]
  misc_feature (1)..(145): NCBI GI: 258568684 Blast Desc: 40S ribosomal protein S23 [Uncinocarpus reesii 1704] gi|237906532|gb|EEP80933.1| 40S ribosomal protein S23 [Uncinocarpus reesii 1704]
  misc_feature (1)..(145): NCBI GI: 116199689 Blast Desc: CHGG_08000 [Chaetomium globosum CBS 148.51] gi|88179279|gb|EAQ86747.1| CHGG_08000 [Chaetomium globosum CBS 148.51]
  misc_feature (1)..(145): NCBI GI: 70995090 Blast Desc: ribosomal protein S23 (S12) [Aspergillus fumigatus Af293] gi|74663642|sp|Q873W8.1|RS23_ASPFU RecName: Full=40S ribosomal protein S23 gi|29150599|gb|AAO64256.1| ribosomal S28
  misc_feature (1)..(145): NCBI GI: 171688780 Blast Desc: protein product [Podospora anserina] gi|170944352|emb|CAP70462.1| protein product [Podospora anserina]
  misc_feature: Useful for introducing or modulating the production of volatile compounds
MGKGKPRGLNAARKLRTHRKDQRWADLGYKKRALGTAFKSSPFGGSSHAKGIVLEKVGVEAKQPNSAIRKCVRVQLIKNGKKVTAFVPNDGCLNFVDENDEVLLAGFGRKGKAKGDIPGVRFKVVKVSGVGLLALWKEKKEKPRS

SEQ ID NO: 15212 - DNA, 1081 bp, Muscodor strobelii
  misc_feature: SGI EST ID NO. CUFF.36735.1
  misc_feature: Variant of the nucleotide sequence at SEQ ID NO 15210
cattctccgcctgttttccagtagggcgaagaaacccttaccaaattttcccctaccgcccaaaattagccgagacaacttcacatccaccccaaaccattggaagtgaagcccatccgtcacgaccaacatcaaccaccccgtcattcagcgataccacatcacaaatcgcaatcatgggtaaaggcaagcctcgtggtctcaacgcggccagaaagctccgcacccaccgcaaggaccagcgctgggccgatctgggatacaagaagcgtgctctcggtaccgccttcaagtcctctcccttcggtggctcctcccacgccaagggcatcgtcctcgagaaggtcggtgtcgaagccaagcagcccaactccgccatccgcaagtgtgtccgtgtccagctcatcaagaacggcaagaaagtcactgctttcgtccccaatgacggttgcttgaacttcgtcgacgagaacgacgaagtcctcctcgccggtttcggtcgcaagggcaaggccaagggtgatatccccggtgtccgtttcaaggtcgtcaaggtgtctggcgtcggtctgttggctctgtggaaggagaagaaggagaagcccagatcatagacgggatggtcattgatttggggtgtcatgagagatgaagacgaaaattcgcgcgacgaaataaaggttcacatgggaaaacggagtccgacggcttgcttgattttccatccgcatcataggttcgggccttgttacacacagtcttcgtaggcaaaccagatccaaaacagaggtcttgtgtctaccatctacacaattttttcaatacgctatccagcccttctacggtgaacaatgttgtcatccagtccacagtgatgtcaggaatgctggagcaagggaagacttatgtagaagtacgaagatacgaatcgccaggcttcgcaaaatcacctactgtaaagaatatgtcgccacgtaacataagttctcggcaatcattatttattgtatggctaataatcagccatcgatgcccctgacaattgtaaagtggttgtatacgagacgagggtcgaatgcgc

SEQ ID NO: 15213 - DNA, 717 bp, Muscodor strobelii
  misc_feature: SGI cDNA ID NO. 565034
  misc_feature: Encodes the peptide sequence at SEQ ID NO 15214
atgtcttctcagcagactcaagggcctccgcctcttacacgcacaggttctctactgaatccccgcaatcgaccggtcccccgtatgccaacaggagactcggcgcggaccgcggaccggactgatgcattatgggctgagatgcaaacaaccctcgaagaggctgagctttctgcgagtggcggcacccatgtctttggagttgatcatgaccgcaagcttgcagagctacgcgtcgctcaaattgccctagcgcaggcatgggctcgaagcgagactgatgataccactgaagaccttccggcagatactgaagtgcgaaatctcaaaggagccttgggcgatattggaaacatcgcaggtgcaatcgctgctggggctgccttgaactcagcaatcccctctggatccgggaaaggaaatgcggatggtacagatgctggcaaaagcacgatcggcacaggaagtgcgcgacctggtagcagcggactcgatggtgaaaagctcggcgccaaactcgaagaagagacggagcgagacattcttcttgctagaaataggagagaggccaatgatcggtacttcagcaaggtagaccagggtgtgagagacgtggtcgaaaagctcgaagcagtcgcggttgctatgagggctgttgagcaggaaactaggggtatttggggtgaggagagtgcacccgagagcttagaagtctaa

SEQ ID NO: 15214 - protein, 238 aa, Muscodor strobelii
  misc_feature: SGI Peptide ID NO. 565034
  misc_feature (23)..(236): NCBI GI: 261355459 Blast Desc: conserved [Verticillium albo-atrum VaMs.102]
  misc_feature (28)..(229): NCBI GI: 164428010 Blast Desc: NCU01551 [Neurospora crassa OR74A] gi|157071972|gb|EAA27018.2| conserved [Neurospora crassa OR74A]
  misc_feature (28)..(229): NCBI GI: 16944551 Blast Desc: [Neurospora crassa]
  misc_feature (29)..(229): NCBI GI: 46138439 Blast Desc: FG10734.1 [Gibberella zeae PH-1]
  misc_feature (26)..(229): NCBI GI: 171688782 Blast Desc: protein product [Podospora anserina] gi|170944353|emb|CAP70463.1| protein product [Podospora anserina]
  misc_feature (11)..(229): NCBI GI: 256729185 Blast Desc: NECHADRAFT_8134 [Nectria haematococca mpVI 77-13-4]
  misc_feature (36)..(229): NCBI GI: 154316721 Blast Desc: BC1G_03778 [Botryotinia fuckeliana B05.10] gi|150845390|gb|EDN20583.1| BC1G_03778 [Botryotinia fuckeliana B05.10]
  misc_feature (26)..(229): NCBI GI: 156043533 Blast Desc: SS1G_10770 [Sclerotinia sclerotiorum 1980] gi|154695157|gb|EDN94895.1| SS1G_10770 [Sclerotinia sclerotiorum 1980]
  misc_feature (23)..(227): NCBI GI: 39973577 Blast Desc: MGG_01065 [Magnaporthe grisea 70-15] gi|145017978|gb|EDK02257.1| MGG_01065 [Magnaporthe grisea 70-15]
  misc_feature (42)..(229): NCBI GI: 225557785 Blast Desc: conserved [Ajellomyces capsulatus G186AR]
MSSQQTQGPPPLTRTGSLLNPRNRPVPRMPTGDSARTADRTDALWAEMQTTLEEAELSASGGTHVFGVDHDRKLAELRVAQIALAQAWARSETDDTTEDLPADTEVRNLKGALGDIGNIAGAIAAGAALNSAIPSGSGKGNADGTDAGKSTIGTGSARPGSSGLDGEKLGAKLEEETERDILLARNRREANDRYFSKVDQGVRDVVEKLEAVAVAMRAVEQETRGIWGEESAPESLEV

SEQ ID NO: 15215 - DNA, 1485 bp, Muscodor strobelii
  misc_feature: SGI EST ID NO. CUFF.36239.0
  misc_feature: Variant of the nucleotide sequence at SEQ ID NO 15213
gttcattcaagataatcacacacctcttacacctacgtagcagttctgagccggaatggagcaccatcgcaaccattgaatctatcttgttgcatttcctatctccattgccaaaatgtagccatgtctcataataaggcgagacagagtgatttgaaagctcgagatcccgctagtccatatctccaaccatcaacaacaggctctcatagctcccttccaggcgtgagtgctccccttggactctcgtcatcttcatctggtctgaggtcgcattctcagttacccaccagcatgtcttctcagcagactcaagggcctccgcctcttacacgcacaggttctctactgaatccccgcaatcgaccggtcccccgtatgccaacaggagactcggcgcggaccgcggaccggactgatgcattatgggctgagatgcaaacaaccctcgaagaggctgagctttctgcgagtggcggcacccatgtctttggagttgatcatgaccgcaagcttgcagagctacgcgtcgctcaaattgccctagcgcaggcatgggctcgaagcgagactgatgataccactgaagaccttccggcagatactgaagtgcgaaatctcaaaggagccttgggcgatattggaaacatcgcaggtgcaatcgctgctggggctgccttgaactcagcaatcccctctggatccgggaaaggaaatgcggatggtacagatgctggcaaaagcacgatcggcacaggaagtgcgcgacctggtagcagcggactcgatggtgaaaagctcggcgccaaactcgaagaagagacggagcgagacattcttcttgctagaaataggagagaggccaatgatcggtacttcagcaaggtagaccagggtgtgagagacgtggtcgaaaagctcgaagcagtcgcggttgctatgagggctgttgagcaggaaactaggggtatttggggtgaggagagtgcacccgagagcttagaagtctaatcatcttatcagaagtgtcacgccgagcattcgcggctctactcaaacacccaaaaccttccaacccgatcaactatggtatgaaaagttcgaagtgtataaaacagtgacacaggcagtgcacagacaaacagccccatgttcagaagctcattcatatgtatggctgggagactggtatcaacgttacagccaactaggtatgaacgattgcgatgctacctagaaatcttatcttgcataatacacacacttgaggagcatatctagaaaatatcgagaatagacgatgttaattgaattcatcttctttctcgctcggggttcttggttaatagtctcgtcctgggttgtatatcacatattttagtcatttacgaagttgcggaaatatccgttttcgctgagatgacagcgtgcttgcgttgtcgaacgtctagtgagttcatctctcccgcttttgcgtgttcaagc

SEQ ID NO: 15216 - DNA, 1122 bp, Muscodor strobelii
  misc_feature: SGI cDNA ID NO. 565035
  misc_feature: Encodes the peptide sequence at SEQ ID NO 15217
atggcttctaacaacgcacatctcgttcatagtcatgcgcacgaggaagatatccccgggacggtgaacctccgagctgcagatggcgacgacactgggtatggccaagctttattcccagttcccgcggaagaccccaacgatccattgcagtccccatatctgaatatttgggccgaagagttcaacatcagtacgactgaagcctccgagctgatttcataccccaatctcgcatttggatttggttctttaatatttgtgcctttgtatctcaaatttggccgccggccgataatgctagtgtcgttgatcacatgtgtctctgccttggaactttcgcctcgcttcctgccggctacatattgtccggtggctatggctggcgtctattcttctatggcaagtgtagaaagatcccacgcgaattatgttttgatcgtattgctgagacatcgcactaacttctttgtagtggagctggcatttggactagcacttctcgtgcttgcgtttattttcgttgaagagacatcatacgaccgcagtgccgttattgctatgttgtcacaagcctcaacgcagacacaaacatacgccaagggggaagctgaacaaactcggacacgatggacgaccgtggccataccctcccgcaagtcatttgtgaacacgctgcgtccctggggtagagtcgacgctgacgtgccttttttcacgatgatgggccgttctttcacatatttcttggtaccgcagacgctctgggtggtatcctcgtttggaatcaatattgggttactggcgctcgcttatagctatacttttccaattctgatcacttcgcctccttataattggacggtgatcaactctggattatttgctttagcggcgcttattggatattccctggctgtaccatttacttcatcgtcggaccgcttagcttcctaccttacgctgcgcaataatggtattcgagaagctgaaatgcgactcggagtgctgctgccggccatggtcataggaccagctggcgtcatcttatacgggttcacagccgcgaactcactccattgggtgctcttcttcgtcggcggcgcaatgtcatgtgagtga

SEQ ID NO: 15217 - protein, 373 aa, Muscodor strobelii
  misc_feature: SGI Peptide ID NO. 565035
  misc_feature (7)..(371): NCBI GI: 242823518 Blast Desc: conserved [Talaromyces stipitatus ATCC 10500] gi|218713001|gb|EED12426.1| conserved [Talaromyces stipitatus ATCC 10500]
  misc_feature (7)..(371): NCBI GI: 212546409 Blast Desc: MFS transporter, [Penicillium marneffei ATCC 18224] gi|210064878|gb|EEA18973.1| MFS transporter, [Penicillium marneffei ATCC 18224]
  misc_feature (7)..(371): NCBI GI: 116178924 Blast Desc: CHGG_00090 [Chaetomium globosum CBS 148.51] gi|88184387|gb|EAQ91855.1| CHGG_00090 [Chaetomium globosum CBS 148.51]
  misc_feature (4)..(371): NCBI GI: 115384748 Blast Desc: conserved [Aspergillus terreus NIH2624] gi|114196613|gb|EAU38313.1| conserved [Aspergillus terreus NIH2624]
  misc_feature (1)..(366): NCBI GI: 171678189 Blast Desc: protein product [Podospora anserina] gi|170937164|emb|CAP61821.1| protein product [Podospora anserina]
  misc_feature (47)..(371): NCBI GI: 171680558 Blast Desc: protein product [Podospora anserina] gi|170939906|emb|CAP65132.1| protein product [Podospora anserina]
  misc_feature (25)..(371): NCBI GI: 145606905 Blast Desc: MGG_03836 [Magnaporthe grisea 70-15] gi|145014524|gb|EDJ99092.1| MGG_03836 [Magnaporthe grisea 70-15]
  misc_feature (10)..(371): NCBI GI: 67525167 Blast Desc: AN3041.2 [Aspergillus nidulans FGSC A4] gi|40744436|gb|EAA63612.1| AN3041.2 [Aspergillus nidulans FGSC A4]
  misc_feature (10)..(371): NCBI GI: 259486012 Blast Desc: TPA: MFS transporter, (AFU_orthologue; AFUA_4G01480) [Aspergillus nidulans FGSC A4]
  misc_feature (28)..(362): NCBI GI: 256724716 Blast Desc: NECHADRAFT_48131 [Nectria haematococca mpVI 77-13-4]
MASNNAHLVHSHAHEEDIPGTVNLRAADGDDTGYGQALFPVPAEDPNDPLQSPYLNIWAEEFNISTTEASELISYPNLAFGFGSLIFVPLYLKFGRRPIMLVSLITCVSALELSPRFLPATYCPVAMAGVYSSMASVERSHANYVLIVLLRHRTNFFVVELAFGLALLVLAFIFVEETSYDRSAVIAMLSQASTQTQTYAKGEAEQTRTRWTTVAIPSRKSFVNTLRPWGRVDADVPFFTMMGRSFTYFLVPQTLWVVSSFGINIGLLALAYSYTFPILITSPPYNWTVINSGLFALAALIGYSLAVPFTSSSDRLASYLTLRNNGIREAEMRLGVLLPAMVIGPAGVILYGFTAANSLHWVLFFVGGAMSCE

SEQ ID NO: 15218 - DNA, 4914 bp, Muscodor strobelii
  misc_feature: SGI EST ID NO. CUFF.36242.1
  misc_feature: Variant of the nucleotide sequence at SEQ ID NO 15216
tcgctattgattctcattcctattgtttggtttgagtttatcagaacgtgatgagaatcgagttatgcttgtgtctttgtccatcttgaaactgccggattgggctgaaactcaacaccaatatctccaggttccccgcctcacccacacgatgacaaagctaagggaagcgatccttaccgaatatagcctgcgtctattggataacagaataagcggaacaatgaagggatgaggggcgaccgcggaatatatagtctcgtcataacgttataacagaccattacatttgacccgtcaggttggaggtggtttggaacatttccgctttctgttcgcttactgaacaagtggcaaacacaggagaacaccgaaatccttcatttatcatggcttctaacaacgcacatctcgttcatagtcatgcgcacgaggaagatatccccgggacggtgaacctccgagctgcagatggcgacgacactgggtatggccaagctttattcccagttcccgcggaagaccccaacgatccattgcagtggtctaacttcaagaaaacgatgatattgatcatctgctcattttactcgtttctggcaaatgcggcgctgatagggccaggtaagcttggtcacatcttaactagattctttaaacattgtcccaatgctgtggccccatctcatctgagctaatagatagattgatatgcagtaagcatcagcatcttatttctcggttgccaaggagaaattctttgcactagcaacaaaaaagatagtaaatcgaggactcaatgccagttactaaggctttctagtccccatatctgaatatttgggccgaagagttcaacatcagtacgactgaagcctccgagctgatttcataccccaatctcgcatttggatttggtatggtgaacacataagacgcgtaattcctggagttctaacccataacaggttctttaatatttgtgcctttgtatctcaaatttggccgccggccgataatgctagtgtcgttgatcacagtaagaatctactgccaatataaggaaagatgatgaagttgatggatgaatagttttgtgccggaattattggagcatcacaggctactacgtttcaggggctgatgggcgctcgtgttgtgcatgcatttgggtcatgtgtttgcgaagcactgcctgtccaactcgtcaatgacatattcttcctccatgaaaggggtgaaaggatcggctactataccgtgtgtctctgccttggaactttcgcctcgcttcctgccggctacatattgtccggtggctatggctggcgtctattcttctatggcaagtgtagaaagatcccacgcgaattatgttttgatcgtattgctgagacatcgcactaacttctttgtagtaagtgatctaacatatcaaatatcagaaactggtcctttgtcacgaagcccgcggccgcgcaggggaaaatcataaaaaataactaacacaacaccgttccggctaccaggtggagctggcatttggactagcacttctcgtgcttgcgtttattttcgttgaagagacatcatacgaccgcagtgccgttattgctatgttgtcacaagcctcaacgcagacacaaacatacgccaagggggaagctgaacaaactcggacacgatggacgaccgtggccataccctcccgcaagtcatttgtgaacacgctgcgtccctggggtagagtcgacgctgacgtgccttttttcacgatgatgggccgttctttcacatatttcttggtaccgcagacgctctgggtggtatcctcgtttggaatcaatattgggttactggcgctcgcttatagctatacttttccaattctgatcacttcgcctccttataattggacggtggtatgtctatgcttgcgcggtgtcgcagtattgacgctgacctagactagatcaactctggattatttgctttagcggcgcttattggatattccctggctgtaccatttacttcatcgtcggaccgcttagcttcctaccttacgctgcgcaataatggtattcgagaagctgaaatgcgactcggagtgctgctgccggccatggtcataggaccagctggcgtcatcttatacgggttcacagccgcgaactcactccattgggtgctcttcttcgtcggcggcgcaatgtcatggtcagtatctggtcccttatataaatgctcggagctataatcaaggctcatattgtgaacactaatagctaacgtcaacgtagtgagtgacttttgctatagtacatggtgatataaaacttgaaagtacaggacagtgctgacaaactgaaaatccacttaagactgggctgcctacttctacttctctttcaccctggcatatgccgtcgattcatataatgccaacacatccgagatgctgattgcaatgaaccttggcaagcaaagtatctcgttcgggtttggtgtaaagcttttgacatgggtcatggagagcggctacaaggtggtggttgcaggcatattcgccggcgtcctgttggcaaataatttggtattgcttatcttcatgctttggggaaagaacatccgccggttcatgtcaaagacgtggctttctagactgcattcttcgagcatcaaagaagccgtaagtcattgacacgatgttatccgcgtcaaagatcatacgttttgcatgtatgaaacctcgtactctttggttgcctgaaactttattcttcattggccgcggatgatgtctctacggcatcttccacaaagggtccataactaatcgatgcaaccacacggtccaattctgcaacgcaactccggatcgtgatggaaccgtgcagcgaaatgatttgccaagagcaaaaagaaatcagggaaagtcatccctgtgatctatgcttgcagctgaggtgtctgggtggcggaatgagcggaaccgggcatgtgttgttggagcggagtcccctatgcagtctgatatcgggcctgcaaagagtcttctaaagtgctattgtgaatatgtatcgaggcaatacttactcgtgcaggtcaaagcatgctttatttgtgacatctacacagacatctccaagtaagggcatcgataataacctctttcgctcacgatgctgttcttcagctgcaagcttcctgtcagcatgtacagtgcctctaccagctcactcaaccgccagtctaaatcccaagaaggttaattctcaggtacgccagctaaactctccggtagaacctggccgttttgctctccggatagagcccagagcctgcctcttcgtgtcttggccccctacaagatgactaggcaacgcaggcttctgaccaggggacctcccaattgggatttggctcagaacaactggcgtaattgccactcagtgcaaatgtatgtaattgggcgcgtgagtctgccgccgaggcgcgtcagcgtgtatgccggatgccccggtgaagcccagggcagggatccgacctgctgtgccggtgcgtaagatggatcgatgggatcggaagaatccaaccgagtccattatacctccactgggctagccaaacggaaacactagatggttgactcgaaattcagtactgtgtagtgacgagacggcgagactgaatcacaaaaaccgttcgacaatgatactggtcctgggcagcgatgggcagataaatcattcgattgaaagggtagttgcagttgagagcattccgagcggcggagaggcggagggcggaggagaactcgcatctgcatactacttgcacactagccaacgaacaaaaagccgctgtcaacggtcatactgtacgtacaccctcgacgccaactcgactattcatctccaaacgccacaaacgatagcgcgcattgatgcagtagctcggtcagaattcctgtttagtcaaacggcacggctcgtgtgttcccatcaaatacaaatggttcgtgcgttttatgactgcaagatggctcaggcacaggatctgttaagggcgctgatccgccaggatatttacccaaccaatccaacccctgtcaatcttctcattttgtccggcatataggatgcagatctgacatgccaattctgtctttgccaattttagtagattttttttccaacttcaaccaccatgctcctccaatcacgttctcactgcaagtccagccgttggaactacccaggttaagcgagcccaagctgaggcgatctgggcttttggtgcttattgcagggctctaccgcttcatccagatactgtaactctcggtgcccgtcacgccctctttgaacttggcgaattacaacatatgacaacatgatcttaacacttacggctgaagaattggttaaggagacataacgaatactacattacacagtagccttcgacgtcatcgagctgcaatcatcctccgcccccttttaatctgcactagggtcctgcagtcactcagcttgcttacgagttctaatcttgttgaaggctgccgctagccgtccgcgccgtgcacacttgtaagtgaaggcaaattgtttggaaaacaaaatgcatatgtcctgctttcgactgttgatcattaccttcttcaactcatgacaacggcccttcgcccgccaaaagctggtaaggtatctggggaaaaggttgtcgaaggtgactcgatagtctgatggaaagaaacctccgagttgacatgatcgacactactcacaagatgtagaattctctagaatacgattaagcggatgtgataattactcttgaaacagtatcattattaccccgaagagcaaatgtgatatagtgaatatagtgataccgtaatttcac

SEQ ID NO: 15219 - DNA, 297 bp, Muscodor strobelii
  misc_feature: SGI cDNA ID NO. 565036
  misc_feature: Encodes the peptide sequence at SEQ ID NO 15220
atgcagttctccaccgtattcgttgccctcttcgctaccgtcgctgtggctgctcctggctacggcaaccccaagccctacgacgcttgctctggtctctacgacactcttgaatgctgtgccaccgacgttctcggtgttgctgacctcgactgcgccacccccggcaaggtccccaccagcgctgccaacttcgcgtctatctgcgccgccaagggccagcgagctcgctgctgtgtcctccctgttctcggccagagcgtcctctgcgagactcctctcggactctcaaactag

SEQ ID NO: 15220 - protein, 98 aa, Muscodor strobelii
  misc_feature: SGI Peptide ID NO. 565036
  misc_feature (29)..(93): Pfam Id: PF06766 Pfam Desc: Fungal hydrophobin
  misc_feature (1)..(98): NCBI GI: 37724083 Blast Desc: hydrophobin [Gibberella moniliformis]
  misc_feature (1)..(98): NCBI GI: 46109898 Blast Desc: FG01831.1 [Gibberella zeae PH-1] gi|91221408|gb|ABE27986.1| hydrophobin 5 precursor [Fusarium culmorum]
  misc_feature (1)..(96): NCBI GI: 164425836 Blast Desc: NCU08192 [Neurospora crassa OR74A] gi|157071084|gb|EAA30046.2| NCU08192 [Neurospora crassa OR74A]
  misc_feature (1)..(97): NCBI GI: 39950019 Blast Desc: MGG_01173 [Magnaporthe grisea 70-15] gi|4337063|gb|AAD18059.1| magnaporin [Magnaporthe grisea] gi|145021037|gb|EDK05166.1| MGG_01173 [Magnaporthe grisea 70-15]
  misc_feature (1)..(82): NCBI GI: 209570340 Blast Desc: [Glomerella graminicola]
  misc_feature (1)..(96): NCBI GI: 148888523 Blast Desc: cerato-ulmin [Ophiostoma quercus]
  misc_feature (31)..(90): NCBI GI: 25091421 Blast Desc: THYD_CLAFS RecName: Full=Trihydrophobin; AltName: Full=CFTH1; Flags: Precursor gi|6448504|emb|CAB61236.1| Trihydrophobin [Claviceps fusiformis]
  misc_feature (1)..(98): NCBI GI: 256722079 Blast Desc: NECHADRAFT_51212 [Nectria haematococca mpVI 77-13-4]
  misc_feature (1)..(96): NCBI GI: 1706154 Blast Desc: CRYP_CRYPA RecName: Full=Cryparin; Flags: Precursor gi|305085|gb|AAA19638.1| cryparin [Cryphonectria parasitica]
  misc_feature (1)..(97): NCBI GI: 171685270 Blast Desc: protein product [Podospora anserina] gi|170942596|emb|CAP68248.1| protein product [Podospora anserina]
MQFSTVFVALFATVAVAAPGYGNPKPYDACSGLYDTLECCATDVLGVADLDCATPGKVPTSAANFASICAAKGQRARCCVLPVLGQSVLCETPLGLSN

SEQ ID NO: 15221 - DNA, 1010 bp, Muscodor strobelii
  misc_feature: SGI EST ID NO. CUFF.36342.0
  misc_feature: Variant of the nucleotide sequence at SEQ ID NO 15219
ctgacacttccggaattcttcaccgtactaactactgtcctctgtcgacgatcacttcctcttcagagactacaaggtaaggaacaggaacaggattttgtcaagatgatccccaggaatctacatcgccaagggctatggcatgttgcatcggactattgcaatgtctatctcatggaaacaggaccgtgagagcctgttgggctcgatcgaatacccacccagtggagttgtcgattctgagatcgtgaagattatatcgaggtttgacggatataaatatctggctttgctcccgtcttcacatcgaaattctatcctcatcaaccagcagtcaatcttccaatccagcttctcgcaatacagccagcacccaatttcagagtcttaaatactcgaacaacagccaaaatgcagttctccaccgtattcgttgccctcttcgctaccgtcgctgtggctgctcctggctacggcaaccccaagccctacgacgcttgctctggtctctacgacactcttgaatgctgtgccaccgacgttctcggtgttgctgacctcgactgcgccacccccggcaaggtccccaccagcgctgccaacttcgcgtctatctgcgccgccaagggccagcgagctcgctgctgtgtcctccctgttctcggccagagcgtcctctgcgagactcctctcggactctcaaactagagctctacacgacgaactgaagctacatggagattggttgttggaatgggctgggcagaaaatgctaattgtctaatgaagtaatccaatgttgtgctagcggcataagacctttgaagataatagttggcggtagctatttagtcattcctttaatataccggtgtgagaaatttatcagtgcgttgcctaagtgaaccaaaggaaatccctgcgcttgatcttgtcaatgcccctgttagttcttagaatccgaaatcgtcgcttgtcctttcttgggatctcgaaaattttctctgcgc

SEQ ID NO: 15222 - DNA, 1032 bp, Muscodor strobelii
  misc_feature: SGI cDNA ID NO. 565037
  misc_feature: Encodes the peptide sequence at SEQ ID NO 15223
atggcacatgtgccgccaccagcaattgccttacctccatctataacgttcgactccatcagacttgaaacaaaaccaaccgcatctatagaatgctctcaggtacagagcaagggtgatgctggatactcggacatcatcgttgtctttcttaatgggcttattgctccgcaatcgttgtggctccctgtcatgtcaatgatgctgcgtcatctcaagctctcatcggatggcggtggacttggtgattcgtcacaacctcagttgctcgcatatgatcgttatggccaaggaaggacgattgatcgtgatccgggcgacgagggaaaagaggagggctacggccataacgtacttgacgttgtacatgacctacgtcagctcatcagacaagtaactgacccaacacttgccatccctaagcgagtcgttttcattgccaactctatcggctgcgcaattgctcgtctctatgctcagaactatccaggaagcgttatgggtatgctattcctagacagcatgatggcaaacacagactttgtcagcatattcccggatccagatagccccgattttgatcctgaatccttaccaaaaggcgttacatctgagatgctgtatgagacgcgacggaagttcagggctgcttttcatccgagcgtgaagaatgctgagggtctcgatagacgcgacctggcaacacttttaccatatgcaaacaaaccgcacttgcagtctggcgccgtatcgccttttgtcactgttgttggccacgatcccgagtggtttgctcgggaaagtcttgagggatcgatggaaacaccccttgtcatatctgaaaactataccaatcccacgtggcacctgtacaatcagggattgacagaaatcacagatgctgacaagtcatctggccctattattgccgaaaattgcggtcattttgttcaaagagataacccaatgctagttgctaacttggcatgtcagttactgtccaaggttacggagcatgcacaagtggactaa

SEQ ID NO: 15223 - protein, 343 aa, Muscodor strobelii
  misc_feature: SGI Peptide ID NO. 565037
  misc_feature (22)..(341): NCBI GI: 169626234 Blast Desc: SNOG_16400 [Phaeosphaeria nodorum SN15] gi|160705797|gb|EAT76225.2| SNOG_16400 [Phaeosphaeria nodorum SN15]
  misc_feature (17)..(338): NCBI GI: 46114518 Blast Desc: FG03101.1 [Gibberella zeae PH-1]
  misc_feature (17)..(333): NCBI GI: 256723628 Blast Desc: NECHADRAFT_52191 [Nectria haematococca mpVI 77-13-4]
  misc_feature (17)..(336): NCBI GI: 169763546 Blast Desc: [Aspergillus oryzae RIB40] gi|83770701|dbj|BAE60834.1| protein product [Aspergillus oryzae]
  misc_feature (16)..(336): NCBI GI: 145231329 Blast Desc: An02g00110 [Aspergillus niger] gi|134056051|emb|CAK96226.1| protein product [Aspergillus niger]
  misc_feature (13)..(341): NCBI GI: 189209634 Blast Desc: conserved [Pyrenophora tritici-repentis Pt-1C-BFP] gi|187977242|gb|EDU43868.1| conserved [Pyrenophora tritici-repentis Pt-1C-BFP]
  misc_feature (19)..(336): NCBI GI: 116191547 Blast Desc: CHGG_05491 [Chaetomium globosum CBS 148.51] gi|88181404|gb|EAQ88872.1| CHGG_05491 [Chaetomium globosum CBS 148.51]
  misc_feature (19)..(336): NCBI GI: 171680914 Blast Desc: protein product [Podospora anserina] gi|170940415|emb|CAP65641.1| protein product [Podospora anserina]
  misc_feature (17)..(336): NCBI GI: 169773071 Blast Desc: [Aspergillus oryzae RIB40] gi|83768865|dbj|BAE59002.1| protein product [Aspergillus oryzae]
  misc_feature (20)..(336): NCBI GI: 145245447 Blast Desc: An11g10340 [Aspergillus niger] gi|134079691|emb|CAK97117.1| protein product [Aspergillus niger]
MAHVPPPAIALPPSITFDSIRLETKPTASIECSQVQSKGDAGYSDIIVVFLNGLIAPQSLWLPVMSMMLRHLKLSSDGGGLGDSSQPQLLAYDRYGQGRTIDRDPGDEGKEEGYGHNVLDVVHDLRQLIRQVTDPTLAIPKRVVFIANSIGCAIARLYAQNYPGSVMGMLFLDSMMANTDFVSIFPDPDSPDFDPESLPKGVTSEMLYETRRKFRAAFHPSVKNAEGLDRRDLATLLPYANKPHLQSGAVSPFVTVVGHDPEWFARESLEGSMETPLVISENYTNPTWHLYNQGLTEITDADKSSGPIIAENCGHFVQRDNPMLVANLACQLLSKVTEHAQVD

SEQ ID NO: 15224 - DNA, 1699 bp, Muscodor strobelii
  misc_feature: SGI EST ID NO. CUFF.36215.0
  misc_feature: Variant of the nucleotide sequence at SEQ ID NO 15222
ttggaacatgcggctagtgttaccctgcaagaaccacgtcacttctcctgcacaccccaacttgcctacctaccttggtctttgcgtctcgaatcacttcagttactatattgttgctgatagtgaactgggggtagaatacgcaaaacgtacctctcaattaacaacttccgtttcataacgtggataacggtctttatcagtttcctttcaatcacctcgtattccatcaacaatggcacatgtgccgccaccagcaattgccttacctccatctataacgttcgactccatcagacttgaaacaaaaccaaccgcatctatagaatgctctcaggtacagagcaagggtgatgctggatactcggacatcatcgttgtctttcttaatgggcttattgctccgcaatcgttgtggctccctgtcatgtcaatgatgctgcgtcatctcaagctctcatcggatggcggtggacttggtgattcgtcacaacctcagttgctcgcatatgatcgttatggccaaggaaggacgattgatcgtgatccgggcgacgagggaaaagaggagggctacggccataacgtacttgacgttgtacatgacctacgtcagctcatcagacaagtaactgacccaacacttgccatccctaagcgagtcgttttcattgccaactctatcggctgcgcaattgctcgtctctatgctcagaactatccaggaagcgttatgggtatgctattcctagacagcatgatggcaaacacagactttgtcagcatattcccggatccagatagccccgattttgatcctgaatccttaccaaaaggcgttacatctgagatgctgtatgagacgcgacggaagttcagggctgcttttcatccgagcgtgaagaatgctgagggtctcgatagacgcgacctggcaacacttttaccatatgcaaacaaaccgcacttgcagtctggcgccgtatcgccttttgtcactgttgttggccacgatcccgagtggtttgctcgggaaagtcttgagggatcgatggaaacaccccttgtcatatctgaaaactataccaatcccacgtggcacctgtacaatcagggattgacagaaatcacagatgctgacaagtcatctggccctattattgccgaaaattgcggtcattttgttcaaagagataacccaatgctagttgctaacttggcatgtcagttactgtccaaggttacggagcatgcacaagtggactaatcctcaaccacatctatttcattcaacatatctgaagattctcacaagatttgcgagaaggtgaaaagccagtcaactgcctaagaagtaaggttatgtatatctcaactatgagaattgtcatagggaaccaagataaaggacatatacgagaccgggacaagggcatgaagtgccctacgagaatagcctagccaagagtgatgagatcataccacgtacaaggtgcgcgtggccagcttattggaaacgttgggagccaatcttattcccaatgcactctttaaatattcgccgtctaacctattaacgagccatcctatctctataacatcatattgatcggcgatcagtaaagcttgtggacaatcatttctattcagtgtaatcgactaggtaatcgacaatttcgatatcttgctgccattcaat

SEQ ID NO: 15225 - DNA, 999 bp, Muscodor strobelii
  misc_feature: SGI cDNA ID NO. 565038
  misc_feature: Encodes the peptide sequence at SEQ ID NO 15226
atgaagtggcttacagcatcagggcttgcgctcgtgggatctgtggaggctggccttcgctttcaatgttccacgttgactattcagcgtcttgatccagtggtccagcctggttcagagccgtcttcacatcttcatcacatcgtcggtggaaatgcgttcaatgccaccatggagggagacgtgagctccagggcgacctgtaccacgtgcgagatgtccgaggatttctcgaattactggacggctgtcttatacttcaagcacccaacgaacggttcctatcacaaggttgatgtggttcccgtcaacccgggcaatcttgatggctactcgggaaccaaagggggacttactgtctactatactcagttcgatttgacgagagacaacattgcgcaacagccagtgcacagtttccaacctggtttccgcatgactgttggtagcccgagtcaaactggtgctcctcacgttggcctgcgctaccagtgtttgtcccaaggcggtggacgaggaccagaaatggcagacttccctaagacgccttgcgccggcggcatttttgtcaccaaccacttcccagcgtgctgggatggcaagaacctggacagtcctgaccaccagtcgcacatgtataatacaatcaccttggacggcttcaccaacgctccagcctgcccggcctcccaccctatgcgaatgccacaagtaacctatgagacagtatgggacaccactaagttcaacagcttgtggccatctggcggtgccaatcctttcgtctggagtttcgaaggcacaactatggttaatggagctggcacccacgccgattacatgtttggctggaaaggcgacgccttgcagaaggccatggataagtcagagtgtttctacgacggttgcggctctatcaagaagcagcagatgtcagtgggccaacaatgcaaagtcccagatatggttggggagccagtcgacggctgtacgtattga

SEQ ID NO: 15226 - protein, 332 aa, Muscodor strobelii
  misc_feature: SGI Peptide ID NO. 565038
  misc_feature (32)..(284): Pfam Id: PF09362 Pfam Desc: Domain of function (DUF1996)
  misc_feature (1)..(332): NCBI GI: 171680022 Blast Desc: protein product [Podospora anserina] gi|170939637|emb|CAP64864.1| protein product [Podospora anserina]
  misc_feature (1)..(329): NCBI GI: 116208234 Blast Desc: CHGG_03410 [Chaetomium globosum CBS 148.51] gi|88184007|gb|EAQ91475.1| CHGG_03410 [Chaetomium globosum CBS 148.51]
  misc_feature (1)..(329): NCBI GI: 169611997 Blast Desc: SNOG_09113 [Phaeosphaeria nodorum SN15] gi|111062185|gb|EAT83305.1| SNOG_09113 [Phaeosphaeria nodorum SN15]
  misc_feature (1)..(329): NCBI GI: 116179322 Blast Desc: CHGG_00289 [Chaetomium globosum CBS 148.51] gi|88184586|gb|EAQ92054.1| CHGG_00289 [Chaetomium globosum CBS 148.51]
  misc_feature (1)..(330): NCBI GI: 164425163 Blast Desc: NCU11317 [Neurospora crassa OR74A] gi|157070815|gb|EAA33351.2| conserved [Neurospora crassa OR74A]
  misc_feature (1)..(329): NCBI GI: 116178994 Blast Desc: conserved [Chaetomium globosum CBS 148.51] gi|88184422|gb|EAQ91890.1| conserved [Chaetomium globosum CBS 148.51]
  misc_feature (1)..(332): NCBI GI: 171680783 Blast Desc: protein product [Podospora anserina] gi|27764287|emb|CAD60567.1| protein product [Podospora anserina] gi|170940019|emb|CAP65245.1| protein product [Podospora anserina]
  misc_feature (1)..(327): NCBI GI: 169868148 Blast Desc: CC1G_10434 [Coprinopsis cinerea okayama7#130] gi|116498252|gb|EAU81147.1| CC1G_10434 [Coprinopsis cinerea okayama7#130]
  misc_feature (20)..(329): NCBI GI: 39975065 Blast Desc: MGG_00321 [Magnaporthe grisea 70-15] gi|145018793|gb|EDK03072.1| MGG_00321 [Magnaporthe grisea 70-15]
  misc_feature (9)..(332): NCBI GI: 171685460 Blast Desc: protein product [Podospora anserina] gi|170942691|emb|CAP68344.1| protein product [Podospora anserina]
MKWLTASGLALVGSVEAGLRFQCSTLTIQRLDPVVQPGSEPSSHLHHIVGGNAFNATMEGDVSSRATCTTCEMSEDFSNYWTAVLYFKHPTNGSYHKVDVVPVNPGNLDGYSGTKGGLTVYYTQFDLTRDNIAQQPVHSFQPGFRMTVGSPSQTGAPHVGLRYQCLSQGGGRGPEMADFPKTPCAGGIFVTNHFPACWDGKNLDSPDHQSHMYNTITLDGFTNAPACPASHPMRMPQVTYETVWDTTKFNSLWPSGGANPFVWSFEGTTMVNGAGTHADYMFGWKGDALQKAMDKSECFYDGCGSIKKQQMSVGQQCKVPDMVGEPVDGCTY

SEQ ID NO: 15227 - DNA, 303 bp, Muscodor strobelii
  misc_feature: SGI cDNA ID NO. 565039
  misc_feature: Encodes the peptide sequence at SEQ ID NO 15228
atgcacttcctcaccattgccgccgccgtgctcgccgctgcacatggggctttcgccgtcgatgtgcagaaggctatcatcatgacatttccttccgagacgtccgatgatgtcgtcagccgtgcgatgaacgacattcgaaaggccggcggagtcataacccacgagtacaagctgatcaagggtttcgcagccaaggcaccgcaaaaaatcttagacaccgttacagcttggagtacggagttcaacgccatcgtcgaagaagatcagatggtcgaaatctctgactcaacacgtcactag

SEQ ID NO: 15228 - protein, 100 aa, Muscodor strobelii
  misc_feature: SGI Peptide ID NO. 565039
  misc_feature (1)..(92): NCBI GI: 171688764 Blast Desc: protein product [Podospora anserina] gi|170944344|emb|CAP70454.1| protein product [Podospora anserina]
  misc_feature (1)..(92): NCBI GI: 116199681 Blast Desc: CHGG_07996 [Chaetomium globosum CBS 148.51] gi|88179275|gb|EAQ86743.1| CHGG_07996 [Chaetomium globosum CBS 148.51]
  misc_feature (24)..(96): NCBI GI: 156062954 Blast Desc: [Sclerotinia sclerotiorum 1980] gi|154696929|gb|EDN96667.1| [Sclerotinia sclerotiorum 1980]
  misc_feature (3)..(95): NCBI GI: 39973579 Blast Desc: [Magnaporthe grisea 70-15] gi|145017979|gb|EDK02258.1| [Magnaporthe grisea 70-15]
  misc_feature (3)..(95): NCBI GI: 119196287 Blast Desc: [Coccidioides immitis RS]
  misc_feature (24)..(95): NCBI GI: 240110937 Blast Desc: CPC735_037990 [Coccidioides posadasii C735 delta SOWgp]
  misc_feature (6)..(95): NCBI GI: 212538055 Blast Desc: conserved [Penicillium marneffei ATCC 18224] gi|210068925|gb|EEA23016.1| conserved [Penicillium marneffei ATCC 18224]
  misc_feature (1)..(92): NCBI GI: 47117605 Blast Desc: YBG3_NEUCR RecName: Full=Uncharacterized protein B24G3.190; Flags: Precursor gi|18376159|emb|CAD21234.1| related to serine proteinase inhibitor IA-2 [Neurospora crassa]
  misc_feature (1)..(92): NCBI GI: 85078899 Blast Desc: NCU01548 [Neurospora crassa OR74A] gi|28917306|gb|EAA27015.1| [Neurospora crassa OR74A]
  misc_feature (1)..(94): NCBI GI: 261192930 Blast Desc: BDBG_06051 [Ajellomyces dermatitidis SLH14081] gi|239589006|gb|EEQ71649.1| BDBG_06051 [Ajellomyces dermatitidis SLH14081] gi|239613590|gb|EEQ90577.1| BDCG_05697 [Ajellomyces
MHFLTIAAAVLAAAHGAFAVDVQKAIIMTFPSETSDDVVSRAMNDIRKAGGVITHEYKLIKGFAAKAPQKILDTVTAWSTEFNAIVEEDQMVEISDSTRH

SEQ ID NO: 15229 - DNA, 882 bp, Muscodor strobelii
  misc_feature: SGI EST ID NO. CUFF.36225.0
  misc_feature: Variant of the nucleotide sequence at SEQ ID NO 15227
gcttcacacaatcgctttcttactcttctctacttctcatcataccaacattgcgcgcttctctgccccgacgctcgatttcatccgaaatcgtcccaacacgatagtcgaagaacttgagtaaaccacggttagacaccggcgattccgcatttccgtatcgcgacccgaggtgctccactgcttaataaccactacgtcataccctcgaacgacacgatgcacttcctcaccattgccgccgccgtgctcgccgctgcacatggggctttcgccgtcgatgtgcagaaggctatcatcatgacatttccttccgagacgtccgatgatgtcgtcagccgtgcgatgaacgacattcgaaaggccggcggagtcataacccacgagtacaagctgatcaagggtttcgcagccaaggcaccgcaaaaaatcttagacaccgttacagcttggagtacggagttcaacgccatcgtcgaagaagatcagatggtcgaaatctctgactcaacacgtcactagaggccacactcttataacaaaaagtcgacattgctagaaagtggtaaaatggggacgagccacgtggcagctggcctttttgataccctctttttgcaaatagaatgcccttgaagaacaagatgctaaattggattgggtttgcgtacatatgatagtggcggtcctatcgactctacctggcgttgggggattatccattgcttggttggcatggtcgatagaatactttcatcatcaattcattaacagtatcaaattacatgtatcggctattctgtaatgcccatttcattcactgtgacatgtccgatacgatgtgggtcaaaagacagagtgagcggcaatcggtgtcttaat

SEQ ID NO: 15230 - DNA, 2769 bp, Muscodor strobelii
  misc_feature: SGI cDNA ID NO. 565040
  misc_feature: Encodes the peptide sequence at SEQ ID NO 15231
atgataccctcaatacactcccaggccacccaggcggccctgctcgaatgggcacacgccatgctcgtcctgcttccatccaagcgcgagaccgctaccaagatccacaagatcgaggacctgttcgacggcgccgccttctctctccttctcgagatcatggacgccaggtacagccccgaccgcttcgatcaaagccttgctgcttccaagagcgggaatgagaggaggagaaacatgcacataatatatatgggcctgatggactttgccagacgagtttgccccaaggttgaacctctgatcaaggccatcgatttccaggccctcgataagtcgcccaccagagcaggcatgatagagattcttgtcgtttttgtgtgcgctgcttgcttcatggatgatgacaacgtgcaatatgtcgatctcattcaaaagttggatagcgaatatcagcagtccatcttcactatccttcaggaggttcaggctaagattgacgaggggattccggctgttgagaacgacaatgctgccgcggtgaaggctgcagacttggatgccgaccttgcacacgaagccgccattgcagacttgaagcgcgaggccgacgacgccaagcgaacagctggtgggctgaagcttcgactggatcgacttcaggataactacgacgagctggtgaggaagcacgaagacattcagactgagaacgaaaggctgcaaaaacaaatcgagtccgaggcgggaaatttcaaccgacatcgtcttcagcaacatgtcaaagagaacgagacgctgatcgccaatctggaaaacgagagaaatgctttgatcgaggagaagggaagacttctgaaagacaaagctcgcctagaggctgcggcgcagaaggcagaggcattagttgacgagaaccaggagctcaagtctaagaacgaagagttgtccaaaaaagccaacatggctgacaatctacggaagaaagttgagtcgaccaaacatttcgaagctgagctcaacgcattgcgtaacgacaagatagatctccacagagcttacgaacaactcgccaccgcgaacaggaaagtcaagaccttgagagaagaaggcgaggcgtatgcttctaaaatgcaaggctacgagatggatattcacgacatgcgagaacagaaggccatgatccaatcgactaactatactctgatggctcgtgtgaaagaactagaaacacgtagccaaaatgacgagatcgtggtcaaagatctccaagagaaggtgatgatgctggaccctggagctgccatggacgaccccctggctgtgcgccctacatccctcgaggacgagctgagcgaatcaaataatacgatatctatgagaagtctcgaagtgcaaagactccaagcggagaacgccgtcctcaaaagcaccattgggtcggagacagacaaaggcgctcttgtgcaagagatggaagatttgcgggcttcccgtcaagccgttcaagatgggtacaatgacatatttgagaaattcaccgtgggccagaagcagcttgacacactcattcaaaatatgagcgaaaaaggagaagaagcttatgcgaacctacgaacccaagtgctagccgaacaaagccgctcaaagcagttcgaaaggcaactcgagtctgtgaaagaacagcttgccgacaaagagcgcgctctgctggaagctcgtggcgattgtaaggccatattcgtggagtacgtcatgaacggggatgatgctgacgatgaggaaaaagtgaacgctgtagaaaaatcgagcgtggatgccctaaccgaattgaagaacacggatggcatgcttgcgcaatcgctacgcgcggaactcgaagtcgagcggaggcggtacaagttgctgaaagatgagcaagaagctcagcagaagcaacttttgaccgcctttatcgaaaaagacgagctccgccgcgaggccgagcgtgccaatctagatcttcaaaaggcggccgacgggcagaccgtgagcacggattacatcaaacaatccgaaaagatagaaaagctccgaacacgctacaagcagctacagcaggtgagtcacatttcttcaaattcgtctgtcgcttcgtgcgatgacgacgacgagggggttatacgtgtggaagagaagcgtcgcacgctctggcaaaccttgagtccgtgggctgttgcaacatccgagtccactcaacccggctttcatccctacatgatgaaagaggacggtagctataccgtcccgtcgcgtccgagttcgagcatgagtgtccgcagcgtcgcgagctctacccatagctcgacgagtcgtgccagctctggatattgttcaccacgccctatgagcgcggaactctctaggactcctgttaccggagaggccgaaggccacacgccgaactcgaagcctagtggctggtctaactggcttggacttcggtcacctatgtctggctgtcaatacgagcaatccgaagtcaagggccgcgagcttgaacgaacgctcaaagccgtccgcgctggcacagaagccagcgagaagaaggcccaaaccgatcaaattatcaagaatctgcagcgcgagaatgccatgatcacgacggcgtggtatgatctttcgagtagactacagagtaatcatgtggtgctgcagaggcgtagtgatgcgccgaagagttggttgaatagacaaagacaattggttaatgctacgccacggagatag

SEQ ID NO: 15231 - protein, 922 aa, Muscodor strobelii
  misc_feature: SGI Peptide ID NO. 565040
  misc_feature (38)..(694): NCBI GI: 256729183 Blast Desc: NECHADRAFT_80173 [Nectria haematococca mpVI 77-13-4]
  misc_feature (35)..(700): NCBI GI: 46138443 Blast Desc: FG10736.1 [Gibberella zeae PH-1]
  misc_feature (6)..(697): NCBI GI: 85078904 Blast Desc: NCU01549 [Neurospora crassa OR74A] gi|18376160|emb|CAD21235.1| related to hook3 protein [Neurospora crassa] gi|28917307|gb|EAA27016.1| [Neurospora crassa OR74A]
  misc_feature (19)..(698): NCBI GI: 145610605 Blast Desc: MGG_01063 [Magnaporthe grisea 70-15] gi|145017980|gb|EDK02259.1| MGG_01063 [Magnaporthe grisea 70-15]
  misc_feature (6)..(697): NCBI GI: 116199683 Blast Desc: CHGG_07997 [Chaetomium globosum CBS 148.51] gi|88179276|gb|EAQ86744.1| CHGG_07997 [Chaetomium globosum CBS 148.51]
  misc_feature (7)..(821): NCBI GI: 261355464 Blast Desc: conserved [Verticillium albo-atrum VaMs.102]
  misc_feature (6)..(697): NCBI GI: 171688766 Blast Desc: protein product [Podospora anserina] gi|170944345|emb|CAP70455.1| protein product [Podospora anserina]
  misc_feature (835)..(922): NCBI GI: 171688766 Blast Desc: protein product [Podospora anserina] gi|170944345|emb|CAP70455.1| protein product [Podospora anserina]
  misc_feature (835)..(922): NCBI GI: 116199683 Blast Desc: CHGG_07997 [Chaetomium globosum CBS 148.51] gi|88179276|gb|EAQ86744.1| CHGG_07997 [Chaetomium globosum CBS 148.51]
  misc_feature (806)..(921): NCBI GI: 256729183 Blast Desc: NECHADRAFT_80173 [Nectria haematococca mpVI 77-13-4]
MIPSIHSQATQAALLEWAHAMLVLLPSKRETATKIHKIEDLFDGAAFSLLLEIMDARYSPDRFDQSLAASKSGNERRRNMHIIYMGLMDFARRVCPKVEPLIKAIDFQALDKSPTRAGMIEILVVFVCAACFMDDDNVQYVDLIQKLDSEYQQSIFTILQEVQAKIDEGIPAVENDNAAAVKAADLDADLAHEAAIADLKREADDAKRTAGGLKLRLDRLQDNYDELVRKHEDIQTENERLQKQIESEAGNFNRHRLQQHVKENETLIANLENERNALIEEKGRLLKDKARLEAAAQKAEALVDENQELKSKNEELSKKANMADNLRKKVESTKHFEAELNALRNDKIDLHRAYEQLATANRKVKTLREEGEAYASKMQGYEMDIHDMREQKAMIQSTNYTLMARVKELETRSQNDEIVVKDLQEKVMMLDPGAAMDDPLAVRPTSLEDELSESNNTISMRSLEVQRLQAENAVLKSTIGSETDKGALVQEMEDLRASRQAVQDGYNDIFEKFTVGQKQLDTLIQNMSEKGEEAYANLRTQVLAEQSRSKQFERQLESVKEQLADKERALLEARGDCKAIFVEYVMNGDDADDEEKVNAVEKSSVDALTELKNTDGMLAQSLRAELEVERRRYKLLKDEQEAQQKQLLTAFIEKDELRREAERANLDLQKAADGQTVSTDYIKQSEKIEKLRTRYKQLQQVSHISSNSSVASCDDDDEGVIRVEEKRRTLWQTLSPWAVATSESTQPGFHPYMMKEDGSYTVPSRPSSSMSVRSVASSTHSSTSRASSGYCSPRPMSAELSRTPVTGEAEGHTPNSKPSGWSNWLGLRSPMSGCQYEQSEVKGRELERTLKAVRAGTEASEKKAQTDQIIKNLQRENAMITTAWYDLSSRLQSNHVVLQRRSDAPKSWLNRQRQLVNATPRR

SEQ ID NO: 15232 - DNA, 3249 bp, Muscodor strobelii
  misc_feature: SGI EST ID NO. CUFF.36288.5
  misc_feature: Variant of the nucleotide sequence at SEQ ID NO 15230
cgtaagtctcagcttctcccgcccttccgtacctacttacgagaacctcttattgtctctttctttgtaagcttggctagccatcgcgatcttccttgcatcttccatatcaacgccgacttgacatcaccacgacatcgtcctttgatctcaaggaacacaacccagactgacacttctttgagcacagggcctcgatcgcccacccgacgtcaccttggcacaatgcgccttgtgctcgactgaacaacgacattctcgccgacaatgaacccgacgacgtctttgtaaacactccctacttctttactcgacccttgcgccgacacgaccccgagcattggttttactgatatcatgagttctggaactcacaatagactactattctcgccaacaacactctttttgaccaaactactataatcactggtgtttctgagcgcttcttattcccttgtctatagctgcccttcttgttgtgccactatctgccagagcacctccatcttactaccatacccgtattcacgtcgtagaccaaccccggaccagtccgtatacgcagaccagaccaacccgacactatgataccctcaatacactcccaggccacccaggcggccctgctcgaatgggcacacgccatgctcgtcctgcttccatccaagcgcgagaccgctaccaagatccacaagatcgaggacctgttcgacggcgccgccttctctctccttctcgagatcatggacgccaggtacagccccgaccgcttcgatcaaagccttgctgcttccaagagcgggaatgagaggaggagaaacatgcacataatatatatgggcctgatggactttgccagacgagtttgccccaaggttgaacctctgatcaaggccatcgatttccaggccctcgataagtcgcccaccagagcaggcatgatagagattcttgtcgtttttgtgtgcgctgcttgcttcatggatgatgacaacgtgcaatatgtcgatctcattcaaaagttggatagcgaatatcagcagtccatcttcactatccttcaggaggttcaggctaagattgacgaggggattccggctgttgagaacgacaatgctgccgcggtgaaggctgcagacttggatgccgaccttgcacacgaagccgccattgcagacttgaagcgcgaggccgacgacgccaagcgaacagctggtgggctgaagcttcgactggatcgacttcaggataactacgacgagctggtgaggaagcacgaagacattcagactgagaacgaaaggctgcaaaaacaaatcgagtccgaggcgggaaatttcaaccgacatcgtcttcagcaacatgtcaaagagaacgagacgctgatcgccaatctggaaaacgagagaaatgctttgatcgaggagaagggaagacttctgaaagacaaagctcgcctagaggctgcggcgcagaaggcagaggcattagttgacgagaaccaggagctcaagtctaagaacgaagagttgtccaaaaaagccaacatggctgacaatctacggaagaaagttgagtcgaccaaacatttcgaagctgagctcaacgcattgcgtaacgacaagatagatctccacagagcttacgaacaactcgccaccgcgaacaggaaagtcaagaccttgagagaagaaggcgaggcgtatgcttctaaaatgcaaggctacgagatggatattcacgacatgcgagaacagaaggccatgatccaatcgactaactatactctgatggctcgtgtgaaagaactagaaacacgtagccaaaatgacgagatcgtggtcaaagatctccaagagaaggtgatgatgctggaccctggagctgccatggacgaccccctggctgtgcgccctacatccctcgaggacgagctgagcgaatcaaataatacgatatctatgagaagtctcgaagtgcaaagactccaagcggagaacgccgtcctcaaaagcaccattgggtcggagacagacaaaggcgctcttgtgcaagagatggaagatttgcgggcttcccgtcaagccgttcaagatgggtacaatgacatatttgagaaattcaccgtgggccagaagcagcttgacacactcattcaaaatatgagcgaaaaaggagaagaagcttatgcgaacctacgaacccaagtgctagccgaacaaagccgctcaaagcagttcgaaaggcaactcgagtctgtgaaagaacagcttgccgacaaagagcgcgctctgctggaagctcgtggcgatttgaacgctgtagaaaaatcgagcgtggatgccctaaccgaattgaagaacacggatggcatgcttgcgcaatcgctacgcgcggaactcgaagtcgagcggaggcggtacaagttgctgaaagatgagcaagaagctcagcagaagcaacttttgaccgcctttatcgaaaaagacgagctccgccgcgaggccgagcgtgccaatctagatcttcaaaaggcggccgacgggcagaccgtgagcacggattacatcaaacaatccgaaaagatagaaaagctccgaacacgctacaagcagctacagcagcaatacgagcaatccgaagtcaagggccgcgagcttgaacgaacgctcaaagccgtccgcgctggcacagaagccagcgagaagaaggcccaaaccgatcaaattatcaagaatctgcagcgcgagaatgccatgatcacgacggcgtggtatgatctttcgagtagactacagagtaatcatgtggtgctgcagaggcgtagtgatgcgccgaagagttggttgaatagacaaagacaattggttaatgctacgccacggagataggaactcccgcaggtctgagtattaacttctttttagcttggagatggaaatgtgaagaggatggtatggagctccgtacagaaatcctcagaaagccttatatcgagcaagatccaacaatggctgatttcacacactgctttcacttagaatgtgttgtgtggacgagatgacagtgaatggagcaagagctcgtcggtttcgttgattttcttgaaaagctgtatatagtgatacatatattctcagagtattagactataccccgttttttcgaatataggagttacggacctggcgcctatcggcccaatgattggaaattctgcttccacacactcgagttacgaatgat

SEQ ID NO: 15233 - DNA, 2868 bp, Muscodor strobelii
  misc_feature: SGI cDNA ID NO. 565041
  misc_feature: Encodes the peptide sequence at SEQ ID NO 15234
atgataccctcaatacactcccaggccacccaggcggccctgctcgaatgggcacacgccatgctcgtcctgcttccatccaagcgcgagaccgctaccaagatccacaagatcgaggacctgttcgacggcgccgccttctctctccttctcgagatcatggacgccaggtacagccccgaccgcttcgatcaaagccttgctgcttccaagagcgggaatgagaggaggagaaacatgcacataatatatatgggcctgatggactttgccagacgagtttgccccaaggttgaacctctgatcaaggccatcgatttccaggccctcgataagtcgcccaccagagcaggcatgatagagattcttgtcgtttttgtgtgcgctgcttgcttcatggatgatgacaacgtgcaatatgtcgatctcattcaaaagttggatagcgaatatcagcagtccatcttcactatccttcaggaggttcaggctaagattgacgaggggattccggctgttgagaacgacaatgctgccgcggtgaaggctgcagacttggatgccgaccttgcacacgaagccgccattgcagacttgaagcgcgaggccgacgacgccaagcgaacagctggtgggctgaagcttcgactggatcgacttcaggataactacgacgagctggtgaggaagcacgaagacattcagactgagaacgaaaggctgcaaaaacaaatcgagtccgaggcgggaaatttcaaccgacatcgtcttcagcaacatgtcaaagagaacgagacgctgatcgccaatctggaaaacgagagaaatgctttgatcgaggagaagggaagacttctgaaagacaaagctcgcctagaggctgcggcgcagaaggcagaggcattagttgacgagaaccaggagctcaagtctaagaacgaagagttgtccaaaaaagccaacatggctgacaatctacggaagaaagttgagtcgaccaaacatttcgaagctgagctcaacgcattgcgtaacgacaagatagatctccacagagcttacgaacaactcgccaccgcgaacaggaaagtcaagaccttgagagaagaaggcgaggcgtatgcttctaaaatgcaaggctacgagatggatattcacgacatgcgagaacagaaggccatgatccaatcgactaactatactctgatggctcgtgtgaaagaactagaaacacgtagccaaaatgacgagatcgtggtcaaagatctccaagagaaggtgatgatgctggaccctggagctgccatggacgaccccctggctgtgcgccctacatccctcgaggacgagctgagcgaatcaaataatacgatatctatgagaagtctcgaagtgcaaagactccaagcggagaacgccgtcctcaaaagcaccattgggtcggagacagacaaaggcgctcttgtgcaagagatggaagatttgcgggcttcccgtcaagccgttcaagatgggtacaatgacatatttgagaaattcaccgtgggccagaagcagcttgacacactcattcaaaatatgagcgaaaaagggttagttacggtgctgcagaaatgctacgaaatggccccggacaccaaatggctgatgtcggactacttcagagaagaagcttatgcgaacctacgaacccaagtgctagccgaacaaagccgctcaaagcagttcgaaaggcaactcgagtctgtgaaagaacagcttgccgacaaagagcgcgctctgctggaagctcgtggcgattgtaaggccatattcgtggagtacgtcatgaacggggatgatgctgacgatgaggaaaaagtgaacgctgtagaaaaatcgagcgtggatgccctaaccgaattgaagaacacggatggcatgcttgcgcaatcgctacgcgcggaactcgaagtcgagcggaggcggtacaagttgctgaaagatgagcaagaagctcagcagaagcaacttttgaccgcctttatcgaaaaagacgagctccgccgcgaggccgagcgtgccaatctagatcttcaaaaggcggccgacgggcagaccgtgagcacggattacatcaaacaatccgaaaagatagaaaagctccgaacacgctacaagcagctacagcaggtgagtcacatttcttcaaattcgtctgtcgcttcgtgcgatgacgacgacgagggggttatacgtgtggaagagaagcgtcgcacgctctggcaaaccttgagtccgtgggctgttgcaacatccgagtccactcaacccggctttcatccctacatgatgaaagaggacggtagctataccgtcccgtcgcgtccgagttcgagcatgagtgtccgcagcgtcgcgagctctacccatagctcgacgagtcgtgccagctctggatattgttcaccacgccctatgagcgcggaactctctaggactcctgttaccggagaggccgaaggccacacgccgaactcgaagcctagtggctggtctaactggcttggacttcggtcacctatgtctggctgtcaatacgagcaatccgaagtcaagggccgcgagcttgaacgaacgctcaaagccgtccgcgctggcacagaagccagcgagaagaaggcccaaaccgatcaaattatcaagaatctgcagcgcgagaatgccatgatcacgacggcgtggtatgatctttcgagtagactacagagtaatcatgtggtgctgcagaggcgtagtgatgcgccgaagagttggttgaatagacaaagacaattggttaatggtaggttcattcttttctcgttatctttgttctgtttcgtttga

SEQ ID NO: 15234 - protein, 955 aa, Muscodor strobelii
  misc_feature: SGI Peptide ID NO. 565041
  misc_feature (38)..(718): NCBI GI: 256729183 Blast Desc: NECHADRAFT_80173 [Nectria haematococca mpVI 77-13-4]
  misc_feature (35)..(724): NCBI GI: 46138443 Blast Desc: FG10736.1 [Gibberella zeae PH-1]
  misc_feature (6)..(721): NCBI GI: 116199683 Blast Desc: CHGG_07997 [Chaetomium globosum CBS 148.51] gi|88179276|gb|EAQ86744.1| CHGG_07997 [Chaetomium globosum CBS 148.51]
  misc_feature (7)..(845): NCBI GI: 261355464 Blast Desc: conserved [Verticillium albo-atrum VaMs.102]
  misc_feature (6)..(721): NCBI GI: 85078904 Blast Desc: NCU01549 [Neurospora crassa OR74A] gi|18376160|emb|CAD21235.1| related to hook3 protein [Neurospora crassa] gi|28917307|gb|EAA27016.1| [Neurospora crassa OR74A]
  misc_feature (19)..(722): NCBI GI: 145610605 Blast Desc: MGG_01063 [Magnaporthe grisea 70-15] gi|145017980|gb|EDK02259.1| MGG_01063 [Magnaporthe grisea 70-15]
  misc_feature (830)..(954): NCBI GI: 256729183 Blast Desc: NECHADRAFT_80173 [Nectria haematococca mpVI 77-13-4]
  misc_feature (6)..(721): NCBI GI: 171688766 Blast Desc: protein product [Podospora anserina] gi|170944345|emb|CAP70455.1| protein product [Podospora anserina]
  misc_feature (829)..(954): NCBI GI: 46138443 Blast Desc: FG10736.1 [Gibberella zeae PH-1]
  misc_feature (859)..(947): NCBI GI: 85078904 Blast Desc: NCU01549 [Neurospora crassa OR74A] gi|18376160|emb|CAD21235.1| related to hook3 protein [Neurospora crassa] gi|28917307|gb|EAA27016.1| [Neurospora crassa OR74A]
MIPSIHSQATQAALLEWAHAMLVLLPSKRETATKIHKIEDLFDGAAFSLLLEIMDARYSPDRFDQSLAASKSGNERRRNMHIIYMGLMDFARRVCPKVEPLIKAIDFQALDKSPTRAGMIEILVVFVCAACFMDDDNVQYVDLIQKLDSEYQQSIFTILQEVQAKIDEGIPAVENDNAAAVKAADLDADLAHEAAIADLKREADDAKRTAGGLKLRLDRLQDNYDELVRKHEDIQTENERLQKQIESEAGNFNRHRLQQHVKENETLIANLENERNALIEEKGRLLKDKARLEAAAQKAEALVDENQELKSKNEELSKKANMADNLRKKVESTKHFEAELNALRNDKIDLHRAYEQLATANRKVKTLREEGEAYASKMQGYEMDIHDMREQKAMIQSTNYTLMARVKELETRSQNDEIVVKDLQEKVMMLDPGAAMDDPLAVRPTSLEDELSESNNTISMRSLEVQRLQAENAVLKSTIGSETDKGALVQEMEDLRASRQAVQDGYNDIFEKFTVGQKQLDTLIQNMSEKGLVTVLQKCYEMAPDTKWLMSDYFREEAYANLRTQVLAEQSRSKQFERQLESVKEQLADKERALLEARGDCKAIFVEYVMNGDDADDEEKVNAVEKSSVDALTELKNTDGMLAQSLRAELEVERRRYKLLKDEQEAQQKQLLTAFIEKDELRREAERANLDLQKAADGQTVSTDYIKQSEKIEKLRTRYKQLQQVSHISSNSSVASCDDDDEGVIRVEEKRRTLWQTLSPWAVATSESTQPGFHPYMMKEDGSYTVPSRPSSSMSVRSVASSTHSSTSRASSGYCSPRPMSAELSRTPVTGEAEGHTPNSKPSGWSNWLGLRSPMSGCQYEQSEVKGRELERTLKAVRAGTEASEKKAQTDQIIKNLQRENAMITTAWYDLSSRLQSNHVVLQRRSDAPKSWLNRQRQLVNGRFILFSLSLFCFV

SEQ ID NO: 15235 - DNA, 3249 bp, Muscodor strobelii; identical to SEQ ID NO: 15232
  misc_feature: SGI EST ID NO. CUFF.36288.5
  misc_feature: Variant of the nucleotide sequence at SEQ ID NO 15233

SEQ ID NO: 15236 - DNA, 3018 bp, Muscodor strobelii
  misc_feature: SGI cDNA ID NO. 565042
  misc_feature: Encodes the peptide sequence at SEQ ID NO 15237
atgataccctcaatacactcccaggccacccaggcggccctgctcgaatgggcacacgccatgctcgtcctgcttccatccaagcgcgagaccgctaccaagatccacaagatcgaggacctgttcgacggcgccgccttctctctccttctcgagatcatggacgccaggtacagccccgaccgcttcgatcaaagccttgctgcttccaagagcgggaatgagaggaggagaaacatgcacataatatatatgggcctgatggactttgccagacgagtttgccccaaggttgaacctctgatcaaggccatcgatttccaggccctcgataagtcgcccaccagagcaggcatgatagagattcttgtcgtttttgtgtgcgctgcttgcttcatggatgatgacaacgtgcaatatgtcgatctcattcaaaagttggatagcgaatatcagcagtccatcttcactatccttcaggaggttcaggctaagattgacgaggggattccggctgttgagaacgacaatgctgccgcggtgaaggctgcagacttggatgccgaccttgcacacgaagccgccattgcagacttgaagcgcgaggccgacgacgccaagcgaacagctggtgggctgaagcttcgactggatcgacttcaggataactacgacgagctggtgaggaagcacgaagacattcagactgagaacgaaaggctgcaaaaacaaatcgagtccgaggcgggaaatttcaaccgacatcgtcttcagcaacatgtcaaagagaacgagacgctgatcgccaatctggaaaacgagagaaatgctttgatcgaggagaagggaagacttctgaaagacaaagctcgcctagaggctgcggcgcagaaggcagaggcattagttgacgagaaccaggagctcaagtctaagaacgaagagttgtccaaaaaagccaacatggctgacaatctacggaagaaagttgagtcgaccaaacatttcgaagctgagctcaacgcattgcgtaacgacaagatagatctccacagagcttacgaacaactcgccaccgcgaacaggaaagtcaagaccttgagagaagaaggcgaggcgtatgcttctaaaatgcaaggctacgagatggatattcacgacatgcgagaacagaaggccatgatccaatcgactaactatactctgatggctcgtgtgaaagaactagaaacacgtagccaaaatgacgagatcgtggtcaaagatctccaagagaaggtgatgatgctggaccctggagctgccatggacgaccccctggctgtgcgccctacatccctcgaggacgagctgagcgaatcaaataatacgatatctatgagaagtctcgaagtgcaaagactccaagcggagaacgccgtcctcaaaagcaccattgggtcggagacagacaaaggcgctcttgtgcaagagatggaagatttgcgggcttcccgtcaagccgttcaagatgggtacaatgacatatttgagaaattcaccgtgggccagaagcagcttgacacactcattcaaaatatgagcgaaaaagggttagttacggtgctgcagaaatgctacgaaatggccccggacaccaaatggctgatgtcggactacttcagagaagaagcttatgcgaacctacgaacccaagtgctagccgaacaaagccgctcaaagcagttcgaaaggcaactcgagtctgtgaaagaacagcttgccgacaaagagcgcgctctgctggaagctcgtggcgattgtaaggccatattcgtggagtacgtcatgaacggggatgatgctgacgatgaggaaaaagtgaacgctgtagaaaaatcgagcgtggatgccctaaccgaattgaagaacacggatggcatgcttgcgcaatcgctacgcgcggaactcgaagtcgagcggaggcggtacaagttgctgaaagatgagcaagaagctcagcagaagcaacttttgaccgcctttatcgaaaaagacgagctccgccgcgaggccgagcgtgccaatctagatcttcaaaaggcggccgacgggcagaccgtgagcacggattacatcaaacaatccgaaaagatagaaaagctccgaacacgctacaagcagctacagcaggtgagtcacatttcttcaaattcgtctgtcgcttcgtgcgatgacgacgacgagggggttatacgtgtggaagagaagcgtcgcacgctctggcaaaccttgagtccgtgggctgttgcaacatccgagtccactcaacccggctttcatccctacatgatgaaagaggacggtagctataccgtcccgtcgcgtccgagttcgagcatgagtgtccgcagcgtcgcgagctctacccatagctcgacgagtcgtgccagctctggatattgttcaccacgccctatgagcgcggaactctctaggactcctgttaccggagaggccgaaggccacacgccgaactcgaagcctagtggctggtctaactggcttggacttcggtcacctatgtctggctgtcaatacgagcaatccgaagtcaagggccgcgagcttgaacgaacgctcaaagccgtccgcgctggcacagaagccagcgagaagaaggcccaaaccgatcaaattatcaagaatctgcagcgcgagaatgccatgatcacgacggcgtggtatgatctttcgagtagactacagagtaatcatgtggtgctgcagaggcgtagtgatgcgccgaagagttggttgaatagacaaagacaattggttaatggtagctacgccacggagataggaactcccgcaggtctgagtattaacttctttttagcttggagatggaaatgtgaagaggatggtatggagctccgtacagaaatcctcagaaagccttatatcgagcaagatccaacaatggctgatttcacacactgctttcacttagaatgtgttgtgtggacgagatga

SEQ ID NO: 15237 - protein, 1005 aa, Muscodor strobelii
  misc_feature: SGI Peptide ID NO. 565042
  misc_feature (38)..(718): NCBI GI: 256729183 Blast Desc: NECHADRAFT_80173 [Nectria haematococca mpVI 77-13-4]
  misc_feature (35)..(724): NCBI GI: 46138443 Blast Desc: FG10736.1 [Gibberella zeae PH-1]
  misc_feature (6)..(721): NCBI GI: 116199683 Blast Desc: CHGG_07997 [Chaetomium globosum CBS 148.51] gi|88179276|gb|EAQ86744.1| CHGG_07997 [Chaetomium globosum CBS 148.51]
  misc_feature (7)..(845): NCBI GI: 261355464 Blast Desc: conserved [Verticillium albo-atrum VaMs.102]
  misc_feature (6)..(721): NCBI GI: 85078904 Blast Desc: NCU01549 [Neurospora crassa OR74A] gi|18376160|emb|CAD21235.1| related to hook3 protein [Neurospora crassa] gi|28917307|gb|EAA27016.1| [Neurospora crassa OR74A]
  misc_feature (19)..(722): NCBI GI: 145610605 Blast Desc: MGG_01063 [Magnaporthe grisea 70-15] gi|145017980|gb|EDK02259.1| MGG_01063 [Magnaporthe grisea 70-15]
  misc_feature (6)..(721): NCBI GI: 171688766 Blast Desc: protein product [Podospora anserina] gi|170944345|emb|CAP70455.1| protein product [Podospora anserina]
  misc_feature (830)..(942): NCBI GI: 256729183 Blast Desc: NECHADRAFT_80173 [Nectria haematococca mpVI 77-13-4]
  misc_feature (859)..(943): NCBI GI: 171688766 Blast Desc: protein product [Podospora anserina] gi|170944345|emb|CAP70455.1| protein product [Podospora anserina]
  misc_feature (829)..(942): NCBI GI: 46138443 Blast Desc: FG10736.1 [Gibberella zeae PH-1]
MIPSIHSQATQAALLEWAHAMLVLLPSKRETATKIHKIEDLFDGAAFSLLLEIMDARYSPDRFDQSLAASKSGNERRRNMHIIYMGLMDFARRVCPKVEPLIKAIDFQALDKSPTRAGMIEILVVFVCAACFMDDDNVQYVDLIQKLDSEYQQSIFTILQEVQAKIDEGIPAVENDNAAAVKAADLDADLAHEAAIADLKREADDAKRTAGGLKLRLDRLQDNYDELVRKHEDIQTENERLQKQIESEAGNFNRHRLQQHVKENETLIANLENERNALIEEKGRLLKDKARLEAAAQKAEALVDENQELKSKNEELSKKANMADNLRKKVESTKHFEAELNALRNDKIDLHRAYEQLATANRKVKTLREEGEAYASKMQGYEMDIHDMREQKAMIQSTNYTLMARVKELETRSQNDEIVVKDLQEKVMMLDPGAAMDDPLAVRPTSLEDELSESNNTISMRSLEVQRLQAENAVLKSTIGSETDKGALVQEMEDLRASRQAVQDGYNDIFEKFTVGQKQLDTLIQNMSEKGLVTVLQKCYEMAPDTKWLMSDYFREEAYANLRTQVLAEQSRSKQFERQLESVKEQLADKERALLEARGDCKAIFVEYVMNGDDADDEEKVNAVEKSSVDALTELKNTDGMLAQSLRAELEVERRRYKLLKDEQEAQQKQLLTAFIEKDELRREAERANLDLQKAADGQTVSTDYIKQSEKIEKLRTRYKQLQQVSHISSNSSVASCDDDDEGVIRVEEKRRTLWQTLSPWAVATSESTQPGFHPYMMKEDGSYTVPSRPSSSMSVRSVASSTHSSTSRASSGYCSPRPMSAELSRTPVTGEAEGHTPNSKPSGWSNWLGLRSPMSGCQYEQSEVKGRELERTLKAVRAGTEASEKKAQTDQIIKNLQRENAMITTAWYDLSSRLQSNHVVLQRRSDAPKSWLNRQRQLVNGSYATEIGTPAGLSINFFLAWRWKCEEDGMELRTEILRKPYIEQDPTMADFTHCFHLECVVWTR

SEQ ID NO: 15238 - DNA, 3249 bp, Muscodor strobelii; identical to SEQ ID NO: 15232
  misc_feature: SGI EST ID NO. CUFF.36288.5
  misc_feature: Variant of the nucleotide sequence at SEQ ID NO 15236

SEQ ID NO: 15239 - DNA, 804 bp, Muscodor strobelii
  misc_feature: SGI cDNA ID NO. 565043
  misc_feature: Reduced expression when VOC is produced
  misc_feature: Encodes the peptide sequence at SEQ ID NO 15240
atgggtgttatcgacagcgagttccaacgtctgcacgatgttgtgaccagcctcgaagagcgcgtaaagcgcctcgagcagcgtcagaccggcagcgctccttcatcagatggtgttcgcatgatcttgatcggtcctcccggagccggcaagggaacgcaagcccccaagatcaaggagaagttctcctgttgccacctggcaaccggtgatatgttgcggtcccaggtcgccaagaagactcccctcggccgggaagccaagaagatcatggatgctggtggccttgtcagcgacgagatcgttattggcatgatcaaggaggagctctccaataacaaggagtgcaagggaggcttcatcctcgacggtttcccgcgcactgtcacccaggccgagtccctcgacaagatgcttgccgagaaggaccagaagcttcagcacgctgttgaactccagatcgacgacggactactcgtctcgagaattactggacgcttggtacatcccgcctcgggtcgttcttaccacagcatcttcaaccctccgaaggagagcatgaaggatgatgtcaccggcgagcctctgatccagcgctctgacgacaatgccgacgccctcaagaagcgtctcgcgacctaccacgctcagaccgctcccgttgttggctactacaagaacaccggcatctggaagggtatcgatgccagccaggagcccggccaggtctggaagagcctgctcaacgtcttcggcgagcactccaagaagagtggaatcatcgccaagttgactggccagtag

SEQ ID NO: 15240 - protein, 267 aa, Muscodor strobelii
  misc_feature: SGI Peptide ID NO. 565043
  misc_feature (43)..(230): Pfam Id: PF00406 Pfam Desc: Adenylate kinase
  misc_feature (166)..(201): Pfam Id: PF05191 Pfam Desc: Adenylate kinase, active site lid
  misc_feature (1)..(266): NCBI GI: 261355463 Blast Desc: adenylate kinase cytosolic [Verticillium albo-atrum VaMs.102]
  misc_feature (1)..(253): NCBI GI: 46138445 Blast Desc: KAD_NEUCR adenylate kinase (ATP-AMP transphosphorylase) [Gibberella zeae PH-1]
  misc_feature (5)..(267): NCBI GI: 156062980 Blast Desc: adenylate kinase [Sclerotinia sclerotiorum 1980] gi|224493058|sp|A7E8H8.1|KAD1_SCLS1 RecName: Full=Adenylate kinase 1; Short=AK 1; AltName: Full=ATP-AMP transphosphorylase 1;
  misc_feature (1)..(264): NCBI GI: 39973591 Blast Desc: MGG_01058 [Magnaporthe grisea 70-15] gi|224493008|sp|A4RD93.1|KAD1_MAGGR RecName: Full=Adenylate kinase 1; Short=AK 1; AltName: Full=ATP-AMP transphosphorylase 1;
  misc_feature (5)..(267): NCBI GI: 154319023 Blast Desc: BC1G_02463 [Botryotinia fuckeliana B05.10] gi|224493047|sp|A6RPU0.1|KAD1_BOTFB RecName: Full=Adenylate kinase 1; Short=AK 1; AltName: Full=ATP-AMP transphosphorylase 1;
  misc_feature (1)..(253): NCBI GI: 256728978 Blast Desc: [Nectria haematococca mpVI 77-13-4]
  misc_feature (1)..(265): NCBI GI: 171688784 Blast Desc: protein product [Podospora anserina] gi|224493054|sp|B2B0E2.1|KAD1_PODAN RecName: Full=Adenylate kinase 1; Short=AK 1; AltName: Full=ATP-AMP transphosphorylase 1;
  misc_feature (1)..(265): NCBI GI: 116199685 Blast Desc: adenylate kinase [Chaetomium globosum CBS 148.51] gi|121780402|sp|Q2GVK6.1|KAD1_CHAGB RecName: Full=Adenylate kinase 1; Short=AK 1; AltName: Full=ATP-AMP transphosphorylase 1;
  misc_feature (1)..(265): NCBI GI: 182628297 Blast Desc: KAD1_NEUCR RecName: Full=Adenylate kinase 1; Short=AK 1; AltName: Full=ATP-AMP transphosphorylase 1; AltName: Full=Adenylate kinase cytosolic and mitochondrial adenylate
  misc_feature (5)..(264): NCBI GI: 225555520 Blast Desc: adenylate kinase cytosolic [Ajellomyces capsulatus G186AR]
  misc_feature (1)..(264): SWISSPROT Homolog: EC 2.7.4.3 Adenylate kinase
  misc_feature: Useful for introducing or modulating the production of volatile compounds
MGVIDSEFQRLHDVVTSLEERVKRLEQRQTGSAPSSDGVRMILIGPPGAGKGTQAPKIKEKFSCCHLATGDMLRSQVAKKTPLGREAKKIMDAGGLVSDEIVIGMIKEELSNNKECKGGFILDGFPRTVTQAESLDKMLAEKDQKLQHAVELQIDDGLLVSRITGRLVHPASGRSYHSIFNPPKESMKDDVTGEPLIQRSDDNADALKKRLATYHAQTAPVVGYYKNTGIWKGIDASQEPGQVWKSLLNVFGEHSKKSGIIAKLTGQ

SEQ ID NO: 15241 - DNA, 1511 bp, Muscodor strobelii
  misc_feature: SGI EST ID NO. CUFF.36390.1
  misc_feature: Variant of the nucleotide sequence at SEQ ID NO 15239
gcgttactgtacagcaatccgatggaagtacctagcatacagtgttacgagtgtggtgagtcgtgacctacgcaacatttttgaacatttgtcgcatcgtctgccgttctcccatccgtcccgaattcgcactcttcttcaacctcgaccaccacccggagctcgtcttcactcttcctcctccctcttctccttgtcattctccctcccctctccactcaaatccgacttgtttgctcttttcctcccgtccgtcttcttttctttgcctcggtccggcctcttcacctgcaccttcgcgttaatttacgatgggtgttatcgacagcgagttccaacgtctgcacgatgttgtgaccagcctcgaagagcgcgtaaagcgcctcgagcagcgtcagaccggcagcgctccttcatcagatggtgttcgcatgatcttgatcggtcctcccggagccggcaagggaacgcaagcccccaagatcaaggagaagttctcctgttgccacctggcaaccggtgatatgttgcggtcccaggtcgccaagaagactcccctcggccgggaagccaagaagatcatggatgctggtggccttgtcagcgacgagatcgttattggcatgatcaaggaggagctctccaataacaaggagtgcaagggaggcttcatcctcgacggtttcccgcgcactgtcacccaggccgagtccctcgacaagatgcttgccgagaaggaccagaagcttcagcacgctgttgaactccagatcgacgacggactactcgtctcgagaattactggacgcttggtacatcccgcctcgggtcgttcttaccacagcatcttcaaccctccgaaggagagcatgaaggatgatgtcaccggcgagcctctgatccagcgctctgacgacaatgccgacgccctcaagaagcgtctcgcgacctaccacgctcagaccgctcccgttgttggctactacaagaacaccggcatctggaagggtatcgatgccagccaggagcccggccaggtctggaagagcctgctcaacgtcttcggcgagcactccaagaagagtggaatcatcgccaagttgactggccagtagatggcgaaatctatcgcctaaccacacgaatcaaggtgcggctatcgagaaacgacgatgcaccattgtcctagctggatggacatagaagatgggagccaaacagcacccagcaattaaggcacaggcagtgatggataaaggagacaaaaaggaaagagaaggtggaaactcggcactttgtatcatacctactaattcatcgcctcggcttgttgtgtatgtacgatgtgattgattatagggggccacttgcgaaatattaccgtgttttatcgattcttgcgttttcgtctatcctcgtgatcgacatttctaccctactgtgcaaatctgaaagagtgaaggtatgcgcgtggttcttgtcacaaaatggccacctgaggtaatgtggta

SEQ ID NO: 15242 - DNA, 1044 bp, Muscodor strobelii
  misc_feature: SGI cDNA ID NO. 565044
  misc_feature: Reduced expression when VOC is produced
  misc_feature: Encodes the peptide sequence at SEQ ID NO 15243
atgcccgcaaccactgccgagacgctctcgttcgtcagcagaaatgtcaccgttgcgcccctcgtcctgctttccgtcgtagaccactacaaccgagtcgccaagggcacgagaaagcgtgtagtcggtgtcttgctgggccagaacgatggcaagaacgtgcgcgtctccaacagcttcgcagtccccttcgaggaagacaatgacgaccccactgtctggttcttggatcacaactatgtcgagaacatgaacgacatgttcaagaaggtcaacgcccgcgagaagctgataggctggtaccactcgggccccaagctgcgcgcctccgatctcgagatcaacgagctcttcaagcgatacacacccaaccctctgctggtcattattgatgtccagcccaaggagtccggagtgcccacagatgcatactttgccgtagaggagatcaaagatgatggaacgacgacagccaagacattcgtacacacaccctccacgatcgaggcggaggaagcagaggagatcggtgtcgagcacctcttaagagacatccgcgacgtcgccatcggctctctctccacccgtatcacaaaccaacttcagtcactacagggtctgcatttacggttacgcgagatccaggcctacctacagaaagtccaagacaagcagctacccgtaaatcacgccgtactaggcaacctacaagacatcttcaacctcttaccgaacctatcgactcccaagccaggcggcgacactaagggtggcaacgtgggcgagctgggatacgccatgagcgtcaagacgaacgatcagctgttggccatctacttgagcagtctgatccgcgccataaccgccttccacgatctcatcgagaacaagatccagaaccgacagcagcaggaggagaaggaagcgaagaaggaagaggccgctgcggaaaaagaaaagagtgaaaaggagaagaaggaaggtgctgctagtggatcaggacctgattcagtagataagagtgaaaaggagaagaagaaataa

SEQ ID NO: 15243 - protein, 347 aa, Muscodor strobelii
  misc_feature: SGI Peptide ID NO. 565044
  misc_feature (11)..(124): Pfam Id: PF01398 Pfam Desc: Mov34/MPN/PAD-1 family
  misc_feature (1)..(347): NCBI GI: 116199679 Blast Desc: 26S proteasome regulatory subunit rpn-8 [Chaetomium globosum CBS 148.51] gi|88179274|gb|EAQ86742.1| 26S proteasome regulatory subunit rpn-8 [Chaetomium globosum CBS 148.51]
  misc_feature (1)..(332): NCBI GI: 261355462 Blast Desc: 26S proteasome regulatory subunit rpn-8 [Verticillium albo-atrum VaMs.102]
  misc_feature (1)..(347): NCBI GI: 85078895 Blast Desc: 26S proteasome regulatory subunit RPN8 [Neurospora crassa OR74A] gi|51702124|sp|Q8WZY4.1|RPN8_NEUCR RecName: Full=26S proteasome regulatory subunit rpn-8 26S proteasome RPN8
  misc_feature (1)..(329): NCBI GI: 256729182 Blast Desc: [Nectria haematococca mpVI 77-13-4]
  misc_feature (1)..(336): NCBI GI: 156062978 Blast Desc: 26S proteasome regulatory subunit rpn-8 [Sclerotinia sclerotiorum 1980] gi|154696941|gb|EDN96679.1| 26S proteasome regulatory subunit rpn-8 [Sclerotinia sclerotiorum 1980]
  misc_feature (1)..(334): NCBI GI: 2599117 Blast Desc: proteasome regulatory subunit 12 [Hypocrea jecorina]
  misc_feature (1)..(347): NCBI GI: 169764070 Blast Desc: [Aspergillus oryzae RIB40] gi|238490061|ref|XP_002376268.1| 26S proteasome regulatory particle subunit Rpn8, [Aspergillus flavus NRRL3357] protein 26S
  misc_feature (1)..(347): NCBI GI: 255931641 Blast Desc: Pc12g05300 [Penicillium chrysogenum Wisconsin 54-1255] gi|211581996|emb|CAP80157.1| Pc12g05300 [Penicillium chrysogenum Wisconsin 54-1255]
  misc_feature (1)..(313): NCBI GI: 261192920 Blast Desc: 26S proteasome regulatory subunit rpn8 [Ajellomyces dermatitidis SLH14081] gi|239589001|gb|EEQ71644.1| 26S proteasome regulatory subunit rpn8 [Ajellomyces dermatitidis SLH14081] 26S
  misc_feature (1)..(345): NCBI GI: 258569759 Blast Desc: 26S proteasome regulatory subunit rpn-8 [Uncinocarpus reesii 1704] gi|237903953|gb|EEP78354.1| 26S proteasome regulatory subunit rpn-8 [Uncinocarpus reesii 1704]
  misc_feature: Useful for introducing or modulating the production of volatile compounds
MPATTAETLSFVSRNVTVAPLVLLSVVDHYNRVAKGTRKRVVGVLLGQNDGKNVRVSNSFAVPFEEDNDDPTVWFLDHNYVENMNDMFKKVNAREKLIGWYHSGPKLRASDLEINELFKRYTPNPLLVIIDVQPKESGVPTDAYFAVEEIKDDGTTTAKTFVHTPSTIEAEEAEEIGVEHLLRDIRDVAIGSLSTRITNQLQSLQGLHLRLREIQAYLQKVQDKQLPVNHAVLGNLQDIFNLLPNLSTPKPGGDTKGGNVGELGYAMSVKTNDQLLAIYLSSLIRAITAFHDLIENKIQNRQQQEEKEAKKEEAAAEKEKSEKEKKEGAASGSGPDSVDKSEKEKKK

SEQ ID NO: 15244 - DNA, 2451 bp, Muscodor strobelii
  misc_feature: SGI EST ID NO. CUFF.36246.0
  misc_feature: Variant of the nucleotide sequence at SEQ ID NO 15242
tttacgacaccgcagctcgacagccttccacaccgaaccacagcacaccacctaacgatacatcacctgcggcaccgaccaaacacaccaccacagataacacaacgcaaccacactatttacacgccaaactatactttgcgatttcgacatctcctccacccctccatcgtttccacgatgcccgcaaccactgccgagacgctctcgttcgtcagcagaaatgtcaccgttgcgcccctcgtcctgctttccgtcgtagaccactacaaccgagtcgccaagggcacgagaaagcgtgtagtcggtgtcttgctgggccagaacgatggcaagaacgtgcgcgtctccaacagcttcgcagtccccttcgaggaagacaatgacgaccccactgtctggttcttggatcacaactatgtcgagaacatgaacgacatgttcaagaaggtcaacgcccgcgagaagctgataggctggtaccactcgggccccaagctgcgcgcctccgatctcgagatcaacgagctcttcaagcgatacacacccaaccctctgctggtcattattgatgtccagcccaaggagtccggagtgcccacagatgcatactttgccgtagaggagatcaaagatgatggaacgacgacagccaagacattcgtacacacaccctccacgatcgaggcggaggaagcagaggagatcggtgtcgagcacctcttaagagacatccgcgacgtcgccatcggctctctctccacccgtatcacaaaccaacttcagtcactacagggtctgcatttacggttacgcgagatccaggcctacctacagaaagtccaagacaagcagctacccgtaaatcacgccgtactaggcaacctacaagacatcttcaacctcttaccgaacctatcgactcccaagccaggcggcgacactaagggtggcaacgtgggcgagctgggatacgccatgagcgtcaagacgaacgatcagctgttggccatctacttgagcagtctgatccgcgccataaccgccttccacgatctcatcgagaacaagatccagaaccgacagcagcaggaggagaaggaagcgaagaaggaagaggccgctgcggaaaaagaaaagagtgaaaaggagaagaaggaaggtgctgctagtggatcaggacctgattcagtagataagagtgaaaaggagaagaagaaataaacgagactagagcgcagcagggggaaaacaaagaaacagacaagtaaccgcaaactcgatgcggcacttgcttgatgcggaacacgatagaccatgtacaattatgccggcgttgagagtctatggagcagggaggcctggttcaggacagttcatgcattggctgatagaggtgctgaggtatctcattatgggcgcaaagaacgtccaggtctcgcataatactcatggcttcatgaccaattcttctgtgttgttttgtgttcgtaaatcgtaactcatgtgagaatttcacaaatctccaactaaacccgcagcctcctccctcccaactacacgctcgtccatacactgccccagcacgccattcaaccgctctgcgagcacgcatgcaaggaggtgtttacagcatggtacgccgccgctcatatcatcctttatactcccatgtagacctgttgtttccctcccatccatgcttaactctccgaattcccatgagtcctcgctcggctcatcaaccgccattccagacatactgtcttcccattccgtagaagcgggcgcgatgtgatatctgcttgagctagagacggtggtgttggatgatgacggtgaaggtggaaaagcagagaatgcgaaagcggcacatgagcaattccaggcttgtagccgcacgacgtaggcttgtccgccgacgctgctgtgggatgatgatgcgtggtggtgtttccgcgttgattggggttgtgcggagcggactaggtggtatagtacatccctttgtggtggggttgggtgtgaggcatggctaggtccaggttctggatctgcatctgctggattttcatcatgtatttcgtttgagttgtgggatgtggtggttgaggcctgagatactacgcgcgtgacgagatgacgatctagtaggtctagtgcgggtaggaggagggttgggtataagacgtggagcgttgtgaggagaggcctgtgggatggcgggaggtgttttagtggggttgttgatgttgcgcctttgtttgatggcgtactgtggttggatgaggggatgggaggtaagcttgagatgagagatgttaggagggctcttgatgttgggagcgatgtcgttgtgttcatcgtgagtttgggtgattgtgatggtttgcgtggatggtggttgagttcttagtatatacatgtacctaaggtatgtattctttctat

SEQ ID NO: 15245 - DNA, 849 bp, Muscodor strobelii
  misc_feature: SGI cDNA ID NO. 565045
  misc_feature: Encodes the peptide sequence at SEQ ID NO 15246
atgaacacaacgacatcgctcccaacatcaagagccctcctaacatctctcatctcaagcttacctcccatcccctcatccaaccacagtacgccatcaaacaaaggcgcaacatcaacaaccccactaaaacacctcccgccatcccacaggcctctcctcacaacgctccacgtcttatacccaaccctcctcctacccgcactagacctactagatcgtcatctcgtcacgcgcgtagtatctcaggcctcaaccaccacatcccacaactcaaacgaaatacatgatgaaaatccagcagatgcagatccagaacctggacctagccatgcctcacacccaaccccaccacaaagggatgtactataccacctagtccgctccgcacaaccccaatcaacgcggaaacaccaccacgcatcatcatcccacagcagcgtcggcggacaagcctacgtcgtgcggctacaagcctggaattgctcatgtgccgctttcgcattctctgcttttccaccttcaccgtcatcatccaacaccaccgtctctagctcaagcagatatcacatcgcgcccgcttctacggaatgggaagacagtatgtctggaatggcggttgatgagccgagcgaggactcatgggaattcggagagttaagcatggatgggagggaaacaacaggtctacatgggagtataaaggatgatatgagcggcggcgtaccatgctgtaaacacctccttgcatgcgtgctcgcagagcggttgaatggcgtgctggggcagtgtatggacgagcgtgtagttgggagggaggaggctgcgggtttagttggagatttgtga

SEQ ID NO: 15246 - protein, 282 aa, Muscodor strobelii
  misc_feature: SGI Peptide ID NO. 565045
  misc_feature (6)..(282): NCBI GI: 171688760 Blast Desc: protein product [Podospora anserina] gi|170944342|emb|CAP70452.1| protein product [Podospora anserina]
  misc_feature (4)..(281): NCBI GI: 39973587 Blast Desc: [Magnaporthe grisea 70-15] gi|145017983|gb|EDK02262.1| [Magnaporthe grisea 70-15]
  misc_feature (7)..(282): NCBI GI: 256728977 Blast Desc: NECHADRAFT_93410 [Nectria haematococca mpVI 77-13-4]
  misc_feature (9)..(277): NCBI GI: 189196030 Blast Desc: conserved [Pyrenophora tritici-repentis Pt-1C-BFP] gi|187980232|gb|EDU46858.1| conserved [Pyrenophora tritici-repentis Pt-1C-BFP]
  misc_feature (7)..(277): NCBI GI: 225684863 Blast Desc: [Paracoccidioides brasiliensis Pb03]
  misc_feature (7)..(277): NCBI GI: 226282037 Blast Desc: conserved [Paracoccidioides brasiliensis Pb01]
  misc_feature (13)..(277): NCBI GI: 238842825 Blast Desc: conserved [Microsporum canis CBS 113480]
  misc_feature (8)..(281): NCBI GI: 145238880 Blast Desc: An07g10120 [Aspergillus niger] gi|134076588|emb|CAK45141.1| protein product [Aspergillus niger]
  misc_feature (7)..(277): NCBI GI: 226287761 Blast Desc: conserved [Paracoccidioides brasiliensis Pb18]
  misc_feature (8)..(278): NCBI GI: 258569757 Blast Desc: [Uncinocarpus reesii 1704] gi|237903952|gb|EEP78353.1| [Uncinocarpus reesii 1704]
MNTTTSLPTSRALLTSLISSLPPIPSSNHSTPSNKGATSTTPLKHLPPSHRPLLTTLHVLYPTLLLPALDLLDRHLVTRVVSQASTTTSHNSNEIHDENPADADPEPGPSHASHPTPPQRDVLYHLVRSAQPQSTRKHHHASSSHSSVGGQAYVVRLQAWNCSCAAFAFSAFPPSPSSSNTTVSSSSRYHIAPASTEWEDSMSGMAVDEPSEDSWEFGELSMDGRETTGLHGSIKDDMSGGVPCCKHLLACVLAERLNGVLGQCMDERVVGREEAAGLVGDL

SEQ ID NO: 15247 - DNA, 1050 bp, Muscodor strobelii
  misc_feature: SGI cDNA ID NO. 565046
  misc_feature: Encodes the peptide sequence at SEQ ID NO 15248
atggatacatccaacacagtagtcggctggctctcattcgccgtcacagccgtcggtctcggcggtctcatcacacaagcgagcgcaatcaacgaccagttagatccattccacgcaagtcgcacagttgaatacttgggaatatggtttcaaagacaacaaagcttcccatggtggaagatatcaaaaccgcctcctgatggcccaataatcaacgcgaaaatgtcggagggattctgcggatacaacaacatccacattgcgcgcataccctttgtattccccggcaaagcctgctggtctttaatgttgtcgatgtttcatacgaaagcgccggggatgcagattgattatataccgagtgaggatggcgtggggttggaggagaaggctgctatcaagcctgtggccaaggcgaaaggcagtgcgaaaaaggctcaggattttgtggactgggattttctacctcacgcagcgttgaaccgtcatcagtcgatgttccaattcagtgatgcgacgggttttcgggcgggctatgcgtcgtattgtgggcagtggtacattacatggccaattggcgaagaagccatagtcaaattcgcagcccacgattcaatcggaaagacagaggttcttccacggagttttgttcaacgcgtagatcgctgtggacaaatggtatccggtgttgtcgtatcagctgcatcaaacttagctgtcgccttctgcggcaggaaagcgctgggaatgtatcagctcgaatacagcccgaaaggctttcaaggcgcgcacggaagtcggcatcttttcaacatgctcggaggcaaggcgttcgagatcgacttcatgttcgccagaccatctacgagcaacagcgagaatagtcttgttttggagctcccaagtaccgagaaaggtggtaaagtcgagatggttatcccggcgcgcgaggaagaagtcatcaagcacgcgctagacttgcctgccttggacatcattatcgtggagtcttcatcgcgggttgcgcgacatcatgatggcatatactaa

SEQ ID NO: 15248 - protein, 349 aa, Muscodor strobelii
  misc_feature: SGI Peptide ID NO. 565046
  misc_feature (1)..(326): NCBI GI: 145245497 Blast Desc: An11g10590 [Aspergillus niger] gi|134079718|emb|CAK40857.1| [Aspergillus niger]
  misc_feature (1)..(348): NCBI GI: 258565211 Blast Desc: [Uncinocarpus reesii 1704] gi|237907051|gb|EEP81452.1| [Uncinocarpus reesii 1704]
  misc_feature (1)..(348): NCBI GI: 240105732 Blast Desc: CPC735_052950 [Coccidioides posadasii C735 delta SOWgp]
  misc_feature (1)..(348): NCBI GI: 119193378 Blast Desc: [Coccidioides immitis RS]
  misc_feature (1)..(326): NCBI GI: 255950570 Blast Desc: Pc22g21560 [Penicillium chrysogenum Wisconsin 54-1255] gi|211593069|emb|CAP99444.1| Pc22g21560 [Penicillium chrysogenum Wisconsin 54-1255]
  misc_feature (1)..(326): NCBI GI: 115402885 Blast Desc: [Aspergillus terreus NIH2624] gi|114189365|gb|EAU31065.1| [Aspergillus terreus NIH2624]
MDTSNTVVGWLSFAVTAVGLGGLITQASAINDQLDPFHASRTVEYLGIWFQRQQSFPWWKISKPPPDGPIINAKMSEGFCGYNNIHIARIPFVFPGKACWSLMLSMFHTKAPGMQIDYIPSEDGVGLEEKAAIKPVAKAKGSAKKAQDFVDWDFLPHAALNRHQSMFQFSDATGFRAGYASYCGQWYITWPIGEEAIVKFAAHDSIGKTEVLPRSFVQRVDRCGQMVSGVVVSAASNLAVAFCGRKALGMYQLEYSPKGFQGAHGSRHLFNMLGGKAFEIDFMFARPSTSNSENSLVLELPSTEKGGKVEMVIPAREEEVIKHALDLPALDIIIVESSSRVARHHDGIY

SEQ ID NO: 15249 - DNA, 1687 bp, Muscodor strobelii
  misc_feature: SGI EST ID NO. CUFF.36274.0
  misc_feature: Variant of the nucleotide sequence at SEQ ID NO 15247
tcgcgtgtacttccaactcaactagccagattgaagacccgtgcccgctatccacaacactcacaatggtcgtactaccgtaccaaacaagacctagcaattatttttagcacgatttcttcacctgtctagattccgagcttcgcctttctacaggggcatttccccacgtggtggtggttgggctgaagcgcctaggttcaaaatccttcccagttaaccgcccatttcctgattatgaaaccaatccttacagctgaattcatgactctctaactatcatgaaactattatgagttgggtgacttctcacccttcaactcttctcataagtcgtttctccatcttataagtttgcatcaaatttgcgaatcattaaaatacactagtcatattgtgattgaggagtaacaaggagagcgttgcgcaacccatttcaacatggatacatccaacacagtagtcggctggctctcattcgccgtcacagccgtcggtctcggcggtctcatcacacaagcgagcgcaatcaacgaccagttagatccattccacgcaagtcgcacagttgaatacttgggaatatggtttcaaagacaacaaagcttcccatggtggaagatatcaaaaccgcctcctgatggcccaataatcaacgcgaaaatgtcggagggattctgcggatacaacaacatccacattgcgcgcataccctttgtattccccggcaaagcctgctggtctttaatgttgtcgatgtttcatacgaaagcgccggggatgcagattgattatataccgagtgaggatggcgtggggttggaggagaaggctgctatcaagcctgtggccaaggcgaaaggcagtgcgaaaaaggctcaggattttgtggactgggattttctacctcacgcagcgttgaaccgtcatcagtcgagtgcgtgtattattgtctcgcgagtgacattgcttacgatattggtcatgacgaatgcgcgcccagtgttccaattcagtgatgcgacgggttttcgggcgggctatgcgtcgtattgtgggcagtggtacattacatggccaattggcgaagaagccatagtcaaattcgcagcccacgattcaatcggaaagacagaggttcttccacggagttttgttcaacgcgtagatcgctgtggacaaatggtatccggtgttgtcgtatcagctgcatcaaacttagctgtcgccttctgcggcaggaaagcgctgggaatgtatcagctcgaatacagcccgaaaggctttcaaggcgcgcacggaagtcggcatcttttcaacatgctcggaggcaaggcgttcgagatcgacttcatgttcgccagaccatctacgagcaacagcgagaatagtcttgttttggagctcccaagtaccgagaaaggtggtaaagtcgagatggttatcccggcgcgcgaggaagaagtcatcaagcacgcgctagacttgcctgccttggacatcattatcgtggagtcttcatcgcgggttgcgcgacatcatgatggcatatactaagccgatcatggatcagtatcgagaagagctggccgatttgctcaagaagacagtagcggagaaatcagatcagttacggtcgagagggtgggattcacaatttatcaaaaataatggtacgtgtagaaag

SEQ ID NO: 15250 - DNA, 654 bp, Muscodor strobelii
  misc_feature: SGI cDNA ID NO. 565047
  misc_feature: Encodes the peptide sequence at SEQ ID NO 15251
atgggtcttcttaaggttgttgctgccgtttcggcattggctggagccactctctcatccccaaccaattttgcaacgccatctgttcagtattgtgatcccgcaactactgtttgctattcgagcagcactgtcggcgttgcaagcatctcttatcggcttgctatccccaacgtcacggctagcccattcgatctcctactccaaattgtcgccccgaagtcggctcagtgggctggcattgcatttggcggtcatatgatcaataacacgattgctatggcctgggcaaatggaaacacctcagttgtctcatctcgttgggcatctgcccacgaaatccctgaaccgtacgaagctgcggagtataccgttttgaatggctcagtcacgaatgatacccattggactctgactgcgctttgcaagggttgctcaacttggattcatgacggtggctccaagactgagatggatcccaactccccatcaattaacctagcgtgggcagcgtctccctatccagtgggagatcctgctgataattatacgatgatgagcatccactcggaacatggcaccttttcacttgatctggcggcggcgaagacagacaagtttgatagttatgttcaatctctggctcgcacttaa

SEQ ID NO: 15251 - protein, 217 aa, Muscodor strobelii
  misc_feature: SGI Peptide ID NO. 565047
  misc_feature (1)..(215): NCBI GI: 171681240 Blast Desc: protein product [Podospora anserina] gi|170940578|emb|CAP65806.1| protein product [Podospora anserina]
  misc_feature (1)..(214): NCBI GI: 171683019 Blast Desc: protein product [Podospora anserina] gi|170941469|emb|CAP67120.1| protein product [Podospora anserina]
  misc_feature (1)..(211): NCBI GI: 85110321 Blast Desc: NCU08432 [Neurospora crassa OR74A] gi|28881259|emb|CAD70518.1| related to cellobiose dehydrogenase (cdh) [Neurospora crassa] gi|28925081|gb|EAA34166.1| [Neurospora
  misc_feature (30)..(212): NCBI GI: 116182928 Blast Desc: CHGG_02092 [Chaetomium globosum CBS 148.51] gi|88186389|gb|EAQ93857.1| CHGG_02092 [Chaetomium globosum CBS 148.51]
  misc_feature (1)..(213): NCBI GI: 189203559 Blast Desc: conserved [Pyrenophora tritici-repentis Pt-1C-BFP] gi|187985214|gb|EDU50702.1| conserved [Pyrenophora tritici-repentis Pt-1C-BFP]
  misc_feature (21)..(212): NCBI GI: 116200335 Blast Desc: CHGG_08323 [Chaetomium globosum CBS 148.51] gi|88179602|gb|EAQ87070.1| CHGG_08323 [Chaetomium globosum CBS 148.51]
  misc_feature (1)..(214): NCBI GI: 116201697 Blast Desc: CHGG_08733 [Chaetomium globosum CBS 148.51] gi|88177251|gb|EAQ84719.1| CHGG_08733 [Chaetomium globosum CBS 148.51]
  misc_feature (30)..(214): NCBI GI: 145603194 Blast Desc: MGG_06206 [Magnaporthe grisea 70-15] gi|145011477|gb|EDJ96133.1| MGG_06206 [Magnaporthe grisea 70-15]
  misc_feature (24)..(214): NCBI GI: 171678064 Blast Desc: protein product [Podospora anserina] gi|170937101|emb|CAP61759.1| protein product [Podospora anserina]
  misc_feature (28)..(213): NCBI GI: 39975559 Blast Desc: MGG_00074 [Magnaporthe grisea 70-15] gi|145019091|gb|EDK03370.1| MGG_00074 [Magnaporthe grisea 70-15]
  misc_feature (24)..(211): SWISSPROT Homolog: EC 1.1.99.18 Cellobiose dehydrogenase (acceptor)
MGLLKVVAAVSALAGATLSSPTNFATPSVQYCDPATTVCYSSSTVGVASISYRLAIPNVTASPFDLLLQIVAPKSAQWAGIAFGGHMINNTIAMAWANGNTSVVSSRWASAHEIPEPYEAAEYTVLNGSVTNDTHWTLTALCKGCSTWIHDGGSKTEMDPNSPSINLAWAASPYPVGDPADNYTMMSIHSEHGTFSLDLAAAKTDKFDSYVQSLART

SEQ ID NO: 15252 - DNA, 1448 bp, Muscodor strobelii
  misc_feature: SGI EST ID NO. CUFF.36280.0
  misc_feature: Variant of the nucleotide sequence at SEQ ID NO 15250
attggccgtgcctgagccaagaacaccaaagcgacaccaacataaagtcgtctatctgtgaactcgggttgtctctaatccaacgcacctttcatcatgcatatgtgtatgattggtatgatgccatccgccaagatggtaccaattaaacctacgcgacgcacttctcgtcgcggccgcatagctcacgccgatccagcatcatagcaacaggattgtgcccaccgtacctgtaaatcctgctcgacatgcctgcttttccgcccttggcctccaaaatgatcaagctaattgtacagtttctacttctatcaacttgattaaggcgcacatgtcatatgagggacgactgccgaaagatttcttcacagccggagtccaagctccgagcatagcgttgtcttccacagccaagctggaaacaaggtccaacagaaaatcgcaggctgagattatacatgattatatatgacagccaatccacgttcccttattaccaaacatatggttgtgcgtaccaagctctggatgcaataccggcggatagtaatggaacggaacgcgaaggacggataaaaccatgaggagaatatggccctcgcttttgcgacgctgtctgtcggccaagacgagaatgttataagagccgggccctcggtgtcggtgagatcacgcatccacagcatctcacgcatcacactggtaccttgcctgcttgcatctacatcatgggtcttcttaaggttgttgctgccgtttcggcattggctggagccactctctcatccccaaccaattttgcaacgccatctgttcagtattgtgatcccgcaactactgtttgctattcgagcagcactgtcggcgttgcaagcatctcttatcggcttgctatccccaacgtcacggctagcccattcgatctcctactccaaattgtcgccccgaagtcggctcagtgggctggcattgcatttggcggtcatatgatcaataacacgattgctatggcctgggcaaatggaaacacctcagttgtctcatctcgttgggcatctgcccacgaaatccctgaaccgtacgaagctgcggagtataccgttttgaatggctcagtcacgaatgatacccattggactctgactgcgctttgcaagggttgctcaacttggattcatgacggtggctccaagactgagatggatcccaactccccatcaattaacctagcgtgggcagcgtctccctatccagtgggagatcctgctgataattatacgatgatgagcatccactcggaacatggcaccttttcacttgatctggcggcggcgaagacagacaagtttgatagttatgttcaatctctggctcgcacttaatcaatccaggtagattagcctagtcttcttcgtacatatataccactgtaaatacgcctcttcagg

SEQ ID NO: 15253 - DNA, 237 bp, Muscodor strobelii
  misc_feature: SGI cDNA ID NO. 565048
  misc_feature: Encodes the peptide sequence at SEQ ID NO 15254
atggctggagtgcagaaaccgtatcctcgagcgacggtcaaaaagattatcaaggcccattccaagtgcaatgtcagcaagagtgtggatgtcatgatattccttgactatgtcctcttcatgcaaaccctggtcaaagaagcggccatcgactcgaagcaggcaggcgaacgcaacatcagcgccaaaagcgtcagaaaagtgacacctgatgcgctcgccaaattcaaaggatga

SEQ ID NO: 15254 - protein, 78 aa, Muscodor strobelii
  misc_feature: SGI Peptide ID NO. 565048
  misc_feature (5)..(78): NCBI GI: 164427389 Blast Desc: NCU03400 [Neurospora crassa OR74A] gi|18376372|emb|CAD21149.1| [Neurospora crassa] gi|157071722|gb|EAA27611.2| [Neurospora crassa OR74A]
  misc_feature (5)..(78): NCBI GI: 171690122 Blast Desc: protein product [Podospora anserina] gi|170945009|emb|CAP71120.1| protein product [Podospora anserina]
  misc_feature (1)..(78): NCBI GI: 46138613 Blast Desc: FG10821.1 [Gibberella zeae PH-1]
  misc_feature (1)..(78): NCBI GI: 154318588 Blast Desc: [Botryotinia fuckeliana B05.10] gi|150857813|gb|EDN33005.1| [Botryotinia fuckeliana B05.10]
  misc_feature (1)..(78): NCBI GI: 116199899 Blast Desc: conserved [Chaetomium globosum CBS 148.51] gi|88179384|gb|EAQ86852.1| conserved [Chaetomium globosum CBS 148.51]
  misc_feature (1)..(77): NCBI GI: 145606014 Blast Desc: [Magnaporthe grisea 70-15] gi|145013753|gb|EDJ98394.1| [Magnaporthe grisea 70-15]
  misc_feature (6)..(78): NCBI GI: 225555490 Blast Desc: conserved [Ajellomyces capsulatus G186AR]
  misc_feature (1)..(78): NCBI GI: 121702341 Blast Desc: conserved [Aspergillus clavatus NRRL 1] gi|119397578|gb|EAW08009.1| conserved [Aspergillus clavatus NRRL 1]
  misc_feature (1)..(69): NCBI GI: 156063722 Blast Desc: SS1G_01979 [Sclerotinia sclerotiorum 1980] gi|154697313|gb|EDN97051.1| SS1G_01979 [Sclerotinia sclerotiorum 1980]
  misc_feature (1)..(78): NCBI GI: 70991252 Blast Desc: conserved [Aspergillus fumigatus Af293] gi|66848107|gb|EAL88437.1| conserved [Aspergillus fumigatus Af293] gi|159130948|gb|EDP56061.1| conserved [Aspergillus A1163]
MAGVQKPYPRATVKKIIKAHSKCNVSKSVDVMIFLDYVLFMQTLVKEAAIDSKQAGERNISAKSVRKVTPDALAKFKG

SEQ ID NO: 15255 - DNA, 1016 bp, Muscodor strobelii
  misc_feature: SGI EST ID NO. CUFF.36282.0
  misc_feature: Variant of the nucleotide sequence at SEQ ID NO 15253
tgggtggggctcgcaaccgaacctgaagtcaacaaacccacatcacgacgttgcgattgacctaccgtgatcgtctctcctcgacgcaatcactaaccctgacgataatccgcgacacgtaaacatggctggagtgcagaaaccgtatcctcgagcgacggtcaaaaagattatcaaggcccattccaagtgcaatgtcagcaagagtgtggatgtcatgatattccttgactatgtcctcttcatgcaaaccctggtcaaagaagcggccatcgactcgaagcaggcaggcgaacgcaacatcagcgccaaaagcgtcagaaaagtgacacctgatgcgctcgccaaattcaaaggatgaagatctagcattccgcaagacatgaccgtaccttataagcttcacccatcatgcagcatgagtagccggtattattctacatgattagtcggctcgacgttattctaccctgcaaaggttgtcaggacattttcgttgggcggcttcagccaggttgagaagcattcatgtttctgccggagtcattagaaagggctgggacactaaagaatagccgctcaagtccaagatcatgccgcgagaccgttcttagcaggagcctagacattggcgccctaggctcttcgtcttgacataagtaatagctatcgtcgaggccctccatattgctaagaagggggtaggatgagttgagttgcacatctacagttggagaagtgccatatgtgtggagaatcagggaacaagcccgccaaccatggtatcggttcaataccacagatatatgagggtgtcactcgacgtcggatgaggtcgttgatagtagcccggaatcgaagactagaccatggttgtagcacgtgcccactcacccgagccgagtgaacttggcatctcgaggtcgaggaagcatagcggattaaatgccaggtagttaaacagtttctcccactgcccgtatttcagctaaaaccaaataagactcttccaccag

SEQ ID NO: 15256 - DNA, 1383 bp, Muscodor strobelii
  misc_feature: SGI cDNA ID NO. 565049
  misc_feature: Reduced expression when VOC is produced
  misc_feature: Encodes the peptide sequence at SEQ ID NO 15257
atgccttcctctgccgtccagaacccgtctgccaaggcagagtcttcttccaagaagaaaaaggccaaggctgctcgcaccgagtcgcctgctccctctgcctcgcccgcccctgagaagacagcctcggtctctggtgccgatgctgcagaagatgagagcccctacatccaagagcttaagaaaaacatgcgaaatatcaacaaaaagattctcaatgcctccaaaaccgaccccatcatcgagcagaacaaggacaagacgctcgacgagctcgtcgctgccaagcttatcaacgccgaccagcgtgcccaacgccttaagaagcctcagctggaggcacagctcgcccagatcgaggagcagctggcccagtacaagaaggtcgacgaggactaccgcgcacgctccgccgccgacaaggccctcctcgagtctaccctcggcgagagccacgccaaggacaaggcagacgccatcagtgccctcaccgagaaggccgccagcgatgccaagcagaccctacacgacagcctgctcgtcctctctcagttcctccgtctggccgccgcccgccgatctgaagatgccgatgccggtctcgacgagaacatggccttggagggagtcttgctgaacgtctactccggcgacgagaatgccgtctccactatgctgaagctgattgagggatccgacgagaccacccgcggtgtcggtggcgacgctcttcagactaccttctcccaggtcaaggccgcagccgtcgcctacgtcagccccttcgccgcgacggagtccgctccagaggcttccgaagctcctgtagaatccactgcgcccatagagtcggatcctaccatcgttcacgccggattgactgagatcgataccaccggagccacagcccccatgaccaacggtcacgacgagtcatcgcctcagtcagcatttcctaccaacgctgccgtcaccgacagtgctgccaatgccgccgctgagcagaactgggacactgacaataacatgagtgcttccatcactcaggaggactgggtccaagtcccgcgggaccccgcagagacggagaccggagtgacagccacgcccgccgctcctagcaatgtccagtcttgggctgatgagcagcctgatccagcaccccaggcatccactccagctgagcccaacgacggtttccatcaggtccaccgcaaccggccccgtggccacgagcgtgaaggtagcttcagaggtcgcggtcgcggaggttatcgtggagaccaccgcggaggattccatgagggccgaggtggacgcggtcgtggacgcggtcgcggcatgggcatgcgcggcggacgcccgcgcgccgaggagtcctag

SEQ ID NO: 15257 - protein, 460 aa, Muscodor strobelii
  misc_feature: SGI Peptide ID NO. 565049
  misc_feature (1)..(407): NCBI GI: 116199897 Blast Desc: CHGG_08104 [Chaetomium globosum CBS 148.51] gi|88179383|gb|EAQ86851.1| CHGG_08104 [Chaetomium globosum CBS 148.51]
  misc_feature (1)..(421): NCBI GI: 39977689 Blast Desc: MGG_06729 [Magnaporthe grisea 70-15] gi|145013754|gb|EDJ98395.1| MGG_06729 [Magnaporthe grisea 70-15]
  misc_feature (1)..(406): NCBI GI: 154318590 Blast Desc: BC1G_02684 [Botryotinia fuckeliana B05.10] gi|150857814|gb|EDN33006.1| BC1G_02684 [Botryotinia fuckeliana B05.10]
  misc_feature (1)..(407): NCBI GI: 85082093 Blast Desc: NCU03399 [Neurospora crassa OR74A] gi|28917925|gb|EAA27610.1| [Neurospora crassa OR74A]
  misc_feature (26)..(411): NCBI GI: 256728927 Blast Desc: NECHADRAFT_100393 [Nectria haematococca mpVI 77-13-4]
  misc_feature (1)..(411): NCBI GI: 261356771 Blast Desc: conserved [Verticillium albo-atrum VaMs.102]
  misc_feature (1)..(407): NCBI GI: 18376371 Blast Desc: conserved [Neurospora crassa]
  misc_feature (17)..(416): NCBI GI: 34500103 Blast Desc: [Epichloe festucae]
  misc_feature (26)..(385): NCBI GI: 46138611 Blast Desc: FG10820.1 [Gibberella zeae PH-1]
  misc_feature (1)..(403): NCBI GI: 156063724 Blast Desc: SS1G_01980 [Sclerotinia sclerotiorum 1980] gi|154697314|gb|EDN97052.1| SS1G_01980 [Sclerotinia sclerotiorum 1980]
  misc_feature: Useful for introducing or modulating the production of volatile compounds
MPSSAVQNPSAKAESSSKKKKAKAARTESPAPSASPAPEKTASVSGADAAEDESPYIQELKKNMRNINKKILNASKTDPIIEQNKDKTLDELVAAKLINADQRAQRLKKPQLEAQLAQIEEQLAQYKKVDEDYRARSAADKALLESTLGESHAKDKADAISALTEKAASDAKQTLHDSLLVLSQFLRLAAARRSEDADAGLDENMALEGVLLNVYSGDENAVSTMLKLIEGSDETTRGVGGDALQTTFSQVKAAAVAYVSPFAATESAPEASEAPVESTAPIESDPTIVHAGLTEIDTTGATAPMTNGHDESSPQSAFPTNAAVTDSAANAAAEQNWDTDNNMSASITQEDWVQVPRDPAETETGVTATPAAPSNVQSWADEQPDPAPQASTPAEPNDGFHQVHRNRPRGHEREGSFRGRGRGGYRGDHRGGFHEGRGGRGRGRGRGMGMRGGRPRAEES

SEQ ID NO: 15258 - DNA, 2798 bp, Muscodor strobelii
  misc_feature: SGI EST ID NO. CUFF.36414.0
  misc_feature: Variant of the nucleotide sequence at SEQ ID NO 15256
caggcctcctctcgtctcccaaaacaccacaacagcttatcacttttacttccggccctgtatttacctcacaaagcatcccgtagccctaagatcattatctactactccgcaagattggaaaccctctgcatctgcttcaattcttactagtagtggcgaccacgtcacatctatcctagctcctagaccccccacccgaccgttttcgtcactgcaaagacggccaccaacaacctcaatatcgccaaccacgtagcaatcctgacattgccgaccctctagacttctctcgtcgtctccacacgcaagagataaacaacatacaccctacctactgtgacaatgccttcctctgccgtccagaacccgtctgccaaggcagagtcttcttccaagaagaaaaaggccaaggctgctcgcaccgagtcgcctgctccctctgcctcgcccgcccctgagaagacagcctcggtctctggtgccgatgctgcagaagatgagagcccctacatccaagagcttaagaaaaacatgcgaaatatcaacaaaaagattctcaatgcctccaaaaccgaccccatcatcgagcagaacaaggacaagacgctcgacgagctcgtcgctgccaagcttatcaacgccgaccagcgtgcccaacgccttaagaagcctcagctggaggcacagctcgcccagatcgaggagcagctggcccagtacaagaaggtcgacgaggactaccgcgcacgctccgccgccgacaaggccctcctcgagtctaccctcggcgagagccacgccaaggacaaggcagacgccatcagtgccctcaccgagaaggccgccagcgatgccaagcagaccctacacgacagcctgctcgtcctctctcagttcctccgtctggccgccgcccgccgatctgaagatgccgatgccggtctcgacgagaacatggccttggagggagtcttgctgaacgtctactccggcgacgagaatgccgtctccactatgctgaagctgattgagggatccgacgagaccacccgcggtgtcggtggcgacgctcttcagactaccttctcccaggtcaaggccgcagccgtcgcctacgtcagccccttcgccgcgacggagtccgctccagaggcttccgaagctcctgtagaatccactgcgcccatagagtcggatcctaccatcgttcacgccggattgactgagatcgataccaccggagccacagcccccatgaccaacggtcacgacgagtcatcgcctcagtcagcatttcctaccaacgctgccgtcaccgacagtgctgccaatgccgccgctgagcagaactgggacactgacaataacatgagtgcttccatcactcaggaggactgggtccaagtcccgcgggaccccgcagagacggagaccggagtgacagccacgcccgccgctcctagcaatgtccagtcttgggctgatgagcagcctgatccagcaccccaggtgagttgatccccggtgaaccaggcacatcaaattcttcgccgcaatgttcactcatcatgtattgatgactaacgcgaccagcaggcatccactccagctgagcccaacgacggtttccatcaggtccaccgcaaccggccccgtggccacgagcgtgaaggtagcttcagaggtcgcggtcgcggaggttatcgtggagaccaccgcggaggattccatgagggccgaggtggacgcggtcgtggacgcggtcgcggcatgggcatgcgcggcggacgcccgcgcgccgaggagtcctagaggaaccgccgccgcaggaggactcgtcactcgcgatctatcatcgatggataccagggacaccccctctatcgacttggaccgtgaggggtgtatctcgaaggcttcccattactgtacaacaaaccccaaacctggctgcctgagttcagcctgcataatcccaagtggaaggtcacattgatgattttccgactggaaaccatggcgtgttttgagcgatcgattgcatggggtcacattgattttcaggagcgactaaaggaaaaggagggcattcaactggcgtcgactgtcctcatttctccatggcaagaggattgtctgtacaataaaagttaaggagcatctacgggactaaagaattgactcttttgaggtcaacacattggcagctacattgcaagagtgagatgactgtctattgaatctacatgtcttcatgacttgtcgtggtgtcattatgagacataggaggccgttgaaagcgcaattcctcactctacgcaacgtttcctatgtccattttcagccccaattccgtgcgaagagtgttcagtccggacagtgcgatatcaagattcgggtaagttgtagaaaatcgtctgattggatagtaaggtgtcggggagaaaagtcgcagctacacaataagggtgatctatatgatgaatggcagaggaagacttatccgagcccgacagtatggatcttcgcgattcgccaatgtgccttttcaattgaagtgggtgtgtctcgcgtgggtattgaagccaccggacttaatacttatgcgagtgaagacgtcaaagactcgatgccccacaacggccgactcaggtctgggccggtccatgatactcatcattaaccaagtcagtagtcagaggaatcaattgcaaaatgaggccgcacaagcattaaactcggagaaagaatgaatttgcaacaaatgaaagagatctgttagagcttcatccgtg

SEQ ID NO: 15259 - DNA, 957 bp, Muscodor strobelii
  misc_feature: SGI cDNA ID NO. 565050
  misc_feature: Encodes the peptide sequence at SEQ ID NO 15260
atggcaagtcagaagaaaatcctcgccatcttcggcgcaacaggcaaccaaggcggttcagtcctgagccacgtcctatcctcgcctgatctatcatcgcaatatgctatccgagccatcactcgagacatcaactcatcctctgctctcgctcttcgctccaaaggcgttgaggacatagtagccggcgacctcaacaactcctcaacccttcccaccgccttgcgaggagcacatacagtctacctaatgtccacccccgacatgacactcccctacccagaagcaaaagccgccgagctcaacgccgcgaaagcagcagcagacgcttgcgtcgcagcaggtgtctcatacctaatcttctccacccttccacatatcgaggaaggttcaggcgggaaatacaaacgcgtagccggtttcgacgccaaagccgaagcagaagcgtacatgcggaccctgcccctaaagaccgcgttcttcgcccctggctcattcatgcagaattggaattcccggtccatctacccctccccagcaaacgacggttcatacatcgtcgctcgcccagtagcccctgagacgaagttaccgttgatcgatatctcaggcgacacagggaaattcgtcggtgctatccttgcggatcctgagaagtacgaggggaagacgttttgcgctgcgactaagttgtatagtttgattgagatctgtgaggcgattgcgaaggctacgggaaagaaagtgagttatgagcagattacgcctgaggaatttaaggggtttatgaggggcagtttatatgctgatattttgatcgatatgatgctttatcagcaggattttgggtattattttgatgagacggagaggaagattgactgggcggtggagaatgctaggggtgatgttacgacttttgaggagtttcttgagagggaacctattgttttgtag

SEQ ID NO: 15260 - protein, 318 aa, Muscodor strobelii
  misc_feature: SGI Peptide ID NO. 565050
  misc_feature (8)..(253): Pfam Id: PF05368 Pfam Desc: NmrA-like family
  misc_feature (6)..(315): NCBI GI: 256732398 Blast Desc: NECHADRAFT_41150 [Nectria haematococca mpVI 77-13-4]
  misc_feature (6)..(318): NCBI GI: 238504394 Blast Desc: hscarg dehydrogenase, [Aspergillus flavus NRRL3357] gi|220690899|gb|EED47248.1| hscarg dehydrogenase, [Aspergillus flavus NRRL3357]
  misc_feature (6)..(318): NCBI GI: 154297931 Blast Desc: BC1G_12118 [Botryotinia fuckeliana B05.10] gi|150858245|gb|EDN33437.1| BC1G_12118 [Botryotinia fuckeliana B05.10]
  misc_feature (7)..(318): NCBI GI: 212546087 Blast Desc: hscarg dehydrogenase, [Penicillium marneffei ATCC 18224] gi|210064717|gb|EEA18812.1| hscarg dehydrogenase, [Penicillium marneffei ATCC 18224]
  misc_feature (6)..(313): NCBI GI: 212541022 Blast Desc: conserved [Penicillium marneffei ATCC 18224] gi|210067965|gb|EEA22057.1| conserved [Penicillium marneffei ATCC 18224]
  misc_feature (6)..(318): NCBI GI: 199431881 Blast Desc: DEHA2D19008p [Debaryomyces hansenii]
  misc_feature (6)..(318): NCBI GI: 169610335 Blast Desc: SNOG_08267 [Phaeosphaeria nodorum SN15] gi|111063423|gb|EAT84543.1| SNOG_08267 [Phaeosphaeria nodorum SN15]
  misc_feature (6)..(318): NCBI GI: 50421523 Blast Desc: DEHA0D20515g [Debaryomyces hansenii CBS767]
  misc_feature (2)..(311): NCBI GI: 242763533 Blast Desc: hscarg dehydrogenase, [Talaromyces stipitatus ATCC 10500] gi|218723789|gb|EED23206.1| hscarg dehydrogenase, [Talaromyces stipitatus ATCC 10500]
  misc_feature (5)..(318): NCBI GI: 169595688 Blast Desc: SNOG_00588 [Phaeosphaeria nodorum SN15] gi|111070963|gb|EAT92083.1| SNOG_00588 [Phaeosphaeria nodorum SN15]
MASQKKILAIFGATGNQGGSVLSHVLSSPDLSSQYAIRAITRDINSSSALALRSKGVEDIVAGDLNNSSTLPTALRGAHTVYLMSTPDMTLPYPEAKAAELNAAKAAADACVAAGVSYLIFSTLPHIEEGSGGKYKRVAGFDAKAEAEAYMRTLPLKTAFFAPGSFMQNWNSRSIYPSPANDGSYIVARPVAPETKLPLIDISGDTGKFVGAILADPEKYEGKTFCAATKLYSLIEICEAIAKATGKKVSYEQITPEEFKGFMRGSLYADILIDMMLYQQDFGYYFDETERKIDWAVENARGDVTTFEEFLEREPIVL

SEQ ID NO: 15261 - DNA, 2667 bp, Muscodor strobelii
  misc_feature: SGI cDNA ID NO. 565051
  misc_feature: Encodes the peptide sequence at SEQ ID NO 15262
atggcagatcgcgatatcctcccagccaatgtgaaaccatcccactatgacctttccatctcctctttgaagtttgaagattggtcttatcaaggtgaagtatcactcagcattcatgtctcgattgctgagcctacaaaggagattgtcatcaattcgctggaattgaccctcgaaaaagctgagatcacagtggaccacactaaagcttcacagtcttttcaaaccacggctttcagctatgatgagaagaagcaacgtgcaaccatcaaatttcctgaggatgtcccgccgtcacctcaggctattttgaagatcactttcaaaggcatcataaacaatgacatggccggattctacaggagcaagtataaacccaccgtgccagctgcaacgtcggttccgagagatgagagctttcactatatgttctctacgcaatttgaggcctgtgatgcccgccgtgcatttccctgttttgacgagcctcgtctcaagtcgactttcgattttcaaatcgaaattcctgacgatcaagtggctttgtctaatatgcctgtaaagtccagcttgaaggcacgtgatggctttaagatggtgtctttcgaacgcactccagtgatgagcacttatttgctggcatgggctgtgggagatttcgagtatgtcgagggctttaccgaacgacggtacaatggaaagcagatacctgttcgcgtatacaccacccgaggcttaaaggagcagggtcgtttcgccctagagcatgcacccaagaccattgatctcttctctgaaagttttggcatcgattatcctcttccaaagtcagatcttctggcggtgcacgaatttactcacggagctatggagaactggggactggtcacttaccgcacaacagctgtccttttcgatgagaagacgtccgatgtgaggtacaagaaccgtgttgcttatgtcgtcgctcatgagctcgctcatcagtggttcggcaacctggtcaccatggattggtgggatgagctttggctcaatgagtcttttgccacttgggctggctggtacgctgtaaacgagtttcatcctgactggcaagtatgggcacagtttgtgaatgaaggtatggagtcagcatttaagctggacggtatgcgcgcgtctcatcctgttcacgtgccagtgcaagatgcccttgatgtcaatcagatattcgatcacatcagctacctcaaaggttgttcgactttacgaatgcttgtcaaccaccttggcgtaaagacattccttaaaggcgtctcgacgtacctcaacaagtacgcttacggaaacgctaagacggagtacctttggcaggctctctctgaagcatcaggagaggatgtggacaaactgatgggtaattggattgagaaaatcggtcatcccgtcctcaccgtcgctgaagagcctggtcagatttctatcaaacaaaatcgttatctggccactggtgatgtcaagcccgaggaggacgagaccgcatggtgggtgcctctgggtctcgaaggaaagagtggcacacaaggcattcagaccctcgcattaacggagaagaccacgactattcgagatgtcgataatgacttctacaaactcaacagcaacgcaactggtttttaccgaacgaactacccacctcctcgtctcgccaagcttggcacgcagcttgatcgactgagtaccgaagacaagatttccatgatcggctcagcagctgacttggcattctctggatatggtgcgactgcagcgcttctatccttcgttcaaggctttaaagctgagaccaaccacctggtctgggcccaagttctggactctctcggttccgtcaagtcaatcttcagtgacgacgaggagatcaagaagggactagaaagctttgctttgaagctggttagcgatgctgtcgaaaagatcggatgggagttctccagcagcgaggatttcctgactggaatgcttcgcaagagactgctcttgaatgccgctaccaacggccataaagcggtaacggaaaaggcgttatctatgtttgatgcctgggcctcacaaggtacaacattcaatccgaacctcagaagtgtcgtgtatcgcacggccatcaagacaaagcctggcgaagcaattcctgcactcaagaaggaatggtacaacggtacttctatcgatggcaaagaagtgtgcttgacttcactcggtcacacacgcgatcttgatctagtggagaaggctctgctaccattcctcttcgatatttcgcctccagctccggccacggagtctatcccgtctggagatatgcattctctgtgctccgtcttgtcgggcaactcagctacccgtaatttgcaatggaagtacatgcaggggaactgggagaagctaacgacgaaaatggccaacccggtcgtgttggatcggtttgtgaagctgtctctcagcaagttcactgacgcgaaatacgtcgacgagatcgatgccttcttcgcagataaggacaccagcagcttcgaccgcactctggagcaggtcaaagatgccattcgcggacgtgccgcctaccgctctcgcgatgccgacggaatcaaggaatggttgggtgcaaacggttatctccagtag

SEQ ID NO: 15262 - protein, 888 aa, Muscodor strobelii
  misc_feature: SGI Peptide ID NO. 565051
  misc_feature (7)..(413): Pfam Id: PF01433 Pfam Desc: Peptidase family M1
  misc_feature (1)..(886): NCBI GI: 46109444 Blast Desc: FG01604.1 [Gibberella zeae PH-1]
  misc_feature (1)..(886): NCBI GI: 256730746 Blast Desc: [Nectria haematococca mpVI 77-13-4]
  misc_feature (1)..(886): NCBI GI: 171678137 Blast Desc: protein product [Podospora anserina] gi|170937138|emb|CAP61795.1| protein product [Podospora anserina]
  misc_feature (1)..(888): NCBI GI: 39957656 Blast Desc: MGG_09190 [Magnaporthe grisea 70-15] gi|145013375|gb|EDJ98016.1| MGG_09190 [Magnaporthe grisea 70-15]
  misc_feature (1)..(886): NCBI GI: 116205850 Blast Desc: conserved [Chaetomium globosum CBS 148.51] gi|88182815|gb|EAQ90283.1| conserved [Chaetomium globosum CBS 148.51]
  misc_feature (1)..(886): NCBI GI: 85092614 Blast Desc: NCU02319 [Neurospora crassa OR74A] gi|28920914|gb|EAA30246.1| NCU02319 [Neurospora crassa OR74A]
  misc_feature (1)..(886): NCBI GI: 261356965 Blast Desc: aminopeptidase [Verticillium albo-atrum VaMs.102]
  misc_feature (2)..(886): NCBI GI: 156063720 Blast Desc: SS1G_01978 [Sclerotinia sclerotiorum 1980] gi|154697312|gb|EDN97050.1| SS1G_01978 [Sclerotinia sclerotiorum 1980]
  misc_feature (3)..(886): NCBI GI: 169776635 Blast Desc: [Aspergillus oryzae RIB40] gi|238503357|ref|XP_002382912.1| aminopeptidase, [Aspergillus flavus NRRL3357] gi|83771519|dbj|BAE61651.1| protein product
  misc_feature (1)..(886): NCBI GI: 121717596 Blast Desc: aminopeptidase, [Aspergillus clavatus NRRL 1] gi|119404295|gb|EAW14671.1| aminopeptidase, [Aspergillus clavatus NRRL 1]
  misc_feature (7)..(883): SWISSPROT Homolog: EC 3.4.11.7 Glutamyl aminopeptidase
MADRDILPANVKPSHYDLSISSLKFEDWSYQGEVSLSIHVSIAEPTKEIVINSLELTLEKAEITVDHTKASQSFQTTAFSYDEKKQRATIKFPEDVPPSPQAILKITFKGIINNDMAGFYRSKYKPTVPAATSVPRDESFHYMFSTQFEACDARRAFPCFDEPRLKSTFDFQIEIPDDQVALSNMPVKSSLKARDGFKMVSFERTPVMSTYLLAWAVGDFEYVEGFTERRYNGKQIPVRVYTTRGLKEQGRFALEHAPKTIDLFSESFGIDYPLPKSDLLAVHEFTHGAMENWGLVTYRTTAVLFDEKTSDVRYKNRVAYVVAHELAHQWFGNLVTMDWWDELWLNESFATWAGWYAVNEFHPDWQVWAQFVNEGMESAFKLDGMRASHPVHVPVQDALDVNQIFDHISYLKGCSTLRMLVNHLGVKTFLKGVSTYLNKYAYGNAKTEYLWQALSEASGEDVDKLMGNWIEKIGHPVLTVAEEPGQISIKQNRYLATGDVKPEEDETAWWVPLGLEGKSGTQGIQTLALTEKTTTIRDVDNDFYKLNSNATGFYRTNYPPPRLAKLGTQLDRLSTEDKISMIGSAADLAFSGYGATAALLSFVQGFKAETNHLVWAQVLDSLGSVKSIFSDDEEIKKGLESFALKLVSDAVEKIGWEFSSSEDFLTGMLRKRLLLNAATNGHKAVTEKALSMFDAWASQGTTFNPNLRSVVYRTAIKTKPGEAIPALKKEWYNGTSIDGKEVCLTSLGHTRDLDLVEKALLPFLFDISPPAPATESIPSGDMHSLCSVLSGNSATRNLQWKYMQGNWEKLTTKMANPVVLDRFVKLSLSKFTDAKYVDEIDAFFADKDTSSFDRTLEQVKDAIRGRAAYRSRDADGIKEWLGANGYLQ

SEQ ID NO: 15263 - DNA, 4775 bp, Muscodor strobelii
  misc_feature: SGI EST ID NO. CUFF.36292.0
  misc_feature: Variant of the nucleotide sequence at SEQ ID NO 15261
attgatacttgcttcattttctgtatcatttgttgatttgatattttcctagaggcagactttcaatcatctaattttaattcactcttttaatttcttatctcttcagttgcttttagcataacttacttcccttacctaaagccatgtttttccaacttatcagccgtacctaatcttataacctggagcaccaaagtgtgagactgtcaagccagtcgaaaggcaacctccagctgattatcacgagagtcaccacggtgctaattactgccttactctaatcgaacgacaaggtatctgcagattgaaatacactgcttcatatacaggccgctcgtacccgggcaaagcatcctcgttggtctcctatcagccgaacgcctggccgctagacggagaatttacggcgtagcaaatggatcatgtcattgggttagtaccccgatttttcagggtagcggccaatatgcgaggggtcaatttctccagtcttagtggcacatactgggcacagagatctttcgtgtcaagtactgggctaaggccaagacattgtgtaaatccccgttggtcagagagcttcgtcttctgtccgcctcagagtaacattaatctcaagagtttcctgcgctatttggcaatttgccgagctttcacatcgtcacctgcccattttgtcgcatcaccacactatcatagagccggagccagaaaaccccaccatcgccacagcttggtgacatatccacacgaacacggcacgcaaagtcaaaagactcaaactctttcctcctcactctttccaactcgactcttttcttctacttcaagtgtgtcctgctcggcaataataccatcctccatcatggcagatcgcgatatcctcccagccaatgtgaaaccatcccactatgacctttccatctcctctttgaagtttgaagattggtcttatcaaggtgaagtatcgtgagtcgctgagtctccaacgccaatatctcataacatcttctaatcagactcagcattcatgtctcgattgctgagcctacaaaggagattgtcatcaattcgctggaattgaccctcgaaaaagctgagatcacagtggaccacactaaagcttcacagtcttttcaaaccacggctttcagctatgatgagaagaagcaacgtgcaaccatcaaatttcctgaggatgtcccgccgtcacctcaggctattttgaagatcactttcaaaggcatcataaacaatgacatggccggattctacaggagcaagtataaacccaccgtgccagctgcaacgtcggttccgagagatgagagctttcactatatgttctctacgcaatttgaggcctgtgatgcccgccgtgcatttccctgttttgacgagcctcgtctcaagtcgactttcgattttcaaatcgaaattcctgacgatcaagtggctttgtctaatatgcctgtaaagtccagcttgaaggcacgtgatggctttaagatggtgtctttcgaacgcactccagtgatgagcacttatttgctggcatgggctgtgggagatttcgagtatgtcgagggctttaccgaacgacggtacaatggaaagcagatacctgttcgcgtatacaccacccgaggcttaaaggagcagggtcgtttcgccctagagcatgcacccaagaccattgatctcttctctgaaagttttggcatcgattatcctcttccaaagtcagatcttctggcggtgcacgaatttactcacggagctatggagaactggggactggtcacttaccgcacaacagctgtccttttcgatgagaagacgtccgatgtgaggtacaagaaccgtgttgcttatgtcgtcgctcatgagctcgctcatcagtggttcggcaacctggtcaccatggattggtgggatgagctttggctcaatgagtcttttgccacttgggctggctggtacgctgtaaacgagtttcatcctgactggcaagtatgggcacagtttgtgaatgaaggtatggagtcagcatttaagctggacggtatgcgcgcgtctcatcctgttcacgtgccagtgcaagatgcccttgatgtcaatcagatattcgatcacatcagctacctcaaaggttgttcgactttacgaatgcttgtcaaccaccttggcgtaaagacattccttaaaggcgtctcgacgtacctcaacaagtacgcttacggaaacgctaagacggagtacctttggcaggctctctctgaagcatcaggagaggatgtggacaaactgatgggtaattggattgagaaaatcggtcatcccgtcctcaccgtcgctgaagagcctggtcagatttctatcaaacaaaatcgttatctggccactggtgatgtcaagcccgaggaggacgagaccgcatggtgggtgcctctgggtctcgaaggaaagagtggcacacaaggcattcagaccctcgcattaacggagaagaccacgactattcgagatgtcgataatgacttctacaaactcaacagcaacgcaactggtttttaccgaacgaactacccacctcctcgtctcgccaagcttggcacgcagcttgatcgactgagtaccgaagacaagatttccatgatcggctcagcagctgacttggcattctctggatatggtgcgactgcagcgcttctatccttcgttcaaggctttaaagctgagaccaaccacctggtctgggcccaagttctggactctctcggttccgtcaagtcaatcttcagtgacgacgaggagatcaagaagggactagaaagctttgctttgaagctggttagcgatgctgtcgaaaagatcggatgggagttctccagcagcgaggatttcctgactggaatgcttcgcaagagactgctcttgaatgccgctaccaacggccataaagcggtaacggaaaaggcgttatctatgtttgatgcctgggcctcacaaggtacaacattcaatccgaacctcagaagtgtcgtgtatcgcacggccatcaagacaaagcctggcgaagcaattcctgcactcaagaaggaatggtacaacggtacttctatcgatggcaaagaagtgtgcttgacttcactcggtcacacacgcgatcttgatctagtggagaaggctctgctaccattcctcttcgatatttcgcctccagctccggccacggagtctatcccgtctggagatatgcattctctgtgctccgtcttgtcgggcaactcagctacccgtaatttgcaatggaagtacatgcaggggaactgggagaagctaacgacgaaaatggccaacccggtcgtgttggatcggtttgtgaagctgtctctcagcaagttcactgacgcgaaatacgtcgacgagatcgatgccttcttcgcagataaggacaccagcagcttcgaccgcactctggagcaggtcaaagatgccattcgcggacgtgccgcctaccgctctcgcgatgccgacggaatcaaggaatggttgggtgcaaacggttatctccagtagttttggaacgtaattgtaacccggcctagaacctccccgcgacatgtcggtatggttgggctgggcatatatatacctggacgtgggtggttgtaggaacgagtaccgggtatctgaaggacagatgccttgcgttgcaaggacgataaatgctacttcaatcgcatgtcggaactgtgtaatagaaaatgcacaatagtcgagatgaattgactgaactatttgaaacctatttcccacgacgactatcaaccacagcaaacttcgatccaccctttagtaccctctacaaaacaataggttccctctcaagaaactcctcaaaagtcgtaacatcacccctagcattctccaccgcccagtcaatcttcctctccgtctcatcaaaataatacccaaaatcctgctgataaagcatcatatcgatcaaaatatcagcatataaactgcccctcataaaccccttaaattcctcaggcgtaatctgctcataactcactttctttcccgtagccttcgcaatcgcctcacagatctcaatcaaactatacaacttagtcgcagcgcaaaacgtcttcccctcgtacttctcaggatccgcaaggatagcaccgacgaatttccctgtgtcgcctgagatatcgatcaacggtaacttcgtctcaggggctactgggcgagcgacgatgtatgaaccgtcgtttgctggggaggggtagatggaccgggaattccaattctgcatgaatgagccaggggcgaagaacgcggtctttaggggcagggtccgcatgtacgcttctgcttcggctttggcgtcgaaaccggctacgcgtttgtatttcccgcctgaaccttcctcgatatgtggaagggtggagaagattaggtatgagacacctgctgcgacgcaagcgtctgctgctgctttcgcggcgttgagctcggcggcttttgcttctgggtaggggagtgtcatgtcgggggtggacattaggtagactgtatgtgctcctcgcaaggcggtgggaagggttgaggagttgttgaggtcgccggctactatgtcctcaacgcctttggagcgaagagcgagagcagaggatgagttgatgtctcgagtgatggctcggatagcatattgcgatgatagatcaggcgaggataggacgtggctcaggactgaaccg

SEQ ID NO: 15264 - DNA, 957 bp, Muscodor strobelii
  misc_feature: SGI cDNA ID NO. 565052
  misc_feature: Encodes the peptide sequence at SEQ ID NO 15265
atggatgacagatcgtcacccccgcgcatccccatcagtcctatggctgagctgtttactgacgccagactagagcgtgctgccatccgagatgcgggcgaaggaagccgccagtttggaagcagcgatgaagatgatgaagacttgcaagacctagacgcaaatgatgaagttgaagccgacacgacggccgacgcagatggagatatggatgccgaagcatttgaggatgacgaggtcgaggaaggcgaggtcgaggaaggcgaggaggagccgccttttgacgccaccgccgtaggcctgaaggaaatcagcaaccttgctagtttcacggccagcagctacaagcctggatgcggtgtcaaggagcttcgtgacgatgatgtcaaccaatactggcagtcagatggcccacagccccatcgcctcaacatccatttcatcaagcgagttgagatacgggctctacgactctttcttgactacgagcttgatgagagctacactcctacgaagattcagattaccgctggctggggtcccaatcttaccattcccttcactacaatggagctcaaccagcccaagggatggatcgatgttcctatcgcaggcgcgggcggtggccctgacggcaactcgctctgctgcttctttgtccgcgtgatcattctcgagaaccaccagaatggcaaagacacgcatatccgtggtgtcaaagtgtatgccctagacgaaggcgcagatacagccgacaacaatccgatcgatgatgttgtcaacgaccttgatgattatcccaaccgcgtgggacgcatgagcctcaacgataatgacgacgatgccctgctacgcctcgacgaagcacgaaagcagaagggtaagggcaagaagtatgcacctggcgatggcggactgaccatccccgacttcatgagggagcccgagattcgttga

SEQ ID NO: 15265 - protein, 318 aa, Muscodor strobelii
  misc_feature: SGI Peptide ID NO. 565052
  misc_feature (80)..(263): Pfam Id: PF03256 Pfam Desc: Anaphase-promoting complex, subunit 10 (APC10)
  misc_feature (103)..(243): Pfam Id: PF03256 Pfam Desc: Anaphase-promoting complex, subunit 10 (APC10)
  misc_feature (77)..(318): NCBI GI: 261356907 Blast Desc: anaphase-promoting complex subunit 10 [Verticillium albo-atrum VaMs.102]
  misc_feature (65)..(318): NCBI GI: 171683830 Blast Desc: protein product [Podospora anserina] gi|170941875|emb|CAP67528.1| protein product [Podospora anserina]
  misc_feature (94)..(318): NCBI GI: 256728930 Blast Desc: NECHADRAFT_93339 [Nectria haematococca mpVI 77-13-4]
  misc_feature (92)..(318): NCBI GI: 46138601 Blast Desc: FG10815.1 [Gibberella zeae PH-1]
  misc_feature (11)..(318): NCBI GI: 154296826 Blast Desc: BC1G_12502 [Botryotinia fuckeliana B05.10] gi|150843156|gb|EDN18349.1| BC1G_12502 [Botryotinia fuckeliana B05.10]
  misc_feature (94)..(318): NCBI GI: 164423406 Blast Desc: NCU08731 [Neurospora crassa OR74A] gi|157070079|gb|EAA34356.2| [Neurospora crassa OR74A]
  misc_feature (94)..(318): NCBI GI: 12718366 Blast Desc: related to anaphase promoting complex subunit 10 [Neurospora crassa]
  misc_feature (42)..(318): NCBI GI: 39961695 Blast Desc: MGG_09554 [Magnaporthe grisea 70-15] gi|145011057|gb|EDJ95713.1| MGG_09554 [Magnaporthe grisea 70-15]
  misc_feature (76)..(318): NCBI GI: 156043912 Blast Desc: SS1G_10059 [Sclerotinia sclerotiorum 1980] gi|154694448|gb|EDN94186.1| SS1G_10059 [Sclerotinia sclerotiorum 1980]
  misc_feature (93)..(246): NCBI GI: 116200263 Blast Desc: CHGG_08287 [Chaetomium globosum CBS 148.51] gi|88179566|gb|EAQ87034.1| CHGG_08287 [Chaetomium globosum CBS 148.51]
MDDRSSPPRIPISPMAELFTDARLERAAIRDAGEGSRQFGSSDEDDEDLQDLDANDEVEADTTADADGDMDAEAFEDDEVEEGEVEEGEEEPPFDATAVGLKEISNLASFTASSYKPGCGVKELRDDDVNQYWQSDGPQPHRLNIHFIKRVEIRALRLFLDYELDESYTPTKIQITAGWGPNLTIPFTTMELNQPKGWIDVPIAGAGGGPDGNSLCCFFVRVIILENHQNGKDTHIRGVKVYALDEGADTADNNPIDDVVNDLDDYPNRVGRMSLNDNDDDALLRLDEARKQKGKGKKYAPGDGGLTIPDFMREPEIR

SEQ ID NO: 15266 - DNA, 3191 bp, Muscodor strobelii
  misc_feature: SGI EST ID NO. CUFF.36321.0
  misc_feature: Variant of the nucleotide sequence at SEQ ID NO 15264
cgttcattgggaaccggtgtccgtgcatcggaggtgacgacaaacgacgctgattatcaaggcctggtgcctcgactcaagtcagcatggataaccgtcatccagtgcctgaggagggttcatcctcagtctctctgtatctacagcgccgtcgacagcaagcaaggaatgagcgccggcgacatttgcggaccgcaagtcggcctaggactactcaagatgatgaccaggctcatcaaacgcccgtgtctgcagccagagttgatgctaggactttcaacgagagtatacagttagggcggccagccgatgctcaatgggctttccggactcctgaagagcgtgctgccatccgagatgcgggcgaaggaagccgccagtttggaagcagcgatgaagatgatgaagacttgcaagacctagacgcaaatgatgaagttgaagccgacacgacggccgacgcagatggagatatggatgccgaagcatttgaggatgacgaggtcgaggaaggcgaggtcgaggaaggcgaggaggagccgccttttgacgccaccgccgtaggcctgaaggaaatcagcaaccttgctagtttcacggccagcagctacaagcctggatgcggtgtcaaggagcttcgtgacgatgatgtcaaccaatactggcagtcagatggcccacagccccatcgcctcaacatccatttcatcaagcgagttgagatacgggctctacgactctttcttgactacgagcttgatgagagctacactcctacgaagattcagattaccgctggctggggtcccaatcttaccattcccttcactacaatggagctcaaccagcccaagggatggatcgatgttcctatcgcaggcgcgggcggtggccctgacggcaactcgctctgctgcttctttgtccgcgtgatcattctcgagaaccaccagaatggcaaagacacgcatatccgtggtgtcaaagtgtatgccctagacgaaggcgcagatacagccgacaacaatccgatcgatgatgttgtcaacgaccttgatgattatcccaaccgcgtgggacgcatgagcctcaacgataatgacgacgatgccctgctacgcctcgacgaagcacgaaagcagaagggtaagggcaagaagtatgcacctggcgatggcggactgaccatccccgacttcatgagggagcccgagattcgttgaaacacgactacaacgtcaagacatacagctggctggtgcataatcgagcatggacacggcgttggggaatgacgggatgaggttcatgatacccttgctttcttgcggaaaaagactttgtgattacgagcagatgagatgacgaatgataattgaagagcgtggaagctcttgcctaagtctggctcaatgcacaggtagacattcggacggtggcattaacgtctcaacgaggccaccttgtagaccttagtacgttaggtacctaatgaactgctcatgccgtctactatgcgactgcctatgtcgtcttctgcaaagcgtgagaattgacactttgaaaatacgtcaccaaatcgccaattgccctccacaacacgaagataacatttgttcgtcttttgaccacagatggtagcgaatttgtgaactgttgccatcaatttagcagctagcggaggttgtcgggactggaggtaaggtattgcctgtggtccagtgctgcatcacccacatcgcataattgccgcccgctcacaagtgatctcatctcttcctcctgtccttcgttgtaaagctaaacctgcatgaacgtcctgtcaatcgattactcgcagtattgtattctcgatgtcttttcatcccttatcgcagtagtagctgcccgcatatccaccgccgaaatgcgcaacgtgcgctgaaacgcaatgccgccgcgacccccgccaaatcttgtggcgctcttcagccaggcgctgaacaacttccagctctcggaatcgacgtttcgagtgctctgctcaattgtcccatctgctgtgcccgatgccctccatgcactgccgccgagactgtctcccaagacgatcctcgtacttgactcctcgttcaatccgccgacactagcgcaccatcgcatgaccctctctgcgctttccgacccacgctatcagccagagcagtcagtggatactaccgacaatacagaagcccgtggtctgccagaggtttcgcctgcgtcacgcgtcctgctcctcctcgcgataaataatgcagacaaagcacctaagccggcagccttccctgagcgcctggccatgatgcacgtctttgctcagcagctgatacaaaagtcagctacgggacgagcgtctccgacccatgatcgggagagtacagatggaggtgcaagctgcgaggctgtggatattgcggttacgactgaaccctatttccacgccaaatgtcaggcaattgccactagcgatttctatagcggcattgagaatacagactcgcctgcaagcgcagtgagtgtagataacgccattggctctgagcaagtctatctcacggggttcgatactttgatccgcattttcaatcccaagtactatcccgataattctatgaagcaatccctcgatccgctcttcgcgcacgccaggttacgtgtgactatgcgcacagatgatgaatggggcggcgcggaacagcaggtcgcctatctcgacgatctccaagatggtaagcttgaagagatgggaggtagacccgagtgggctgagaaggtcgagctagtcgagggccgcaaagacgacgaggcaatcgtcagcagtacgaaagtacgcgacgcagtccacaagcaggactgggaggctctcgagcaactcgtgagcgcggacattgccagattcatccgcgaacacgagctgtattctaaacaagactgaatgggactatttgaaagcctcttaacaatcttgcggtgtgacttatccgaagagattgacgacgatcgggctttgatatgccttcggactcgaaaggtcttacttgcagactacttcacgatcatctctacatgattgagaatgagactcggcgctcttatacgaggcaacatactctttgccagtcactctcatattacatatttcgctatctagaatttaagtcaattaaaag

SEQ ID NO: 15267 - DNA, 1026 bp, Muscodor strobelii
  misc_feature: SGI cDNA ID NO. 565053
  misc_feature: Encodes the peptide sequence at SEQ ID NO 15268
atgccgccgcgacccccgccaaatcttgtggcgctcttcagccaggcgctgaacaacttccagctctcggaatcgacgtttcgagtgctctgctcaattgtcccatctgctgtgcccgatgccctccatgcactgccgccgagactgtctcccaagacgatcctcgtacttgactcctcgttcaatccgccgacactagcgcaccatcgcatgaccctctctgcgctttccgacccacgctatcagccagagcagtcagtggatactaccgacaatacagaagcccgtggtctgccagaggtttcgcctgcgtcacgcgtcctgctcctcctcgcgataaataatgcagacaaagcacctaagccggcagccttccctgagcgcctggccatgatgcacgtctttgctcagcagctgatacaaaagtcagctacgggacgagcgtctccgacccatgatcgggagagtacagatggaggtgcaagctgcgaggctgtggatattgcggttacgactgaaccctatttccacgccaaatgtcaggcaattgccactagcgatttctatagcggcattgagaatacagactcgcctgcaagcgcagtgagtgtagataacgccattggctctgagcaagtctatctcacggggttcgatactttgatccgcattttcaatcccaagtactatcccgataattctatgaagcaatccctcgatccgctcttcgcgcacgccaggttacgtgtgactatgcgcacagatgatgaatggggcggcgcggaacagcaggtcgcctatctcgacgatctccaagatggtaagcttgaagagatgggaggtagacccgagtgggctgagaaggtcgagctagtcgagggccgcaaagacgacgaggcaatcgtcagcagtacgaaagtacgcgacgcagtccacaagcaggactgggaggctctcgagcaactcgtgagcgcggacattgccagattcatccgcgaacacgagctgtattctaaacaagactga

SEQ ID NO: 15268 - protein, 341 aa, Muscodor strobelii
  misc_feature: SGI Peptide ID NO. 565053
  misc_feature (8)..(337): NCBI GI: 38524228 Blast Desc: conserved [Neurospora crassa]
  misc_feature (9)..(337): NCBI GI: 171683828 Blast Desc: protein product [Podospora anserina] gi|170941874|emb|CAP67527.1| protein product [Podospora anserina]
  misc_feature (8)..(339): NCBI GI: 261356975 Blast Desc: cytidylyltransferase family protein [Verticillium albo-atrum VaMs.102]
  misc_feature (8)..(337): NCBI GI: 115398133 Blast Desc: conserved [Aspergillus terreus NIH2624] gi|114192849|gb|EAU34549.1| conserved [Aspergillus terreus NIH2624]
  misc_feature (4)..(337): NCBI GI: 225560548 Blast Desc: cytidylyltransferase [Ajellomyces capsulatus G186AR]
  misc_feature (8)..(338): NCBI GI: 239610825 Blast Desc: cytidylyltransferase [Ajellomyces dermatitidis ER-3]
  misc_feature (13)..(331): NCBI GI: 119188039 Blast Desc: CIMG_04067 [Coccidioides immitis RS]
  misc_feature (8)..(338): NCBI GI: 261206404 Blast Desc: cytidylyltransferase [Ajellomyces dermatitidis SLH14081] gi|239592998|gb|EEQ75579.1| cytidylyltransferase [Ajellomyces dermatitidis SLH14081]
  misc_feature (13)..(331): NCBI GI: 240107986 Blast Desc: CPC735_003290 [Coccidioides posadasii C735 delta SOWgp]
  misc_feature (8)..(339): NCBI GI: 169773753 Blast Desc: [Aspergillus oryzae RIB40] gi|83769206|dbj|BAE59343.1| protein product [Aspergillus oryzae]
MPPRPPPNLVALFSQALNNFQLSESTFRVLCSIVPSAVPDALHALPPRLSPKTILVLDSSFNPPTLAHHRMTLSALSDPRYQPEQSVDTTDNTEARGLPEVSPASRVLLLLAINNADKAPKPAAFPERLAMMHVFAQQLIQKSATGRASPTHDRESTDGGASCEAVDIAVTTEPYFHAKCQAIATSDFYSGIENTDSPASAVSVDNAIGSEQVYLTGFDTLIRIFNPKYYPDNSMKQSLDPLFAHARLRVTMRTDDEWGGAEQQVAYLDDLQDGKLEEMGGRPEWAEKVELVEGRKDDEAIVSSTKVRDAVHKQDWEALEQLVSADIARFIREHELYSKQD

SEQ ID NO: 15269 - DNA, 3191 bp, Muscodor strobelii; identical to SEQ ID NO: 15266
  misc_feature: SGI EST ID NO. CUFF.36321.0
  misc_feature: Variant of the nucleotide sequence at SEQ ID NO 15267

SEQ ID NO: 15270 - DNA, 840 bp, Muscodor strobelii
  misc_feature: SGI cDNA ID NO. 565054
  misc_feature: Elevated expression when VOC is produced
  misc_feature: Encodes the peptide sequence at SEQ ID NO 15271
atggcctcgtccactttaccaaccataatgctagtgtgcggtgcgtggcatacaccgccagcgtaccaagcatatatcgatgggctacagaaagctggctttacagtttcctgcccacgcttgccaagttgcagcgggacacgtaactcgctcccggccgctaaaccctcccttcgcgaggatgcgataatggtccgctcaaatgtacgagctctcgttgagagtggccaacgcgtgctgatgatcatgcattcgtacggcggagcggtcggctcagaagctgttggtttcgaaagccccgagctcgagccgctctcatacgccaaccggagggcaaaaggtcttgaaggcggcgtaggagatttgctcttcctttgtgcatacattcttgatgtcgggcaaacactcaccgatatagtggaagcaaccgtgaatacggaactgttggcgaaatacacggacgtcaacgtggaggagggatgggtatgggcgaacgatccaggattctcgttcttcagttcgtcgaaagaggttgatccagataatgagcatgtgaaacgtcagatgcctcatcttgttgcatggcccatctcggcgctattaactcctatcgagtatgctgcgtggaagcatattcctagttcgtatgttcacacgacaaacgattggggggttctgacagcctatcaagaagtaatgacgaaacatgtcaaagaggtcggcgtagagctcaagattacagtgtatgatacgtatcatagtgtatggatttcgcatccagaggagatggtgcaggaagcattgaacgcggctacggaccctaggaatgaggcatcctag

SEQ ID NO: 15271 - protein, 279 aa, Muscodor strobelii
  misc_feature: SGI Peptide ID NO. 565054
  misc_feature (10)..(276): NCBI GI: 145240765 Blast Desc: An08g09180 [Aspergillus niger] gi|134077553|emb|CAK96697.1| protein product [Aspergillus niger]
  misc_feature (7)..(264): NCBI GI: 169773097 Blast Desc: [Aspergillus oryzae RIB40] gi|83768878|dbj|BAE59015.1| protein product [Aspergillus oryzae]
  misc_feature (7)..(264): NCBI GI: 238491036 Blast Desc: conserved [Aspergillus flavus NRRL3357] gi|220697168|gb|EED53509.1| conserved [Aspergillus flavus NRRL3357]
  misc_feature (7)..(265): NCBI GI: 238485370 Blast Desc: conserved [Aspergillus flavus NRRL3357] gi|220698802|gb|EED55141.1| conserved [Aspergillus flavus NRRL3357]
  misc_feature (7)..(265): NCBI GI: 169772025 Blast Desc: [Aspergillus oryzae RIB40] gi|83768341|dbj|BAE58480.1| protein product [Aspergillus oryzae]
  misc_feature (7)..(260): NCBI GI: 238837612 Blast Desc: conserved [Microsporum canis CBS 113480]
  misc_feature (1)..(264): NCBI GI: 171684613 Blast Desc: protein product [Podospora anserina] gi|170942267|emb|CAP67919.1| protein product [Podospora anserina]
  misc_feature (3)..(269): NCBI GI: 156066009 Blast Desc: SS1G_01015 [Sclerotinia sclerotiorum 1980] gi|154691874|gb|EDN91612.1| SS1G_01015 [Sclerotinia sclerotiorum 1980]
  misc_feature (8)..(271): NCBI GI: 238488277 Blast Desc: conserved [Aspergillus flavus NRRL3357] gi|220697764|gb|EED54104.1| conserved [Aspergillus flavus NRRL3357]
  misc_feature (1)..(245): NCBI GI: 212535352 Blast Desc: conserved [Penicillium marneffei ATCC 18224] gi|210070231|gb|EEA24321.1| conserved [Penicillium marneffei ATCC 18224]
  misc_feature: Useful for introducing or modulating the production of volatile compounds
MASSTLPTIMLVCGAWHTPPAYQAYIDGLQKAGFTVSCPRLPSCSGTRNSLPAAKPSLREDAIMVRSNVRALVESGQRVLMIMHSYGGAVGSEAVGFESPELEPLSYANRRAKGLEGGVGDLLFLCAYILDVGQTLTDIVEATVNTELLAKYTDVNVEEGWVWANDPGFSFFSSSKEVDPDNEHVKRQMPHLVAWPISALLTPIEYAAWKHIPSSYVHTTNDWGVLTAYQEVMTKHVKEVGVELKITVYDTYHSVWISHPEEMVQEALNAATDPRNEAS

SEQ ID NO: 15272 - DNA, 541 bp, Muscodor strobelii
  misc_feature: SGI EST ID NO. CUFF.36297.0
  misc_feature: Variant of the nucleotide sequence at SEQ ID NO 15270
ggcggcgtaggagatttgctcttcctttgtgcatacattcttgatgtcgggcaaacactcaccgatatagtggaagcaaccgtgaatacggaactgttggcgaaatacacggacgtcaacgtggaggagggatgggtatgggcgaacgatccaggattctcgttcttcagttcgtcgaaagaggttgatccagataatgagcatgtgaaacgtcagatgcctcatcttgttgcatggcccatctcggcgctattaactcctatcgagtatgctgcgtggaagcatattcctagttcgtatgttcacacgacaaacgattggggggttctgacagcctatcaagaagtaatgacgaaacatgtcaaagaggtcggcgtagagctcaagattacagtgtatgatacgtatcatagtgtatggatttcgcatccagaggagatggtgcaggaagcattgaacgcggctacggaccctaggaatgaggcatcctaggagaccaacgcagtcgtagtgtagagaacccgataaattttggctgctt

SEQ ID NO: 15273 - DNA, 1371 bp, Muscodor strobelii
  misc_feature: SGI cDNA ID NO. 565055
  misc_feature: Encodes the peptide sequence at SEQ ID NO 15274
atgcctatgtatgagaagatcgccaccgagggcaagaccgaggtcaccctcctcactccccccaccacccctaccaccgtcgcctctgccggagagactggcatcgaggctagtggttctcctacctctcctgtcatcctcatcaatggcatgccctacatcactgagcgtatcatggccatgggagctgctctcgagaacgctcgtcgcgctggtcacttccctgagactcgtactcccgactacaacgtccaggctgtcgtcgatgactacaccgatctccagcgcctcaatgctgctcttcgtcaggaaggtcaggtcctcaacatccgcgagcacgctactcaccccatcatcggccccctctacgtcggtattcagcgtcgcattcagaaccgcgacaccactgagggagaatacgccgccgaggccaacgtccgcgcacgtattcagggctttgccaatggtgtcgccgctgagactggcatctataacctcatgcgtcacgccatccacaccgttcttcgtaacaatggtctcactggtcagaacgacaacagcgctgtcgattctgctgctactcgcgtcatcgatgaggttcgcaccatcgtccatggtcaggctatcactggcgccaatggtgtcactcaggagaacatgaacggtgtcatcgatgaagtcttcaccgccattcagggtgctctcggcgagtacaacgatgttcagggcgcccaagctcgcgtcatgcacaacatcgcccttgatcaacgcaccgctactgacgatcagcgtgctgctaccaatgaccagcgtcgctacagcgaagtccagcgcgctgctattgatgatcatcgtgccgtcaccgatgcccagcgtcttctcgcccagtctcagggtgcccagatcaacgctatcggtggccatgtcggtgctatcgacggtcacgtccgctccctcggtactaacctcaacgccatgggtactcttgtcactttgaccaacggcaatcttcagactctctccgccaatgtcgacgttatgcgtaccatgctcaacatgatccctcagatgatcgccgacgctgttcgtcagattcttcctgagatcatcggtcctgctgtcgagcaagccatcaccaatgacctcatcaccggaatgcagggtctggtcaatgttctggctcagtccggtgttcccgccaatgtcaacgtctccagcaagggcggcgtcaagcacgacagtggcaccaagaagggtggtaagggccacggtcgcaagggctctggcggaagctacttttgcggtctgttcggttcgggcggacgaaaggattctggtgctggcggcgctggtggctttgccactgtctag

SEQ ID NO: 15274 - protein, 456 aa, Muscodor strobelii
  misc_feature: SGI Peptide ID NO. 565055
MPMYEKIATEGKTEVTLLTPPTTPTTVASAGETGIEASGSPTSPVILINGMPYITERIMAMGAALENARRAGHFPETRTPDYNVQAVVDDYTDLQRLNAALRQEGQVLNIREHATHPIIGPLYVGIQRRIQNRDTTEGEYAAEANVRARIQGFANGVAAETGIYNLMRHAIHTVLRNNGLTGQNDNSAVDSAATRVIDEVRTIVHGQAITGANGVTQENMNGVIDEVFTAIQGALGEYNDVQGAQARVMHNIALDQRTATDDQRAATNDQRRYSEVQRAAIDDHRAVTDAQRLLAQSQGAQINAIGGHVGAIDGHVRSLGTNLNAMGTLVTLTNGNLQTLSANVDVMRTMLNMIPQMIADAVRQILPEIIGPAVEQAITNDLITGMQGLVNVLAQSGVPANVNVSSKGGVKHDSGTKKGGKGHGRKGSGGSYFCGLFGSGGRKDSGAGGAGGFATV

SEQ ID NO: 15275 - DNA, 416 bp, Muscodor strobelii
  misc_feature: SGI EST ID NO. CUFF.36309.0
  misc_feature: Variant of the nucleotide sequence at SEQ ID NO 15273
gctgctaccaatgaccagcgtcgctacagcgaagtccagcgcgctgctattgatgatcatcgtgccgtcaccgatgcccagcgtcttctcgcccagtctcagggtgcccagatcaacgctatcggtggccatgtcggtgctatcgacggtcacgtccgctccctcggtactaacctcaacgccatgggtactcttgtcactttgaccaacggcaatcttcagactctctccgccaatgtcgacgttatgcgtaccatgctcaacatgatccctcagatgatcgccgacgctgttcgtcagattcttcctgagatcatcggtcctgctgtcgagcaagccatcaccaatgacctcatcaccggaatgcagggtctggtcaatgttctggctcagtccggtgttcccgccaatgtcaa

SEQ ID NO: 15276 - DNA, 774 bp, Muscodor strobelii
  misc_feature: SGI cDNA ID NO. 565056
  misc_feature: Encodes the peptide sequence at SEQ ID NO 15277
atggctcccacagaacccgcggaccatttcaagttcctcatctcttgcatccgccactctcagaatggcaaggtcgactttgaggaggtccgcaaggagattggtctcaacaccaagggcgccgctgctaagcgatatgagcgcctcatgaaggcccacggcatcaccaagggaggtggcggtgtcaagtctgagccctccactcccgatggcaaggccgccaagactcccaagactcccaaggcccccaagacacccaagtctgccaagaagcgcaagctcgaggaagttgacgaggaggaaggcgacactgatgagcccatcaaggccgaggacgctatcaaaggtgaagtcaaatccgaagatgcagtcgctgtgaaatccgaacattacaatggcccgctagtcctatccagcacaacattacatccttcctgtccttcatctccgcaacgctctctttccacgaatcccgatccaaccaacgaaaatgacgaagtcttttttgtgtctgcgcacgagaaacatggcgccccggtgaattcagagcacgatcgccacctcaaccaatcccactctcatacacatgctgccagtgcccacggcgctactcccttcgactacaccactgacatgagtttgcccctacagcttccagcgacgactccggcgacgccgactattcaggcgaggcctgatatgttcccgtacggcttttcacctgccccatggatgtatcctcatgatccccatggctatcacagcaaccactag

SEQ ID NO: 15277 - protein, 257 aa, Muscodor strobelii
  misc_feature: SGI Peptide ID NO. 565056
  misc_feature (1)..(101): NCBI GI: 46123741 Blast Desc: FG06248.1 [Gibberella zeae PH-1]
  misc_feature (8)..(89): NCBI GI: 258571609 Blast Desc: [Uncinocarpus reesii 1704] gi|237904878|gb|EEP79279.1| [Uncinocarpus reesii 1704]
  misc_feature (1)..(93): NCBI GI: 256732503 Blast Desc: NECHADRAFT_78767 [Nectria haematococca mpVI 77-13-4]
  misc_feature (1)..(81): NCBI GI: 240109290 Blast Desc: CPC735_027950 [Coccidioides posadasii C735 delta SOWgp]
  misc_feature (1)..(142): NCBI GI: 225678977 Blast Desc: [Paracoccidioides brasiliensis Pb03]
  misc_feature (1)..(161): NCBI GI: 226287981 Blast Desc: [Paracoccidioides brasiliensis Pb18]
  misc_feature (1)..(130): NCBI GI: 226282129 Blast Desc: [Paracoccidioides brasiliensis Pb01]
  misc_feature (8)..(90): NCBI GI: 240276915 Blast Desc: conserved [Ajellomyces capsulatus H143]
  misc_feature (3)..(98): NCBI GI: 261194457 Blast Desc: [Ajellomyces dermatitidis SLH14081] gi|239588171|gb|EEQ70814.1| [Ajellomyces dermatitidis SLH14081]
  misc_feature (1)..(53): NCBI GI: 146322366 Blast Desc: conserved [Aspergillus fumigatus Af293] gi|129556981|gb|EBA27328.1| conserved [Aspergillus fumigatus Af293] gi|159130457|gb|EDP55570.1| conserved [Aspergillus A1163]
MAPTEPADHFKFLISCIRHSQNGKVDFEEVRKEIGLNTKGAAAKRYERLMKAHGITKGGGGVKSEPSTPDGKAAKTPKTPKAPKTPKSAKKRKLEEVDEEEGDTDEPIKAEDAIKGEVKSEDAVAVKSEHYNGPLVLSSTTLHPSCPSSPQRSLSTNPDPTNENDEVFFVSAHEKHGAPVNSEHDRHLNQSHSHTHAASAHGATPFDYTTDMSLPLQLPATTPATPTIQARPDMFPYGFSPAPWMYPHDPHGYHSNH

SEQ ID NO: 15278 - DNA, 990 bp, Muscodor strobelii
  misc_feature: SGI cDNA ID NO. 565057
  misc_feature: Encodes the peptide sequence at SEQ ID NO 15279
atgtcttcactgtcaccaccaaagaccattgcaagcaagcccgtaggcagcgttggctatggcatgatgaatcttacgctgtttgggaacatctctcacgaagaagctatcaagccgatgaaagtagccattgagaatggggcaaatttttggaatgctggaacattctatggacctccagacgcgagctcgctacagcttctaaagtactacttcaccaagtatccagaggatgcgtcgaaagttgtgctcagtgtcaagggagcttatgatggtgcaactcatactccagacggtagccgcgaaggtgtacgcgcagcggtagaaaagacactgcgcattcttgacgggacgcacgcgatcgacctctttgagtgtgcccgtgtcgatcccaaagtaccgatagaggaaactgttcaagccctcgctgagctcatcaaagagggtaagatcggttcttatggcctcagtgaagtcactgccgacactattcgccgcgcttatgcaattcatccgcccgctgccgtcgaggtcgaattgagtctattttcgcgccacgcacttgagaaagacggcatagcggacacctgccacgagctcaacattccccttgtaggctatagccctctcgaccggggctggctcacaggccagttcaagacattagatgatttgccgaaagatgatgttcgtcatcactatccacgtttccagccaggaaattttgagaacaacgtcaaattagccgaactagttgagggtgtcgctaagagaaaaggtacaacacccgcgcaagtggccatcgcatgggtcaaacaccagggcgcgctcccgattccaggtgctacgaagtcgcctcgggtgctagaaaattgcaaggagatcgaattaactgggtctgagctatctgaacttcaggaggcggtgaacaagaccaagatagtgggagctcgttatcctgccctatttcagcctcttctcaaccagtag

SEQ ID NO: 15279 - protein, 329 aa, Muscodor strobelii
  misc_feature: SGI Peptide ID NO. 565057
  misc_feature (16)..(310): Pfam Id: PF00248 Pfam Desc: Aldo/keto reductase family
  misc_feature (11)..(328): NCBI GI: 145602534 Blast Desc: MGG_10908 [Magnaporthe grisea 70-15] gi|145010942|gb|EDJ95598.1| MGG_10908 [Magnaporthe grisea 70-15]
  misc_feature (9)..(328): NCBI GI: 145252072 Blast Desc: An16g02360 [Aspergillus niger] gi|134083092|emb|CAL00460.1| protein product [Aspergillus niger]
  misc_feature (9)..(328): NCBI GI: 226494317 Blast Desc: LOC100272747 [Zea mays] gi|194700512|gb|ACF84340.1| [Zea mays]
  misc_feature (9)..(319): NCBI GI: 242760270 Blast Desc: aldo/keto reductase, [Talaromyces stipitatus ATCC 10500] gi|218723154|gb|EED22571.1| aldo/keto reductase, [Talaromyces stipitatus ATCC 10500]
  misc_feature (9)..(319): NCBI GI: 238838914 Blast Desc: pyridoxal reductase [Microsporum canis CBS 113480]
  misc_feature (10)..(328): NCBI GI: 169607521 Blast Desc: SNOG_06819 [Phaeosphaeria nodorum SN15] gi|160701430|gb|EAT85470.2| SNOG_06819 [Phaeosphaeria nodorum SN15]
  misc_feature (1)..(328): NCBI GI: 212545881 Blast Desc: aldo/keto reductase, [Penicillium marneffei ATCC 18224] gi|210064614|gb|EEA18709.1| aldo/keto reductase, [Penicillium marneffei ATCC 18224]
  misc_feature (10)..(320): NCBI GI: 85119285 Blast Desc: NCU02930 [Neurospora crassa OR74A] gi|28927423|gb|EAA36376.1| NCU02930 [Neurospora crassa OR74A]
  misc_feature (9)..(328): NCBI GI: 242820696 Blast Desc: aldo/keto reductase, [Talaromyces stipitatus ATCC 10500] gi|218714023|gb|EED13447.1| aldo/keto reductase, [Talaromyces stipitatus ATCC 10500]
  misc_feature (9)..(319): NCBI GI: 242767894 Blast Desc: pyridoxal reductase (AKR8), [Talaromyces stipitatus ATCC 10500] gi|218724656|gb|EED24073.1| pyridoxal reductase (AKR8), [Talaromyces stipitatus ATCC 10500]
  misc_feature (15)..(319): SWISSPROT Homolog: EC 1.1.1.65 Pyridoxine 4-dehydrogenase
MSSLSPPKTIASKPVGSVGYGMMNLTLFGNISHEEAIKPMKVAIENGANFWNAGTFYGPPDASSLQLLKYYFTKYPEDASKVVLSVKGAYDGATHTPDGSREGVRAAVEKTLRILDGTHAIDLFECARVDPKVPIEETVQALAELIKEGKIGSYGLSEVTADTIRRAYAIHPPAAVEVELSLFSRHALEKDGIADTCHELNIPLVGYSPLDRGWLTGQFKTLDDLPKDDVRHHYPRFQPGNFENNVKLAELVEGVAKRKGTTPAQVAIAWVKHQGALPIPGATKSPRVLENCKEIELTGSELSELQEAVNKTKIVGARYPALFQPLLNQ

SEQ ID NO: 15280 - DNA, 1692 bp, Muscodor strobelii
  misc_feature: SGI EST ID NO. CUFF.36334.0
  misc_feature: Variant of the nucleotide sequence at SEQ ID NO 15278
tttctggaaacctcatgagattctcgcggcgccttaaagccgggcgctatcaacgatctattgacatcagtgactgcatatagattgagcctaagccaaatggcatctacatatctccggaatgtgcgtccatctggcaatatggtttttggctattgacttaagaccattgattcgtgtgaccatgaaagtttagaaccaacgagacacgctgaatgattgactcggacgcaaatgagcatcatgttactcagctcatatagatataaatatcaaagacaaactcactctctattacctctgatacctcgcagtcagcagtcacatattcgcacacataaatatcgtttagggacctaatactagaaaaattatatctttacaatccgcgcccacttctactcactcgatccagctcgatttgacgatgtcttcactgtcaccaccaaagaccattgcaagcaagcccgtaggcagcgttggctatggcatgatgaatcttacgctgtttgggaacatctctcacgaagaagctatcaagccgatgaaagtagccattgagaatggggcaaatttttggaatgctggaacattctatggacctccagacgcgagctcgctacagcttctaaagtactacttcaccaagtatccagaggatgcgtcgaaagttgtgctcagtgtcaagggagcttatgatggtgcaactcatactccagacggtagccgcgaaggtgtacgcgcagcggtagaaaagacactgcgcattcttgacgggacgcacgcgatcgacctctttgagtgtgcccgtgtcgatcccaaagtaccgatagaggaaactgttcaagccctcgctgagctcatcaaagagggtaagatcggttcttatggcctcagtgaagtcactgccgacactattcgccgcgcttatgcaattcatccgcccgctgccgtcgaggtcgaattgagtctattttcgcgccacgcacttgagaaagacggcatagcggacacctgccacgagctcaacattccccttgtaggctatagccctctcgaccggggctggctcacaggccagttcaagacattagatgatttgccgaaagatgatgttcgtcatcactatccacgtttccagccaggaaattttgagaacaacgtcaaattagccgaactagttgagggtgtcgctaagagaaaaggtacaacacccgcgcaagtggccatcgcatgggtcaaacaccagggcgcgctcccgattccaggtgctacgaagtcgcctcgggtgctagaaaattgcaaggagatcgaattaactgggtctgagctatctgaacttcaggaggcggtgaacaagaccaagatagtgggagctcgttatcctgccctatttcagcctcttctcaaccagtagggtgtactcagcatacctaaggctgcgagccgtacaagcttggctatatttccaactccatgactgctcactcaagtcctcgatattcacccacgaattatgttgttaggtagcagtagcttcagatatcatgatttggattgtcagtcacagctctcagatcactacgtacctaatcagcgcatcattagcaagacccatcaatcagccacgaatactactaagtgatgcaaatatgaattacttaaaagaatatgttttgaaatatactcgca

SEQ ID NO: 15281 - DNA, 1401 bp, Muscodor strobelii
  misc_feature: SGI cDNA ID NO. 565058
  misc_feature: Elevated expression when VOC is produced
  misc_feature: Encodes the peptide sequence at SEQ ID NO 15282
atggtgaaggcgcgactatcgctgtacccagccgcctgtactacgccccgcctagtgaaggagaagccattatccggagttcgcgtgggcgttaaggatatttatgatctgaaaggtcttcgaaaatcggcaggcaaccgtgcttatttcgatctctatgaggctgccaatgcaactgctccgagcatccagtatctcatagatcttggcgccgtgatcgtgggcaggacgaaaactagtcagtttgcgaatggtcaatcgccgacagctgattgggttgattttcacgaccccttcaacgcccgcggtgatggctatcaggatccctcatcttcgtccgccggcgctggatctgccgcgtcgaactacgattggatagatctaaatatcggctctgacactggtggttccgtccgggcccctgcagctgtcagtggtgtattcggaaatcggccaagccaagatatcatgactctagatggcgtcctgccgctcagctcctatatggacacaccggctttcatagctcgctccgcattcaatttcgctacttggggtaaagcatggtatgaagccggcaacacttcgctcaaatcctttaagaactttcccagcaaactcatttatcccatcgacacattagacattaataccacgcagtatccgtcgcccgggttctttccatctgccaacgccgatgcacaaattctttttgacgaattcaccacgggtttagagaagtttttaggcacgaaacgtaccgtcgttgacttctacacgaggtacagggaaacttcaggtatagggctgtacccgttggatcatcttggcgcagtttggacgctgatgactgcctatgagcaatatcaccaagttattgagcccatggccacagcgtgggctacatcacataacggtgacgctccttacctcaacccacaagtcgcgctgaacgcagaatatgggcgcagtagctctgagcctttcttcaacgaagccataacaaacaagacgatcttcaagagctggctcgagacagaacttctggttcccgagcatgagtccgcgcactgttcctcggcactgataatccacccgattgtgagcggtacaccaagctatcgtgacaactatccggcccagagccctgggcaggccggcgtctcgttcgtttggaaccaatacagcatcagtcaactaggtggtgtgccagaggttgtgctccctctcggacaggtcaactatacaagccgtgtcacgggcaccaccaagtacctgcccgttgcggttagcataaatgctgcagctggatgcgatttgatgctttactctcttgtagaagagcttgcgaaagagggcataatccccaacagcgtcaagactggaccaagtctcttttga

SEQ ID NO: 15282 - protein, 466 aa, Muscodor strobelii
  misc_feature: SGI Peptide ID NO. 565058
  misc_feature (2)..(443): Pfam Id: PF01425 Pfam Desc: Amidase
  misc_feature (130)..(179): Pfam Id: PF01425 Pfam Desc: Amidase
  misc_feature (149)..(462): NCBI GI: 242804044 Blast Desc: conserved [Talaromyces stipitatus ATCC 10500] gi|218717641|gb|EED17062.1| conserved [Talaromyces stipitatus ATCC 10500]
  misc_feature (22)..(466): NCBI GI: 255946445 Blast Desc: Pc20g15160 [Penicillium chrysogenum Wisconsin 54-1255] gi|211588725|emb|CAP86845.1| Pc20g15160 [Penicillium chrysogenum Wisconsin 54-1255]
  misc_feature (25)..(466): NCBI GI: 115442858 Blast Desc: [Aspergillus terreus NIH2624] gi|114188105|gb|EAU29805.1| [Aspergillus terreus NIH2624]
  misc_feature (18)..(466): NCBI GI: 547468 Blast Desc: ORF near MEL [Saccharomyces cerevisiae]
  misc_feature (21)..(455): NCBI GI: 156064527 Blast Desc: SS1G_00271 [Sclerotinia sclerotiorum 1980] gi|154691133|gb|EDN90871.1| SS1G_00271 [Sclerotinia sclerotiorum 1980]
  misc_feature (21)..(455): NCBI GI: 256720629 Blast Desc: NECHADRAFT_50177 [Nectria haematococca mpVI 77-13-4]
  misc_feature (22)..(466): NCBI GI: 119483210 Blast Desc: orf near mel [Neosartorya fischeri NRRL 181] gi|119409788|gb|EAW19736.1| orf near mel [Neosartorya fischeri NRRL 181]
  misc_feature (22)..(466): NCBI GI: 159123401 Blast Desc: glutamyl-tRNA(Gln) amidotransferase, subunit A [Aspergillus fumigatus A1163]
  misc_feature (21)..(466): NCBI GI: 238485406 Blast Desc: amidase, [Aspergillus flavus NRRL3357] gi|220698820|gb|EED55159.1| amidase, [Aspergillus flavus NRRL3357]
  misc_feature (21)..(466): NCBI GI: 256731989 Blast Desc: NECHADRAFT_93947 [Nectria haematococca mpVI 77-13-4]
  misc_feature: Useful for introducing or modulating the production of volatile compounds
MVKARLSLYPAACTTPRLVKEKPLSGVRVGVKDIYDLKGLRKSAGNRAYFDLYEAANATAPSIQYLIDLGAVIVGRTKTSQFANGQSPTADWVDFHDPFNARGDGYQDPSSSSAGAGSAASNYDWIDLNIGSDTGGSVRAPAAVSGVFGNRPSQDIMTLDGVLPLSSYMDTPAFIARSAFNFATWGKAWYEAGNTSLKSFKNFPSKLIYPIDTLDINTTQYPSPGFFPSANADAQILFDEFTTGLEKFLGTKRTVVDFYTRYRETSGIGLYPLDHLGAVWTLMTAYEQYHQVIEPMATAWATSHNGDAPYLNPQVALNAEYGRSSSEPFFNEAITNKTIFKSWLETELLVPEHESAHCSSALIIHPIVSGTPSYRDNYPAQSPGQAGVSFVWNQYSISQLGGVPEVVLPLGQVNYTSRVTGTTKYLPVAVSINAAAGCDLMLYSLVEELAKEGIIPNSVKTGPSLF

SEQ ID NO: 15283 - DNA, 2073 bp, Muscodor strobelii
  misc_feature: SGI EST ID NO. CUFF.36373.4
  misc_feature: Variant of the nucleotide sequence at SEQ ID NO 15281
tctcgctaccagaaggagaagccattatccggagttcgcgtgggcgttaaggatatttatgatctgaaaggtcttcgaaaatcggcaggcaaccgtgcttatttcgatctctatgaggctgccaatgcaactgctccgagcatccagtatctcatagatcttggcgccgtaagtatctgtgggggtcttccattttcgttgcgcagtgactcgactcatacaagctctcgaaacagcggaaagggcaaaatctgggttgcagagtcattattgaagtcattgctgatcccacggagtaggtgatcgtgggcaggacgaaaactagtcagtttgcgaatggtcaatcgccgacagctgattgggttgattttcacgaccccttcaacgcccgcggtgatggctatcaggatccctcatcttcgtccgccggcgctggatctgccgcgtcgaactacgattggatagatctaaatatcggctctgacactggtggttccgtccgggcccctgcagctgtcagtggtgtattcggaaatcggccaagccaagatatcatgactctagatggcgtcctgccgctcagctcctatatggacacaccggctttcatagctcgctccgcattcaatttcgctacttggggtaaagcatggtatgaagccggcaacacttcgctcaaatcctttaagaactttcccagcaaactcatttatcccatcgacacattagacattaataccacgcagtatccgtcgcccgggttctttccatctgccaacgccgatgcacaaattctttttgacgaattcaccacgggtttagagaagtttttaggcacgaaacgtaccgtcgttgacttctacacgaggtacagggaaacttcaggtatagggctgtacccgttggatcatcttggcgcagtttggacgctgatgactgcctatgagcaatatcaccaagttattgagcccatggccacagcgtgggctacatcacataacggtgacgctccttacctcaacccacaagtcgcgctgaacgcagaatatgggcgcagtagctctgagcctttcttcaacgaagccataacaaacaagacgatcttcaagagctggctcgagacagaacttctggttcccgagcatgagtccgcgcactgttcctcggcactgataatccacccgattgtgagcggtacaccaagctatcgtgacaactatccggcccagagccctgggcaggccggcgtctcgttcgtttggaaccaatacagcatcagtcaactaggtggtgtgccagaggttgtgctccctctcggacaggtcaactatacaagccgtgtcacgggcaccaccaagtacctgcccgttgcggttagcataaatgctgcagctggatgcgatttgatgctttactctcttgtagaagagcttgcgaaagagggcataatccccaacagcgtcaagactggaccaagtctcttttgaacatggtcattgtcgatgcattgtgattatgggagaaactaggttgagcaatagcgttttcatcgtccagtcaactaatcctggcatctagatcttcgcaacctagatttaataattttcttcgcagcctcgtctgacttaacaatagggctttgaacaaagtgctgctgttaggcactcaccgccttcgacggcgactgtatgtagcacaaaacatgacaggcgggcacagagaggcaatatataccattttagatggtatatacacgatactctctcatgttcatgaatataagtgcgcgttgactactgtacattccactaaagttgaacaagtggtgtggctgttggcacaaagtgtccgctagaattatggaccccgactgaaaccaaactcccttcaagcgcccggaatacctaattaggactcgcaccactctgcccaccttagcgtggggggttattacggtagaggagcattggctgagcagggtgagaggcagatcacccgtcaaagtgcatgacttttatgttggataccttactgcctacagttggtttcccacaggtgaacctaattatgttc

SEQ ID NO: 15284 - DNA, 2454 bp, Muscodor strobelii
  misc_feature: SGI cDNA ID NO. 565059
  misc_feature: Encodes the peptide sequence at SEQ ID NO 15285
atggaaaacgagcccgtgactccaacagaaaacgatacgcgctctatcagaacttctgcagagatattacaaagccctaacactaggagggagaaaggacgagtacgcttcaacagcaccgccacttcaaagcccccgttggcatcaggatcacaggatgtcaccacagagccgaagccaaagccgaagccgcggccgtctctccttcggggaagctcgtataactctgtgattgacgtttctggcggaaatgcagaagatcctcagtctgaaaagacactctccgcctatgccgcccacgctcgggcgcaacatgtcgctgcaagagtccttggaacaaattcttcatcaggttcaagacgaagttccatcgattcggacgcagatacagtgcacagtggagttgattttctgcctgcgagccaagatatccctttgcacgagtttaacatcaggcttgcagacgcaggccttgacggcagtagggaaaaccaggaagcttacaaattagttcgctcacacactcttcgtcatgaacagatggacttcgaagcaatgcccgtggctgttaattctggacaagtcacccctattgaggaacgcgacgcagagcactacgtcgctccacctccccaatatcgcggaggaattctgtcaaatctgttgaagctttacaaagaaccagctccaagctacccgcatagcgagaacaccaccccgacgacttctggcacgacgacacctactcgtagtaagaaatggtacgataaaaaccgctcacaggaaactcttgcaacactagcaggagctgccatgcagctagctcattctacttcgactactacccttgtcgattcgacgcgtaattccgtgaacataccttcaccacctaccgaaggatcacgttcaactcgacagaaacataagcgaagccatagtgctaaattgatgaacttcggccgtgcacgcaaagaagaagaaatacgaatcacaatgcacattgccgagacgctcagtcgtcaaaagtatataataaaaatgtgcaaggcattggtgctctatggagcaccaacgcaccgcttggaggaatgtactgacttttttgtaactaacgcaatccctttacggccaccagatttgacgatgacaactagagtccttgaaattgatggccagtttctctatctaccagggtgtatgatcatctcatttgatgataagaccacacacactactgaggtcaagatcgtaaggacaaatcaaggaatcgatctaaagaagttgaaagacgttcacgaaatttacaaatcggtgctacacgattgctacagtgttgacgacgccatagagcaactcaacaacatcacaaacgcagttgattcgtatcccgcatgggttcggactattgcatttggcttagccagcgcgtctgtcgcccctttcgccttcggaggacgtttcatcgatataggtctatgtggtgcacttggtctcatggttggcgcgctccagatcttcgttgcaccaaagtcgccgctgtataacaacatttttgagatcagcgccacggttataacgagttttttgagccgagcgcttgggagtatacatggcggagagttattttgtttctctgccatggcgcagagctccattgcactcattcttccgggctggtttgttttgagcgcagcgcttgagctacagtcacgcgcaatagtcccaggctcgatacggctcgtttatgcaattatctactccttgttccttgggtttggtattacagtcggaataacactctacgggctcatcgatccgaatgccacttcaaagacagagtgtgtcaacccgatgctggacatggactccgactctccatacaaatacgtagtgtttgtctttgtccctatcttcacagtgtgtttggcaattgtgaatcaggctcattggaagcaaatgcctgtcatgatcgtcatttcatttacgggctacatcgtgaatttcttctccagtccgaaattcgaagcttgcccccaaattgcgaatgagaaacggactaacatgtttttgatgcatcagacacttggcgctttcacggtcggtattcttgcaaatttatactcgagaattcgacatggagtagcagttgccgcacttctcccagctatcttcgtacaagtgcctagcggacttgcagcgtcagggagccttttgagtggactgagtgcggctaacgccataaatcactccaatcaaacaatcaatggaacaacctacaaccaaactgatagtagcgggttgacagcaacagcctccgattactcgaacaacgtcgtttacaatgttgccggttcaatgattcaaattgcaattggcattacactgggtctgtttctaagctccttgctaatctatccgtttggaaagcggagaagcggactgtggacgctctga

SEQ ID NO: 15285 - protein, 817 aa, Muscodor strobelii
  misc_feature: SGI Peptide ID NO. 565059
  misc_feature (347)..(558): Pfam Id: PF06738 Pfam Desc: Domain of function (DUF1212)
  misc_feature (385)..(558): Pfam Id: PF06738 Pfam Desc: Domain of function (DUF1212)
  misc_feature (63)..(817): NCBI GI: 156066067 Blast Desc: SS1G_01045 [Sclerotinia sclerotiorum 1980] gi|154691903|gb|EDN91641.1| SS1G_01045 [Sclerotinia sclerotiorum 1980]
  misc_feature (58)..(817): NCBI GI: 154294230 Blast Desc: BC1G_13801 [Botryotinia fuckeliana B05.10] gi|150844811|gb|EDN20004.1| BC1G_13801 [Botryotinia fuckeliana B05.10]
  misc_feature (155)..(817): NCBI GI: 115391421 Blast Desc: conserved [Aspergillus terreus NIH2624] gi|114194139|gb|EAU35839.1| conserved [Aspergillus terreus NIH2624]
  misc_feature (52)..(817): NCBI GI: 67525371 Blast Desc: AN3143.2 [Aspergillus nidulans FGSC A4] gi|40744538|gb|EAA63714.1| AN3143.2 [Aspergillus nidulans FGSC A4] gi|259485903|tpe|CBF83321.1| TPA: DUF1212 domain membrane A4]
  misc_feature (36)..(817): NCBI GI: 145242321 Blast Desc: An09g04780 [Aspergillus niger] gi|134078339|emb|CAK40332.1| protein product [Aspergillus niger]
  misc_feature (83)..(817): NCBI GI: 119490693 Blast Desc: NFIA_063330 [Neosartorya fischeri NRRL 181] gi|119411229|gb|EAW21172.1| conserved [Neosartorya fischeri NRRL 181]
  misc_feature (91)..(817): NCBI GI: 70999017 Blast Desc: DUF1212 domain membrane protein Prm10 [Aspergillus fumigatus Af293] gi|66851867|gb|EAL92192.1| DUF1212 domain membrane protein Prm10, [Aspergillus fumigatus Af293] DUF1212
  misc_feature (148)..(817): NCBI GI: 121706174 Blast Desc: DUF1212 domain membrane protein Prm10, [Aspergillus clavatus NRRL 1] gi|119399496|gb|EAW09924.1| DUF1212 domain membrane protein Prm10, [Aspergillus clavatus NRRL 1]
  misc_feature (91)..(817): NCBI GI: 238489579 Blast Desc: DUF1212 domain membrane protein Prm10, [Aspergillus flavus NRRL3357] gi|220698415|gb|EED54755.1| DUF1212 domain membrane protein Prm10, [Aspergillus flavus NRRL3357]
  misc_feature (145)..(817): NCBI GI: 189194135 Blast Desc: conserved [Pyrenophora tritici-repentis Pt-1C-BFP] gi|187978970|gb|EDU45596.1| conserved [Pyrenophora tritici-repentis Pt-1C-BFP]
MENEPVTPTENDTRSIRTSAEILQSPNTRREKGRVRFNSTATSKPPLASGSQDVTTEPKPKPKPRPSLLRGSSYNSVIDVSGGNAEDPQSEKTLSAYAAHARAQHVAARVLGTNSSSGSRRSSIDSDADTVHSGVDFLPASQDIPLHEFNIRLADAGLDGSRENQEAYKLVRSHTLRHEQMDFEAMPVAVNSGQVTPIEERDAEHYVAPPPQYRGGILSNLLKLYKEPAPSYPHSENTTPTTSGTTTPTRSKKWYDKNRSQETLATLAGAAMQLAHSTSTTTLVDSTRNSVNIPSPPTEGSRSTRQKHKRSHSAKLMNFGRARKEEEIRITMHIAETLSRQKYIIKMCKALVLYGAPTHRLEECTDFFVTNAIPLRPPDLTMTTRVLEIDGQFLYLPGCMIISFDDKTTHTTEVKIVRTNQGIDLKKLKDVHEIYKSVLHDCYSVDDAIEQLNNITNAVDSYPAWVRTIAFGLASASVAPFAFGGRFIDIGLCGALGLMVGALQIFVAPKSPLYNNIFEISATVITSFLSRALGSIHGGELFCFSAMAQSSIALILPGWFVLSAALELQSRAIVPGSIRLVYAIIYSLFLGFGITVGITLYGLIDPNATSKTECVNPMLDMDSDSPYKYVVFVFVPIFTVCLAIVNQAHWKQMPVMIVISFTGYIVNFFSSPKFEACPQIANEKRTNMFLMHQTLGAFTVGILANLYSRIRHGVAVAALLPAIFVQVPSGLAASGSLLSGLSAANAINHSNQTINGTTYNQTDSSGLTATASDYSNNVVYNVAGSMIQIAIGITLGLFLSSLLIYPFGKRRSGLWTL

SEQ ID NO: 15286 - DNA, 4478 bp, Muscodor strobelii
  misc_feature: SGI EST ID NO. CUFF.36529.0
  misc_feature: Variant of the nucleotide sequence at SEQ ID NO 15284
tggttgttgccagctttaacagttatcgccaactccatctgcttcccaagcgcatctgtgtcgatctatgtggccatcgcaaaaattgcaattatcacctctactcggcaacattctacttttgtcaatgccgctcaatcactcagtcgtgccccaattaagtgggctcaggcgccctcgagtttctaggcggtggagttactagataagaggtttgaaattttgagttcgttgaggtaacagtcccatctttgtttccacaaattgtcgaccgctagagccttcgtatcttttgttgttttcctgcttgttaccgtttgcctatgtaccaatcacttctatagaataccaagccgcaatctttgactcctccattacagcttgcgacatgctaagcccatgttacgtcgtctaccggtccacaaacccatgtgtctaagagcgcgatgcccctagatcgccgaagccgcgagttgagcttgattgacaagttgtgccgctcggcttcgacctgacggcacagaagcaatcgcgtctacagtatcagtatccatttaattgttgtgggttcgtagatagcgtgatagtacatgtagttgccatacttcttccagtctgacccaaactcatcgccatctccctggccgaatgcgtagcctaaacacgatttgtagatcatttcacttggttattcggacatcaactcacttggccattcaagatttggctcacttgcttatttgggtttatgtttataggactatccgctttgttatccaacatttgattgatagcagcccactagttgctaaatctatttcagcaatcggagtttttaccaacacaaccaagctaccggtgattgtcgatcgtattgtcgacctttcaacccatcagtctgtatttgtgttatcttggagatattggaagtcattagcatggaaaacgagcccgtgactccaacagaaaacgatacgcgctctatcagaacttctgcagagatattacaaagccctaacactaggagggagaaaggacgagtacgcttcaacagcaccgccacttcaaagcccccgttggcatcaggatcacaggatgtcaccacagagccgaagccaaagccgaagccgcggccgtctctccttcggggaagctcgtataactctgtgattgacgtttctggcggaaatgcagaagatcctcagtctgaaaagacactctccgcctatgccgcccacgctcgggcgcaacatgtcgctgcaagagtccttggaacaaattcttcatcaggttcaagacgaagttccatcgattcggacgcagatacagtgcacagtggagttgattttctgcctgcgagccaagatatccctttgcacgagtttaacatcaggcttgcagacgcaggccttgacggcagtagggaaaaccaggaagcttacaaattagttcgctcacacactcttcgtcatgaacagatggacttcgaagcaatgcccgtggctgttaattctggacaagtcacccctattgaggaacgcgacgcagagcactacgtcgctccacctccccaatatcgcggaggaattctgtcaaatctgttgaagctttacaaagaaccagctccaagctacccgcatagcgagaacaccaccccgacgacttctggcacgacgacacctactcgtagtaagaaatggtacgataaaaaccgctcacaggaaactcttgcaacactagcaggagctgccatgcagctagctcattctacttcgactactacccttgtcgattcgacgcgtaattccgtgaacataccttcaccacctaccgaaggatcacgttcaactcgacagaaacataagcgaagccatagtgctaaattgatgaacttcggccgtgcacgcaaagaagaagaaatacgaatcacaatgcacattgccgagacgctcagtcgtcaaaagtatataataaaaatgtgcaaggcattggtgctctatggagcaccaacgcaccgcttggaggaatggtatgtgtagaaagatcccacacgtgatatttttatagtcgtatccctgagacatagtactgacttttttgtagtaagtgatcaatctgttaaatatcaggaatcagtcatttgcctcgaaacccacggcccggcatgggaaaatcgtgaaataagactaacgcaatccctttacggccaccagatttgacgatgacaactagagtccttgaaattgatggccagtttctctatctaccagggtgtatgatcatctcatttgatgataagaccacacacactactgaggtcaagatcgtaaggacaaatcaaggaatcgatctaaagaagttgaaagacgttcacgaaatttacaaatcggtgctacacgattgctacagtgttgacgacgccatagagcaactcaacaacatcacaaacgcagttgattcgtatcccgcatgggttcggactattgcatttggcttagccagcgcgtctgtcgcccctttcgccttcggaggacgtttcatcgatataggtctatgtggtgcacttggtctcatggttggcgcgctccagatcttcgttgcaccaaagtcgccgctgtataacaacatttttgagatcagcgccacggttataacgagttttttgagccgagcgcttgggagtatacatggcggagagttattttgtttctctgccatggcgcagagctccattgcactcattcttccgggctggtttgttttgagcgcagcgcttgagctacagtcacgcgcaatagtcccaggctcgatacggctcgtttatgcaattatctactccttgttccttgggtttggtattacagtcggaataacactctacgggctcatcgatccgaatgccacttcaaagacagagtgtgtcaacccgatgctggacatggactccgactctccatacaaatacgtagtgtttgtctttgtccctatcttcacagtgtgtttggcaattgtgaatcaggctcattggaagcaaatgcctgtcatgatcgtcatttcatttacgggctacatcgtgaatttcttctccagtccgaaattcgaagcttgcccccaaattgcgaatggtatgtaataaacagtcccctctacttcgtcattccccccccatccctttccccatccctttccccgccctatgctaatatgcattgtagtgagtactgttgcattcgagattcggagtgatagcggtttgattctggatccaatgccggattaacttccgaataatagcgaatagagaaacggactaacatgtttttgatgcatcagacacttggcgctttcacggtcggtattcttgcaaatttatactcgagaattcgacatggagtagcagttgccgcacttctcccagctatcttcgtacaagtgcctagcggacttgcagcgtcagggagccttttgagtggactgagtgcggctaacgccataaatcactccaatcaaacaatcaatggaacaacctacaaccaaactgatagtagcgggttgacagcaacagcctccgattactcgaacaacgtcgtttacaatgttgccggttcaatgattcaaattgcaattggcattacactgggtctgtttctaagctccttgctaatctatccgtttggaaagcggagaagcggactgtggacgctctgagctatatttcggatgcctgcttcatgtgtttttttttttttgaagctagcaaaaaggagttagggcgaatagagcattggtagagccggcagcgactgctgatagataatagaggatagacatggacatgcattagacggaaccaaggctgcataggaccagctttaatgaaaatagaggagcgttaatgacgagatcatactagattagattagattatttatttacctgagcatatcagaatgtataaaacaccgaattaataaacgtacaattgactgatcccaagctggacaatcaatcgcatagactttcgagtagtccttcgcttacacatgcaggaaatgcaaggcatatcatactcgtggaataagtcatagctcattaaactgcttcaaatagctacgtaaccatttttcatactctacatctcctcaggctcgataaaggctgcgttactaacccctttgtaccatgactccgggtttagcggcttcggaatgttctttggatgcgtagctcgattggagcccgccgtggctaagttgcctaatggaccgtgaggtatccaaggtggcaattcttgatatacaattctctagactttcatttcttgcgcaggcaccgttgcgaaacgtgacatgatgtcaatgacttcgtctttactcagacgacgaccgccaccgctcatctcggccattaacttgaagtagttgatataatgggctggtgtgaatgtgttgaagactacaagctcgagtcagcatacg

SEQ ID NO: 15287 - DNA, 567 bp, Muscodor strobelii
  misc_feature: SGI cDNA ID NO. 565060
  misc_feature: Encodes the peptide sequence at SEQ ID NO 15288
atggacgttgacgagaaagccgtttttgcaagcctgaagatgcccaaaagggatgttaactttgtgccagccaaagctggcgaggtgctacaattaggaggtgcagtgtgcagaatcatggaagatgggtctaatactggtaaattgataccccgagtttcatctcactcgccatatctttggcatctgttcaagtacaatcgcattggcgctgcggagttcactattccaccaaatgtaatgggtccaccaccacactggcacgaaatgcacgacgagacatttctcgtgacgcaaggtacggtgcgatttcacgcgcccgatggcaagacaattgatgctaaggtcggcgactacgtcacagtacccacacgtgcgcctcacaccttctcgaacccaactggggaagaggcaaaattcttcaacacattcacaccagcccattatatcaactacttcaagttaatggccgagatgagcggtggcggtcgtcgtctgagtaaagacgaagtcattgacatcatgtcacgtttcgcaacggtgcctgcgcaagaaatgaaagtctag

SEQ ID NO: 15288 - protein, 188 aa, Muscodor strobelii
  misc_feature: SGI Peptide ID NO. 565060
  misc_feature (72)..(144): Pfam Id: PF07883 Pfam Desc: Cupin domain
  misc_feature (12)..(186): NCBI GI: 169598290 Blast Desc: SNOG_01946 [Phaeosphaeria nodorum SN15] gi|111069038|gb|EAT90158.1| SNOG_01946 [Phaeosphaeria nodorum SN15]
  misc_feature (1)..(186): NCBI GI: 189208798 Blast Desc: conserved [Pyrenophora tritici-repentis Pt-1C-BFP] gi|187976825|gb|EDU43451.1| conserved [Pyrenophora tritici-repentis Pt-1C-BFP]
  misc_feature (19)..(181): NCBI GI: 256723501 Blast Desc: NECHADRAFT_41989 [Nectria haematococca mpVI 77-13-4]
  misc_feature (19)..(181): NCBI GI: 256723393 Blast Desc: NECHADRAFT_55713 [Nectria haematococca mpVI 77-13-4]
  misc_feature (31)..(188): NCBI GI: 212531279 Blast Desc: conserved [Penicillium marneffei ATCC 18224] gi|210071160|gb|EEA25249.1| conserved [Penicillium marneffei ATCC 18224]
  misc_feature (31)..(185): NCBI GI: 242772594 Blast Desc: conserved [Talaromyces stipitatus ATCC 10500] gi|218721685|gb|EED21103.1| conserved [Talaromyces stipitatus ATCC 10500]
  misc_feature (31)..(185): NCBI GI: 242798066 Blast Desc: conserved [Talaromyces stipitatus ATCC 10500] gi|218716438|gb|EED15859.1| conserved [Talaromyces stipitatus ATCC 10500]
  misc_feature (32)..(182): NCBI GI: 169610339 Blast Desc: SNOG_08269 [Phaeosphaeria nodorum SN15] gi|111063425|gb|EAT84545.1| SNOG_08269 [Phaeosphaeria nodorum SN15]
  misc_feature (14)..(182): NCBI GI: 171682344 Blast Desc: protein product [Podospora anserina] gi|170941131|emb|CAP66781.1| protein product [Podospora anserina]
  misc_feature (68)..(185): NCBI GI: 242798071 Blast Desc: conserved [Talaromyces stipitatus ATCC 10500] gi|218716439|gb|EED15860.1| conserved [Talaromyces stipitatus ATCC 10500]
MDVDEKAVFASLKMPKRDVNFVPAKAGEVLQLGGAVCRIMEDGSNTGKLIPRVSSHSPYLWHLFKYNRIGAAEFTIPPNVMGPPPHWHEMHDETFLVTQGTVRFHAPDGKTIDAKVGDYVTVPTRAPHTFSNPTGEEAKFFNTFTPAHYINYFKLMAEMSGGGRRLSKDEVIDIMSRFATVPAQEMKV

SEQ ID NO: 15289 - DNA, 5291 bp, Muscodor strobelii
  misc_feature: SGI EST ID NO. CUFF.36530.1
  misc_feature: Variant of the nucleotide sequence at SEQ ID NO 15287
gaaaatgtctaagatatcaacactctgctcacaaagcttagaagcaacatctagacctatcctatcttacttaaacactttctaatcacgcaataaatcgaacaacatggacgttgacgagaaagccgtttttgcaagcctgaagatgcccaaaagggatgttaactttgtgccagccaaagctggcgaggtgctacaattaggaggtgcagtgtgcagaatcatggaagatgggtctaatactggtaaattgataccccgagtttcatctcactcgccatatctttggcatctgttcaagtgtcattggaactgtataagtgaagaagtattatactgacttggggtcaatcggttaatagacaatcgcattggcgctgcggagttcactattccaccaaatgtaatgggtccaccaccacactggcacgaaatgcacgacgagacatttctcgtgacgcaaggtacggtgcgatttcacgcgcccgatggcaagacaattgatgctaaggtcggcgactacgtcacagtacccacacgtgcgcctcacaccttctcgaacccaactggggaagaggcaaaattcttcaacacattcacaccagcccattatatcaactacttcaagttaatggccgagatgagcggtggcggtcgtcgtctgagtaaagacgaagtcattgacatcatgtcacgtttcgcaacggtgcctgcgcaagaaatgaaagtctagagaattgtatatcaagaattgccaccttggatacctcacggtccattaggcaacttagccacggcgggctccaatcgagctacgcatccaaagaacattccgaagccgctaaacccggagtcatggtacaaaggggttagtaacgcagcctttatcgagcctgaggagatgtagagtatgaaaaatggttacgtagctatttgaagcagtttaatgagctatgacttattccacgagtatgatatgccttgcatttcctgcatgtgtaagcgaaggactactcgaaagtctatgcgattgattgtccagcttgggatcagtcaattgtacgtttattaattcggtgttttatacattctgatatgctcaggtaaataaataatctaatctaatctagtatgatctcgtcattaacgctcctctattttcattaaagctggtcctatgcagccttggttccgtctaatgcatgtccatgtctatcctctattatctatcagcagtcgctgccggctctaccaatgctctattcgccctaactcctttttgctagcttcaaaaaaaaaaaaacacatgaagcaggcatccgaaatatagctcagagcgtccacagtccgcttctccgctttccaaacggatagattagcaaggagcttagaaacagacccagtgtaatgccaattgcaatttgaatcattgaaccggcaacattgtaaacgacgttgttcgagtaatcggaggcctgcgtacacattgattaataattctcgctgttgatgaaagatgaggaaaaatgagtcaattactgactgttgctgtcaacccgctactatcagtttggttgtaggttgttccattgattgtttgattggagtgatttatggcgttagccgcactcagtccactcaaaaggctccctgacgctgcaagtccgctaggcacttgtacgaagatagctgggagaagtgcggcaactgctactccatgtcgaattctcgagtataaatttgcaagaataccgaccgtgaaagcgccaagtgtctgatgcatcaaaaacatgttagtccgtttctctattcgctattattcggaagttaatccggcattggatccagaatcaaaccgctatcactccgaatctcgaatgcaacagtactcactacaatgcatattagcatagggcggggaaagggatggggaaagggatggggggggaatgacgaagtagaggggactgtttattacataccattcgcaatttgggggcaagcttcgaatttcggactggagaagaaattcacgatgtagcccgtaaatgaaatgacgatcatgacaggcatttgcttccaatgagcctgattcacaattgccaaacacactgtgaagatagggacaaagacaaacactacgtatttgtatggagagtcggagtccatgtccagcatcgggttgacacactctgtctttgaagtggcattcggatcgatgagcccgtagagtgttattccgactgtaataccaaacccaaggaacaaggagtagataattgcataaacgagccgtatcgagcctgggactattgcgcgtgactgtagctcaagcgctgcgctcactgtggctacctgttagctcaagtatgcttgagaatcaggcaatgacaattaactcacaaacaaaccagcccggaagaatgagtgcaatggagctctgcgccatggcagagaaacaaaataactctccgccatgtatactcccaagcgctcggctcaaaaaactcgttataaccgtggcgctgatctcaaaaatgttgttatacagcggcgactttggtgcaacgaagatctggagcgcgccaaccatgagaccaagtgcaccacatagacctatatcgatgaaacgtcctccgaaggcgaaaggggcgacagacgcgctggctaagccaaatgcaatagtccgaacccatgcgggatacgaatcaactgcgtttgtgatgttgttgagttgctctatggcgtcgtcaacactgtagcaatcgtgtagcaccgatttgtaaatttcgtgaacgtctttcaacttctttagatcgattccttgatttgtccttacgatcttgacctcagtagtgtgtgtggtcttatcatcaaatgagatgatcatacaccctggtagatagagaaactggccatcaatttcaaggactctagttgtcatcgtcaaatctggtggccgtaaagggattgcgttagtcttatttcacgattttcccatgccgggccgtgggtttcgaggcaaatgactgattcctgatatttaacagattgatcacttactacaaaaaagtcagtactatgtctcagggatacgactataaaaatatcacgtgtgggatctttctacacataccattcctccaagcggtgcgttggtgctccatagagcaccaatgccttgcacatttttattatatacttttgacgactgagcgtctcggcaatgtgcattgtgattcgtatttcttcttctttgcgtgcacggccgaagttcatcaatttagcactatggcttcgcttatgtttctgtcgagttgaacgtgatccttcggtaggtggtgaaggtatgttcacggaattacgcgtcgaatcgacaagggtagtagtcgaagtagaatgagctagctgcatggcagctcctgctagtgttgcaagagtttcctgtgagcggtttttatcgtaccatttcttactacgagtaggtgtcgtcgtgccagaagtcgtcggggtggtgttctcgctatgcgggtagcttggagctggttctttgtaaagcttcaacagatttgacagaattcctccgcgatattggggaggtggagcgacgtagtgctctgcgtcgcgttcctcaataggggtgacttgtccagaattaacagccacgggcattgcttcgaagtccatctgttcatgacgaagagtgtgtgagcgaactaatttgtaagcttcctggttttccctactgccgtcaaggcctgcgtctgcaagcctgatgttaaactcgtgcaaagggatatcttggctcgcaggcagaaaatcaactccactgtgcactgtatctgcgtccgaatcgatggaacttcgtcttgaacctgatgaagaatttgttccaaggacctacatattgtgagttagtagtgactcctttctgccaagactttactcatcatggtgtctcgagagagaacttccatgaatggaatcgccactgaacaaataaaattgctcttagaaagtactgactcttgcagcgacatgttgcgcccgagcgtgggcggcataggcggagagtgtcttttcagactgaggatcttctgcatttccgccagaaacgtcaatcacagagttatacgagcttccccgaaggagagacggccgcggcttcggctttggcttcggctctgtggtgacatcctgtgatcctgatgccaacgggggctttgaagtggcggtgctgttgaagcgtactcgtcctttctccctcctagtgttagggctttgtaatatctctgcagaagttctgatagagcgcgtatcgttttctgttggagtcacgggctcgttttccatgctaatgacttccaatatctccaagataacacaaatacagactgatgggttgaaaggtcgacaatacgatcgacaatcaccggtagcttggttgtgttggtaaaaactccgattgctgaaatagatttagcaactagtgggctgctatcaatcaaatgttggataacaaagcggatagtcctataaacataaacccaaataagcaagtgagccaaatcttgaatggccaagtgagttgatgtccgaataaccaagtgaaatgatctacaaatcgtgtttaggctacgcattcggccagggagatggcgatgagtttgggtcagactggaagaagtatggcaactacatgtactatcacgctatctacgaacccacaacaattaaatggatactgatactgtagacgcgattgcttctgtgccgtcaggtcgaagccgagcggcacaacttgtcaatcaagctcaactcgcggcttcggcgatctaggggcatcgcgctcttagacacatgggtttgtggaccggtagacgacgtaacatgggcttagcatgtcgcaagctgtaatggaggagtcaaagattgcggcttggtattctatagaagtgattggtacataggcaaacggtaacaagcaggaaaacaacaaaagatacgaaggctctagcggtcgacaatttgtggaaacaaagatgggactgttacctcaacgaactcaaaatttcaaacctcttatctagtaactccaccgcctagaaactcgagggcgcctgagcccacttaattggggcacgactgagtgattgagcggcattgacaaaagtagaatgttgccgagtagaggtgataattgcaatttttgcgatggccacatagatcgacacagatgcgcttgggaagcagatggagttggcgataactgttaaagctggcaacaacca

SEQ ID NO: 15290 - DNA, 2238 bp, Muscodor strobelii
  misc_feature: SGI cDNA ID NO. 565061
  misc_feature: Elevated expression when VOC is produced
  misc_feature: Encodes the peptide sequence at SEQ ID NO 15291
atggatactaagaagttaattctgtgtttgctcccagcttgggcattggggcaaagcagcaccgtagattggatcaccgtggagggcgatacagcaccatccttctctctctcatcatcaaatatttcgtaccaattccatgtcgacccatcgacactagatcttatccatgatcactggggcgcgtacgcagccgaagcggtgccaccgtgggatggtatccagggcggatgggcaggcccttacacctactctttacgcgagttcccagactcaggtcggggtgatttccgatcacctgctatacacattgaacacgcgtccggtgatacggtctccgcattctcatacactggctacgatgtaagctcgggaaagcccaagatccctggtctgccagctacatatggtgaggatggcgacgtctcgacgctcactattcatatgtacgacaattactcgtctattgcggcggatctgtactactccatctttccgaagtacaatgctattgctcgcagtttcagacttacaaacgagggaaaccagactgcaactgtccaaagggctcatagttggagtattgacatgccaaacgaggagatgcaaatgctagatctgtatggagattgggcagctgagacacacatcaatagacgttcaattggatacggagaacacggattccgctcaaccgcaggatattcttcgcatttccacaaccccttcttcgcgcttgctgatcccaccacaactgaatcccggggcgcagcaataggctattcgcttgtctacactggttctttcgcggcgaacgtagagcggtggtccacgggctgggtgcgagtacttcttggtctgaacccattgcatctatcttggcctatcaagccgggcgactcattcagctccccagaagccgtctctgtatattctgctgatgggttcaccggaatgtctcaatcactacattccttatataagaatcagctctctcgatcaaaccagacattcgaaacaagaccaccgttgttgaactcatgggaaggtttgggcttcaacttcaatcagacttccatggttcatctcgcacaagaggctgcagacctcggctgttcattgttcgtcaacgacgatgggtggtttggaacggattaccctcgcgataacgacacactgggtctcggagactgggtaccacagaagaagaagttccccaacggccttggaccctatgtcgatgcggtcaacgacatcactgtagccaattcaagcgacaaagtgaagtttgggctgtggttcgaacctgaaatggttaatcccgactccgatctatacaaggaacacccggattgggtcttacactcaggctcgcacaatcgcacactgcagcgtgaccaattggtgctcaatctgggcttgacggaagtacaagactacatcatcaacacagtcgaaaaggtcctcgactcagcaaacatcgagtacataaaatgggataacaaccgcggccagcacgagctaccatctccatcagcgaactacgcctacttcctcggactataccgcgtaatagacaatctcacgacagcacacccagaaatcctctgggaaggctgcgcctcaggcggcggacgcttcgacccaggactactacactactggccacaaagttggacatcagacgacacagacggactcgagcgtctatacattcaattcggcacctcatacgcctacccaccatcagccatgggctgtcacgtaagcgcagtccccaacggccaagtcggacgaacaacaccgctcgctttccgatcagcagtagcctccatgtgcggctcatacggtctcgagctcgaccccgcgaaggagtcccaagaagacatcgatgcaatcccgggactgatcgcagtacaacaagacataaacccgctcgtcgtaaacggtgatttctaccgtctcgtattgcccgatcaatcgaattggccggcggcaatgttcatgttgcctgatgcgagctcaggcgtgttattcgccttccaggtacgctcgatgttgaagccgctgcccccaccgataaagctacgtggcctcgatcctagtgcgaagtacaccgtcggaaacagcactgataatactacctggtctggatcgacgctcatgaatgttggaatcagtgtgaactggccgaggtcagattatgagagtatgattctgcggttagaccgggtatga

SEQ ID NO: 15291 - protein, 745 aa, Muscodor strobelii
  misc_feature: SGI Peptide ID NO. 565061
  misc_feature (301)..(702): Pfam Id: PF02065 Pfam Desc: Melibiase
  misc_feature (1)..(744): NCBI GI: 169622980 Blast Desc: SNOG_14716 [Phaeosphaeria nodorum SN15] gi|111056788|gb|EAT77908.1| SNOG_14716 [Phaeosphaeria nodorum SN15]
  misc_feature (17)..(745): NCBI GI: 189188528 Blast Desc: alpha-galactosidase [Pyrenophora tritici-repentis Pt-1C-BFP] gi|187972209|gb|EDU39708.1| alpha-galactosidase [Pyrenophora tritici-repentis Pt-1C-BFP]
  misc_feature (25)..(744): NCBI GI: 1580818 Blast Desc: alpha-galactosidase [Hypocrea jecorina]
  misc_feature (18)..(744): NCBI GI: 121715117 Blast Desc: alpha-galactosidase C, [Aspergillus clavatus NRRL 1] gi|119403324|gb|EAW13742.1| alpha-galactosidase C, [Aspergillus clavatus NRRL 1]
  misc_feature (1)..(744): NCBI GI: 229472633 Blast Desc: alpha-galactosidase [Gibberella sp. F75] gi|239736198|gb|ACS12899.1| alpha-galactosidase [Gibberella sp. F75]
  misc_feature (15)..(744): NCBI GI: 46109842 Blast Desc: FG01803.1 [Gibberella zeae PH-1]
  misc_feature (18)..(745): NCBI GI: 159123979 Blast Desc: alpha-galactosidase C, [Aspergillus fumigatus A1163]
  misc_feature (18)..(745): NCBI GI: 119483664 Blast Desc: melibiase, [Neosartorya fischeri NRRL 181] gi|119409891|gb|EAW19838.1| melibiase, [Neosartorya fischeri NRRL 181]
  misc_feature (18)..(745): NCBI GI: 146324661 Blast Desc: alpha-galactosidase C [Aspergillus fumigatus Af293] gi|129555481|gb|EAL85055.2| alpha-galactosidase C, [Aspergillus fumigatus Af293]
  misc_feature (35)..(744): NCBI GI: 255956549 Blast Desc: Pc21g20400 [Penicillium chrysogenum Wisconsin 54-1255] gi|211590738|emb|CAP96937.1| Pc21g20400 [Penicillium chrysogenum Wisconsin 54-1255]
  misc_feature (15)..(744): SWISSPROT Homolog: EC 3.2.1.22 Alpha-galactosidase
  misc_feature: Useful for introducing or modulating the production of volatile compounds
MDTKKLILCLLPAWALGQSSTVDWITVEGDTAPSFSLSSSNISYQFHVDPSTLDLIHDHWGAYAAEAVPPWDGIQGGWAGPYTYSLREFPDSGRGDFRSPAIHIEHASGDTVSAFSYTGYDVSSGKPKIPGLPATYGEDGDVSTLTIHMYDNYSSIAADLYYSIFPKYNAIARSFRLTNEGNQTATVQRAHSWSIDMPNEEMQMLDLYGDWAAETHINRRSIGYGEHGFRSTAGYSSHFHNPFFALADPTTTESRGAAIGYSLVYTGSFAANVERWSTGWVRVLLGLNPLHLSWPIKPGDSFSSPEAVSVYSADGFTGMSQSLHSLYKNQLSRSNQTFETRPPLLNSWEGLGFNFNQTSMVHLAQEAADLGCSLFVNDDGWFGTDYPRDNDTLGLGDWVPQKKKFPNGLGPYVDAVNDITVANSSDKVKFGLWFEPEMVNPDSDLYKEHPDWVLHSGSHNRTLQRDQLVLNLGLTEVQDYIINTVEKVLDSANIEYIKWDNNRGQHELPSPSANYAYFLGLYRVIDNLTTAHPEILWEGCASGGGRFDPGLLHYWPQSWTSDDTDGLERLYIQFGTSYAYPPSAMGCHVSAVPNGQVGRTTPLAFRSAVASMCGSYGLELDPAKESQEDIDAIPGLIAVQQDINPLVVNGDFYRLVLPDQSNWPAAMFMLPDASSGVLFAFQVRSMLKPLPPPIKLRGLDPSAKYTVGNSTDNTTWSGSTLMNVGISVNWPRSDYESMILRLDRV

SEQ ID NO: 15292 - DNA, 5861 bp, Muscodor strobelii
  misc_feature: SGI EST ID NO. CUFF.36410.0
  misc_feature: Variant of the nucleotide sequence at SEQ ID NO 15290
ctacgcatggggaacagcaacggttagtcttggttagtcttggcaattgcattaaagctctcaaaaggcagctcatttgccgtttgccaactcttcgagttaagcgggatgaaccggtctggagatcttttccatgcatataatcactagtgacgcaatgaaccggtgatgtcgtatagagccatttatcgtaaagttggagaaacgtatttagaggtcctgcagtccgtcgttgacctgggctggggatcgtcatcgtccgtgatctctgtccaggacagagtcgaagtcgtagcaggatacatcatggatactaagaagttaattctgtgtttgctcccagcttgggcattggggcaaagcagcaccgtagattggatcaccgtggagggcgatacagcaccatccttctctctctcatcatcaaatatttcgtaccaattccatgtcgacccatcgacactagatcttatccatgatcactggggcgcgtacgcagccgaagcggtgccaccgtgggatggtatccagggcggatgggcaggcccttacacctactctttacgcgagttcccagactcaggtcggggtgatttccgatcacctgctatacacattgaacacgcgtccggtgatacggtctccgcattctcatacactggctacgatgtaagctcgggaaagcccaagatccctggtctgccagctacatatggtgaggatggcgacgtctcgacgctcactattcatatgtacgacaattactcgtctattgcggcggatctgtactactccatctttccgaagtacaatgctattgctcgcagtttcagacttacaaacgagggaaaccagactgcaactgtccaaagggctcatagttggagtattgacatgccaaacgaggagatgcaaatgctagatctgtatggagattgggcagctgagacacacatcaatagacgttcaattggatacggagaacacggattccgctcaaccgcaggatattcttcgcatttccacaaccccttcttcgcgcttgctgatcccaccacaactgaatcccggggcgcagcaataggctattcgcttgtctacactggttctttcgcggcgaacgtagagcggtggtccacgggctgggtgcgagtacttcttggtctgaacccattgcatctatcttggcctatcaagccgggcgactcattcagctccccagaagccgtctctgtatattctgctgatgggttcaccggaatgtctcaatcactacattccttatataagaatcagctctctcgatcaaaccagacattcgaaacaagaccaccgttgttgaactcatgggaaggtttgggcttcaacttcaatcagacttccatggttcatctcgcacaagaggctgcagacctcggctgttcattgttcgtcaacgacgatgggtggtttggaacggattaccctcgcgataacgacacactgggtctcggagactgggtaccacagaagaagaagttccccaacggccttggaccctatgtcgatgcggtcaacgacatcactgtagccaattcaagcgacaaagtgaagtttgggctgtggttcgaacctgaaatggttaatcccgactccgatctatacaaggaacacccggattgggtcttacactcaggctcgcacaatcgcacactgcagcgtgaccaattggtgctcaatctgggcttgacggaagtacaagactacatcatcaacacagtcgaaaaggtcctcgactcagcaaacatcgagtacataaaatgggataacaaccgcggccagcacgagctaccatctccatcagcgaactacgcctacttcctcggactataccgcgtaatagacaatctcacgacagcacacccagaaatcctctgggaaggctgcgcctcaggcggcggacgcttcgacccaggactactacactactggccacaaagttggacatcagacgacacagacggactcgagcgtctatacattcaattcggcacctcatacgcctacccaccatcagccatgggctgtcacgtaagcgcagtccccaacggccaagtcggacgaacaacaccgctcgctttccgatcagcagtagcctccatgtgcggctcatacggtctcgagctcgaccccgcgaaggagtcccaagaagacatcgatgcaatcccgggactgatcgcagtacaacaagacataaacccgctcgtcgtaaacggtgatttctaccgtctcgtattgcccgatcaatcgaattggccggcggcaatgttcatgttgcctgatgcgagctcaggcgtgttattcgccttccaggtacgctcgatgttgaagccgctgcccccaccgataaagctacgtggcctcgatcctagtgcgaagtacaccgtcggaaacagcactgataatactacctggtctggatcgacgctcatgaatgttggaatcagtgtgaactggccgaggtcagattatgagagtatgattctgcggttagaccgggtatgagttgaaaagttgtcttgaaattctagcttgtgatgacacgcgacccggaagggagatagtcaataatataattactcgtacaatcatctaatctgcctaatgaaaccttgtgtggtgccatttgggctcactcatcgtcggagaggccgaagagtcctatgggaagcggtgttggtatatcaaacttgataacgtggaacaagtgatttcggtacttatcctgagttgtgatgtatgtgatactaaatggctatgccgagagctgtggtctaatcgaggctgaattcgcgtccacttaaactatgatcatagttcaaccaagtatgaagatgagagagtatttaagttgcgaaaactataatgctgattactaataagaacgtatctaatgctgtatatgtagcgctaatgctctagtctattttgtagtacaacctctgtgggcaaaatttatgtaatggatacagaacgcgtcaattaagcgcgtttttctcaacgaccactgttttgttgagatcaagcttcaagtaccgatcccaacacgttgccaagcacaccacgaactctgtttcgattctcacggacgcaagtaaagacgatagctgtgctgaatgcgaacacaaacgtctctttccactgcttatcgagggagtatcttctaggcaagagcgtcgctaatgctctgggtgctacaaacaacgccatgtcttttctccgtgaagcggcttcgaagaggatgctccatccgcacagaaagcagccgcagccaacgcaaacgccggagtcgatcgtttgcctagcagcagcatgctttcctagtatgagagggccgatgcgtgttcgagcgaggcatacgccatagtaaaacaatgtgataaaggtggcgagaaaggacgaagagcgcgctgcagatagcagtgctgaacgaaagcctttgatatctttcttacgggctaggaggttcagaggcaaatatgttgccatcgaccacttgaatgatcgaaagaagcgagatagcgcgtggtattcgcaggacgggccaaaacccatgtgaaccatctcgcatggaaatgggacagcaatggctggatcaccccattgttgtggccacttgtaatccgtacacatcgattgtagaagaggggcttggccggtttccttgccgtagagtagctcgcctttacgacagcgccttaaagcctcaatcagtcgtgtatctaccgctgcggcggaactgatccatttcgtataagattgaggtaaagcacaaggcgtgtaaaaccacgcccacattatgaaggcgcatgaggtagcgaaaatggaggggtcagcaaagtaagatatgaaggagtcgagctgctgcaagttagaactgaaaaacatagtgctctgtagtgcctggagaaggacatacccgagtccatttgtttgctgcgagccgacgctgccgcctttgagaccacagctcgcccaccacgacatcagcagctcgagttgcagcaaatagagttaaatcaagagtacggccagcatagtgcatagtttcctgtttatcaccgtctaccgatctggtctcggtaaaggcatttgttcttttggattgtatcaaccgcagactcaaccaagctgcgacgaatgagccaacccatctcgaaagcctacatcctatggcattagatattgcttttggcaagcaggtcgaaaatcgccgtgcaaggcttaccttcgcctggctatatctgatagctgagttctcgactggagtatgaggctgactagcgactgattaaagttaattattatctcatttcatcttggtcggtcgagggcagggaagtcgtacgtcgagcaaagtagtaccaccaatgagcgcagcgcagaaagttggaaatcgctggtaatctagaccccagacgaggatatgccgcagggatgtaacaaaagaatcgtggggtttggacccgttggtaagacccctgcttttcctccgtctcatcgcatgctgcaaaaccaatgtcaggagtcgcggtgcaacggaagatgcataccccaaaacgtaggcccgaatcactggccgaagtaagggtggtatagcgtcattcagcctttggcgaccattgggtctctgtacgagatggccacgagcggccatggttctgacgttattgacgagcttgtgtcgcgttggcgcgctcgtccgggacgcgttcgtccgggacgcgtgaagctgttggggagtgtagcgcagtgcaggtttcccaaggtcgggctcgggctgttgatagatgaacagcggtggaagtcagatcgtctccggtgctacagagcaacagtccccagtcttgtacgggcagacctcggctgcagtgagaactctgtaggcaaaaggcacaaatggcaccctactgtcctaataagacatgatgcatgcaccgatggacgaagtaaccgaatctcttttgatgattcggacaagcaatcaatccgttgacaaatacaattcgagctaggcgtacatttatttcctagatatattcaaacgatggtccggcctgggagaccgtttgaactgacctgtgctctgttgcgggtggttccccataaaatccagggggtgggtcgcgcgcaggtagataaagccttgaaatgacgccacacacgatcactacgacactggcatgcagtacgacacgatcctgttgaatcgttttcgagtctgtatgactactaccagcgatcatgctctgtcgtgactagctgtgaaggatatatgaaacgcaggaaccactcagaaccttgcagtattgacacgcctttgggtattgctcgaaattgatttggatgcgtgcctatgagtacatacatgtagatagatgtatgtacctgttgggatcaagaccagtcaatttcccaacacaattacatgccgaggcatacagtatcgagaatacctattatatctgaccatcgacagtcaatggcggtgaaatagcatattatgcaaacgaacgcgtgatcggcgcgtgatgttgttcggggaacaaggaggcttcacctctcatcctcttaagtcagacgactttaggaatcgatgcttaatagtgtatgctccagaatggagtttttgtccagttcgaaataacgaaaccaaaaatattagtcgaatcgccatatcggctagctttaaaatgttactaagtagacttttaattttcttaggtaggctcaagatcaatcgttgctttctagcttgtccgcatagatgtcctctattgtacttcaatggctgcgaacacgatgattttgacgcacgtcag

SEQ ID NO: 15293 - DNA, 1452 bp, Muscodor strobelii
  misc_feature: SGI cDNA ID NO. 565062
  misc_feature: Reduced expression when VOC is produced
  misc_feature: Encodes the peptide sequence at SEQ ID NO 15294
atggccgctcgtggccatctcgtacagagacccaatggtcgccaaaggctgaatgacgctataccacccttacttcggccagtgattcgggcctacgttttggggtatgcatcttccgttgcaccgcgactcctgacattggttttgcagcatgcgatgagacggaggaaaagcaggggtcttaccaacgggtccaaaccccacgattcttttgttacatccctgcggcatatcctcgtctggggtctagattaccagcgatttccaactttctgcgctgcgctcattggtggtactactttgctcgactcgctagtcagcctcatactccagtcgagaactcagctatcagatatagccaggcgaaggctttcgagatgggttggctcattcgtcgcagcttggttgagtctgcggttgatacaatccaaaagaacaaatgcctttaccgagaccagatcggtagacggtgataaacaggaaactatgcactatgctggccgtactcttgatttaactctatttgctgcaactcgagctgctgatgtcgtggtgggcgagctgtggtctcaaaggcggcagcgtcggctcgcagcaaacaaatggactcggctcgactccttcatatcttactttgctgacccctccattttcgctacctcatgcgccttcataatgtgggcgtggttttacacgccttgtgctttacctcaatcttatacgaaatggatcagttccgccgcagcggtagatacacgactgattgaggctttaaggcgctgtcgtaaaggcgagctactctacggcaaggaaaccggccaagcccctcttctacaatcgatgtgtacggattacaagtggccacaacaatggggtgatccagccattgctgtcccatttccatgcgagatggttcacatgggttttggcccgtcctgcgaataccacgcgctatctcgcttctttcgatcattcaagtggtcgatggcaacatatttgcctctgaacctcctagcccgtaagaaagatatcaaaggctttcgttcagcactgctatctgcagcgcgctcttcgtcctttctcgccacctttatcacattgttttactatggcgtatgcctcgctcgaacacgcatcggccctctcatactaggaaagcatgctgctgctaggcaaacgatcgactccggcgtttgcgttggctgcggctgctttctgtgcggatggagcatcctcttcgaagccgcttcacggagaaaagacatggcgttgtttgtagcacccagagcattagcgacgctcttgcctagaagatactccctcgataagcagtggaaagagacgtttgtgttcgcattcagcacagctatcgtctttacttgcgtccgtgagaatcgaaacagagttcgtggtgtgcttggcaacgtgttgggatcggtacttgaagcttga

SEQ ID NO: 15294 - protein, 483 aa, Muscodor strobelii
  misc_feature: SGI Peptide ID NO. 565062
  misc_feature (19)..(483): NCBI GI: 46123771 Blast Desc: FG06263.1 [Gibberella zeae PH-1]
  misc_feature (7)..(482): NCBI GI: 28881359 Blast Desc: [Neurospora crassa]
  misc_feature (61)..(481): NCBI GI: 261356653 Blast Desc: integral membrane protein [Verticillium albo-atrum VaMs.102]
  misc_feature (123)..(482): NCBI GI: 164424552 Blast Desc: NCU06745 [Neurospora crassa OR74A] gi|157070562|gb|EAA34281.2| conserved [Neurospora crassa OR74A]
  misc_feature (115)..(483): NCBI GI: 156030714 Blast Desc: SS1G_14296 [Sclerotinia sclerotiorum 1980] gi|154700687|gb|EDO00426.1| SS1G_14296 [Sclerotinia sclerotiorum 1980]
  misc_feature (126)..(482): NCBI GI: 171689358 Blast Desc: protein product [Podospora anserina] gi|170944641|emb|CAP70752.1| protein product [Podospora anserina]
  misc_feature (24)..(481): NCBI GI: 242809823 Blast Desc: integral membrane protein [Talaromyces stipitatus ATCC 10500] gi|218716078|gb|EED15500.1| integral membrane protein [Talaromyces stipitatus ATCC 10500]
  misc_feature (24)..(481): NCBI GI: 212537253 Blast Desc: integral membrane protein [Penicillium marneffei ATCC 18224] gi|210068524|gb|EEA22615.1| integral membrane protein [Penicillium marneffei ATCC 18224]
  misc_feature (18)..(482): NCBI GI: 71001760 Blast Desc: integral membrane protein [Aspergillus fumigatus Af293] gi|66853199|gb|EAL93523.1| integral membrane protein [Aspergillus fumigatus Af293] gi|159129622|gb|EDP54736.1| protein
  misc_feature (24)..(482): NCBI GI: 121715798 Blast Desc: conserved [Aspergillus clavatus NRRL 1] gi|119403665|gb|EAW14082.1| conserved [Aspergillus clavatus NRRL 1]
  misc_feature: Useful for introducing or modulating the production of volatile compounds
MAARGHLVQRPNGRQRLNDAIPPLLRPVIRAYVLGYASSVAPRLLTLVLQHAMRRRKSRGLTNGSKPHDSFVTSLRHILVWGLDYQRFPTFCAALIGGTTLLDSLVSLILQSRTQLSDIARRRLSRWVGSFVAAWLSLRLIQSKRTNAFTETRSVDGDKQETMHYAGRTLDLTLFAATRAADVVVGELWSQRRQRRLAANKWTRLDSFISYFADPSIFATSCAFIMWAWFYTPCALPQSYTKWISSAAAVDTRLIEALRRCRKGELLYGKETGQAPLLQSMCTDYKWPQQWGDPAIAVPFPCEMVHMGFGPSCEYHALSRFFRSFKWSMATYLPLNLLARKKDIKGFRSALLSAARSSSFLATFITLFYYGVCLARTRIGPLILGKHAAARQTIDSGVCVGCGCFLCGWSILFEAASRRKDMALFVAPRALATLLPRRYSLDKQWKETFVFAFSTAIVFTCVRENRNRVRGVLGNVLGSVLEA

SEQ ID NO: 15295 - DNA, 5203 bp, Muscodor strobelii
  misc_feature: SGI EST ID NO. CUFF.36411.1
  misc_feature: Variant of the nucleotide sequence at SEQ ID NO 15293
ctgacgtgcgtcaaaatcatcgtgttcgcagccattgaagtacaatagaggacatctatgcggacaagctagaaagcaacgattgatcttgagcctacctaagaaaattaaaagtctacttagtaacattttaaagctagccgatatggcgattcgactaatatttttggtttcgttatttcgaactggacaaaaactccattctggagcatacactattaagcatcgattcctaaagtcgtctgacttaagaggatgagaggtgaagcctccttgttccccgaacaacatcacgcgccgatcacgcgttcgtttgcataatatgctatttcaccgccattgactgtcgatggtcagatataataggtattctcgatactgtatgcctcggcatgtaattgtgttgggaaattgactggtcttgatcccaacaggtacatacatctatctacatgtatgtactcataggcacgcatccaaatcaatttcgagcaatacccaaaggcgtgtcaatactgcaaggttctgagtggttcctgcgtttcatatatccttcacagctagtcacgacagagcatgatcgctggtagtagtcatacagactcgaaaacgattcaacaggatcgtgtcgtactgcatgccagtgtcgtagtgatcgtgtgtggcgtcatttcaaggctttatctacctgcgcgcgacccaccccctggattttatggggaaccacccgcaacagagcacaggtcagttcaaacggtctcccaggccggaccatcgtttgaatatatctaggaaataaatgtacgcctagctcgaattgtatttgtcaacggattgattgcttgtccgaatcatcaaaagagattcggttacttcgtccatcggtgcatgcatcatgtcttattaggacagtagggtgccatttgtgccttttgcctacagagttctcactgcagccgaggtctgcccgtacaagactggggactgttgctctgtagcaccggagacgatctgacttccaccgctgttcatctatcaacagcccgagcccgaccttgggaaacctgcactgcgctacactccccaacagcttcacgcgtcccggacgaacgcgtcccggacgagcgcgccaacgcgacacaagctcgtcaataacgtcagaaccatggccgctcgtggccatctcgtacagagacccaatggtcgccaaaggctgaatgacgctataccacccttacttcggccagtgattcgggcctacgttttggggtatgcatcttccgttgcaccgcgactcctgacattggttttgcagcatgcgatgagacggaggaaaagcaggggtcttaccaacgggtccaaaccccacgattcttttgttacatccctgcggcatatcctcgtctggggtctagattaccagcgatttccaactttctgcgctgcgctcattggtggtactactttgctcgactcgctagtcagcctcatactccagtcgagaactcagctatcagatatagccaggcgaaggctttcgagatgggttggctcattcgtcgcagcttggttgagtctgcggttgatacaatccaaaagaacaaatgcctttaccgagaccagatcggtagacggtgataaacaggaaactatgcactatgctggccgtactcttgatttaactctatttgctgcaactcgagctgctgatgtcgtggtgggcgagctgtggtctcaaaggcggcagcgtcggctcgcagcaaacaaatggactcggctcgactccttcatatcttactttgctgacccctccattttcgctacctcatgcgccttcataatgtgggcgtggttttacacgccttgtgctttacctcaatcttatacgaaatggatcagttccgccgcagcggtagatacacgactgattgaggctttaaggcgctgtcgtaaaggcgagctactctacggcaaggaaaccggccaagcccctcttctacaatcgatgtgtacggattacaagtggccacaacaatggggtgatccagccattgctgtcccatttccatgcgagatggttcacatgggttttggcccgtcctgcgaataccacgcgctatctcgcttctttcgatcattcaagtggtcgatggcaacatatttgcctctgaacctcctagcccgtaagaaagatatcaaaggctttcgttcagcactgctatctgcagcgcgctcttcgtcctttctcgccacctttatcacattgttttactatggcgtatgcctcgctcgaacacgcatcggccctctcatactaggaaagcatgctgctgctaggcaaacgatcgactccggcgtttgcgttggctgcggctgctttctgtgcggatggagcatcctcttcgaagccgcttcacggagaaaagacatggcgttgtttgtagcacccagagcattagcgacgctcttgcctagaagatactccctcgataagcagtggaaagagacgtttgtgttcgcattcagcacagctatcgtctttacttgcgtccgtgagaatcgaaacagagttcgtggtgtgcttggcaacgtgttgggatcggtacttgaagcttgatctcaacaaaacagtggtcgttgagaaaaacgcgcttaattgacgcgttctgtatccattacataaattttgcccacagaggttgtactacaaaatagactagagcattagcgctacatatacagcattagatacgttcttattagtaatcagcattatagttttcgcaacttaaatactctctcatcttcatacttggttgaactatgatcatagtttaagtggacgcgaattcagcctcgattagaccacagctctcggcatagccatttagtatcacatacatcacaactcaggataagtaccgaaatcacttgttccacgttatcaagtttgatataccaacaccgcttcccataggactcttcggcctctccgacgatgagtgagcccaaatggcaccacacaaggtttcattaggcagattagatgattgtacgagtaattatattattgactatctcccttccgggtcgcgtgtcatcacaagctagaatttcaagacaacttttcaactcatacccggtctaaccgcagaatcatactctcataatctgacctcggccagttcacactgattccaacattcatgagcgtcgatccagaccaggtagtattatcagtgctgtttccgacggtgtacttcgcactaggatcgaggccacgtagctttatcggtgggggcagcggcttcaacatcgagcgtacctggaaggcgaataacacgcctgagctcgcatcaggcaacatgaacattgccgccggccaattcgattgatcgggcaatacgagacggtagaaatcaccgtttacgacgagcgggtttatgtcttgttgtactgcgatcagtcccgggattgcatcgatgtcttcttgggactccttcgcggggtcgagctcgagaccgtatgagccgcacatggaggctactgctgatcggaaagcgagcggtgttgttcgtccgacttggccgttggggactgcgcttacgtgacagcccatggctgatggtgggtaggcgtatgaggtgccgaattgaatgtatagacgctcgagtccgtctgtgtcgtctgatgtccaactttgtggccagtagtgtagtagtcctgggtcgaagcgtccgccgcctgaggcgcagccttcccagaggatttctgggtgtgctgtcgtgagattgtctattacgcggtatagtccgaggaagtaggcgtagttcgctgatggagatggtagctcgtgctggccgcggttgttatcccattttatgtactcgatgtttgctgagtcgaggaccttttcgactgtgttgatgatgtagtcttgtacttccgtcaagcccagattgagcaccaattggtcacgctgcagtgtgcgattgtgcgagcctgagtgtaagacccaatccgggtgttccttgtatagatcggagtcgggattaaccatttcaggttcgaaccacagcccaaacttcactttgtcgcttgaattggctacagtgatgtcgttgaccgcatcgacatagggtccaaggccgttggggaacttcttcttctgtggtacccagtctccgagacccagtgtgtcgttatcgcgagggtaatccgttccaaaccacccatcgtcgttgacgaacaatgaacagccgaggtctgcagcctcttgtgcgagatgaaccatggaagtctgattgaagttgaagcccaaaccttcccatgagttcaacaacggtggtcttgtttcgaatgtctggtttgatcgagagagctgattcttatataaggaatgtagtgattgagacattccggtgaacccatcagcagaatatacagagacggcttctggggagctgaatgagtcgcccggcttgataggccaagatagatgcaatgggttcagaccaagaagtactcgcacccagcccgtggaccaccgctctacgttcgccgcgaaagaaccagtgtagacaagcgaatagcctattgctgcgccccgggattcagttgtggtgggatcagcaagcgcgaagaaggggttgtggaaatgcgaagaatatcctgcggttgagcggaatctgggaggatgcatgtcagtgcaccgcatatacgaaagaaaacacgagtgagcaatattcttacccgtgttctccgtatccaattgaacgtctattgatgtgtgtctcagctgcccaatctccatacagatctagcatttgcatctcctcgtttggcatgtcaatactccaactatgagccctttggacagttgcagtctggtttccctcgtttgtaagtctgaaactgcgagcaatagcattgtacttcggaaagatggagtagtacagatccgccgcaatagacgagtaattgtcgtacatatgaatagtgagcgtcgagacgtcgccatcctcaccatatgtagctggcagaccagggatcttgggctttcccgagcttacatcgtagccagtgtatgagaatgcggagaccgtatcaccggacgcgtgttcaatgtgtatagcaggtgatcggaaatcaccccgacctgagtctgggaactcgcgtaaagagtaggtgtaagggcctgccc

SEQ ID NO: 15296 - DNA, 1806 bp, Muscodor strobelii
  misc_feature: SGI cDNA ID NO. 565063
  misc_feature: Encodes the peptide sequence at SEQ ID NO 15297
atggccggaccgccgcctgacggaggcattcacttcgaccgtaagtttgtctctccttcagcccgcaacacatgcgacataaacgacaaatacctcagatttctatcgctgtcgcgagactataagccaagataccacgggagaccacaagacttgaaactgatgcttcttgcagctgcagattttgactacgccgaccttctctcatcccctcctccgccgccacccaacggccagaatctcctcgatgccaacgatacagacaacctccagggcttcttcggcactttccccgacgcctcctctcaggtttcctatagcgacgcattgaacttcacggagaatgtcggcagctggctcggcccagtcgacctgccaggcgattacctcggccactcgacacatactggccagatagcacagcccaatggctacaccttcactggagcagccggtgctggcagtgtgcccttcatgttccagcccaatgtgcccgacgagctgccagtaatgccgctgcagacccaactgcagactcagatatcacctccgatgccatcccatataccagcccacatgccacaccaagtaccacaccaagtaccacaccagatgcaacaccaggtgcaacagatgcaacatcaaatgccgcctcaaacagcatcgccgttcgggggtgggagaacgcatatggaacacgaaccggtacagagaatgggtcaacgacgacagctgctgcaccaacccccggcctttacacccagcccactcccactcgatcaccatcagacacaagccagcgtggctaccgccttgacgtcgatgcagaacagccaccagaatggaaagttctcacatccccgtcgtaacgatagcttcccccaaccatcctctcaccagtcacatcggtcatacaacgccactatatcacctggtgcctccgcccggcttgcccaggcaacgtctcagaaccagtcatcccgcggcattccccaggcgagaccagcgtcttcgggccagccatttaaaggcaatctgttcgcttctcggccttcagaatccagtgattctaccttgttcatggatatgtggtttggtagccgagtgtctacacaacgtcgagccgaaccggaaccactgcagtatggctctgatactcatttcggcaatcctcatggttaccaaccacccactcgtgaatccagccaggccgaaatcaggcaaatgcagacattgggtgccttccaaagggtcgagagcgctccgggcacacgcgagtctagcccagtccgaaacggaggtccatacatgaacggttctcgtacttctcacaatggcttgggaaatggtataccaaatgcggcagcaccattgaagaaacgccattctggtggggttcatgccccgttgagagaggaggaggacgatgaggaggaggattcaatcatgtcgagcatgccaccaccgcgacctcgggcgagaaagcgcaagtcgaatgcaaatttgggcaacgcgacacagatggcagacgagagccctcctgatcctcctggaaaacgacggaagtccgcggctggcgacagagcggcaaggccacccaaggaaaatctgtctgaggaacagaagaggaccaaccacatcctcagcgagaagagaagacgacgtgtcatcaaagatggctacgatgatctcgagctgctcgttcctaatatcggtaatggccagagcaaggccgtccaacttgactcggctgcgaaatgggtcctgaagctcgccaccggcaatggcgatctgagtacttggtga

SEQ ID NO: 15297 - protein, 601 aa, Muscodor strobelii
  misc_feature: SGI Peptide ID NO. 565063
  misc_feature (542)..(592): Pfam Id: PF00010 Pfam Desc: Helix-loop-helix DNA-binding domain
  misc_feature (302)..(599): NCBI GI: 256732494 Blast Desc: NECHADRAFT_37658 [Nectria haematococca mpVI 77-13-4]
  misc_feature (358)..(598): NCBI GI: 154299641 Blast Desc: BC1G_10783 [Botryotinia fuckeliana B05.10] gi|150857275|gb|EDN32467.1| BC1G_10783 [Botryotinia fuckeliana B05.10]
  misc_feature (357)..(598): NCBI GI: 67540250 Blast Desc: AN6295.2 [Aspergillus nidulans FGSC A4] gi|40739489|gb|EAA58679.1| AN6295.2 [Aspergillus nidulans FGSC A4] gi|259479491|tpe|CBF69761.1| TPA: bHLH transcription factor
  misc_feature (379)..(595): NCBI GI: 258565371 Blast Desc: [Uncinocarpus reesii 1704] gi|237907131|gb|EEP81532.1| [Uncinocarpus reesii 1704]
  misc_feature (331)..(598): NCBI GI: 169774813 Blast Desc: [Aspergillus oryzae RIB40] gi|83769737|dbj|BAE59872.1| protein product [Aspergillus oryzae]
  misc_feature (331)..(598): NCBI GI: 238496577 Blast Desc: HLH transcription factor, [Aspergillus flavus NRRL3357] gi|220694404|gb|EED50748.1| HLH transcription factor, [Aspergillus flavus NRRL3357]
  misc_feature (350)..(598): NCBI GI: 46123769 Blast Desc: FG06262.1 [Gibberella zeae PH-1]
  misc_feature (358)..(598): NCBI GI: 156030718 Blast Desc: SS1G_14298 [Sclerotinia sclerotiorum 1980] gi|154700689|gb|EDO00428.1| SS1G_14298 [Sclerotinia sclerotiorum 1980]
  misc_feature (379)..(595): NCBI GI: 240107205 Blast Desc: bHLH family transcription factor [Coccidioides posadasii C735 delta SOWgp]
  misc_feature (379)..(595): NCBI GI: 119190349 Blast Desc: CIMG_05222 [Coccidioides immitis RS]
MAGPPPDGGIHFDRKFVSPSARNTCDINDKYLRFLSLSRDYKPRYHGRPQDLKLMLLAAADFDYADLLSSPPPPPPNGQNLLDANDTDNLQGFFGTFPDASSQVSYSDALNFTENVGSWLGPVDLPGDYLGHSTHTGQIAQPNGYTFTGAAGAGSVPFMFQPNVPDELPVMPLQTQLQTQISPPMPSHIPAHMPHQVPHQVPHQMQHQVQQMQHQMPPQTASPFGGGRTHMEHEPVQRMGQRRQLLHQPPAFTPSPLPLDHHQTQASVATALTSMQNSHQNGKFSHPRRNDSFPQPSSHQSHRSYNATISPGASARLAQATSQNQSSRGIPQARPASSGQPFKGNLFASRPSESSDSTLFMDMWFGSRVSTQRRAEPEPLQYGSDTHFGNPHGYQPPTRESSQAEIRQMQTLGAFQRVESAPGTRESSPVRNGGPYMNGSRTSHNGLGNGIPNAAAPLKKRHSGGVHAPLREEEDDEEEDSIMSSMPPPRPRARKRKSNANLGNATQMADESPPDPPGKRRKSAAGDRAARPPKENLSEEQKRTNHILSEKRRRRVIKDGYDDLELLVPNIGNGQSKAVQLDSAAKWVLKLATGNGDLSTW

SEQ ID NO: 15298 - DNA, 5322 bp, Muscodor strobelii
  misc_feature: SGI EST ID NO. CUFF.36429.3
  misc_feature: Variant of the nucleotide sequence at SEQ ID NO 15296
tctggggagtgcccgcgtgcgctctccaccagacaccaaccagctgcacagcactacccgcaccgcaccactttctcagtcgagagtccggggcagagctgctcgatcttggtagcaaggcgcacctcagtctgtcgcaacgtcgttcctgtttccgtgtctacattgtcgccgagtcttgtcttctaccgccgttacggcatcatttgcgcattcattttattgacgcttgtcccagaattatacccctcccgcaccatttccagcatcgttcttcgacttctgccatttcgccgagttcccaccaccgcccaccaccacctgcatatatcgccaatactatttctacctccctatccggcctcccacccagcatcgttgctattatcgctgcacgatatctccggaactatatttgctgtataacgatcgactcgccttggccctttttacgccgtatgcgagcgcaggcagtccaaaaatctgcaggctctggtgcagcattatcagagacaggtcgaccgtcgaccctctcatgtcgcgcgcaacacacacagatagaaatgcccatgagctcctgatgtgtatgagttctctctcagaatggccggaccgccgcctgacggaggcattcacttcgaccctgcagattttgactacgccgaccttctctcatcccctcctccgccgccacccaacggccagaatctcctcgatgccaacgatacagacaacctccagggcttcttcggcactttccccgacgcctcctctcaggtttcctatagcgacgcattgaacttcacggagaatgtcggcagctggctcggcccagtcgacctgccaggcgattacctcggccactcgacacatactggccagatagcacagcccaatggctacaccttcactggagcagccggtgctggcagtgtgcccttcatgttccagcccaatgtgcccgacgagctgccagtaatgccgctgcagacccaactgcagactcagatatcacctccgatgccatcccatataccagcccacatgccacaccaagtaccacaccaagtaccacaccagatgcaacaccaggtgcaacagatgcaacatcaaatgccgcctcaaacagcatcgccgttcgggggtgggagaacgcatatggaacacgaaccggtacagagaatgggtcaacgacgacagctgctgcaccaacccccggcctttacacccagcccactcccactcgatcaccatcagacacaagccagcgtggctaccgccttgacgtcgatgcagaacagccaccagaatggaaagttctcacatccccgtcgtaacgatagcttcccccaaccatcctctcaccagtcacatcggtcatacaacgccactatatcacctggtgcctccgcccggcttgcccaggcaacgtctcagaaccagtcatcccgcggcattccccaggcgagaccagcgtcttcgggccagccatttaaaggcaatctgttcgcttctcggccttcagaatccagtgattctaccttgttcatggatatgtggtttggtagccgagtgtctacacaacgtcgagccgaaccggaaccactgcagtatggctctgatactcatttcggcaatcctcatggttaccaaccacccactcgtgaatccagccaggccgaaatcaggcaaatgcagacattgggtgccttccaaagggtcgagagcgctccgggcacacgcgagtctagcccagtccgaaacggaggtccatacatgaacggttctcgtacttctcacaatggcttgggaaatggtataccaaatgcggcagcaccattgaagaaacgccattctggtggggttcatgccccgttgagagaggaggaggacgatgaggaggaggattcaatcatgtcgagcatgccaccaccgcgacctcgggcgagaaagcgcaagtcgaatgcaaatttgggcaacgcgacacagatggcagacgagagccctcctgatcctcctggaaaacgacggaagtccgcggctggcgacagagcggcaaggccacccaaggaaaatctgtctgaggaacagaagaggaccaaccacatcctcagcgagaagagaagacgacgtgtcatcaaagatggctacgatgatctcgagctgctcgttcctaatatcggtaatggccagagcaaggccgtccaacttgactcggctgcgaaatgggtcctgaagctcgccaccggcaatggcgatctgagtacttggtgacttagaagcttctccaggaaactgcctctatatagatagcacgggctatgactgacacgctatataatgataccacacgaactataccagagcttataatgtattaaaaacggctccgccgggggcatgagatgttgcggattaccaatccttgttggaattggtaggagataattatcgtgtggatcgaagaagaagacggtatatttatgttctggattatggtgagctaacccaggaaaaaatatacttgataaaatgccatgttggcgttctcaattgcacgtgactttggcggacgatggactatcgtccaattaatgtttggttgtattttcgggtaactagtagactatatgcaggatctggccctgagactatagctacctgtagattgttgcgggctcggctgctttggcggcgcaactgaagcgtagtactcacgtagtgtcttagtgtctcctatcatctggccctggtccgtacctgatcggtcttaatcaagtgagcaccgtaatcactcatccagagcatggaagcgtcgatgtgctggcatcgcgaagactgcgatttcatggtcgcaggtttcgcagcggtgcgtttctgtttcttcgtcttcccctcctgcttcgtcccacacgtcatcgtcatcccacgtatcgtccatttgatcgtcaaaaggagccggtgaagtagaagtcgtgagatgtgagttaggatgtgccccatctttcatttctatctgttgaggagcatcgataacagtatcagcttggggcgattcaggtagaggcgatgtgtcgtagacagtgaattctcgtagcttttcttcttgggttcggaacatacgcccgatgtctcttcccgaacccttagtgcctgtattgctgtcatcgttcgccacgatgaccatgtttgtcacgcagacgttcagcagagcaagattgtagctttgtcgctcaggatgcagacgtcgaaataatggaagcagagactcggtcacgagtcgttccgcaattccagcgatgtcatctgagagactaaatacgaagctttgaagcggtgcactgcgggatgagcgactgaactgaggcatatcggtcgtactatttggattcgtaactggatttgactttttgcgggtagacagtcttaatgtctttgggtacgctaaccagcgaggagggtttgagcctacctcggtggatgtcaacgacgggtcgtggacatcgtgtgtggtcggatccaggctatggtcagcttccgtgagatcgacacgcattcgccgtatcagagagactgcaatcgcagatagctcacgtgttatttcagcgattgtctgcagcggatgtgtcatatatgtgtcttcgatgctaatctgtgtcggtacatcgcttgcctccttgacctccgaaggatccacgccatggagaagattccagattttctctccgctgcctcgctctgcgcctggacgatcgagtatcttctctaaaagaagagctgacattccgtcgaattggcgcacttccttgacagtaacggtgccttcgcgatctcgtaagacagccggcgcagagagaatgtgctcttcgatcagttgcgcaattcgagagccaatacccggcacttttcgaattgtatgcgaatccatgaatgtctcgatggagccatctttgaaacttagcaaagtagtctggttattcggtttattgacactaccagctagctttgcgagaatcttgtttgtcgagatgccgccactcgatgtgtaaccaaagtcttcgtcgagcttatggcgcaaataaccagccagatgcgaggccagcatcaaccggacacagagcggatttccgacttcaacagactcaacaccgtttgcttccggatcactaggtggaggctgtacacaggcataaaatcgcgtgccgtcaaacggaaatccctttagtggatcgtttcgatcaagctgaaagaaagagttactcagagcatggacattcagcatgtccgcgttgtaagaaatgatgtccgtgacatcgaggaagacctcatcaagacccaaacgctccacacgatgattccacgagtgagcacgaagaaaagcccacaatttctttgacacatctcgaaatcgcgtgaggtcctccccattcatgatgataagatcagggcagatcttttgagcctcagagatcagcatcaattttttgacgccgcgggctcgtgccacatagttgcaggtggcaaggatgctcttctgcttgatgcccagcggctgtgacttgagagatgggttctcattctcgaaaacacttgcgtagaagcaatcatagtcctatttcaacgcgcagagtgttagaagccgtttgaaagagtgaatatagaaagcaatggacaggggaaaccggattccggaaagccgagaaggtccaatctatggtgaagctgagatggaatcaagtgaggttatatgagattagcaacggataaggtgcacagatgtgagaatgtcctagaagtatattcatatataatcgaaaatatagactcgtcacgtacaaaatgtacaataatgcgctcagagtttttatccatcttcaaggcgttgataggggcttggcatgtgcgatgtgtcaaactcgacgattttgccatgcttgtccatgatcaatgatgctgaccgtcgtctgtgtgtaaggcatcaatgtaatgctagactgtaattgtgatatcacatgttggcctcaggctgctctgaacgtcttttggcggtctaggtatatcttcagattaggctttcgttgaacatctgcaatcatatgtggtccgggcggtgtggtgcgatgcaacggagacggaaggctgcgggcgacagctggcatcaatgatgtccgctgagacggaccccaaaaaccacatgccggatccctatcaaccgaagtcactccagtggccggagtggcatttaatgtcccaaattgatgatacatatctattttttgccttgcagtttatttttgtcgtccatttcaaacttcatcatca

SEQ ID NO: 15299 - DNA, 1314 bp, Muscodor strobelii
  misc_feature: SGI cDNA ID NO. 565064
  misc_feature: Encodes the peptide sequence at SEQ ID NO 15300
atgctggcctcgcatctggctggttatttgcgccataagctcgacgaagactttggttacacatcgagtggcggcatctcgacaaacaagattctcgcaaagctagctggtagtgtcaataaaccgaataaccagactactttgctaagtttcaaagatggctccatcgagacattcatggattcgcatacaattcgaaaagtgccgggtattggctctcgaattgcgcaactgatcgaagagcacattctctctgcgccggctgtcttacgagatcgcgaaggcaccgttactgtcaaggaagtgcgccaattcgacggaatgtcagctcttcttttagagaagatactcgatcgtccaggcgcagagcgaggcagcggagagaaaatctggaatcttctccatggcgtggatccttcggaggtcaaggaggcaagcgatgtaccgacacagattagcatcgaagacacatatatgacacatccgctgcagacaatcgctgaaataacacgtgagctatctgcgattgcagtctctctgatacggcgaatgcgtgtcgatctcacggaagctgaccatagcctggatccgaccacacacgatgtccacgacccgtcgttgacatccaccgaggtaggctcaaaccctcctcgctggttagcgtacccaaagacattaagactgtctacccgcaaaaagtcaaatccagttacgaatccaaatagtacgaccgatatgcctcagttcagtcgctcatcccgcagtgcaccgcttcaaagcttcgtatttagtctctcagatgacatcgctggaattgcggaacgactcgtgaccgagtctctgcttccattatttcgacgtctgcatcctgagcgacaaagctacaatcttgctctgctgaacgtctgcgtgacaaacatggtcatcgtggcgaacgatgacagcaatacaggcactaagggttcgggaagagacatcgggcgtatgttccgaacccaagaagaaaagctacgagaattcactgtctacgacacatcgcctctacctgaatcgccccaagctgatactgttatcgatgctcctcaacagatagaaatgaaagatggggcacatcctaactcacatctcacgacttctacttcaccggctccttttgacgatcaaatggacgatacgtgggatgacgatgacgtgtgggacgaagcaggaggggaagacgaagaaacagaaacgcaccgctgcgaaacctgcgaccatgaaatcgcagtcttcgcgatgccagcacatcgacgcttccatgctctggatgagtga

SEQ ID NO: 15300 - protein, 437 aa, Muscodor strobelii
  misc_feature: SGI Peptide ID NO. 565064
  misc_feature (10)..(154): Pfam Id: PF00817 Pfam Desc: impB/mucB/samB family
  misc_feature (1)..(433): NCBI GI: 121707923 Blast Desc: DNA polymerase iota, [Aspergillus clavatus NRRL 1] gi|119400125|gb|EAW10551.1| DNA polymerase iota, [Aspergillus clavatus NRRL 1]
  misc_feature (1)..(437): NCBI GI: 156030832 Blast Desc: SS1G_14355 [Sclerotinia sclerotiorum 1980] gi|154700746|gb|EDO00485.1| SS1G_14355 [Sclerotinia sclerotiorum 1980]
  misc_feature (1)..(434): NCBI GI: 255947808 Blast Desc: Pc22g06410 [Penicillium chrysogenum Wisconsin 54-1255] gi|211591688|emb|CAP97929.1| Pc22g06410 [Penicillium chrysogenum Wisconsin 54-1255]
  misc_feature (1)..(433): NCBI GI: 70993736 Blast Desc: DNA polymerase iota [Aspergillus fumigatus Af293] gi|66849349|gb|EAL89677.1| DNA polymerase iota, [Aspergillus fumigatus Af293] gi|159125363|gb|EDP50480.1| DNA polymerase iota,
  misc_feature (1)..(437): NCBI GI: 145258014 Blast Desc: An04g05540 [Aspergillus niger] gi|134074522|emb|CAK38816.1| protein product [Aspergillus niger]
  misc_feature (1)..(433): NCBI GI: 119500316 Blast Desc: DNA polymerase iota, [Neosartorya fischeri NRRL 181] gi|119415080|gb|EAW25018.1| DNA polymerase iota, [Neosartorya fischeri NRRL 181]
  misc_feature (1)..(434): NCBI GI: 238485970 Blast Desc: DNA polymerase iota, [Aspergillus flavus NRRL3357] gi|220699102|gb|EED55441.1| DNA polymerase iota, [Aspergillus flavus NRRL3357]
  misc_feature (1)..(337): NCBI GI: 261353049 Blast Desc: conserved [Verticillium albo-atrum VaMs.102]
  misc_feature (14)..(434): NCBI GI: 169609106 Blast Desc: SNOG_07638 [Phaeosphaeria nodorum SN15] gi|160701782|gb|EAT85104.2| SNOG_07638 [Phaeosphaeria nodorum SN15]
  misc_feature (1)..(437): NCBI GI: 256732484 Blast Desc: NECHADRAFT_92505 [Nectria haematococca mpVI 77-13-4]
  misc_feature (1)..(321): SWISSPROT Homolog: EC 2.7.7.7 DNA-directed DNA polymerase
MLASHLAGYLRHKLDEDFGYTSSGGISTNKILAKLAGSVNKPNNQTTLLSFKDGSIETFMDSHTIRKVPGIGSRIAQLIEEHILSAPAVLRDREGTVTVKEVRQFDGMSALLLEKILDRPGAERGSGEKIWNLLHGVDPSEVKEASDVPTQISIEDTYMTHPLQTIAEITRELSAIAVSLIRRMRVDLTEADHSLDPTTHDVHDPSLTSTEVGSNPPRWLAYPKTLRLSTRKKSNPVTNPNSTTDMPQFSRSSRSAPLQSFVFSLSDDIAGIAERLVTESLLPLFRRLHPERQSYNLALLNVCVTNMVIVANDDSNTGTKGSGRDIGRMFRTQEEKLREFTVYDTSPLPESPQADTVIDAPQQIEMKDGAHPNSHLTTSTSPAPFDDQMDDTWDDDDVWDEAGGEDEETETHRCETCDHEIAVFAMPAHRRFHALDE

SEQ ID NO: 15301 - DNA, 6342 bp, Muscodor strobelii
  misc_feature: SGI EST ID NO. CUFF.36430.2
  misc_feature: Variant of the nucleotide sequence at SEQ ID NO 15299
tgatgatgaagtttgaaatggacgacaaaaataaactgcaaggcaaaaaatagatatgtatcatcaatttgggacattaaatgccactccggccactggagtgacttcggttgatagggatccggcatgtggtttttggggtccgtctcagcggacatcattgatgccagctgtcgcccgcagccttccgtctccgttgcatcgcaccacaccgcccggaccacatatgattgcagatgttcaacgaaagcctaatctgaagatatacctagaccgccaaaagacgttcagagcagcctgaggccaacatgtgatatcacaattacagtctagcattacattgatgccttacacacagacgacggtcagcatcattgatcatggacaagcatggcaaaatcgtcgagtttgacacatcgcacatgccaagcccctatcaacgccttgaagatggataaaaactctgagcgcattattgtacattttgactatgattgcttctacgcaagtgttttcgagaatgagaacccatctctcaagtcacagccgctgggcatcaagcagaagagcatccttgccacctgcaactatgtggcacgagcccgcggcgtcaaaaaattgatgctgatctctgaggctcaaaagatctgccctgatcttatcatcatgaatggggaggacctcacgcgatttcgagatgtgtcaaagaaattgtgggcttttcttcgtgctcactcgtggaatcatcgtgtggagcgtttgggtcttgatgaggtcttcctcgatgtcacggacatcatttcttacaacgcggacatgctgaatgtccatgctctgagtaactctttctttcagcttgatcgaaacgatccactaaagggatttccgtttgacggcacgcgattttatgcctgtgtacagcctccacctagtgatccggaagcaaacggtgttgagtctgttgaagtcggaaatccgctctgtgtccggttgatgctggcctcgcatctggctggttatttgcgccataagctcgacgaagactttggttacacatcgagtggcggcatctcgacaaacaagattctcgcaaagctagctggtagtgtcaataaaccgaataaccagactactttgctaagtttcaaagatggctccatcgagacattcatggattcgcatacaattcgaaaagtgccgggtattggctctcgaattgcgcaactgatcgaagagcacattctctctgcgccggctgtcttacgagatcgcgaaggcaccgttactgtcaaggaagtgcgccaattcgacggaatgtcagctcttcttttagagaagatactcgatcgtccaggcgcagagcgaggcagcggagagaaaatctggaatcttctccatggcgtggatccttcggaggtcaaggaggcaagcgatgtaccgacacagattagcatcgaagacacatatatgacacatccgctgcagacaatcgctgaaataacacgtgagctatctgcgattgcagtctctctgatacggcgaatgcgtgtcgatctcacggaagctgaccatagcctggatccgaccacacacgatgtccacgacccgtcgttgacatccaccgaggtaggctcaaaccctcctcgctggttagcgtacccaaagacattaagactgtctacccgcaaaaagtcaaatccagttacgaatccaaatagtacgaccgatatgcctcagttcagtcgctcatcccgcagtgcaccgcttcaaagcttcgtatttagtctctcagatgacatcgctggaattgcggaacgactcgtgaccgagtctctgcttccattatttcgacgtctgcatcctgagcgacaaagctacaatcttgctctgctgaacgtctgcgtgacaaacatggtcatcgtggcgaacgatgacagcaatacaggcactaagggttcgggaagagacatcgggcgtatgttccgaacccaagaagaaaagctacgagaattcactgtctacgacacatcgcctctacctgaatcgccccaagctgatactgttatcgatgctcctcaacagatagaaatgaaagatggggcacatcctaactcacatctcacgacttctacttcaccggctccttttgacgatcaaatggacgatacgtgggatgacgatgacgtgtgggacgaagcaggaggggaagacgaagaaacagaaacgcaccgctgcgaaacctgcgaccatgaaatcgcagtcttcgcgatgccagcacatcgacgcttccatgctctggatgagtgattacggtgctcacttgattaagaccgatcaggtacggaccagggccagatgataggagacactaagacactacgtgagtactacgcttcagttgcgccgccaaagcagccgagcccgcaacaatctacaggtagctatagtctcagggccagatcctgcatatagtctactagttacccgaaaatacaaccaaacattaattggacgatagtccatcgtccgccaaagtcacgtgcaattgagaacgccaacatggcattttatcaagtatattttttcctgggttagctcaccataatccagaacataaatataccgtcttcttcttcgatccacacgataattatctcctaccaattccaacaaggattggtaatccgcaacatctcatgcccccggcggagccgtttttaatacattataagctctggtatagttcgtgtggtatcattatatagcgtgtcagtcatagcccgtgctatctatatagaggcagtttcctggagaagcttctaagtcaccaagtactcagatcgccattgccggtggcgagcttcaggacccatttcgcagccgagtcaagttggacggccttgctctggccattaccgatattaggaacgagcagctcgagatcatcgtagccatctttgatgacacgtcgtcttctcttctcgctgaggatgtggttggtcctcttctgttcctcagacagattttccttgggtggccttgccgctctgtcgccagccgcggacttccgtcgttttccaggaggatcaggagggctctcgtctgccatctgtgtcgcgttgcccaaatttgcattcgacttgcgctttctcgcccgaggtcgcggtggtggcatgctcgacatgattgaatcctcctcctcatcgtcctcctcctctctcaacggggcatgaaccccaccagaatggcgtttcttcaatggtgctgccgcatttggtataccatttcccaagccattgtgagaagtacgagaaccgttcatgtatggacctccgtttcggactgggctagactcgcgtgtgcccggagcgctctcgaccctttggaaggcacccaatgtctgcatttgcctgatttcggcctggctggattcacgagtgggtggttggtaaccatgaggattgccgaaatgagtatcagagccatactgcagtggttccggttcggctcgacgttgtgtagacactcggctaccaaaccacatatccatgaacaaggtagaatcactggattctgaaggccgagaagcgaacagattgcctttaaatggctggcccgaagacgctggtctcgcctggggaatgccgcgggatgactggttctgagacgttgcctgggcaagccgggcggaggcaccaggtgatatagtggcgttgtatgaccgatgtgactggtgagaggatggttgggggaagctatcgttacgacggggatgtgagaactttccattctggtggctgttctgcatcgacgtcaaggcggtagccacgctggcttgtgtctgatggtgatcgagtgggagtgggctgggtgtaaaggccgggggttggtgcagcagctgtcgtcgttgacccattctctgtaccggttcgtgttccatatgcgttctcccacccccgaacggcgatgctgtttgaggcggcatttgatgttgcatctgttgcacctggtgttgcatctggtgtggtacttggtgtggtacttggtgtggcatgtgggctggtatatgggatggcatcggaggtgatatctgagtctgcagttgggtctgcagcggcattactggcagctcgtcgggcacattgggctggaacatgaagggcacactgccagcaccggctgctccagtgaaggtgtagccattgggctgtgctatctggccagtatgtgtcgagtggccgaggtaatcgcctggcaggtcgactgggccgagccagctgccgacattctccgtgaagttcaatgcgtcgctataggaaacctgagaggaggcgtcggggaaagtgccgaagaagccctggaggttgtctgtatcgttggcatcgaggagattctggccgttgggtggcggcggaggaggggatgagagaaggtcggcgtagtcaaaatctgcagctgcaagaagcatcagtttcaagtcttgtggtctcccgtggtatcttggcttatagtctcgcgacagcgatagaaatctgaggtatttgtcgtttatgtcgcatgtgttgcgggctgaaggagagacaaacttacggtcgaagtgaatgcctccgtcaggcggcggtccggccattctgagagagaactcatacacatcaggagctcatgggcatttctatctgtgtgtgttgcgcgcgacatgagagggtcgacggtcgacctgtctctgataatgctgcaccagagcctgcagatttttggactgcctgcgctcgcatacggcgtaaaaagggccaaggcgagtcgatcgttatacagcaaatatagttccggagatatcgtgcagcgataatagcaacgatgctgggtgggaggccggatagggaggtagaaatagtattggcgatatatgcaggtggtggtgggcggtggtgggaactcggcgaaatggcagaagtcgaagaacgatgctggaaatggtgcgggaggggtataattctgggacaagcgtcaataaaatgaatgcgcaaatgatgccgtaacggcggtagaagacaagactcggcgacaatgtagacacggaaacaggaacgacgttgcgacagactgaggtgcgccttgctaccaagatcgagcagctctgccccggactctcgactgagaaagtggtgcggtgcgggtagtgctgtgcagctggttggtgtctggtggagagcgcacgcgggcactccccagactgctggacttagcgggcactactgccacactctgcccacatacggggaaggccgtgcctagacgctctccgccagcccaaggccgccccttctgtccactgaggaccgactaaaagagcgctgacaagccgtcaacgacgacatcgatccacttgacaagatctattcacctggacaactctcttcagcctttttaatagtctgtattcaaacacacatgtatctcttcctacctacatgtaggtacaaccattgatacagttaccaagccctcgtacccgacagccgatagtaggtcatattgatacatgtatgtatagcaacataaagattcacctcacgtacctcttcctatatgcggcctttttcaacttgtctgggaatagctctggctgcgatgagatacgacagggttcagccgtagccctcggcaagacagcacacgatcctgcagagccgttttcttccgacctaggatgtgatgatgttagagcacgtgcatcctgtccaaagctcgggtgtgggtgggtggtaccaattctatcggccgagtcgagagtcgagaacggatataaaagccaacttaatccttgagctcaaacaatgacaagttgcacttacgagtagtcagtatttcaagatattggactgcaagacacgtttgacgcgtcgacgaagaatgcctcgtagtctagaagtcgggtcgttaaatggaacaagtgaagaatcaggagtgagttgcttgaaacttctgttcacatggagtaagaatcaacattctatcaggttgtccttaagtattacgggtacgtcgagagtgatccaaaaacccgcccagcgcgagccgccatgttgttaaattgaactagttagaactaaaaacagaataagaatattttagtactttcttaaacgcgttcttcgaatctttgccgttctcgtgctgcgctgaattgtcaccgtagccttgccggtcttgatattgagtttgacgacgagtctccgtcaagacctcaaggtccagcaatcaggtcaatcacagcattcaatgtcttgtattacctaaattttgattccgcagataggtgtaattaacagcggattctca

SEQ ID NO: 15302 - DNA, 1857 bp, Muscodor strobelii
  misc_feature: SGI cDNA ID NO. 565065
  misc_feature: Encodes the peptide sequence at SEQ ID NO 15303
atggataaaaactctgagcgcattattgtacattttgactatgattgcttctacgcaagtgttttcgagaatgagaacccatctctcaagtcacagccgctgggcatcaagcagaagagcatccttgccacctgcaactatgtggcacgagcccgcggcgtcaaaaaattgatgctgatctctgaggctcaaaagatctgccctgatcttatcatcatgaatggggaggacctcacgcgatttcgagatgtgtcaaagaaattgtgggcttttcttcgtgctcactcgtggaatcatcgtgtggagcgtttgggtcttgatgaggtcttcctcgatgtcacggacatcatttcttacaacgcggacatgctgaatgtccatgctctgagtaactctttctttcagcttgatcgaaacgatccactaaagggatttccgtttgacggcacgcgattttatgcctgtgtacagcctccacctagtgatccggaagcaaacggtgttgagtctgttgaagtcggaaatccgctctgtgtccggttgatgctggcctcgcatctggctggttatttgcgccataagctcgacgaagactttggttacacatcgagtggcggcatctcgacaaacaagattctcgcaaagctagctggtagtgtcaataaaccgaataaccagactactttgctaagtttcaaagatggctccatcgagacattcatggattcgcatacaattcgaaaagtgccgggtattggctctcgaattgcgcaactgatcgaagagcacattctctctgcgccggctgtcttacgagatcgcgaaggcaccgttactgtcaaggaagtgcgccaattcgacggaatgtcagctcttcttttagagaagatactcgatcgtccaggcgcagagcgaggcagcggagagaaaatctggaatcttctccatggcgtggatccttcggaggtcaaggaggcaagcgatgtaccgacacagattagcatcgaagacacatatatgacacatccgctgcagacaatcgctgaaataacacgtgagctatctgcgattgcagtctctctgatacggcgaatgcgtgtcgatctcacggaagctgaccatagcctggatccgaccacacacgatgtccacgacccgtcgttgacatccaccgaggtaggctcaaaccctcctcgctggttagcgtacccaaagacattaagactgtctacccgcaaaaagtcaaatccagttacgaatccaaatagtacgaccgatatgcctcagttcagtcgctcatcccgcagtgcaccgcttcaaagcttcgtatttagtctctcagatgacatcgctggaattgcggaacgactcgtgaccgagtctctgcttccattatttcgacgtctgcatcctgagcgacaaagctacaatcttgctctgctgaacgtctgcgtgacaaacatggtcatcgtggcgaacgatgacagcaatacaggcactaagggttcgggaagagacatcgggcgtatgttccgaacccaagaagaaaagctacgagaattcactgtctacgacacatcgcctctacctgaatcgccccaagctgatactgttatcgatgctcctcaacagatagaaatgaaagatggggcacatcctaactcacatctcacgacttctacttcaccggctccttttgacgatcaaatggacgatacgtgggatgacgatgacgtgtgggacgaagcaggaggggaagacgaagaaacagaaacgcaccgctgcgaaacctgcgaccatgaaatcgcagtcttcgcgatgccagcacatcgacgcttccatgctctggatgagtga

SEQ ID NO: 15303 - protein, 618 aa, Muscodor strobelii
  misc_feature: SGI Peptide ID NO. 565065
  misc_feature (12)..(426): Pfam Id: PF00817 Pfam Desc: impB/mucB/samB family
  misc_feature (12)..(120): Pfam Id: PF00817 Pfam Desc: impB/mucB/samB family
  misc_feature (179)..(335): Pfam Id: PF00817 Pfam Desc: impB/mucB/samB family
  misc_feature (7)..(614): NCBI GI: 121707923 Blast Desc: DNA polymerase iota, [Aspergillus clavatus NRRL 1] gi|119400125|gb|EAW10551.1| DNA polymerase iota, [Aspergillus clavatus NRRL 1]
  misc_feature (13)..(518): NCBI GI: 261353049 Blast Desc: conserved [Verticillium albo-atrum VaMs.102]
  misc_feature (3)..(614): NCBI GI: 70993736 Blast Desc: DNA polymerase iota [Aspergillus fumigatus Af293] gi|66849349|gb|EAL89677.1| DNA polymerase iota, [Aspergillus fumigatus Af293] gi|159125363|gb|EDP50480.1| DNA polymerase iota,
  misc_feature (3)..(618): NCBI GI: 67538900 Blast Desc: AN5620.2 [Aspergillus nidulans FGSC A4] gi|40743523|gb|EAA62713.1| AN5620.2 [Aspergillus nidulans FGSC A4] gi|259484911|tpe|CBF81536.1| TPA: DNA polymerase iota, FGSC
  misc_feature (2)..(617): NCBI GI: 39973529 Blast Desc: MGG_01089 [Magnaporthe grisea 70-15] gi|145017950|gb|EDK02229.1| MGG_01089 [Magnaporthe grisea 70-15]
  misc_feature (3)..(615): NCBI GI: 255947808 Blast Desc: Pc22g06410 [Penicillium chrysogenum Wisconsin 54-1255] gi|211591688|emb|CAP97929.1| Pc22g06410 [Penicillium chrysogenum Wisconsin 54-1255]
  misc_feature (7)..(618): NCBI GI: 256732484 Blast Desc: NECHADRAFT_92505 [Nectria haematococca mpVI 77-13-4]
  misc_feature (20)..(614): NCBI GI: 119500316 Blast Desc: DNA polymerase iota, [Neosartorya fischeri NRRL 181] gi|119415080|gb|EAW25018.1| DNA polymerase iota, [Neosartorya fischeri NRRL 181]
  misc_feature (1)..(616): NCBI GI: 242769663 Blast Desc: DNA polymerase iota, [Talaromyces stipitatus ATCC 10500] gi|218725011|gb|EED24428.1| DNA polymerase iota, [Talaromyces stipitatus ATCC 10500]
  misc_feature (1)..(615): NCBI GI: 212542149 Blast Desc: DNA polymerase iota, [Penicillium marneffei ATCC 18224] gi|210066136|gb|EEA20229.1| DNA polymerase iota, [Penicillium marneffei ATCC 18224]
  misc_feature (5)..(502): SWISSPROT Homolog: EC 2.7.7.7 DNA-directed DNA polymerase
MDKNSERIIVHFDYDCFYASVFENENPSLKSQPLGIKQKSILATCNYVARARGVKKLMLISEAQKICPDLIIMNGEDLTRFRDVSKKLWAFLRAHSWNHRVERLGLDEVFLDVTDIISYNADMLNVHALSNSFFQLDRNDPLKGFPFDGTRFYACVQPPPSDPEANGVESVEVGNPLCVRLMLASHLAGYLRHKLDEDFGYTSSGGISTNKILAKLAGSVNKPNNQTTLLSFKDGSIETFMDSHTIRKVPGIGSRIAQLIEEHILSAPAVLRDREGTVTVKEVRQFDGMSALLLEKILDRPGAERGSGEKIWNLLHGVDPSEVKEASDVPTQISIEDTYMTHPLQTIAEITRELSAIAVSLIRRMRVDLTEADHSLDPTTHDVHDPSLTSTEVGSNPPRWLAYPKTLRLSTRKKSNPVTNPNSTTDMPQFSRSSRSAPLQSFVFSLSDDIAGIAERLVTESLLPLFRRLHPERQSYNLALLNVCVTNMVIVANDDSNTGTKGSGRDIGRMFRTQEEKLREFTVYDTSPLPESPQADTVIDAPQQIEMKDGAHPNSHLTTSTSPAPFDDQMDDTWDDDDVWDEAGGEDEETETHRCETCDHEIAVFAMPAHRRFHALDE

SEQ ID NO: 15304 - DNA, 6342 bp, Muscodor strobelii; identical to SEQ ID NO: 15301
  misc_feature: SGI EST ID NO. CUFF.36430.2
  misc_feature: Variant of the nucleotide sequence at SEQ ID NO 15302

SEQ ID NO: 15305 - DNA, 1419 bp, Muscodor strobelii
  misc_feature: SGI cDNA ID NO. 565066
  misc_feature: Elevated expression when VOC is produced
  misc_feature: Encodes the peptide sequence at SEQ ID NO 15306
atggccgggcctactccccaaaaggccagaccgagactgtcgcttcagactaagtccatgggtggctcttctagtcgaacaagaaatgcccttgcccacgcagatcctaggtctcttacagctttcaacacgctgtctaatgtatatgttaccgccattgaaaggtcgactcctatccagagcacgccgttgacggcgatcaatctcatgcagacgcttaagctacagacaaatccagaggcactccagacacatcagcagagaatccaaacccctttcactgccacattgccagacactcctttatcagccaacccgatatcacccgctcagcagatggacataatatttcccagtactatgactgctactccgcctctttccgccgggccgaacgactcaactgagcggaaggtattcaactttggtcttattgacacacgccatcaaaccgcgccctcgtctccagctcaggctcgccgtcgagtcacctacgttccttcgggtactgctctcagagcgccgtatagccataacaggtctcttcatagtattctccgtaattcacctttgccgcctgcaagtgcaaagtctcctagctcgcctagaagacaatctcttcgtctccaagagaaggcagcacggcgagtgggctacgagtcgccattgacacagactatcactactgagaggtacaccaaatcacatattgacctacttgtggaggaagcgtcaccatatacaccctctcccgcgattgaagattctgatatggccctggatctcgccatggcatattcgggagacgagacaagagacggaggcatgactccaggaccattcgaggaaatgaggagacggatggccaaggtcgctaccgagacacctattcactcacctaggccagatggaataaggaagcgtaagcgtaaggaaaagaaacgaaagtgggtctggacaatcggacaagagggagaagagggcgagggcgcagccatggcagccattcgtgctgctgctggtgaagcaacaccacgagcaaccagctcatcgacgcctgcacgccagcatatggtcaaagctaccacgccagagcctttgacggccattcaaataagtgtcgaacaagcagagtctgagtcagatctatcgatagataaggatcagatggattacgagatgtcggacacatctagcttactttcgagcagagcgacaacaccttacagcgtggacctagacatgaagaccccaactgttcctgttgctttcaatactgagacggcatcggtacagtcaacaccgcccaagagacagcgatttggttccatcgacttgatcaaccctgagaccggaagtcgaagggacacacctattcctccggatctagtgggtgttccggagaataaccagctatga

SEQ ID NO: 15306 - protein, 472 aa, Muscodor strobelii
  misc_feature: SGI Peptide ID NO. 565066
  misc_feature (6)..(464): NCBI GI: 261353043 Blast Desc: conserved [Verticillium albo-atrum VaMs.102]
  misc_feature (10)..(465): NCBI GI: 256732937 Blast Desc: NECHADRAFT_38392 [Nectria haematococca mpVI 77-13-4]
  misc_feature (61)..(463): NCBI GI: 145610585 Blast Desc: MGG_01088 [Magnaporthe grisea 70-15] gi|145017951|gb|EDK02230.1| MGG_01088 [Magnaporthe grisea 70-15]
  misc_feature (10)..(464): NCBI GI: 46123819 Blast Desc: FG06287.1 [Gibberella zeae PH-1]
  misc_feature (10)..(329): NCBI GI: 164427973 Blast Desc: NCU01509 [Neurospora crassa OR74A] gi|16416064|emb|CAB91434.2| related to glucan 1, 4-alpha-glucosidase [Neurospora crassa] [Neurospora crassa OR74A]
  misc_feature (10)..(291): NCBI GI: 171689354 Blast Desc: protein product [Podospora anserina] gi|170944639|emb|CAP70750.1| protein product [Podospora anserina]
  misc_feature (10)..(296): NCBI GI: 154290452 Blast Desc: BC1G_15563 [Botryotinia fuckeliana B05.10] gi|150847734|gb|EDN22927.1| BC1G_15563 [Botryotinia fuckeliana B05.10]
  misc_feature (10)..(296): NCBI GI: 156030836 Blast Desc: SS1G_14357 [Sclerotinia sclerotiorum 1980] gi|154700748|gb|EDO00487.1| SS1G_14357 [Sclerotinia sclerotiorum 1980]
  misc_feature (182)..(331): NCBI GI: 116199615 Blast Desc: CHGG_07963 [Chaetomium globosum CBS 148.51] gi|88179242|gb|EAQ86710.1| CHGG_07963 [Chaetomium globosum CBS 148.51]
  misc_feature (173)..(322): NCBI GI: 255947810 Blast Desc: Pc22g06420 [Penicillium chrysogenum Wisconsin 54-1255] gi|211591689|emb|CAP97930.1| Pc22g06420 [Penicillium chrysogenum Wisconsin 54-1255]
  misc_feature: Useful for introducing or modulating the production of volatile compounds
MAGPTPQKARPRLSLQTKSMGGSSSRTRNALAHADPRSLTAFNTLSNVYVTAIERSTPIQSTPLTAINLMQTLKLQTNPEALQTHQQRIQTPFTATLPDTPLSANPISPAQQMDIIFPSTMTATPPLSAGPNDSTERKVFNFGLIDTRHQTAPSSPAQARRRVTYVPSGTALRAPYSHNRSLHSILRNSPLPPASAKSPSSPRRQSLRLQEKAARRVGYESPLTQTITTERYTKSHIDLLVEEASPYTPSPAIEDSDMALDLAMAYSGDETRDGGMTPGPFEEMRRRMAKVATETPIHSPRPDGIRKRKRKEKKRKWVWTIGQEGEEGEGAAMAAIRAAAGEATPRATSSSTPARQHMVKATTPEPLTAIQISVEQAESESDLSIDKDQMDYEMSDTSSLLSSRATTPYSVDLDMKTPTVPVAFNTETASVQSTPPKRQRFGSIDLINPETGSRRDTPIPPDLVGVPENNQL

SEQ ID NO: 15307 - DNA, 2601 bp, Muscodor strobelii
  misc_feature: SGI EST ID NO. CUFF.36355.0
  misc_feature: Variant of the nucleotide sequence at SEQ ID NO 15305
gaggaatagacgccgtcgagtgcgaatctagcggccacacacgcggtgaggattgttagccgacgtcaacgataccacaattggttgcttgtgactaggatcatgcatcccagccaggatgcgtcggcgcttgcgcctttggattcatcccttcccatgccactgtcacctttttatagccaaccaacaagaagcccactcacctcagcacaaaaacgtccttcatcaagtgaagaacccatgtctctcagtgctctgggcttgaaagttcccaaagtccattcctcccgacctcgcactcccttaccaatttcttgatgctttctcacgctagtcgcgtctatctggcttcttcacattgcaatacacattagtgcgatccttccaagcgctcgttccagggagggggttttcttctccctgtcctcttcgccgggtactatttctctatgatagtcatataatgtagacgctgtccacttcgttgttaccccaatatccttattcagtttctacttcttcgtcttgaaaacatataggtctgttgggaggttgcctaagtctagtctgctggctgctcagactgaggtggtatactttacagcaaccttccttcacctacctatgtgcttaactcgccattcatctgtcggtggtcatcttagttgaactcatcaccaacaccagagacatggccgggcctactccccaaaaggccagaccgagactgtcgcttcagactaagtccatgggtggctcttctagtcgaacaagaaatgcccttgcccacgcagatcctaggtctcttacagctttcaacacgctgtctaatgtatatgttaccgccattgaaaggtcgactcctatccagagcacgccgttgacggcgatcaatctcatgcagacgcttaagctacagacaaatccagaggcactccagacacatcagcagagaatccaaacccctttcactgccacattgccagacactcctttatcagccaacccgatatcacccgctcagcagatggacataatatttcccagtactatgactgctactccgcctctttccgccgggccgaacgactcaactgagcggaaggtattcaactttggtcttattgacacacgccatcaaaccgcgccctcgtctccagctcaggctcgccgtcgagtcacctacgttccttcgggtactgctctcagagcgccgtatagccataacaggtctcttcatagtattctccgtaattcacctttgccgcctgcaagtgcaaagtctcctagctcgcctagaagacaatctcttcgtctccaagagaaggcagcacggcgagtgggctacgagtcgccattgacacagactatcactactgagaggtacaccaaatcacatattgacctacttgtggaggaagcgtcaccatatacaccctctcccgcgattgaagattctgatatggccctggatctcgccatggcatattcgggagacgagacaagagacggaggcatgactccaggaccattcgaggaaatgaggagacggatggccaaggtcgctaccgagacacctattcactcacctaggccagatggaataaggaagcgtaagcgtaaggaaaagaaacgaaagtgggtctggacaatcggacaagagggagaagagggcgagggcgcagccatggcagccattcgtgctgctgctggtgaagcaacaccacgagcaaccagctcatcgacgcctgcacgccagcatatggtcaaagctaccacgccagagcctttgacggccattcaaataagtgtcgaacaagcagagtctgagtcagatctatcgatagataaggatcagatggattacgagatgtcggacacatctagcttactttcgagcagagcgacaacaccttacagcgtggacctagacatgaagaccccaactgttcctgttgctttcaatactgagacggcatcggtacagtcaacaccgcccaagagacagcgatttggttccatcgacttgatcaaccctgagaccggaagtcgaagggacacacctattcctccggatctagtgggtgttccggagaataaccagctatgaagagacgcggagacaactcccggaaggttttacttggaagtcttacagcatatttacacgcatacttaccgcaaggtgcaaaagattgggcttgcatgcattgcgatggttttgttttgagcgaaaggggttgatcgagtgcattaggttgggctgtcggcgttttcgtggattataccaaacttgctttaccttcacttgacctttggtctcgtggatacatgtactttaactcttgacagttactacacttcggacatggttgaacgagaatatgacaattatgaatatttgaacctcgcctatttgtcgaattcattgtggagtcatagtgttttttggtcttcacgagatccttgatttattttgaatcttacagttcaagatgttttatgttagtttcctcgtaccgcaagcggtgtaaatggtattgctctgtcttgcagccatttacagggtaagattgctcacctacattgccttggtcccct

SEQ ID NO: 15308 - DNA, 750 bp, Muscodor strobelii
  misc_feature: SGI cDNA ID NO. 565067
  misc_feature: Encodes the peptide sequence at SEQ ID NO 15309
atgcaacccattccggatctcaagtgcttgttcgccaacaactaccagacctacaactacatctacatctactacgaccactcgacccacgacaacacttcctactaccacaacttctataagtacgactacgactacaaccacaactcctacaacaactactacgactacgaccacaactacaactcctacaacaactactacaactacgactcctacgactactactacaactacaacccccactactaccacgagcacaaccacaacaaccacgacaactacgacgactgctgcgccacaacccacaatattgataatggcttgacatgtttagactatgatctggctgaacttatctgcgggcccgtcgcaacaaccgctactacaacgacaacgacaacgacgacgacgacgacgacaaccgctgccccacagcctacctgcgtcgtgccgccaccagatacgaacactcagtgtggtcagaacatccaaggcacagggatctacggataccgctatgacattgtttgcggttctggctatactgataccttggctgactctggcacaaccaccgcggccaacttcgatatatgcgtgactgcttgcgataattccgacacctgtctatcatttgactacgactgcagcactgcagtgaataactgccgtctcttcaatgctggcaactcgccgaacacggctccaaacccgcttcgatctaggggatacgctaacaatagttaa

SEQ ID NO: 15309 - protein, 249 aa, Muscodor strobelii
  misc_feature: SGI Peptide ID NO. 565067
MQPIPDLKCLFANNYQTYNYIYIYYDHSTHDNTSYYHNFYKYDYDYNHNSYNNYYDYDHNYNSYNNYYNYDSYDYYYNYNPHYYHEHNHNNHDNYDDCCATTHNIDNGLTCLDYDLAELICGPVATTATTTTTTTTTTTTTTAAPQPTCVVPPPDTNTQCGQNIQGTGIYGYRYDIVCGSGYTDTLADSGTTTAANFDICVTACDNSDTCLSFDYDCSTAVNNCRLFNAGNSPNTAPNPLRSRGYANNS

SEQ ID NO: 15310 - DNA, 3633 bp, Muscodor strobelii
  misc_feature: SGI cDNA ID NO. 565068
  misc_feature: Reduced expression when VOC is produced
  misc_feature: Encodes the peptide sequence at SEQ ID NO 15311
atgtctaccgaaaataatgattataccgaccatacccatacaggcggagggcactattctggtcgcaatcgcattcctaacataaaagagtttgcggccgccctggacagggataagaagaagcgtgacgccgagatcgatgcccagctcaaatcgaacaagaaaaatggcggaatccaagatcacaagaatagcagaatcctcgagggccacggcaaggtcgtgactgatcccgtcacaggcaaccaggtccagattgacgatgtcaacacggattttatgaaagctgtggaaaacccacatctctccataccgaatgccaacttgggtaaagaaactactgttaaaacagaagcaacacagtcaggcgaggagtaccgcgagaatcaagatatcacggcgcccccagatcctgtagctaccggcgcaacctctgatgttcccatccacggcgagaagacaaatgtattgtttcaccccacgccttcagttagctacgaacctatgtatgcaacgatcgagaagaaagcaactgtactgtgcggagtcattttctttgccataatattcgtgggcaagttctttggtggaagacttctcggccttattcccttagctatgtgtatcagttctggcgtcttcctttggatgaaggaccttgttcgtcaaggccgtgatatcgaatggtctagcgagcagaaacgaggcgagactgctgtcgtcaatctaattcccgagtcagttgagtggatgaacacccttcttggcgttgtttggggcttggtcaacccagaaatgttttctgctgtggccgataccctcgaggatgtaatgcaagcctcggttccgggagttattgagaatgtaaaagttgccgacatctctcaaggcaacaatcctattcgcatcctgagtctacgtgccctcccagattcgcacatgaaggaagtgaaggacgaaatgcacaagcagaatgagaagattaaggacccacaagagcttgccgccgatgaagaaggtggtgactactacaatctcgaggcgtcatttgcttaccacgcaaagccgtcttcgcaatctgtttccggcaaggcagcaaatatgggcatgcagctcgttttctaccttggaatgaagggtcttttcggtgtcccgctacctatctgggtcgaacttattgggcttgttggtaccgtgagaataagacttcaaatgagtccagagcccccgttcttgaaagccgttacctttactctcatgggtgttcccaaagttgaagccggttgtactccaatgatcgagcgcggagtcaacattctcaatttgccgttgatctccaactttgttaactgggcgattaagaccgcggcgagcatgtatgttgcacccaagtcgatgactcttgacttgggcaagatgctacagggcgatgacatcaccaaagacacacaagctatgggtgtcttgttcattcggatccacaaggcaactggcctatccaaacaggaccgacgtggttctcaaggcggaggttcagatccttatatcaccgtcagcttctctaaattcggcaaacccatgtattgcactcgtgttgtccaagatgatctcaaccccgtgttcgaggagagttgtgccctcatggttacccctgatctcatcaaggctgatgagcaattgtcaatggagctctgggacagtgatcggtcgagcgctgacgacgtcgtcggcaaagtcgagctttcgctccaaaagttgatccagcacccaggccagatgtttccccaggtctcaaaactcagaggtgtacaggccggaagcgacatgccaggtgagctccactgggaggtgggttactttggcaagactcaatttcgcgctgctctacggaccgacggcaaggacctcagcttacccaaagagctgcgagataagaaggagttgcaagaagacaagggtgcgattgataacgcagaggaagacgccgctacacacacgccacccgatcccctatggccgtctggtgttctcggtgttgtggtacaccaaatcgtcaatctcgagcttgccaatgtccaaggatctgaaggtggcaagcgtaagggaggcaaagagtacgaacctgcacgagatgccggcgagatcaaaggagaagcaagcaagaagctacctaatgcttactgcaccatctgcctcaacgatgaattggtctacaaaacgcgaacgaaagtggtttcttctaagccgatcttcaacgccggtaccgaacgatttgttcgagactggcgatcgaccatcgtcactgtcaccgtccgcgactctcgcaacaggcagcatgaccccatcctcggagttgttcccctcaagctgtctgacatcttgcagaccagtagccagtcctctcggtggtatcctctagatggtggtgtcggatatggtcgcgtccgtatttctctcgtattccgctctgtcgagttgaaacttcctcccccacagctcggctgggatgttggtaccttcgaattctcatctgacaagattacgtctacctttgctggtactggaaaaggcaagataaagttgagaatgcggactggcggcagttctgctacaattaaacgcgaggcatgcacggtggaagaagacgacagtgttagttgggctatcaatggcattgccaacaaccctagacctcgtctacctgtcagatatcgctatcgatcacccatcttcgtggaggtccaccttccaggcaaacgacacgtcaatcacttcgctgcactttggctactggagctggttgacaacgaagagcaggacttcgacattcctatctgggaatgcgacaatgccacacgcctgtcacagaactacatcaccgaaaacaatttctctgagattccacacatgaagatgaaggaagtgggacgtatgcgcttccggggcagattcaaggccggtaccgaccgtgatcacttgcgctttgtgagtgataacgattcacgagagacaatcgagacttgggaggcatgcttcgctgaaggcgtccggcaagaagaggttaccaaagaggtccctcctgctacccaggccttacacgaggagtcattgacacacggccgagatgttctggccaccctctctcctgaggagaagaagaagtggctctcgaaggacggcacagactggacaggagcgtttggtaaagatcctgccgaactgatgaacggcgaacgaaacgataatgaagaggatgcctacgaatctgatagcgactcagaaacgaccaagtccactggagcggctgatcttggcattagcgatgccacgacctccggcgatgctcacgaagatcagattggccctgctcggactgccagtaccactggtacagattccggtgtgtctcttcagtctaagggcagcactggtagtggcagtggaccgcttgctgcgtacaaggactacaagtctcgcagtcgagacttgcaccgtcaacagcgtggattgatgcagtggcgcccgatgcgcaatgtccaatttgtgaaggacgaggcgaaatttgcggtcagacggctgacgaaggtcggctccttgagtggacgacagccggatgtcgaaactgaggtctaa

SEQ ID NO: 15311 - protein, 1210 aa, Muscodor strobelii
  misc_feature: SGI Peptide ID NO. 565068
  misc_feature (489)..(580): Pfam Id: PF00168 Pfam Desc: C2 domain
  misc_feature (677)..(787): Pfam Id: PF00168 Pfam Desc: C2 domain
  misc_feature (14)..(1210): NCBI GI: 46117072 Blast Desc: FG04378.1 [Gibberella zeae PH-1]
  misc_feature (16)..(1210): NCBI GI: 39973519 Blast Desc: MGG_01094 [Magnaporthe grisea 70-15] gi|145017943|gb|EDK02222.1| MGG_01094 [Magnaporthe grisea 70-15]
  misc_feature (6)..(1210): NCBI GI: 171689352 Blast Desc: protein product [Podospora anserina] gi|170944638|emb|CAP70749.1| protein product [Podospora anserina]
  misc_feature (9)..(1209): NCBI GI: 154299615 Blast Desc: BC1G_10770 [Botryotinia fuckeliana B05.10] gi|150857262|gb|EDN32454.1| BC1G_10770 [Botryotinia fuckeliana B05.10]
  misc_feature (13)..(1075): NCBI GI: 85082661 Blast Desc: NCU01510 [Neurospora crassa OR74A] gi|16416063|emb|CAB91433.2| conserved [Neurospora crassa] gi|28918041|gb|EAA27723.1| NCU01510 [Neurospora crassa OR74A]
  misc_feature (10)..(1210): NCBI GI: 116199617 Blast Desc: CHGG_07964 [Chaetomium globosum CBS 148.51] gi|88179243|gb|EAQ86711.1| CHGG_07964 [Chaetomium globosum CBS 148.51]
  misc_feature (13)..(1210): NCBI GI: 169608922 Blast Desc: SNOG_07545 [Phaeosphaeria nodorum SN15] gi|160701744|gb|EAT85011.2| SNOG_07545 [Phaeosphaeria nodorum SN15]
  misc_feature (13)..(1209): NCBI GI: 189199436 Blast Desc: meiotically up-regulated gene 190 protein [Pyrenophora tritici-repentis Pt-1C-BFP] gi|187983154|gb|EDU48642.1| meiotically up-regulated gene 190 protein [Pyrenophora Pt-1C-BFP]
  misc_feature (14)..(975): NCBI GI: 261353042 Blast Desc: conserved [Verticillium albo-atrum VaMs.102]
  misc_feature (13)..(1209): NCBI GI: 242769576 Blast Desc: C2 domain protein [Talaromyces stipitatus ATCC 10500] gi|218724989|gb|EED24406.1| C2 domain protein [Talaromyces stipitatus ATCC 10500]
  misc_feature: Useful for introducing or modulating the production of volatile compounds
MSTENNDYTDHTHTGGGHYSGRNRIPNIKEFAAALDRDKKKRDAEIDAQLKSNKKNGGIQDHKNSRILEGHGKVVTDPVTGNQVQIDDVNTDFMKAVENPHLSIPNANLGKETTVKTEATQSGEEYRENQDITAPPDPVATGATSDVPIHGEKTNVLFHPTPSVSYEPMYATIEKKATVLCGVIFFAIIFVGKFFGGRLLGLIPLAMCISSGVFLWMKDLVRQGRDIEWSSEQKRGETAVVNLIPESVEWMNTLLGVVWGLVNPEMFSAVADTLEDVMQASVPGVIENVKVADISQGNNPIRILSLRALPDSHMKEVKDEMHKQNEKIKDPQELAADEEGGDYYNLEASFAYHAKPSSQSVSGKAANMGMQLVFYLGMKGLFGVPLPIWVELIGLVGTVRIRLQMSPEPPFLKAVTFTLMGVPKVEAGCTPMIERGVNILNLPLISNFVNWAIKTAASMYVAPKSMTLDLGKMLQGDDITKDTQAMGVLFIRIHKATGLSKQDRRGSQGGGSDPYITVSFSKFGKPMYCTRVVQDDLNPVFEESCALMVTPDLIKADEQLSMELWDSDRSSADDVVGKVELSLQKLIQHPGQMFPQVSKLRGVQAGSDMPGELHWEVGYFGKTQFRAALRTDGKDLSLPKELRDKKELQEDKGAIDNAEEDAATHTPPDPLWPSGVLGVVVHQIVNLELANVQGSEGGKRKGGKEYEPARDAGEIKGEASKKLPNAYCTICLNDELVYKTRTKVVSSKPIFNAGTERFVRDWRSTIVTVTVRDSRNRQHDPILGVVPLKLSDILQTSSQSSRWYPLDGGVGYGRVRISLVFRSVELKLPPPQLGWDVGTFEFSSDKITSTFAGTGKGKIKLRMRTGGSSATIKREACTVEEDDSVSWAINGIANNPRPRLPVRYRYRSPIFVEVHLPGKRHVNHFAALWLLELVDNEEQDFDIPIWECDNATRLSQNYITENNFSEIPHMKMKEVGRMRFRGRFKAGTDRDHLRFVSDNDSRETIETWEACFAEGVRQEEVTKEVPPATQALHEESLTHGRDVLATLSPEEKKKWLSKDGTDWTGAFGKDPAELMNGERNDNEEDAYESDSDSETTKSTGAADLGISDATTSGDAHEDQIGPARTASTTGTDSGVSLQSKGSTGSGSGPLAAYKDYKSRSRDLHRQQRGLMQWRPMRNVQFVKDEAKFAVRRLTKVGSLSGRQPDVETEV

SEQ ID NO: 15312 - DNA, 4366 bp, Muscodor strobelii
  misc_feature: SGI EST ID NO. CUFF.36445.0
  misc_feature: Variant of the nucleotide sequence at SEQ ID NO 15310
gcgctaccccactgacgtcatctatcacttacttacaccagcgactaaggtagcatttctgtgatgcacacacccgattacctcactgcacttctcaaagcggaatctacgtgcaaagactgcatttcttagcttttggtgcttggaacagctaggacgaatgggtttctagtttcaatttcgtcgtgctcgtctggcaatctgcatacctacatcatacgtaacacatcgcatagacctccaccttaatacattttcaacggacagcgtcctctttcttctctttccctacctttcaccctcaatcccccgcttggctactccccaatctctgtaacaaccgccctacggagtgggatcgtggacgtggatatacacaaccagtctcgagtaattgacacacgcctgtcatccactcttaaggtagtcgagcgtgcttgaagcgcgaaaacgggcaaccaatatcgagtaccgtagtaataggggcaaaagaacaacttgggccgcccacgatgtctaccgaaaataatgattataccgaccatacccatacaggcggagggcactattctggtcgcaatcgcattcctaacataaaagagtttgcggccgccctggacagggataagaagaagcgtgacgccgagatcgatgcccagctcaaatcgaacaagaaaaatggcggaatccaagatcacaagaatagcagaatcctcgagggccacggcaaggtcgtgactgatcccgtcacaggcaaccaggtccagattgacgatgtcaacacggattttatgaaagctgtggaaaacccacatctctccataccgaatgccaacttgggtaaagaaactactgttaaaacagaagcaacacagtcaggcgaggagtaccgcgagaatcaagatatcacggcgcccccagatcctgtagctaccggcgcaacctctgatgttcccatccacggcgagaagacaaatgtattgtttcaccccacgccttcagttagctacgaacctatgtatgcaacgatcgagaagaaagcaactgtactgtgcggagtcattttctttgccataatattcgtgggcaagttctttggtggaagacttctcggccttattcccttagctatgtgtatcagttctggcgtcttcctttggatgaaggaccttgttcgtcaaggccgtgatatcgaatggtctagcgagcagaaacgaggcgagactgctgtcgtcaatctaattcccgagtcagttgagtggatgaacacccttcttggcgttgtttggggcttggtcaacccagaaatgttttctgctgtggccgataccctcgaggatgtaatgcaagcctcggttccgggagttattgagaatgtaaaagttgccgacatctctcaaggcaacaatcctattcgcatcctgagtctacgtgccctcccagattcgcacatgaaggaagtgaaggacgaaatgcacaagcagaatgagaagattaaggacccacaagagcttgccgccgatgaagaaggtggtgactactacaatctcgaggcgtcatttgcttaccacgcaaagccgtcttcgcaatctgtttccggcaaggcagcaaatatgggcatgcagctcgttttctaccttggaatgaagggtcttttcggtgtcccgctacctatctgggtcgaacttattgggcttgttggtaccgtgagaataagacttcaaatgagtccagagcccccgttcttgaaagccgttacctttactctcatgggtgttcccaaagttgaagccggttgtactccaatgatcgagcgcggagtcaacattctcaatttgccgttgatctccaactttgttaactgggcgattaagaccgcggcgagcatgtatgttgcacccaagtcgatgactcttgacttgggcaagatgctacagggcgatgacatcaccaaagacacacaagctatgggtgtcttgttcattcggatccacaaggcaactggcctatccaaacaggaccgacgtggttctcaaggcggaggttcagatccttatatcaccgtcagcttctctaaattcggcaaacccatgtattgcactcgtgttgtccaagatgatctcaaccccgtgttcgaggagagttgtgccctcatggttacccctgatctcatcaaggctgatgagcaattgtcaatggagctctgggacagtgatcggtcgagcgctgacgacgtcgtcggcaaagtcgagctttcgctccaaaagttgatccagcacccaggccagatgtttccccaggtctcaaaactcagaggtgtacaggccggaagcgacatgccaggtgagctccactgggaggtgggttactttggcaagactcaatttcgcgctgctctacggaccgacggcaaggacctcagcttacccaaagagctgcgagataagaaggagttgcaagaagacaagggtgcgattgataacgcagaggaagacgccgctacacacacgccacccgatcccctatggccgtctggtgttctcggtgttgtggtacaccaaatcgtcaatctcgagcttgccaatgtccaaggatctgaaggtggcaagcgtaagggaggcaaagagtacgaacctgcacgagatgccggcgagatcaaaggagaagcaagcaagaagctacctaatgcttactgcaccatctgcctcaacgatgaattggtctacaaaacgcgaacgaaagtggtttcttctaagccgatcttcaacgccggtaccgaacgatttgttcgagactggcgatcgaccatcgtcactgtcaccgtccgcgactctcgcaacaggcagcatgaccccatcctcggagttgttcccctcaagctgtctgacatcttgcagaccagtagccaggttggtatcctcatgtctagcgctttgacgcaaacactaacatgtgtttagtcctctcggtggtatcctctagatggtggtgtcggatatggtcgcgtccgtatttctctcgtattccgctctgtcgagttgaaacttcctcccccacagctcggctgggatgttggtaccttcgaattctcatctgacaagattacgtctacctttgctggtactggaaaaggcaagataaagttgagaatgcggactggcggcagttctgctacaattaaacgcgaggcatgcacggtggaagaagacgacagtgttagttgggctatcaatggcattgccaacaaccctagacctcgtctacctgtcagatatcgctatcgatcacccatcttcgtggaggtccaccttccaggcaaacgacacgtcaatcacttcgctgcactttggctactggagctggttgacaacgaagagcaggacttcgacattcctatctgggaatgcgacaatgccacacgcctgtcacagaactacatcaccgaaaacaatttctctgagattccacacatgaagatgaaggaagtgggacgtatgcgcttccggggcagattcaaggccggtaccgaccgtgatcacttgcgctttgtgagtgataacgattcacgagagacaatcgagacttgggaggcatgcttcgctgaaggcgtccggcaagaagaggttaccaaagaggtccctcctgctacccaggccttacacgaggagtcattgacacacggccgagatgttctggccaccctctctcctgaggagaagaagaagtggctctcgaaggacggcacagactggacaggagcgtttggtaaagatcctgccgaactgatgaacggcgaacgaaacgataatgaagaggatgcctacgaatctgatagcgactcagaaacgaccaagtccactggagcggctgatcttggcattagcgatgccacgacctccggcgatgctcacgaagatcagattggccctgctcggactgccagtaccactggtacagattccggtgtgtctcttcagtctaagggcagcactggtagtggcagtggaccgcttgctgcgtacaaggactacaagtctcgcagtcgagacttgcaccgtcaacagcgtggattgatgcagtggcgcccgatgcgcaatgtccaatttgtgaaggacgaggcgaaatttgcggtcagacggctgacgaaggtcggctccttgagtggacgacagccggatgtcgaaactgaggtctaaattgttgaaaggatctgaatatactttaagtgcaacatggttcaggagcatggtgtggaagtggacgcaatgcgtggttcttctgttgacctaatgtttatttgtataattaggcgtcctagtgtgaaatgacttacgatggaaaatgaaataattcagtcaaccagaaa

SEQ ID NO: 15313 - DNA, 639 bp, Muscodor strobelii
  misc_feature: SGI cDNA ID NO. 565069
  misc_feature: Reduced expression when VOC is produced
  misc_feature: Encodes the peptide sequence at SEQ ID NO 15314
atggtgaacccaggaaagcgcatgaacatattacaagctctgttgagcttacggcatggccctggcgctgcaatactaccaccagagatcacgaggatacatatggatttcgctatgaggtggaatgatggtcactttggccctagaaaattctggcgcgaatgcctgccacgcctaaagttctataacccagcggtccccatgctggtgaaccggtctacgaacaacgaagggccagccacattatccatctacttccgacaacccgactcaaaagcaccaagcactccatcagaaatcctaaaaaccatgctcccattggcgcgacagcctcactccagcaccgaaaacgaacatccagcaccacctcccgatgagggcgaacacgtcgtcaccatcgacatgaagaacgtccactcagactcgatcctcagtgaatttctctccaagactggcgccgttctcgtcacgcccacgccggaagaacagagcgagatgcgccaggtcaaggagagggaggaacgaggaaactatgatcgtgtcatcatgaagaagtatatcgacgataagaggcatgaggagcgcatgatggccattgcgagacaagaggccgatgctatcaaggcggccaacacttaa

SEQ ID NO: 15314 - protein, 212 aa, Muscodor strobelii
  misc_feature: SGI Peptide ID NO. 565069
  misc_feature (40)..(154): Pfam Id: PF05047 Pfam Desc: Mitochondrial ribosomal protein L51 / S25 / CI-B8 domain
  misc_feature (40)..(97): Pfam Id: PF05047 Pfam Desc: Mitochondrial ribosomal protein L51 / S25 / CI-B8 domain
  misc_feature (1)..(210): NCBI GI: 171689100 Blast Desc: protein product [Podospora anserina] gi|170944512|emb|CAP70623.1| protein product [Podospora anserina]
  misc_feature (1)..(210): NCBI GI: 116204891 Blast Desc: CHGG_10329 [Chaetomium globosum CBS 148.51] gi|88176457|gb|EAQ83925.1| CHGG_10329 [Chaetomium globosum CBS 148.51]
  misc_feature (1)..(202): NCBI GI: 261353071 Blast Desc: 50S ribosomal protein Mrp49 [Verticillium albo-atrum VaMs.102]
  misc_feature (14)..(212): NCBI GI: 16944669 Blast Desc: related to ribosomal protein MRP49 [Neurospora crassa]
  misc_feature (1)..(180): NCBI GI: 256732490 Blast Desc: NECHADRAFT_78744 [Nectria haematococca mpVI 77-13-4]
  misc_feature (47)..(211): NCBI GI: 164428090 Blast Desc: NCU01650 [Neurospora crassa OR74A] gi|157072007|gb|EAA27036.2| [Neurospora crassa OR74A]
  misc_feature (1)..(208): NCBI GI: 145236711 Blast Desc: An06g01820 [Aspergillus niger] gi|134075464|emb|CAK48025.1| protein product [Aspergillus niger]
  misc_feature (1)..(208): NCBI GI: 238487430 Blast Desc: 50S ribosomal protein Mrp49 [Aspergillus flavus NRRL3357] gi|220699832|gb|EED56171.1| 50S ribosomal protein Mrp49 [Aspergillus flavus NRRL3357]
  misc_feature (1)..(208): NCBI GI: 115389864 Blast Desc: [Aspergillus terreus NIH2624] gi|114194833|gb|EAU36533.1| [Aspergillus terreus NIH2624]
  misc_feature (1)..(194): NCBI GI: 39973475 Blast Desc: MGG_01116 [Magnaporthe grisea 70-15] gi|145017918|gb|EDK02197.1| MGG_01116 [Magnaporthe grisea 70-15]
  misc_feature: Useful for introducing or modulating the production of volatile compounds
MVNPGKRMNILQALLSLRHGPGAAILPPEITRIHMDFAMRWNDGHFGPRKFWRECLPRLKFYNPAVPMLVNRSTNNEGPATLSIYFRQPDSKAPSTPSEILKTMLPLARQPHSSTENEHPAPPPDEGEHVVTIDMKNVHSDSILSEFLSKTGAVLVTPTPEEQSEMRQVKEREERGNYDRVIMKKYIDDKRHEERMMAIARQEADAIKAANT

SEQ ID NO: 15315 - DNA, 1706 bp, Muscodor strobelii
  misc_feature: SGI EST ID NO. CUFF.36378.0
  misc_feature: Variant of the nucleotide sequence at SEQ ID NO 15313
gaaagttggagcttcatcaatctaagcgatcatcaattgacagcgatttttttcacgacgacgcagcgagcatagaggctcgcaagccgccaagatggtgaacccaggaaagcgcatgaacatattacaagctgtaagcatcattgataccagtatttgacattcaactcgaattcgctaacagtagagcagaaggtatcttcttccgccgtcgtcgcaacaccgaagcatctcagagaacgtgactaaccatgtgagccttagctgttgagcttacggcatggccctggcgctgcaatactaccaccagagatcacgaggatacatatggatttcgctatgaggtggaatgatggtcactttggccctagaaaattctggcgcgaatgcctgccacgcctaaagttctataacccagcggtccccatgctggtgaaccggtctacgaacaacgaagggccagccacattatccatctacttccgacaacccgactcaaaagcaccaagcactccatcagaaatcctaaaaaccatgctcccattggcgcgacagcctcactccagcaccgaaaacgaacatccagcaccacctcccgatgagggcgaacacgtcgtcaccatcgacatgaagaacgtccactcagactcgatcctcagtgaatttctctccaagactggcgccgttctcgtcacgcccacgccggaagaacagagcgagatgcgccaggtcaaggagagggaggaacgaggaaactatgatcgtgtcatcatgaagaagtatatcgacgataagaggcatgaggagcgcatgatggccattgcgagacaagaggccgatgctatcaaggcggccaacacttaaaacggcgatcagcaaagggactcaggacgtcgtgtgcatactgtatgacggcagtgtatgatggcgagtgtcgtcatcgaacacggaagagggaaagccaagctatccacgaggacgacaagatgaaggaggcttgcgctgtacaaattaattgtattgtatagggagacagcgtggagcaatacctaaagcccacgaggtgtgtatggatctgtacatgaatataccaaccgccgtcaaggaacggcggatatttttcagcagccagcagttttcactgtcaggtaaatcgcatgatcgagtggagtgggagggagtggctcgtctcacagtacgaacagatgtgtccgtccatgggaccggccataccacacatcctcccgatcagagtgtgctccggagttcacctcgtgacaatccataagacttccaccgccactaaggtaaaatcacatatatcgtgacatgtttctctaactattctcccatcatagcattcaagacacctatacccaaaactcaacctctgccttcccattgccagatctcatccttcatatctcactgcactctctctctacctcctcacagctcagaacacaaaacggacccttgcaacactctgagataagcctgcaagttacatcgtggcttatttcaattttcagtccaaggaagaacaaaatcacatatcccacaaatgggatatggccgatgaggagagttgtggatatgccttttgatggttatctgcggttcgtctcctcgtggtcaacatacttttgaagccttagattaattacgataaatatagaactaaaatagagaggagtttactggca

SEQ ID NO: 15316 - DNA, 870 bp, Muscodor strobelii
  misc_feature: SGI cDNA ID NO. 565070
  misc_feature: Encodes the peptide sequence at SEQ ID NO 15317
atgcatgtctcctcgacagactcatcttgcagcacttcggcgatggcgaagtccgctaaggatcaagagatgccacgaactctggatgaagatgaatcctctagctcaatcgtgaagaccatcgccaatgagccattcccttttaatcgccttcccccagagctgcgcgatatgatctgggatattgccttgcgggaagaatctagccatcgctttgttctggtcaaccaggattattgcacgccagcgttgggccgagtagtaggcattattcacgaggatcatctcgtctctccgtatctatctgtcaatcacggaagtagagcgagagccaagacattctattcatgctgcgaggttatgttcaaggcaccagctgccacgtggtaccagatagtcccgtcatcaggcagaatatacgtcagcccgactcacgatacattcgtcgtcgcaaatgctcctatcttcaatcgcgtaaagcatctcaataacccgctcatcctctggtgtgcaaacagatccttccctgctcagatccggaaagtatgctgggccgttcactgctcgtgtgaatacccccgttccacctgggacctggataacaagttctatggtctgtcggcgacacataatttcaagacgcttcccagctccggtcgctcgattgcgtactttttcaaatcagacaaagatctagagattctcaagcaaggttgggtaaagatgagcgaatatctacgatcccagaagctcgagtactgctttgcccgcattaccattaccgagaacttttcatccagcaagccttacgagttcgaaacgatgccactctctgaagttcagttcatcggagacactttgggtacatga

SEQ ID NO: 15317 - protein, 289 aa, Muscodor strobelii
  misc_feature: SGI Peptide ID NO. 565070
MHVSSTDSSCSTSAMAKSAKDQEMPRTLDEDESSSSIVKTIANEPFPFNRLPPELRDMIWDIALREESSHRFVLVNQDYCTPALGRVVGIIHEDHLVSPYLSVNHGSRARAKTFYSCCEVMFKAPAATWYQIVPSSGRIYVSPTHDTFVVANAPIFNRVKHLNNPLILWCANRSFPAQIRKVCWAVHCSCEYPRSTWDLDNKFYGLSATHNFKTLPSSGRSIAYFFKSDKDLEILKQGWVKMSEYLRSQKLEYCFARITITENFSSSKPYEFETMPLSEVQFIGDTLGT

SEQ ID NO: 15318 - DNA, 258 bp, Muscodor strobelii
  misc_feature: SGI cDNA ID NO. 565071
  misc_feature: Encodes the peptide sequence at SEQ ID NO 15319
atgtccgacgatgagcgcgagaccaagcccttcaagttcgtcaccggtgtcgacgcccgcttccccaacatgaaccagaccaagcactgctggcagaactacgtcgactaccacaagtgcatcaatgccaagggcgaggactttgccccctgccgccagttcttccttgcctaccgatctctctgccccagcggatggtaccagcgatgggacgaacagcgagaagctggaaacttccccgttaagctcgacggttag

SEQ ID NO: 15319 - protein, 85 aa, Muscodor strobelii
  misc_feature: SGI Peptide ID NO. 565071
  misc_feature (7)..(82): Pfam Id: PF02297 Pfam Desc: Cytochrome oxidase c subunit VIb
  misc_feature (1)..(84): NCBI GI: 85110547 Blast Desc: NCU11339 [Neurospora crassa OR74A] gi|28881364|emb|CAD70406.1| [Neurospora crassa] gi|28925196|gb|EAA34277.1| [Neurospora crassa OR74A]
  misc_feature (1)..(84): NCBI GI: 116199527 Blast Desc: conserved [Chaetomium globosum CBS 148.51] gi|88179198|gb|EAQ86666.1| conserved [Chaetomium globosum CBS 148.51]
  misc_feature (1)..(84): NCBI GI: 39973485 Blast Desc: cytochrome c oxidase polypeptide vib [Magnaporthe grisea 70-15] gi|145017924|gb|EDK02203.1| cytochrome c oxidase polypeptide vib [Magnaporthe grisea 70-15]
  misc_feature (1)..(85): NCBI GI: 256732949 Blast Desc: [Nectria haematococca mpVI 77-13-4]
  misc_feature (4)..(84): NCBI GI: 154291151 Blast Desc: cytochrome c oxidase polypeptide VIb [Botryotinia fuckeliana B05.10] gi|150847063|gb|EDN22256.1| cytochrome c oxidase polypeptide VIb [Botryotinia fuckeliana B05.10]
  misc_feature (4)..(84): NCBI GI: 156044772 Blast Desc: SS1G_10490 [Sclerotinia sclerotiorum 1980] gi|154694878|gb|EDN94616.1| SS1G_10490 [Sclerotinia sclerotiorum 1980]
  misc_feature (3)..(84): NCBI GI: 261195250 Blast Desc: BDBG_05537 [Ajellomyces dermatitidis SLH14081] gi|239587901|gb|EEQ70544.1| BDBG_05537 [Ajellomyces dermatitidis SLH14081] gi|239610609|gb|EEQ87596.1| BDCG_02716 [Ajellomyces
  misc_feature (3)..(84): NCBI GI: 154281701 Blast Desc: cytochrome c oxidase polypeptide VIb [Ajellomyces capsulatus NAm1] gi|150411842|gb|EDN07230.1| cytochrome c oxidase polypeptide VIb [Ajellomyces capsulatus NAm1] cytochrome c VIb c
  misc_feature (3)..(84): NCBI GI: 225684773 Blast Desc: cytochrome c oxidase polypeptide vib [Paracoccidioides brasiliensis Pb03] gi|226286662|gb|EEH42175.1| conserved [Paracoccidioides brasiliensis Pb18]
  misc_feature (4)..(84): NCBI GI: 189200300 Blast Desc: cytochrome c oxidase polypeptide VIb [Pyrenophora tritici-repentis Pt-1C-BFP] gi|187983586|gb|EDU49074.1| cytochrome c oxidase polypeptide VIb [Pyrenophora Pt-1C-BFP]
MSDDERETKPFKFVTGVDARFPNMNQTKHCWQNYVDYHKCINAKGEDFAPCRQFFLAYRSLCPSGWYQRWDEQREAGNFPVKLDG

SEQ ID NO: 15320 - DNA, 649 bp, Muscodor strobelii
  misc_feature: SGI EST ID NO. CUFF.36393.0
  misc_feature: Variant of the nucleotide sequence at SEQ ID NO 15318
tagctggtaagaatcccttatcctgtgtctatccttcgattctaccccgaagcgaaaacgaagccgaccaaagcgatacaccaattccacctatttcgccctatcgccgacgatgaaccccaatgtctaactaatccaccacaggtgtcgacgcccgcttccccaacatgaaccagaccaagcactgctggcagaactacgtcgactaccacaagtgcatcaatgccaagggcgaggactttgccccctgccgccagttcttccttgcctaccgatctctctgccccagcggatggtaccagcgatgggacgaacagcgagaagctggaaacttccccgttaagctcgacggttagattgtgtaacatgacaaaggaagtggatgtgagacataaggtgaagacagggagtggtgatgatgtagtattagacttttgggtcataccagcaattagaagcattgcgaaccacatatcaagtcatttgtttcactattaatcttccaaatcaaagtggaattgtccaatggagtttgtgccacacttcattattctgacagcctttgacatatatcgatctatccagcaaataatacgtcccgctatgtacaaacataaagagccagatcaagataaaagtttggatgaac

SEQ ID NO: 15321 - DNA, 261 bp, Muscodor strobelii
  misc_feature: SGI cDNA ID NO. 565072
  misc_feature: Encodes the peptide sequence at SEQ ID NO 15322
atgtatgccacgcgagcactccgcatgatgcccacgaggcgcatgatggctcctgttcccaaagaggatcagagcgcgcacaccgtctcccaacgtctgcgaaagctcaaagatattcccgctgagctgtggcctcttggcatcgtcgtgggtttcgccgtcttcgccgccgggtactcgagcgctcgcaagttttttgtcgacaagaacctccgtctcagccgccagaaccgcaaggacgagccctccgaacaccactaa

SEQ ID NO: 15322 - protein, 86 aa, Muscodor strobelii
  misc_feature: SGI Peptide ID NO. 565072
  misc_feature (1)..(86): NCBI GI: 171689534 Blast Desc: protein product [Podospora anserina] gi|170944729|emb|CAP70840.1| protein product [Podospora anserina]
  misc_feature (1)..(86): NCBI GI: 39973487 Blast Desc: MGG_01110 [Magnaporthe grisea 70-15] gi|145017925|gb|EDK02204.1| MGG_01110 [Magnaporthe grisea 70-15]
  misc_feature (1)..(77): NCBI GI: 46123779 Blast Desc: FG06267.1 [Gibberella zeae PH-1]
  misc_feature (1)..(78): NCBI GI: 85110545 Blast Desc: NCU06740 [Neurospora crassa OR74A] gi|28881365|emb|CAD70407.1| [Neurospora crassa] gi|28925195|gb|EAA34276.1| [Neurospora crassa OR74A]
  misc_feature (1)..(86): NCBI GI: 212533921 Blast Desc: conserved [Penicillium marneffei ATCC 18224] gi|210072481|gb|EEA26570.1| conserved [Penicillium marneffei ATCC 18224]
  misc_feature (1)..(86): NCBI GI: 242779144 Blast Desc: conserved [Talaromyces stipitatus ATCC 10500] gi|218723002|gb|EED22420.1| conserved [Talaromyces stipitatus ATCC 10500]
  misc_feature (1)..(81): NCBI GI: 154291153 Blast Desc: BC1G_15348 [Botryotinia fuckeliana B05.10] gi|150847064|gb|EDN22257.1| BC1G_15348 [Botryotinia fuckeliana B05.10]
  misc_feature (1)..(80): NCBI GI: 154281703 Blast Desc: [Ajellomyces capsulatus NAm1] gi|150411843|gb|EDN07231.1| [Ajellomyces capsulatus NAm1] gi|240275809|gb|EER39322.1| HCDG_06427 [Ajellomyces capsulatus
  misc_feature (1)..(85): NCBI GI: 238496737 Blast Desc: conserved [Aspergillus flavus NRRL3357] gi|220694484|gb|EED50828.1| conserved [Aspergillus flavus NRRL3357]
  misc_feature (1)..(80): NCBI GI: 261195252 Blast Desc: BDBG_05538 [Ajellomyces dermatitidis SLH14081] gi|239587902|gb|EEQ70545.1| BDBG_05538 [Ajellomyces dermatitidis SLH14081] gi|239610608|gb|EEQ87595.1| BDCG_02715 [Ajellomyces
MYATRALRMMPTRRMMAPVPKEDQSAHTVSQRLRKLKDIPAELWPLGIVVGFAVFAAGYSSARKFFVDKNLRLSRQNRKDEPSEHH

SEQ ID NO: 15323 - DNA, 842 bp, Muscodor strobelii
  misc_feature: SGI EST ID NO. CUFF.36542.0
  misc_feature: Variant of the nucleotide sequence at SEQ ID NO 15321
gtcgtctctagacagctactcggcttcatactgcatccaaactacgcaaagccaccactctctcgcccttcggcctcgatcgatttcgcacagaacaatcccctctctttttcaattctctcaccatgtatgccacgcgagcactccgcatgatgcccacgaggcgcatgatggctcctgttcccaaagaggatcagagcgcgcacaccgtctcccaacgtctgcgaaagctcaaagatattcccgctgagctgtggcctcttggcatcgtcgtgggtttcgccgtcttcgccgccgggtactcgagcgctcgcaagttttttgtcgacaagaacctccgtctcagccgccagaaccgcaaggacgagccctccgaacaccactaaatcgcatgtatccatgtatcataaccaagcaacgaggcaaggcgaatcggggggacggcaccagagcatacttccctttgttcaagacaccacacaacattgtatatgataaagagccatagggtgtagcaggaggagctataaaatttgtgaaattgaacatggtatagaccatggtcgcgaagacttgtcattcatgtcctatcttcatgcctgcccaaatgaaacctggatgccatgtccaacgcctacgctatgctgaaataagaaatcatataccctcatctcgtgaaacaatagaagactttgatatcacgccagcttgggcccagccacatccagcccttcgagtccttgcattgggtcgtctggcctctcgtccgtcttgccatctgtaggggctgcaagccgatcctcttcactaaccgcattcttggccaaccaaccttcctgtac

SEQ ID NO: 15324 - DNA, 459 bp, Muscodor strobelii
  misc_feature: SGI cDNA ID NO. 565073
  misc_feature: Encodes the peptide sequence at SEQ ID NO 15325
atgacggacgcagctcgctggaaggcgaccgtctacgtcggcggtctggcctcgctagttaccaccaccaatctgcacgacgcattcataccctttggtgagattgccgatatatctttgcccaagaacgatgcgccaaacgccacagagcctcaccgaggcttcgcctacgttgagtatgaggatgctgaggacgccaaagaggccatcgacaatatggaccagtcagagttcttcggccgcattatgaaagtctcggcggctaaagctcctaagagcgctgacgaaggactgggaagcaagactgccgtctgggaacaggaaggttggttggccaagaatgcggttagtgaagaggatcggcttgcagcccctacagatggcaagacggacgagaggccagacgacccaatgcaaggactcgaagggctggatgtggctgggcccaagctggcgtga

SEQ ID NO: 15325 - protein, 152 aa, Muscodor strobelii
  misc_feature: SGI Peptide ID NO. 565073
  misc_feature (11)..(85): Pfam Id: PF00076 Pfam Desc: RNA recognition motif. (a.k.a. RRM, RBD, or RNP domain)
  misc_feature (1)..(150): NCBI GI: 261356649 Blast Desc: peptidyl-prolyl cis-trans isomerase E [Verticillium albo-atrum VaMs.102]
  misc_feature (1)..(150): NCBI GI: 85110543 Blast Desc: NCU06739 [Neurospora crassa OR74A] gi|28881366|emb|CAD70408.1| related to cyclophilin [Neurospora crassa] gi|28925194|gb|EAA34275.1| NCU06739 [Neurospora crassa
  misc_feature (1)..(152): NCBI GI: 154291155 Blast Desc: BC1G_15349 [Botryotinia fuckeliana B05.10] gi|150847065|gb|EDN22258.1| BC1G_15349 [Botryotinia fuckeliana B05.10]
  misc_feature (1)..(150): NCBI GI: 116199523 Blast Desc: CHGG_07917 [Chaetomium globosum CBS 148.51] gi|88179196|gb|EAQ86664.1| CHGG_07917 [Chaetomium globosum CBS 148.51]
  misc_feature (1)..(152): NCBI GI: 156044768 Blast Desc: SS1G_10488 [Sclerotinia sclerotiorum 1980] gi|154694876|gb|EDN94614.1| SS1G_10488 [Sclerotinia sclerotiorum 1980]
  misc_feature (1)..(150): NCBI GI: 39973489 Blast Desc: MGG_01109 [Magnaporthe grisea 70-15] gi|145017926|gb|EDK02205.1| MGG_01109 [Magnaporthe grisea 70-15]
  misc_feature (1)..(150): NCBI GI: 256732950 Blast Desc: NECHADRAFT_99935 [Nectria haematococca mpVI 77-13-4]
  misc_feature (1)..(150): NCBI GI: 46123777 Blast Desc: FG06266.1 [Gibberella zeae PH-1]
  misc_feature (1)..(150): NCBI GI: 261195254 Blast Desc: peptidyl prolyl cis-trans isomerase Cyclophilin [Ajellomyces dermatitidis SLH14081] gi|239587903|gb|EEQ70546.1| peptidyl prolyl cis-trans isomerase Cyclophilin [Ajellomyces
  misc_feature (1)..(152): NCBI GI: 238841865 Blast Desc: peptidyl-prolyl cis-trans isomerase E [Microsporum canis CBS 113480]
  misc_feature (5)..(113): SWISSPROT Homolog: EC 5.2.1.8 Peptidylprolyl isomerase
MTDAARWKATVYVGGLASLVTTTNLHDAFIPFGEIADISLPKNDAPNATEPHRGFAYVEYEDAEDAKEAIDNMDQSEFFGRIMKVSAAKAPKSADEGLGSKTAVWEQEGWLAKNAVSEEDRLAAPTDGKTDERPDDPMQGLEGLDVAGPKLA

SEQ ID NO: 15326 - DNA, 1150 bp, Muscodor strobelii
  misc_feature: SGI EST ID NO. CUFF.36543.2
  misc_feature: Variant of the nucleotide sequence at SEQ ID NO 15324
ccaccacgtgatatccctgcatgagtttcgcagctcatctcatccactactcgaattcagctcttgaagctccagagccggatatccagacagttaatcaaaagcaacaacccattctcaaggctacaacccagagaaatgacggacgcagctcgctggaaggcgaccgtctacgtcggcggtctggcctcgctagttaccaccaccaatctgcacgacgcattcataccctttggtgagattgccgatatatctttgcccaagaacgatgcgccaaacgccacagagcctcaccgaggcttcgcctacgttgagtatgaggatgctgaggacgccaaagaggccatcgacaatatggaccagtcagagttcttcggccgcattatgaaagtctcggcggctaaagctcctaagagcgctgacgaaggactgggaagcaagactgccgtctgggaacaggaaggttggttggccaagaatgcggttagtgaagaggatcggcttgcagcccctacagatggcaagacggacgagaggccagacgacccaatgcaaggactcgaagggctggatgtggctgggcccaagctggcgtgatatcaaagtcttctattgtttcacgagatgagggtatatgatttcttatttcagcatagcgtaggcgttggacatggcatccaggtttcatttgggcaggcatgaagataggacatgaatgacaagtcttcgcgaccatggtctataccatgttcaatttcacaaattttatagctcctcctgctacaccctatggctctttatcatatacaatgttgtgtggtgtcttgaacaaagggaagtatgctctggtgccgtccccccgattcgccttgcctcgttgcttggttatgatacatggatacatgcgatttagtggtgttcggagggctcgtccttgcggttctggcggctgagacggaggttcttgtcgacaaaaaacttgcgagcgctcgagtacccggcggcgaagacggcgaaacccacgacgatgcctatttatccgccccaattagcttccaaaagcaataatgtgtgtcgaatgttctgtattatggactcaccaagaggccacagctcagcgggaatatctttgagctttcgcagacgttgg

SEQ ID NO: 15327 - DNA, 3804 bp, Muscodor strobelii
  misc_feature: SGI cDNA ID NO. 565074
  misc_feature: Reduced expression when VOC is produced
  misc_feature: Encodes the peptide sequence at SEQ ID NO 15328
atggtcaggctgcgcgagatcgctcgcacggcggcctttgcctggtcgccgggctccgcgaagcccctacttgtcactggaacacgggccggtgctgtcgacgctgacttctccgacgagaccaagctcgagctctgggatcttgatctcgacaaccaggaacaggggctagagctccagccccttgccagcatttccgccgattctcggttctacgatattgcctggggccagccatcagaagaccatcccaagggcatcattgccggcgctctcgagaatggctcactagatctctgggatgccgaaaagctcatttcaggcgattccgatgctctcatttcccgaacgaccaaacacaccggagccatcaagtctctgcagttcaatcccatccggcctcagatcctcgcaactgccggagccaagggcgagctgttcatctacgatgtcaacgatcccgatggtgcttttcgcctaggcaccgccgccgctcgatcagacgacttggaatgcgtagcttggaacatcaaggtctcccacattcttgccactggtggcagcggtggcttcgtcactgtttgggatctgaagaccaagaaggcctcattgactctcaacaacaaccgcaaggccgtcagctctattgcctgggatccgaacaactccaccaagctactcacagctacccctgacgacacaacccccgtcatcctactatgggatcttcgaaactccaacgcccccgagcgtacgctccagggccacgaacaaggtgttctctctgtgtcttggtgccaacaagacgatggactcctcatttcctgtggcaaggataatagaaccttgatctggaacccacagactggcgaacgttttggagagttccccgaagtgaccaactggaccttctcaacgcgattccatcccagcaacccgaatctctcggctactgcttcttttgatggaaagattaccgtccaaactctgcagaacacaaacccttctgctgtgcaggctactacccagagcaatctcgacggagaagacttctttacccaagcccagactcaaccccagggcgccgcattctccttgatcaaagctcccaggtggtttgagagacctacgggtgtctccttcggattcggcggcaaactcataatatttaatcaatcatcctctcagcctggccagaagcgagcttccaagatacaaatttcgcagtttactgtcgactccgacataggcgctgcaacggagaagtttgaggatgccctcaactctggggatatcagggctatctgcgaatcgcacaaggaggaagctaaaacagacgaagagaaagccgattggcgcgttatggagacgcttctgtccgagaatccgcgcaagcagattgttgaatatctcgggctcaacgaggaagaggctgtcaatggcgctatcgccgaaaagactgaaccggaagagaaaccgaagactctcgcacccgaggttaaaggccacaagaagcgcatctcaaccttgttcactgacggaccagatggcgatgatgaagatttcttagcaagtctatcagctaccaagggcgccaagacagacaatcctttccagctgttaggcgaaagcgactcacccgttgagaagcagatcaccaaggcattgatggtcggcaactttgaaaaggccactgaaatttgtctagaagaaggccgtatggcggacgctttcatcatcgctaactgcggcggtaaggatttagttgaccgggtgcaatctgcctatctttctcaaaaaacgggcatgccaagctacctgcgcctcctggggtcggtcatagtcaaaaatctctgggatgtggtgtacaatgccgatttggcagactggaaagagactatggtgaccctctgcacattcgctgatccaaccgagtttcccgatctttgtgaagctttgggcgatcgtatctacgagtctggctctcgaaaagacgcctctttctgttactcagttggctcaaagctggaaaaggtcgtggatatctggatcgccgacttggcagagactgaaaaggctggcctatccgaggagggcgactcgactttctccgtccacgctcgatccttacaacagttcatcgaaaaggttactgtattccgccacgtcacgaagttccaagataatgagaccagtcttgcctccggctggaaactcgcctcgctttacgacaaatatgtagagtattcagacattgtggcagctcatggacaactggacatcgcccagaagtatcttgatcttctgccaagcaaatatccggctgctgacatatcacgggaacgagttcagcttgccaccaagaaagcatcggctcgtcctgctccacgacagcctgctcagcagtctgctctaccaggacgtgttgcatctcgagcgcaacagccagccatgggaggctaccagcagcctcaagcagctcctgtgaacccaaacaatccgtatggccctatggctggtcaaccacctgttgctaacaatccatatgcgccgcccactacttcgactccagtgcagaatgtgtatgctccgccaaccgcgggcaacccatatgcccctcaaggcttccagcaagctcagtctcaacctgcccaaatgactgctccacctgtgccgggatatggcgctcccccaacgtcgaactttggccctccacgctcctccactccatcctccagaccccctccaccaaggaatgcggacgtcggtaattggaacgatgtgcctgtagtggctagggctcctccaaggcggaacactccaagtgcggctccaatcacagcgcccttcggaaatccaggcagtcctcaagctccccctccgccacagagcccctatggtcaacgaaccacatcgacaccacctccacctcccaaaggtccaccaccagcccgtgttatgtctccgctaggtggccctccacaagcaggtcagttgccaacgggtcctcgccccggctcgtctgcttcgaacgcatatgcaccgtcagctgccatgcaaactcctcacggcggtgctagtttgccgcctcctccagcagcaggcaattttgtccccagaacagcgtctccttatcaaccacctccctcagccggacctccgacaaatagatacgcaccagctccggcgcctcagcagtctggccaggcacctccacagcccggtattgcacctccacctggtgtcaatcgtggtccacctccaccaaatccgtatgccccgccaccgcaatcaactccctcacagagtcagttcgcgccgtcaccttatggggcaccaccatctcatcaaggtcctccgccttccagcagcggaggcccacctccggccgcaggtgcatctgctcctccacctgcccctccacaagctcaacctgcgccgccgccaaaggccaagcaccctccgggcgatcgctctcatatacctccgcaggctcagcagctcgttgacattttgagccgggacatgcagcgagttacggcacaagcaccagaatcattcgcgccaaatgtccgagatataaaaaagcggattagtttactgttcgaccatctcaacaacgaggagcttatcagaccagatactgtagaacagcttacgcaattagcacaagcactggaagccaaaaactaccctgaagcacaaagactgcaggtcgaaatacaaacatccaaaaccgatgaatgcggcaactggatggtgggtgttaaacgtttggtgcagctgagcaaagcctcgaactaa

SEQ ID NO: 15328 - protein, 1267 aa, Muscodor strobelii
  misc_feature: SGI Peptide ID NO. 565074
  misc_feature (247)..(286): Pfam Id: PF00400 Pfam Desc: WD domain, G-beta repeat
  misc_feature (1)..(1266): NCBI GI: 39973491 Blast Desc: MGG_01108 [Magnaporthe grisea 70-15] gi|158514090|sp|A4RD35.1|SEC31_MAGGR RecName: Full=Protein transport protein SEC31 gi|145017927|gb|EDK02206.1| MGG_01108
  misc_feature (1)..(1266): NCBI GI: 46123775 Blast Desc: FG06265.1 [Gibberella zeae PH-1]
  misc_feature (1)..(1266): NCBI GI: 156044766 Blast Desc: SS1G_10487 [Sclerotinia sclerotiorum 1980] gi|154694875|gb|EDN94613.1| SS1G_10487 [Sclerotinia sclerotiorum 1980]
  misc_feature (1)..(1266): NCBI GI: 154291157 Blast Desc: BC1G_15350 [Botryotinia fuckeliana B05.10] gi|150847066|gb|EDN22259.1| BC1G_15350 [Botryotinia fuckeliana B05.10]
  misc_feature (1)..(1266): NCBI GI: 256732492 Blast Desc: NECHADRAFT_68119 [Nectria haematococca mpVI 77-13-4]
  misc_feature (1)..(1266): NCBI GI: 85110541 Blast Desc: NCU06738 [Neurospora crassa OR74A] gi|74697039|sp|Q873A1.1|SEC31_NEUCR RecName: Full=Protein transport protein sec-31 gi|28881367|emb|CAD70409.1| related to
  misc_feature (1)..(1266): NCBI GI: 171689538 Blast Desc: protein product [Podospora anserina] gi|170944731|emb|CAP70842.1| protein product [Podospora anserina]
  misc_feature (1)..(1069): NCBI GI: 116199521 Blast Desc: CHGG_07916 [Chaetomium globosum CBS 148.51] gi|121927570|sp|Q2GVT8.1|SEC31_CHAGB RecName: Full=Protein transport protein SEC31 gi|88179195|gb|EAQ86663.1| CHGG_07916 CBS
  misc_feature (1)..(771): NCBI GI: 261356650 Blast Desc: transport protein SEC31 [Verticillium albo-atrum VaMs.102]
  misc_feature (1)..(1266): NCBI GI: 119190145 Blast Desc: CIMG_05120 [Coccidioides immitis RS] gi|121931853|sp|Q1DX43.1|SEC31_COCIM RecName: Full=Protein transport protein SEC31
  misc_feature: Useful for introducing or modulating the production of volatile compounds
MVRLREIARTAAFAWSPGSAKPLLVTGTRAGAVDADFSDETKLELWDLDLDNQEQGLELQPLASISADSRFYDIAWGQPSEDHPKGIIAGALENGSLDLWDAEKLISGDSDALISRTTKHTGAIKSLQFNPIRPQILATAGAKGELFIYDVNDPDGAFRLGTAAARSDDLECVAWNIKVSHILATGGSGGFVTVWDLKTKKASLTLNNNRKAVSSIAWDPNNSTKLLTATPDDTTPVILLWDLRNSNAPERTLQGHEQGVLSVSWCQQDDGLLISCGKDNRTLIWNPQTGERFGEFPEVTNWTFSTRFHPSNPNLSATASFDGKITVQTLQNTNPSAVQATTQSNLDGEDFFTQAQTQPQGAAFSLIKAPRWFERPTGVSFGFGGKLIIFNQSSSQPGQKRASKIQISQFTVDSDIGAATEKFEDALNSGDIRAICESHKEEAKTDEEKADWRVMETLLSENPRKQIVEYLGLNEEEAVNGAIAEKTEPEEKPKTLAPEVKGHKKRISTLFTDGPDGDDEDFLASLSATKGAKTDNPFQLLGESDSPVEKQITKALMVGNFEKATEICLEEGRMADAFIIANCGGKDLVDRVQSAYLSQKTGMPSYLRLLGSVIVKNLWDVVYNADLADWKETMVTLCTFADPTEFPDLCEALGDRIYESGSRKDASFCYSVGSKLEKVVDIWIADLAETEKAGLSEEGDSTFSVHARSLQQFIEKVTVFRHVTKFQDNETSLASGWKLASLYDKYVEYSDIVAAHGQLDIAQKYLDLLPSKYPAADISRERVQLATKKASARPAPRQPAQQSALPGRVASRAQQPAMGGYQQPQAAPVNPNNPYGPMAGQPPVANNPYAPPTTSTPVQNVYAPPTAGNPYAPQGFQQAQSQPAQMTAPPVPGYGAPPTSNFGPPRSSTPSSRPPPPRNADVGNWNDVPVVARAPPRRNTPSAAPITAPFGNPGSPQAPPPPQSPYGQRTTSTPPPPPKGPPPARVMSPLGGPPQAGQLPTGPRPGSSASNAYAPSAAMQTPHGGASLPPPPAAGNFVPRTASPYQPPPSAGPPTNRYAPAPAPQQSGQAPPQPGIAPPPGVNRGPPPPNPYAPPPQSTPSQSQFAPSPYGAPPSHQGPPPSSSGGPPPAAGASAPPPAPPQAQPAPPPKAKHPPGDRSHIPPQAQQLVDILSRDMQRVTAQAPESFAPNVRDIKKRISLLFDHLNNEELIRPDTVEQLTQLAQALEAKNYPEAQRLQVEIQTSKTDECGNWMVGVKRLVQLSKASN

SEQ ID NO: 15329 - DNA, 5237 bp, Muscodor strobelii
  misc_feature: SGI EST ID NO. CUFF.36398.0
  misc_feature: Variant of the nucleotide sequence at SEQ ID NO 15327
caggctcagtatgaggacatcgatcccccacacttggctaaaagacgtgtggcttggtctaaaatacaccaggctagcagactggcgttgagggagagaggttacagaatggatcctgacctacgtactgtgttatctggcaacaacctgaactccctctcaatggcatgagtcgtcgaccctgtttctttcccatttgaccccatctcgacgttttgattgcagccttgccaattggtttatctgtcccgtagcgtgagctggtgtaataacgtgtttcgatgccagctggtgctgcggcaacatttccttgagacccctccaacccaccccatcatctcgctcctttcctcttcccccttgagcctctcctcatcacagcaacatggtcaggctgcgcgagatcgctcgcacggcggcctttgcctggtcgccgggctccgcgaagcccctacttgtcactggaacacgggccggtgctgtcgacgctgacttctccgacgagaccaagctcgagctctgggatcttgatctcgacaaccaggaacaggggctagagctccagccccttgccagcatttccgccgattctcggttctacgatattgcctggggccagccatcagaagaccatcccaagggcatcattgccggcgctctcgagaatggctcactagatctctgggatgccgaaaagctcatttcaggcgattccgatgctctcatttcccgaacgaccaaacacaccggagccatcaagtctctgcagttcaatcccatccggcctcagatcctcgcaactgccggagccaagggcgagctgttcatctacgatgtcaacgatcccgatggtgcttttcgcctaggcaccgccgccgctcgatcagacgacttggaatgcgtagcttggaacatcaaggtctcccacattcttgccactggtggcagcggtggcttcgtcactgtttgggatctgaagaccaagaaggcctcattgactctcaacaacaaccgcaaggccgtcagctctattgcctgggatccgaacaactccaccaagctactcacagctacccctgacgacacaacccccgtcatcctactatgggatcttcgaaactccaacgcccccgagcgtacgctccagggccacgaacaaggtgttctctctgtgtcttggtgccaacaagacgatggactcctcatttcctgtggcaaggataatagaaccttgatctggaacccacagactggcgaacgttttggagagttccccgaagtgaccaactggaccttctcaacgcgattccatcccagcaacccgaatctctcggctactgcttcttttgatggaaagattaccgtccaaactctgcagaacacaaacccttctgctgtgcaggctactacccagagcaatctcgacggagaagacttctttacccaagcccagactcaaccccagggcgccgcattctccttgatcaaagctcccaggtggtttgagagacctacgggtgtctccttcggattcggcggcaaactcataatatttaatcaatcatcctctcagcctggccagaagcgagcttccaagatacaaatttcgcagtttactgtcgactccgacataggcgctgcaacggagaagtttgaggatgccctcaactctggggatatcagggctatctgcgaatcgcacaaggaggaagctaaaacagacgaagagaaagccgattggcgcgttatggagacgcttctgtccgagaatccgcgcaagcagattgttgaatatctcgggctcaacgaggaagaggctgtcaatggcgctatcgccgaaaagactgaaccggaagagaaaccgaagactctcgcacccgaggttaaaggccacaagaagcgcatctcaaccttgttcactgacggaccagatggcgatgatgaagatttcttagcaagtctatcagctaccaagggcgccaagacagacaatcctttccagctgttaggcgaaagcgactcacccgttgagaagcagatcaccaaggcattgatggtcggcaactttgaaaaggccactgaaatttgtctagaagaaggccgtatggcggacgctttcatcatcgctaactgcggcggtaaggatttagttgaccgggtgcaatctgcctatctttctcaaaaaacgggcatgccaagctacctgcgcctcctggggtcggtcatagtcaaaaatctctgggatgtggtgtacaatgccgatttggcagactggaaagagactatggtgaccctctgcacattcgctgatccaaccgagtttcccgatctttgtgaagctttgggcgatcgtatctacgagtctggctctcgaaaagacgcctctttctgttactcagttggctcaaagctggaaaaggtcgtggatatctggatcgccgacttggcagagactgaaaaggctggcctatccgaggagggcgactcgactttctccgtccacgctcgatccttacaacagttcatcgaaaaggttactgtattccgccacgtcacgaagttccaagataatgagaccagtcttgcctccggctggaaactcgcctcgctttacgacaaatatgtagagtattcagacattgtggcagctcatggacaactggacatcgcccagaagtatcttgatcttctgccaagcaaatatccggctgctgacatatcacgggaacgagttcagcttgccaccaagaaagcatcggctcgtcctgctccacgacagcctgctcagcagtctgctctaccaggacgtgttgcatctcgagcgcaacagccagccatgggaggctaccagcagcctcaagcagctcctgtgaacccaaacaatccgtatggccctatggctggtcaaccacctgttgctaacaatccatatgcgccgcccactacttcgactccagtgcagaatgtgtatgctccgccaaccgcgggcaacccatatgcccctcaaggcttccagcaagctcagtctcaacctgcccaaatgactgctccacctgtgccgggatatggcgctcccccaacgtcgaactttggccctccacgctcctccactccatcctccagaccccctccaccaaggaatgcggacgtcggtaattggaacgatgtgcctgtagtggctagggctcctccaaggcggaacactccaagtgcggctccaatcacagcgcccttcggaaatccaggcagtcctcaagctccccctccgccacagagcccctatggtcaacgaaccacatcgacaccacctccacctcccaaaggtccaccaccagcccgtgttatgtctccgctaggtggccctccacaagcaggtcagttgccaacgggtcctcgccccggctcgtctgcttcgaacgcatatgcaccgtcagctgccatgcaaactcctcacggcggtgctagtttgccgcctcctccagcagcaggcaattttgtccccagaacagcgtctccttatcaaccacctccctcagccggacctccgacaaatagatacgcaccagctccggcgcctcagcagtctggccaggcacctccacagcccggtattgcacctccacctggtgtcaatcgtggtccacctccaccaaatccgtatgccccgccaccgcaatcaactccctcacagagtcagttcgcgccgtcaccttatggggcaccaccatctcatcaaggtcctccgccttccagcagcggaggcccacctccggccgcaggtgcatctgctcctccacctgcccctccacaagctcaacctgcgccgccgccaaaggccaagcaccctccgggcgatcgctctcatatacctccgcaggctcagcagctcgttgacattttgagccgggacatgcagcgagttacggcacaagcaccagaatcattcgcgccaaatgtccgagatataaaaaagcggattagtttactgttcgaccatctcaacaacgaggagcttatcagaccagatactgtagaacagcttacgcaattagcacaagcactggaagccaaaaactaccctgaagcacaaagactgcaggtcgaaatacaaacatccaaaaccgatgaatgcggcaactggatggtgggtgttaaacgtttggtgcagctgagcaaagcctcgaactaagcatcgctgggcccaactatttcacagaagaccatgagtagctcttagaagtgatagagaaaataaaacaacgcatttacagatgcccggaatctcttatcccggctatcaactggcttatggatagcgcaaagtaaaagcacagaaagcttttcaggttgctctgcggaactttgccaaactgaattctctcagctctgactatagctgagccctctgacgcgctcgatacctaacctaaccaaaaaatgaggagcggttgaagattgaatgcataggagtgtcgcaccaggaaccgggttttcaaaatcagcattgtaaagcaatttgttgttacgtgatgttacgtgaggcgccgattgtcaccatcgttctcattaaactgattcagcttatgacatcgcagatgatgctggctagcagagccgctttattcccattccgcgatgtaagattcgacgtaagctaaacaggcaacagtatttttttcattgtcaccgcgtagcttttcccattgaaaaacagcccaaaatttgggtatatcctgcaattagacgggaattgcggagtttggggataagaccgcggctcccccgaatactcgaccgtagtcgttctccggacggacgaatcgttgcagagagctacggatttctaccagttcacgatgcttccttgcagagtagcattgacgcgtggagttgttggctgataactatcataggtcaatgtcaagctattcatggcggagggcgtggtggctggcatgagagatggaatcaaccttgagattatgacagtcatgtcttgctttgtgctgctaggggaatacgaaaatggttgactgtgagaagaagtcgggagcggattgagtataaagaggctttctcttcctctccgagtgagctagttgaagactgaatcaagacatctcacgatagacaagtatcaggcaatttcacacacagttaagcacctcttacagctttcaagctaaatttactattccatcctctcgcaatggagcatccagccacgaacaatctcc

SEQ ID NO: 15330 - DNA, 903 bp, Muscodor strobelii
  misc_feature: SGI cDNA ID NO. 565075
  misc_feature: Reduced expression when VOC is produced
  misc_feature: Encodes the peptide sequence at SEQ ID NO 15331
atggagcatccagccacgaacaatctccctacagacgcagtctggttcatcaccggctgctcatcaggcatcggcgcagcactagtcaagcgtctcgcccaacagacgaagtgtcgtgtcgtagcgacagcacgaaaggtcgaagcactatcttacatcccagacgatgctaagaacgtcctgaaactcgctctcgacgtcacttctacaaaggccatcgacgccgcgtttgcccaggcggtcaagcattttggtcgtgttgatgtggttgttaacaatgctggttatacggtcatgggtgataccgaggcttcgactgaacgagaggcgagggagctgtttgatacgaacttctggggcgcagtagaagtaacaaaacgcgcgctccccatcctacgcgatgaaaaccccaagacaggtctccaaggcggcatgatcatattcatgagttccatcgggggctacgtcacctttcctggtaactcattctaccacgcctccaaattcgcgatggaaggtttcgcggagtctgtctccaaggaattagacccgagttggggtatacagttctctatcattgagcccggtggtacggacacggagttcatgggcacgagcttcaagacttgtgccacgcgccatcctgcgtatgaggggaaaaatatgccgactagtatgctgtatgggatgatgacgaatcaggatattaggaagggtcttacgaggcctgatgatgttgcgagggcggttgttgatttggctgggagggagaaggtgcctgttagatttccggtggggaaggtggcttgggatattgttgttaaggagacggatgatgttaagagggagttggagggtcttgaggaggcttgtaagggttatggggttggattcgttgggtag

SEQ ID NO: 15331 - protein, 300 aa, Muscodor strobelii
  misc_feature: SGI Peptide ID NO. 565075
  misc_feature (13)..(183): Pfam Id: PF00106 Pfam Desc: short chain dehydrogenase
  misc_feature (15)..(266): Pfam Id: PF01370 Pfam Desc: NAD dependent epimerase/dehydratase family
  misc_feature (13)..(196): Pfam Id: PF08659 Pfam Desc: KR domain
  misc_feature (8)..(289): NCBI GI: 39944586 Blast Desc: MGG_04304 [Magnaporthe grisea 70-15] gi|145015044|gb|EDJ99612.1| MGG_04304 [Magnaporthe grisea 70-15]
  misc_feature (11)..(289): NCBI GI: 115402205 Blast Desc: [Aspergillus terreus NIH2624] gi|114189025|gb|EAU30725.1| [Aspergillus terreus NIH2624]
  misc_feature (9)..(289): NCBI GI: 156051630 Blast Desc: SS1G_07222 [Sclerotinia sclerotiorum 1980] gi|154705000|gb|EDO04739.1| SS1G_07222 [Sclerotinia sclerotiorum 1980]
  misc_feature (16)..(289): NCBI GI: 154312790 Blast Desc: BC1G_05096 [Botryotinia fuckeliana B05.10] gi|150849798|gb|EDN24991.1| BC1G_05096 [Botryotinia fuckeliana B05.10]
  misc_feature (9)..(289): NCBI GI: 116182590 Blast Desc: CHGG_01923 [Chaetomium globosum CBS 148.51] gi|88186220|gb|EAQ93688.1| CHGG_01923 [Chaetomium globosum CBS 148.51]
  misc_feature (4)..(252): NCBI GI: 242767199 Blast Desc: 3-oxoacyl-[acyl-carrier-protein] reductase, [Talaromyces stipitatus ATCC 10500] gi|218724519|gb|EED23936.1| 3-oxoacyl-[acyl-carrier-protein] reductase, [Talaromyces ATCC
  misc_feature (8)..(287): NCBI GI: 212528146 Blast Desc: 3-oxoacyl-[acyl-carrier-protein] reductase, [Penicillium marneffei ATCC 18224] gi|210073628|gb|EEA27715.1| 3-oxoacyl-[acyl-carrier-protein] reductase, [Penicillium ATCC
  misc_feature (8)..(289): NCBI GI: 39968489 Blast Desc: MGG_02337 [Magnaporthe grisea 70-15] gi|145014085|gb|EDJ98726.1| MGG_02337 [Magnaporthe grisea 70-15]
  misc_feature (8)..(273): NCBI GI: 156046230 Blast Desc: SS1G_09374 [Sclerotinia sclerotiorum 1980] gi|154693769|gb|EDN93507.1| SS1G_09374 [Sclerotinia sclerotiorum 1980]
  misc_feature (9)..(181): NCBI GI: 116191145 Blast Desc: CHGG_05290 [Chaetomium globosum CBS 148.51] gi|88181203|gb|EAQ88671.1| CHGG_05290 [Chaetomium globosum CBS 148.51]
  misc_feature (14)..(203): SWISSPROT Homolog: EC 1.1.1.62 Estradiol 17-beta-dehydrogenase
  misc_feature: Useful for introducing or modulating the production of volatile compounds
MEHPATNNLPTDAVWFITGCSSGIGAALVKRLAQQTKCRVVATARKVEALSYIPDDAKNVLKLALDVTSTKAIDAAFAQAVKHFGRVDVVVNNAGYTVMGDTEASTEREARELFDTNFWGAVEVTKRALPILRDENPKTGLQGGMIIFMSSIGGYVTFPGNSFYHASKFAMEGFAESVSKELDPSWGIQFSIIEPGGTDTEFMGTSFKTCATRHPAYEGKNMPTSMLYGMMTNQDIRKGLTRPDDVARAVVDLAGREKVPVRFPVGKVAWDIVVKETDDVKRELEGLEEACKGYGVGFVG

SEQ ID NO: 15332 - DNA, 1007 bp, Muscodor strobelii
  misc_feature: SGI EST ID NO. CUFF.36401.0
  misc_feature: Variant of the nucleotide sequence at SEQ ID NO 15330
cggcgcagcactagtcaagcgtctcgcccaacagacgaagtgtcgtgtcgtagcgacagcacgaaaggtcgaagcactatcttacatcccagacgatgctaagaacgtcctgaaactcgctctcgacgtcacttctacaaaggccatcgacgccgcgtttgcccaggcggtcaagcattttggtcgtgttgatgtggttgttaacaatgctggttatacggtcatgggtgataccgaggcttcgactgaacgagaggcgagggagctgtttgatacgaacttctggggcgcagtagaagtaacaaaacgcgcgctccccatcctacgcgatgaaaaccccaagacaggtctccaaggcggcatgatcatattcatgagttccatcgggggctacgtcacctttcctggtaactcattctaccacgcctccaaattcgcgatggaaggtttcgcggagtctgtctccaaggaattagacccgagttggggtatacagttctctatcattgagcccggtggtacggacacggagttcatgggcacgagcttcaagacttgtgccacgcgccatcctgcgtatgaggggaaaaatatgccgactagtatgctgtatgggatgatgacgaatcaggatattaggaagggtcttacgaggcctgatgatgttgcgagggcggttgttgatttggctgggagggagaaggtgcctgttagatttccggtggggaaggtggcttgggatattgttgttaaggagacggatgatgttaagagggagttggagggtcttgaggaggcttgtaagggttatggggttggattcgttgggtaggtggcggaatagctttggggtggttgtttttgggtttctgtagttgtagttatggttgatacatctctgctctttgttggcaacgtattgatgtattgagattcttcgtccgcttcgactgtattgttgttattacttgaataattcaggtcttaagggctaggatagaatctac

SEQ ID NO: 15333 - DNA, 1350 bp, Muscodor strobelii
  misc_feature: SGI cDNA ID NO. 565076
  misc_feature: Encodes the peptide sequence at SEQ ID NO 15334
atgagtcctttcaagttcttttcgcgtggcatccgctcgttgcggaaactacttcgaattcgagcatctccagtaccaaattccacggcaaaggacttcctcttacgtgtggttggatctcatgatttgtaccccgttcatcgcacattgctttcaatgctcggtacccgggatatcctgaatctctgcgcaacatccaaacagttccggaatgagatccgcgccactttgtgggatatcaacatgaaactcaagagattcttcgacaacccgattgaattccgcacgcagcttggcaaatccaacgccttgattacaggagattttccgctccaatttctggaagcagtaacttggaaagaatcagacttgaacattatggtgcatgaaggaaaagatagcgatgagatggagaactatctgttcaaagagggataccagaagaccgacactcagaactacgaagacagaggttatcctagcactttcgacggtggagagtgcaaaacatacctgaagatgaagaagtccgccaaggaggacaagaaaggagagaccactgtcgaagcgagcgataccagagctggccgaaaggttcaaatcatatctacaaaatgcatccctgtccttacaatcctccgatgcgtctacacaacatgcgtggtaaattttatcacgtggaacaaggtgtattcgatttttcccagggtaacattcttggagcatgaaacaatacccctaaagccccttaccacccatctcggaccatgccatagcaaatatagcctgcgcggctggcccaggttcactcctccccttacgcccaagagatggaaggacctgatcggccaatgcgtcgatcaagattgggctgatctagactggtacctcatttggcgacgtatgggcgatcgagatacctggaccttcaaactcgacaccgattatatcacgccacctcaagttccggaccccgtaattgaaagttgcactttctggatcgataaagaggggccgcggaatctaggcacgacatggacggtggatatgtacccacatccggcgatagacatcgacgcctttcactcgcccgtacttcgctatggatacacatatggaccgagtgtaaccctggatcggatagtccagcgagcattcgagatgcagctctgcaaagtaaaagaagccgaccaacatcaggtatacgatccggctgttggtcgtattagatatgatgctagatatgatgtccctggatgggactacatggatggggagcttccacgtcttctacgtttcctcgaggagaatcgcagtaacctcgacgcgtttactgaaatgggatattaa

SEQ ID NO: 15334 - protein, 449 aa, Muscodor strobelii
  misc_feature: SGI Peptide ID NO. 565076
  misc_feature (44)..(428): NCBI GI: 256721412 Blast Desc: NECHADRAFT_88423 [Nectria haematococca mpVI 77-13-4]
  misc_feature (44)..(330): NCBI GI: 154301077 Blast Desc: [Botryotinia fuckeliana B05.10] gi|150856259|gb|EDN31451.1| [Botryotinia fuckeliana B05.10]
  misc_feature (78)..(326): NCBI GI: 170085847 Blast Desc: [Laccaria bicolor S238N-H82] gi|164651699|gb|EDR15939.1| [Laccaria bicolor S238N-H82]
  misc_feature (78)..(314): NCBI GI: 242209890 Blast Desc: [Postia placenta Mad-698-R] gi|220730133|gb|EED83995.1| [Postia placenta Mad-698-R]
  misc_feature (45)..(266): NCBI GI: 169845441 Blast Desc: [Coprinopsis cinerea okayama7#130] gi|116509505|gb|EAU92400.1| [Coprinopsis cinerea okayama7#130]
  misc_feature (82)..(266): NCBI GI: 119194221 Blast Desc: [Coccidioides immitis RS]
  misc_feature (45)..(266): NCBI GI: 169845439 Blast Desc: [Coprinopsis cinerea okayama7#130] gi|116509504|gb|EAU92399.1| [Coprinopsis cinerea okayama7#130]
  misc_feature (78)..(273): NCBI GI: 242216721 Blast Desc: [Postia placenta Mad-698-R] gi|220726711|gb|EED80652.1| [Postia placenta Mad-698-R]
  misc_feature (78)..(146): NCBI GI: 242216675 Blast Desc: [Postia placenta Mad-698-R] gi|220726688|gb|EED80629.1| [Postia placenta Mad-698-R]
  misc_feature (49)..(324): NCBI GI: 238582946 Blast Desc: MPER_10695 [Moniliophthora perniciosa FA553] gi|215453090|gb|EEB91019.1| MPER_10695 [Moniliophthora perniciosa FA553]
MSPFKFFSRGIRSLRKLLRIRASPVPNSTAKDFLLRVVGSHDLYPVHRTLLSMLGTRDILNLCATSKQFRNEIRATLWDINMKLKRFFDNPIEFRTQLGKSNALITGDFPLQFLEAVTWKESDLNIMVHEGKDSDEMENYLFKEGYQKTDTQNYEDRGYPSTFDGGECKTYLKMKKSAKEDKKGETTVEASDTRAGRKVQIISTKCIPVLTILRCVYTTCVVNFITWNKVYSIFPRVTFLEHETIPLKPLTTHLGPCHSKYSLRGWPRFTPPLTPKRWKDLIGQCVDQDWADLDWYLIWRRMGDRDTWTFKLDTDYITPPQVPDPVIESCTFWIDKEGPRNLGTTWTVDMYPHPAIDIDAFHSPVLRYGYTYGPSVTLDRIVQRAFEMQLCKVKEADQHQVYDPAVGRIRYDARYDVPGWDYMDGELPRLLRFLEENRSNLDAFTEMGY

SEQ ID NO: 15335 - DNA, 858 bp, Muscodor strobelii
  misc_feature: SGI cDNA ID NO. 565077
  misc_feature: Encodes the peptide sequence at SEQ ID NO 15336
atggcttcgaagcatctcaacatcttcgtcacgaccttcccgggattgggtctcccctcgaccctttcctttgccatcccatccactacgactaccggcgacttgcacgactgcatcatagaacgacttcctctgcgcgatgccagattcgtcctcaccaccatatcaaacaagcagctgctggccggatcggatagcattatatctgatctttgcgatgtcgatgataacttcatctcactacgactctcgctccccctctgcggtggcaagggtggtttcggctcccagctccgtgccgccggtggccgcatgtcctcaaagaagaagaagaaccaaggcgacgagaatggctccagcaggaatttggatggccgacgactcaggacagtcaatgaggccaaggcgttggctgaatatctagctatcaaaccagaaatggagcagaaagaaaaggagaagcgacgcgagcgatggcagcagatcgttgacgcagcagaagagagagaacacgaactcaagaacaactcccgcggtcgtctaagtggcaagtgggtcgaggacaaggaggagacgagcgagaggactcgcgacgccgttctcgctgccatcaaggccggcaactacaaagacaacctactcggcacatcacacggctcggcttcgaccgatgcccctgacgagggatcgtcgggcagtagtggggacgaagacaacgctaaggactcgaacaattccaagtcgccatcaccgccaacgactaaggccgtgcaaaagccaccaactagagctttcgcgggattcgacgaagatgatgagtttatgagttcttccgacgatgaagacaatgacaagtga

SEQ ID NO: 15336 - protein, 285 aa, Muscodor strobelii
  misc_feature: SGI Peptide ID NO. 565077
  misc_feature (1)..(285): NCBI GI: 46123783 Blast Desc: FG06269.1 [Gibberella zeae PH-1]
  misc_feature (1)..(285): NCBI GI: 261356646 Blast Desc: conserved [Verticillium albo-atrum VaMs.102]
  misc_feature (1)..(281): NCBI GI: 256732491 Blast Desc: [Nectria haematococca mpVI 77-13-4]
  misc_feature (6)..(268): NCBI GI: 154291147 Blast Desc: BC1G_15345 [Botryotinia fuckeliana B05.10] gi|150847061|gb|EDN22254.1| BC1G_15345 [Botryotinia fuckeliana B05.10]
  misc_feature (1)..(281): NCBI GI: 255947050 Blast Desc: Pc22g02480 [Penicillium chrysogenum Wisconsin 54-1255] gi|211591309|emb|CAP97536.1| Pc22g02480 [Penicillium chrysogenum Wisconsin 54-1255]
  misc_feature (1)..(278): NCBI GI: 145236719 Blast Desc: An06g01860 [Aspergillus niger] gi|134075468|emb|CAK48029.1| protein product [Aspergillus niger]
  misc_feature (1)..(285): NCBI GI: 169770197 Blast Desc: [Aspergillus oryzae RIB40] gi|83767427|dbj|BAE57566.1| protein product [Aspergillus oryzae]
  misc_feature (1)..(278): NCBI GI: 238487414 Blast Desc: conserved [Aspergillus flavus NRRL3357] gi|220699824|gb|EED56163.1| conserved [Aspergillus flavus NRRL3357]
  misc_feature (6)..(283): NCBI GI: 39973483 Blast Desc: MGG_01112 [Magnaporthe grisea 70-15] gi|145017923|gb|EDK02202.1| MGG_01112 [Magnaporthe grisea 70-15]
  misc_feature (1)..(282): NCBI GI: 70992589 Blast Desc: conserved [Aspergillus fumigatus Af293] gi|66848776|gb|EAL89105.1| conserved [Aspergillus fumigatus Af293] gi|159124714|gb|EDP49832.1| conserved [Aspergillus A1163]
MASKHLNIFVTTFPGLGLPSTLSFAIPSTTTTGDLHDCIIERLPLRDARFVLTTISNKQLLAGSDSIISDLCDVDDNFISLRLSLPLCGGKGGFGSQLRAAGGRMSSKKKKNQGDENGSSRNLDGRRLRTVNEAKALAEYLAIKPEMEQKEKEKRRERWQQIVDAAEEREHELKNNSRGRLSGKWVEDKEETSERTRDAVLAAIKAGNYKDNLLGTSHGSASTDAPDEGSSGSSGDEDNAKDSNNSKSPSPPTTKAVQKPPTRAFAGFDEDDEFMSSSDDEDNDK

SEQ ID NO: 15337 - DNA, 1705 bp, Muscodor strobelii
  misc_feature: SGI EST ID NO. CUFF.36461.1
  misc_feature: Variant of the nucleotide sequence at SEQ ID NO 15335
ccgccatccaacggcatgcatccacttgacggacttcaatgacccaccctccgtcatttgcctgcctgcatgcatcacatcgcagatacggaatacaacttcatcaatctccatctcagagtcgacgcactcccagttcctctataccccgttcgatccgcatttccattcaacactatcgcgcgacgacgacatcatcaaccgatattcgtagcaagccgttgccacgatggcttcgaagcatctcaacatcttcgtcacgaccttcccgggattgggtctcccctcgaccctttcctttgccatcccatccactacgactaccggcgacttgcacgactgcatcatagaacgacttcctctgcgcgatgccagattcgtcctcaccaccatatcaaacaagcagctgctggccggatcggatagcattatatctgatctttgcgatgtcgatgataacttcatctcactacgactctcgctccccctctgcggtggcaagggtggtttcggctcccagctccgtgccgccggtggccgcatgtcctcaaagaagaagaagaaccaaggcgacgagaatggctccagcaggaatttggatggccgacgactcaggacagtcaatgaggccaaggcgttggctgaatatctagctatcaaaccagaaatggagcagaaagaaaaggagaagcgacgcgagcgatggcagcagatcgttgacgcagcagaagagagagaacacgaactcaagaacaactcccgcggtcgtctaagtggcaagtgggtcgaggacaaggaggagacgagcgagaggactcgcgacgccgttctcgctgccatcaaggccggcaactacaaagacaacctactcggcacatcacacggctcggcttcgaccgatgcccctgacgagggatcgtcgggcagtagtggggacgaagacaacgctaaggactcgaacaattccaagtcgccatcaccgccaacgactaaggccgtgcaaaagccaccaactagagctttcgcgggattcgacgaagatgatgagtttatgagttcttccgacgatgaagacaatgacaagtgaagaattggccgagcagagcgtcgaacctcaagggacgctaattttacaccgagacctggctccttcagctcgaaattagatcattgcgactttgctgaggtcgcccatgtttatcaatcatgaaagtgtcacttgcgcacggagagaaagatgcgcttgaccggaacatgatagcattagcggtccttttgacaaacgccagaaaaggattatcaagcggcccaaacattgacgacaatgagcgccctgaagtctattccgtagccactatcaactgcgacagtcagctcgcatagtgttttgacctgcagaaggctacaacaggctgtaagcggatggtaatcgccattgacagtaaatagctgcgagggctgaaaccagtagcaacagacagtatatatgtttctgatgtgatattagcgatagccagcacctgaagatacttgtagtcccgaaacgtggtaaagacttgtctccaatacgcgtcttctcgaaggaactatatataatgacaaaacatgtaaatcaacgggaatactatctcggtacagaatgttgctatggatgtgacgataattaccctgatcgaaagtgcatgtctttgtaagctgaataaat

SEQ ID NO: 15338 - DNA, 495 bp, Muscodor strobelii
  misc_feature: SGI cDNA ID NO. 565078
  misc_feature: Reduced expression when VOC is produced
  misc_feature: Encodes the peptide sequence at SEQ ID NO 15339
atgctgattcccaaggctgaccgcaagaagatccacgagtacctcttccgcgagggtgtcatggtcgcgaagaaggactacaaccttcccaagcaccccgatatcgacaccaagaacctcttcgtcgtcaaggccgcccagtccctcacctcccgcggctatgtcaaaacccagttctcctggcaatactactactacaccctgacccccgagggtctcgactacctccgcgagtggctccacctccccgccgagatcgtccccgccacacacatcaagcagcagcgatcccacgctcctccccgaggcatgatgggcgagggcgagcgtgagcgcagaccgttcggccgtggccgtggtggcgaccgtggcgaccgtgagggtggataccgacgacgtgacgctggcgagggcaaggagggtggtgctcctggtgaattcaaccctcaattccgtggtggattcggccgtggccgtggcgctcctccttcctaa

SEQ ID NO: 15339 - protein, 164 aa, Muscodor strobelii
  misc_feature: SGI Peptide ID NO. 565078
  misc_feature (3)..(98): Pfam Id: PF03501 Pfam Desc: Plectin/S10 domain
  misc_feature (1)..(164): NCBI GI: 119194649 Blast Desc: 40S ribosomal protein S10 [Coccidioides immitis RS] gi|240105219|gb|EER23412.1| 40S ribosomal protein S10-B, [Coccidioides posadasii C735 delta SOWgp]
  misc_feature (1)..(151): NCBI GI: 256732948 Blast Desc: NECHADRAFT_38065 [Nectria haematococca mpVI 77-13-4]
  misc_feature (1)..(150): NCBI GI: 223975151 Blast Desc: [Zea mays]
  misc_feature (1)..(150): NCBI GI: 46123785 Blast Desc: FG06270.1 [Gibberella zeae PH-1]
  misc_feature (1)..(149): NCBI GI: 255947048 Blast Desc: Pc22g02470 [Penicillium chrysogenum Wisconsin 54-1255] gi|211591308|emb|CAP97535.1| Pc22g02470 [Penicillium chrysogenum Wisconsin 54-1255]
  misc_feature (1)..(164): NCBI GI: 169770199 Blast Desc: [Aspergillus oryzae RIB40] gi|83767428|dbj|BAE57567.1| protein product [Aspergillus oryzae]
  misc_feature (6)..(164): NCBI GI: 258567962 Blast Desc: 40S ribosomal protein S10-A [Uncinocarpus reesii 1704] gi|237906171|gb|EEP80572.1| 40S ribosomal protein S10-A [Uncinocarpus reesii 1704]
  misc_feature (1)..(164): NCBI GI: 238487412 Blast Desc: 40S ribosomal protein S10b [Aspergillus flavus NRRL3357] gi|220699823|gb|EED56162.1| 40S ribosomal protein S10b [Aspergillus flavus NRRL3357]
  misc_feature (1)..(164): NCBI GI: 121700110 Blast Desc: 40S ribosomal protein S10b [Aspergillus clavatus NRRL 1] gi|119396462|gb|EAW06894.1| 40S ribosomal protein S10b [Aspergillus clavatus NRRL 1]
  misc_feature (1)..(163): NCBI GI: 226278402 Blast Desc: 40S ribosomal protein S10-A [Paracoccidioides brasiliensis Pb01]
  misc_feature: Useful for introducing or modulating the production of volatile compounds
MLIPKADRKKIHEYLFREGVMVAKKDYNLPKHPDIDTKNLFVVKAAQSLTSRGYVKTQFSWQYYYYTLTPEGLDYLREWLHLPAEIVPATHIKQQRSHAPPRGMMGEGERERRPFGRGRGGDRGDREGGYRRRDAGEGKEGGAPGEFNPQFRGGFGRGRGAPPS

SEQ ID NO: 15340 - DNA, 1588 bp, Muscodor strobelii
  misc_feature: SGI EST ID NO. CUFF.36420.0
  misc_feature: Variant of the nucleotide sequence at SEQ ID NO 15338
gtcgcttccctctccacccaccgtagggtttttgcgcacaccaaaaaattgccggacctctgttcatcgattggactgactgactgtcatcgacgcagccccggccgacgaacttctcaatacaccacgcccaccccttcaatcaacatcacgtcttgctgccaacgagcaaaccgccaagatgctgattcccaaggctgaccgcaagaagatccacgagtacctcttccgcgagggtgtcatggtcgcgaagaaggactacaaccttcccaagcaccccgatatcgacaccaagaacctcttcgtcgtcaaggccgcccagtccctcacctcccgcggctatgtcaaaacccagttctcctggcaatactactactacaccctgacccccgagggtctcgactacctccgcgagtggctccacctccccgccgagatcgtccccgccacacacatcaagcagcagcgatcccacgctcctccccgaggcatgatgggcgagggcgagcgtgagcgcagaccgttcggccgtggccgtggtggcgaccgtggcgaccgtgagggtggataccgacgacgtgacgctggcgagggcaaggagggtggtgctcctggtgaattcaaccctcaattccgtggtggattcggccgtggccgtggcgctcctccttcctaaacaactcaagggactatatccattgtctcttcttctctgaacaaatccttcgacgcacatggtggccggaatcggtatggacatgtactctagggacatgaagcacctgcatagtcgcgcgctattgcttgcgcgataggaaaatcgattagggccaaaaacctcggatgcacgggtgggagttataaggagaccaaatcctcggtatcgtctacgaaattaagggtcatgattattttgcgccaaggaaacaaatgataaaccaaaaaaaaataatcgccacatctcccatgcatgtgatgttattgtcaagcgtgattgcccacaccggtgtctaaggatattctctgaggtatgggggatccatcgtttggacaattcagcgccagacttcgatcagcacgacattgtgacgaagtcggagagaaatcggttatcaatgcctcgcacccagctggtgctgtaacatgagtataagaattgagccatacatcaatcttcctatttgggttatcatgcctcttggtcatttgggacaattgcttgcacctacttcagtgaacgtcaaataaccggcacaggtcgacttatgaccaaacaattgctgatttattgctgtctgtgttggcctcttgctgctgccgaatattctaccgcgcagctcatacttgtatatttgctactcatccagctctggagatagccttaaccgatacataattggccgcctgaataagtatgtgcgtcttagccttgtcgtagtccgcatggtcctcctaggcatagcatgccagattcgctcaaaaactcaaggaaatgtccttgccccaactcctgtatcctcgggtatctctgatccatcatcctgtaggccctcatctcataagacctccgcacattttcttcctgaac

SEQ ID NO: 15341 - DNA, 1113 bp, Muscodor strobelii
  misc_feature: SGI cDNA ID NO. 565079
  misc_feature: Encodes the peptide sequence at SEQ ID NO 15342
atggacgccagtttcctgggactcgcccagcaccacaccgctcagatggatttcgcgttcaagaaacttgtggatactatcctcaagaattccgggttgtctatctctcttctgcgcattagcagtgttagcgaagaatccttccatgtctccctagaggctcgcgtggtcaagacaggacctaccagcgccaccatctctcccatgaccctggatctctgtggtccacttggggtcttcggaaagatcaagcttcctaccatcaccacccaatccaacggaacagatgtcgttgtgaacaaccagctggtcgaaatcagcgacaccaaggctctgcaggccttcatcgagccgctcctcaagaacgaaggtgtcaagctctcacttcgtaatggcaatactacgatcaaggcactgggcgttgggccccgtgatatctgctacgagaaggacatcgacttaaagggcatgaatggaccaatcgtacgcatacgctcagcagaactagtccaaagcgccggctcgcgcttgtccgtcatgtcagcagccccaagcgtgctcggcgaaggccctagtctcggccccagagtctctacagctagcaccatctcagggggcgccaacaatgtatctatagtctttcacatcgacaacccaagtcccctcgaactaagtttcggcatctgcgtcttcgagatccaagacaaccacggcgtcgttctcgcagagctcaagggccgtctcgacatccgccgtcatcacttccaagtcacctcgcaaggacccatcgacaagacagcagtaatccgactagcagccagcatgcacgcacgaaaaagcagcctcaacgagctggccgggggcaaggaccccgaagaactcgaggatgctcgccccgaagcgcgtctcgtcggcaagagatgtggaggagccggttggtgcgatgatacggtcaagggcatcaatgtacccctccacaacgtcggaaagctgtttcgtgctctgggcttagacgctgatgtcaaggacgctgtgcaagagcctaagcaggactttgaaaaggatgaggagaagggtgtttctaagtggaagggtaagcttggtttgcgttag

SEQ ID NO: 15342 - protein, 370 aa, Muscodor strobelii
  misc_feature: SGI Peptide ID NO. 565079
  misc_feature (16)..(323): NCBI GI: 256732946 Blast Desc: NECHADRAFT_99932 [Nectria haematococca mpVI 77-13-4]
  misc_feature (23)..(261): NCBI GI: 46123787 Blast Desc: FG06271.1 [Gibberella zeae PH-1]
  misc_feature (23)..(325): NCBI GI: 85079007 Blast Desc: NCU01649 [Neurospora crassa OR74A] gi|16944668|emb|CAB99176.2| [Neurospora crassa] gi|28917327|gb|EAA27035.1| [Neurospora crassa OR74A]
  misc_feature (16)..(158): NCBI GI: 71023333 Blast Desc: UM05749.1 [Ustilago maydis 521] gi|46100771|gb|EAK86004.1| [Ustilago maydis 521]
  misc_feature (21)..(159): NCBI GI: 164657378 Blast Desc: MGL_2801 [Malassezia globosa CBS 7966] gi|159103709|gb|EDP42601.1| MGL_2801 [Malassezia globosa CBS 7966]
MDASFLGLAQHHTAQMDFAFKKLVDTILKNSGLSISLLRISSVSEESFHVSLEARVVKTGPTSATISPMTLDLCGPLGVFGKIKLPTITTQSNGTDVVVNNQLVEISDTKALQAFIEPLLKNEGVKLSLRNGNTTIKALGVGPRDICYEKDIDLKGMNGPIVRIRSAELVQSAGSRLSVMSAAPSVLGEGPSLGPRVSTASTISGGANNVSIVFHIDNPSPLELSFGICVFEIQDNHGVVLAELKGRLDIRRHHFQVTSQGPIDKTAVIRLAASMHARKSSLNELAGGKDPEELEDARPEARLVGKRCGGAGWCDDTVKGINVPLHNVGKLFRALGLDADVKDAVQEPKQDFEKDEEKGVSKWKGKLGLR

SEQ ID NO: 15343 - DNA, 582 bp, Muscodor strobelii
  misc_feature: SGI cDNA ID NO. 565080
  misc_feature: Encodes the peptide sequence at SEQ ID NO 15344
atgtacggccgcacaaataggccttcgttcggtcaatatgacttcaccctgcgcgatctagtcgtcaatgacccttctccgcgacctagagcatattcgaggccacccgaactgcccctccctctgcgtagtctgttaaatgtccctcgagaccccgtcgccggcgacgacgatcgctcgaacccccatattaccaaccacaacacaagaccagtcagcaaacattcgcggtccatgagcaatccgttcccctctctgttctccaaaaagaagaagaacatcgacatcgacctcgacagcgaaggcgaccaagacgaactccccaatggccatgacaagagcaagaataagatggcgcagggtccgtcgcaagcgagcagcggaaacggcattccttctgggcccaccgaatttataactgggaatttcgccatcacatgtgccctccccgcctgtcccaccagtaaatatgccgagttcgatatcattagattatacgaggcagttgatcaagagctgtttgcgcttttcattattgcagtccatgggatcaccatcgagctatcaaccaacgccttgtga

SEQ ID NO: 15344 - protein, 193 aa, Muscodor strobelii
  misc_feature: SGI Peptide ID NO. 565080
MYGRTNRPSFGQYDFTLRDLVVNDPSPRPRAYSRPPELPLPLRSLLNVPRDPVAGDDDRSNPHITNHNTRPVSKHSRSMSNPFPSLFSKKKKNIDIDLDSEGDQDELPNGHDKSKNKMAQGPSQASSGNGIPSGPTEFITGNFAITCALPACPTSKYAEFDIIRLYEAVDQELFALFIIAVHGITIELSTNAL

SEQ ID NO: 15345 - DNA, 6757 bp, Muscodor strobelii
  misc_feature: SGI EST ID NO. CUFF.36519.0
  misc_feature: Variant of the nucleotide sequence at SEQ ID NO 15343
gaatgtgggcgaccgcgagattggttgcgttttcttcatgggaagctttgggtggcattgcatttgacaagggggccatcctgggtttagtccggggccaaaaggcagaggcagaaacagaggggtccttttcgcggtcgaggatggggtttcaaaagggtgattcgtcgtcaactcacttcgtattacaattgcagttgagcattcccctaactgctgctacgtctgagagcggccttgtccccattcaagctctttcttttcccaaattctaccccttttgtacttgatatcaggcactctgccgggtctgcacactttaatatagacataggcggcatgcattgcgtcccctgatacataccataccctaccccagcttggtcgtgacaacctccaacagctttcctcatccgcatgctgtggtctgacatgcagtgatgatccagccctcagcctcacctcagccggctcttcaggtgtgcccgtcaaatgccattgcctcgatggtgactagtgtgccagtgcgtgacaaagtcgacctcgtgagcttctttatgagaggtggattgagagccctgggaaccttctctcgcatctagcgtcccgacctcgtcctcccagccactatacgtcaccgtcgtcgctctactctccctcattcccaccctctccgttgcagcttcgacatatcgtcttctgcaagctgctactgcctcctcacctttggtttgcagaccaacccaccagatgcagaagcagtcaacgctcgtccttaaggtcctagctgccagctgtatctgcacttgagtcagcgtccgctagcttccccatgctgccgccatgtacggccgcacaaataggccttcgttcggtcaatatgacttcaccctgcgcgatctagtcgtcaatgacccttctccgcgacctagagcatattcgaggccacccgaactgcccctccctctgcgtagtctgttaaatgtccctcgagaccccgtcgccggcgacgacgatcgctcgaacccccatattaccaaccacaacacaagaccagtcagcaaacattcgcggtccatgagcaatccgttcccctctctgttctccaaaaagaagaagaacatcgacatcgacctcgacagcgaaggcgaccaagacgaactccccaatggccatgacaagagcaagaataagatggcgcagggtccgtcgcaagcgagcagcggaaacggcattccttctgggcccaccgaatttataactgggaattgtgcaccaaatgtttgaccatcaacgatctccagccatatactccctcagtcgctaggccagtcattcgccggccagcccgtggcggcatctcgcagtcgccatcacatgtgccctccccgcctgtcccaccagtaaatatgccgagttcgatatcattagattatacgaggcagttgatcaagagctgtttgcgcttttcattattgcagtccatgggatcaccatcgagctatcaaccaacgccttgtgatggggatacctcaagatctgatcattccagtgactatttcgcctcccgagagcgtagtgaccaatccggcaactctttgccgtttagcaataattgtccgaaacaatacgcatataatgctctctttaatgattttgaagaactgcacttggagctaaatccgctaaacaaatccaccaacgaccccaagatgtctgtaccaccgtatcttgacatgaaaagctcgcctcataccaggtcgccatcaggaatatcgccaggcgcaggcggtgacataagctcgagccgtcaagagcctgttccagaccctaagagaatgtttaagagagtagaggactatctcgttgcgtgttttgggtcgcattcatgtattaacagctccttcattcctcgtcgatcgagtgttagtgcaagagggcctgccgaaaccatgcgacgctccatcgcagattcaagcagggatcacgtgcgagaggatcctacaatttctgagcttgatcctaaattacttcttctgggcaattttgccgaaaatgggctatggtggacgggaaaccaagacgaggtagctcctgcgcaaagttcattgcggcgtcacgaagaaaagccgtcgattgtgactcctcggtcgccccgcattgattgggccgtggccatggagtggtattacgctgtgactaatgctgcttctttatggacagaggtccgtgatgaattaattcgagcaaatttgatgccaacattgacggagttggaatcaagaaatttcgaagaaaccgccattgaggcacaaagtcatcttcagagggctttgctgaaatgcacggagatgctgttgaagcgaccaggacgacttatggccgaaccgcaagatgtgcgcttcctaatcattgtcctcgccaaccctcttttattaccaaagcacgagtcatttgctggacactttcagctaccaagtaaagagaaagggaaaagacaagcaaagcttctagatggggagggaaagtcgcctatgggccggcattctgggatcatcaagagaatattaggtcttttggccaattcttccgagatatgccatctacacctaataacgtggctgtctagattgccggaacatctattccttcagacaaaagacctcattggtaccttcgtgacttatcgactcattcgacaaaatgagagaaagagtgatcccaaaattgatgtcacagatggtttaattccgcatatgtccagcggtcgggctggaaacacaccggctactctctacgcagctctgcagccctcaaagtcaccgcggaaacacaaacagccactagacgtgaatccagcaccatataccgatgactggcagctgagagccgcggccagagtgatggctttgctagtcgctgcaaactaccatacgcgtgcccgaaagtctcactcctttgaaggacgaaggcaaggacatatcctttcagcaggcgacttttacaacacattagtcgataccttggatttcaagctcgacttcgaactatgggaatcgaaaaggggcaaattcacattttgccaataccctttcttcctaagtatctgggcaaaaatccaaattctcgagttcgacgccaaacgacaaatggcgggcaaggcgcgagaagctttcttcgacagtataatgtcaaataggaattatacgcaatatcttacactccgcgtccgccgagagtgtttagtagacgacagtctgaagcaggtcagcgaggtggtcggcagcggcagtgaggacatcaagaaggctcttcgaattgaatttcgtggagaagaaggcgttgacggcggagggttgcggaaagaatggtttctactccttgtgagggaagtctttaatcccgaccatggcctctttgtttacgatgaagattcgaaattttgctacttcaactcgaatacattcgagacatcggaccaatatttcttagtcggcgttgtctttggcctcgctatttacaattccacaatattagatgtcgcatttcctccctttgcctttcggaaacttctcgccgcagcaccgccgccggccgccggcacccctgggcactctcggccagcaatgaattacacgctagatgatctctcagaacttcgcccagcgctggccagaggccttcggcagctacttgagtttgacggagatgtacagtctactttctgtttagactttgcaatagacgtcgagaggtacggatcccgtcagcgggtagctctctgtaccgggggcgagacaaggatggtcacaaacgcaaatcgcaaggaatatgtagacctttatgtgagatatcttctcgacacgtccgtgactcgccaattcgaaccgttcaagcgcggtttcttcacggtatgtgccggcaacccattaaccctattcggtcccgaagagatcgagctcctcgttcgaggttcggatgaagctctcgatatagcgtcgctaaaagcagtcgctacttatttcaactggccgaatggaaaatctgacaaatctattggctggttttgggacacgtttgagaacgcatcgccgaaggatcagcgtaggctgttgaccttcatcacgggtagcgatcgaattccggctatgggtgcagcatctctcatcatcaggattcaatgccttggcgaagatgaaggacggtacccttccgctcggacttgtttcaatactttatcactgtatcaataccggtctcgtgagcgacttgaacagttcctttggcgagcggtcaacgagagtgaagggtttgggcttaagtaatttcgcgaatggcgggtaacttacaaatcgaactcagggtctgcatttcatggtgttttgagagttaaggacggtcactaaaaggagtctcaaacaggcactgggtcgaatagtgtttctgcccattggtatagagtctcgtctccgttgttcggcatcacgaccagtgtcgtttgtagctggcttgtaataaccaaagctacgtcgatgagagatccacgagcttgttcatatacataattataagatacccatacatcatgagtttcaaggaccgaaatgctcttttgcaggaaagagcgagacttgcttgactcgaacatgtgctaattaatttgtattattggttatggccactagtaaattagagtctagttcatgagctcggctttaagcccaaagcagcgtagacttcattttgaagctttccctggcaatgataacgcgacgagtcgatatcttgagtgtccacgaagccaacgcacttccagcacgtcaggatattttcaggatcatatttggctttgatcttgaggagcttctcgtagttctcacgtccatagtaagacgtttgccatcccgtcataaatgggtttgcctcgttaaaatgtgaaccggcgtcaggacctgcgagaacctcggactgcacggtggcattggtaagattggtgatgaattcgagacgcgcgtcataagagctgttccaagccatcagaccgatcgtctgcatatgccagagcgacttgtaccaagctggagtcaaagatgtgccgatctccatcttggcaaacgcctcagggtcattcaggcgctggtaaacgtacggcgtcgagacgggcgtgtagaagctcacggggttgaaaccgagttcggcggctgatttgatataagaccaaatcgcattctttccttcctctgtggtgaagagttcatcgggaattagtcgactggaacccatacccatgttaccgccttgcatcgtgtcgaggggcaagaggtatttattccagatataaagccagtttggctgcacgccgacatcgctcgttccgccgtgagcaagtgcgaagtctgttacgcgcttaaacgactcccgagctgttgtgccatcgtcggatacaaactcgtccacgggattgaagtgcgtaacgtaggtaccagcgacgtgaccgccccagccttgacgaccccattcgtaagtctcgtctatcatcagtttgatccattccaacgcgacttcggctgatatattcgatgggagctgaacgttggcgaaagcaaggggtttgcgcgggataacgctatgcgtagcgttgaggacgacaccgaagctgcttccaccgccgcctcgcagggcgaagaaaagatcgggatcttgacatttgttgacggtacgctctttgccgtctggtgttacgatgttgaactctactactctgtctgctcccattccgtatactggtcctagaacaccgtctacaatttcattagcatgcgttaccccctctgcggaccggtatgaatcatatggagggatgtgcaaaaaacttacgaccaccgcccaatagccacccagcagacaccgcaacagttggcgaatagggaccaagaatcacactatcatgctcatctgcgaagatatgcgcatcaccactaggaacacccgcgccaagaaccatgactctcccagcatcctccgtacatcccttcggaacaaacgaatcatgatattccatgccctgcatattctgcgtccaaagattcaacgtattcttccccgagtttctcgtcataaagtcatgtccagcattcttgacactcagcgtaacattatgctgtctcgcaaacgccagcgcagcagtgacgtccgatccctgaagcacctcgagataatacgctggcacgctcccctggttgcaggtagcgttattcgaaggcataccggcgggtatcatcgaattatccaacacgcactgatcgctaggctcagagagacagacttcgctctgcaggttcatgtaggcacctgggtagttcgtccggaagtctcctgatttccagttctgccggactgttgtgcatcttgggtcgtctactgtgttcgcttcaccgttgtatgatgtgtaacatgggagtgctatcggtggatttgctcttagacgaccaccgactgttgaatttagggagttccatgatgggaaggaatatgataccccaaggctcgcgccagtcaacagacaggcgatttggtgtgtgagcttcatggccttacatagaacgacgacaccgcaccgtcggaatgggaattaggagatagtgttcgagagaacgccattcctgataacaacagcatttatctaaatgtcgatctcttcaatccttcgaagcttacgtacattcccgagatctcccaggacagaggcaaggaatta

SEQ ID NO: 15346 - DNA, 2373 bp, Muscodor strobelii
  misc_feature: SGI cDNA ID NO. 565081
  misc_feature: Encodes the peptide sequence at SEQ ID NO 15347
atgcgacgctccatcgcagattcaagcagggatcacgtgcgagaggatcctacaatttctgagcttgatcctaaattacttcttctgggcaattttgccgaaaatgggctatggtggacgggaaaccaagacgaggtagctcctgcgcaaagttcattgcggcgtcacgaagaaaagccgtcgattgtgactcctcggtcgccccgcattgattgggccgtggccatggagtggtattacgctgtgactaatgctgcttctttatggacagaggtccgtgatgaattaattcgagcaaatttgatgccaacattgacggagttggaatcaagaaatttcgaagaaaccgccattgaggcacaaagtcatcttcagagggctttgctgaaatgcacggagatgctgttgaagcgaccaggacgacttatggccgaaccgcaagatgtgcgcttcctaatcattgtcctcgccaaccctcttttattaccaaagcacgagtcatttgctggacactttcagctaccaagtaaagagaaagggaaaagacaagcaaagcttctagatggggagggaaagtcgcctatgggccggcattctgggatcatcaagagaatattaggtcttttggccaattcttccgagatatgccatctacacctaataacgtggctgtctagattgccggaacatctattccttcagacaaaagacctcattggtaccttcgtgacttatcgactcattcgacaaaatgagagaaagagtgatcccaaaattgatgtcacagatggtttaattccgcatatgtccagcggtcgggctggaaacacaccggctactctctacgcagctctgcagccctcaaagtcaccgcggaaacacaaacagccactagacgtgaatccagcaccatataccgatgactggcagctgagagccgcggccagagtgatggctttgctagtcgctgcaaactaccatacgcgtgcccgaaagtctcactcctttgaaggacgaaggcaaggacatatcctttcagcaggcgacttttacaacacattagtcgataccttggatttcaagctcgacttcgaactatgggaatcgaaaaggggcaaattcacattttgccaataccctttcttcctaagtatctgggcaaaaatccaaattctcgagttcgacgccaaacgacaaatggcgggcaaggcgcgagaagctttcttcgacagtataatgtcaaataggaattatacgcaatatcttacactccgcgtccgccgagagtgtttagtagacgacagtctgaagcaggtcagcgaggtggtcggcagcggcagtgaggacatcaagaaggctcttcgaattgaatttcgtggagaagaaggcgttgacggcggagggttgcggaaagaatggtttctactccttgtgagggaagtctttaatcccgaccatggcctctttgtttacgatgaagattcgaaattttgctacttcaactcgaatacattcgagacatcggaccaatatttcttagtcggcgttgtctttggcctcgctatttacaattccacaatattagatgtcgcatttcctccctttgcctttcggaaacttctcgccgcagcaccgccgccggccgccggcacccctgggcactctcggccagcaatgaattacacgctagatgatctctcagaacttcgcccagcgctggccagaggccttcggcagctacttgagtttgacggagatgtacagtctactttctgtttagactttgcaatagacgtcgagaggtacggatcccgtcagcgggtagctctctgtaccgggggcgagacaaggatggtcacaaacgcaaatcgcaaggaatatgtagacctttatgtgagatatcttctcgacacgtccgtgactcgccaattcgaaccgttcaagcgcggtttcttcacggtatgtgccggcaacccattaaccctattcggtcccgaagagatcgagctcctcgttcgaggttcggatgaagctctcgatatagcgtcgctaaaagcagtcgctacttatttcaactggccgaatggaaaatctgacaaatctattggctggttttgggacacgtttgagaacgcatcgccgaaggatcagcgtaggctgttgaccttcatcacgggtagcgatcgaattccggctatgggtgcagcatctctcatcatcaggattcaatgccttggcgaagatgaaggacggtacccttccgctcggacttgtttcaatactttatcactgtatcaataccggtctcgtgagcgacttgaacagttcctttggcgagcggtcaacgagagtgaagggtttgggcttaagtaa

SEQ ID NO: 15347 - protein, 790 aa, Muscodor strobelii
  misc_feature: SGI Peptide ID NO. 565081
  misc_feature (475)..(790): Pfam Id: PF00632 Pfam Desc: HECT-domain (ubiquitin-transferase)
  misc_feature (7)..(790): NCBI GI: 85110577 Blast Desc: NCU06756 [Neurospora crassa OR74A] gi|28881348|emb|CAD70390.1| related to ubiquitin-protein ligase HUL4 [Neurospora crassa] gi|28925211|gb|EAA34292.1| conserved
  misc_feature (3)..(790): NCBI GI: 145610557 Blast Desc: MGG_01115 [Magnaporthe grisea 70-15] gi|145017919|gb|EDK02198.1| MGG_01115 [Magnaporthe grisea 70-15]
  misc_feature (21)..(790): NCBI GI: 256732945 Blast Desc: NECHADRAFT_38788 [Nectria haematococca mpVI 77-13-4]
  misc_feature (5)..(790): NCBI GI: 171689390 Blast Desc: protein product [Podospora anserina] gi|170944657|emb|CAP70768.1| protein product [Podospora anserina]
  misc_feature (18)..(790): NCBI GI: 156044818 Blast Desc: SS1G_10513 [Sclerotinia sclerotiorum 1980] gi|154694901|gb|EDN94639.1| SS1G_10513 [Sclerotinia sclerotiorum 1980]
  misc_feature (19)..(790): NCBI GI: 154289940 Blast Desc: BC1G_15911 [Botryotinia fuckeliana B05.10] gi|150848531|gb|EDN23724.1| BC1G_15911 [Botryotinia fuckeliana B05.10]
  misc_feature (15)..(751): NCBI GI: 46123789 Blast Desc: FG06272.1 [Gibberella zeae PH-1]
  misc_feature (21)..(790): NCBI GI: 70990728 Blast Desc: ubiquitin-protein ligase (Hul4) [Aspergillus fumigatus Af293] gi|66847845|gb|EAL88175.1| ubiquitin-protein ligase (Hul4), [Aspergillus fumigatus Af293] gi|159130690|gb|EDP55803.1|
  misc_feature (21)..(790): NCBI GI: 121702863 Blast Desc: ubiquitin-protein ligase (Hul4), [Aspergillus clavatus NRRL 1] gi|119397839|gb|EAW08270.1| ubiquitin-protein ligase (Hul4), [Aspergillus clavatus NRRL 1]
  misc_feature (21)..(790): NCBI GI: 119496853 Blast Desc: ubiquitin-protein ligase (Hul4), [Neosartorya fischeri NRRL 181] gi|119413362|gb|EAW23303.1| ubiquitin-protein ligase (Hul4), [Neosartorya fischeri NRRL 181]
MRRSIADSSRDHVREDPTISELDPKLLLLGNFAENGLWWTGNQDEVAPAQSSLRRHEEKPSIVTPRSPRIDWAVAMEWYYAVTNAASLWTEVRDELIRANLMPTLTELESRNFEETAIEAQSHLQRALLKCTEMLLKRPGRLMAEPQDVRFLIIVLANPLLLPKHESFAGHFQLPSKEKGKRQAKLLDGEGKSPMGRHSGIIKRILGLLANSSEICHLHLITWLSRLPEHLFLQTKDLIGTFVTYRLIRQNERKSDPKIDVTDGLIPHMSSGRAGNTPATLYAALQPSKSPRKHKQPLDVNPAPYTDDWQLRAAARVMALLVAANYHTRARKSHSFEGRRQGHILSAGDFYNTLVDTLDFKLDFELWESKRGKFTFCQYPFFLSIWAKIQILEFDAKRQMAGKAREAFFDSIMSNRNYTQYLTLRVRRECLVDDSLKQVSEVVGSGSEDIKKALRIEFRGEEGVDGGGLRKEWFLLLVREVFNPDHGLFVYDEDSKFCYFNSNTFETSDQYFLVGVVFGLAIYNSTILDVAFPPFAFRKLLAAAPPPAAGTPGHSRPAMNYTLDDLSELRPALARGLRQLLEFDGDVQSTFCLDFAIDVERYGSRQRVALCTGGETRMVTNANRKEYVDLYVRYLLDTSVTRQFEPFKRGFFTVCAGNPLTLFGPEEIELLVRGSDEALDIASLKAVATYFNWPNGKSDKSIGWFWDTFENASPKDQRRLLTFITGSDRIPAMGAASLIIRIQCLGEDEGRYPSARTCFNTLSLYQYRSRERLEQFLWRAVNESEGFGLK

SEQ ID NO: 15348 - DNA, 6757 bp, Muscodor strobelii; identical to SEQ ID NO: 15345
  misc_feature: SGI EST ID NO. CUFF.36519.0
  misc_feature: Variant of the nucleotide sequence at SEQ ID NO 15346

SEQ ID NO: 15349 - DNA, 1467 bp, Muscodor strobelii
  misc_feature: SGI cDNA ID NO. 565082
  misc_feature: Encodes the peptide sequence at SEQ ID NO 15350
atgcgacgctccatcgcagattcaagcagggatcacgtgcgagaggatcctacaatttctgagcttgatcctaaattacttcttctgggcaattttgccgaaaatgggctatggtggacgggaaaccaagacgaggtagctcctgcgcaaagttcattgcggcgtcacgaagaaaagccgtcgattgtgactcctcggtcgccccgcattgattgggccgtggccatggagtggtattacgctgtgactaatgctgcttctttatggacagaggtccgtgatgaattaattcgagcaaatttgatgccaacattgacggagttggaatcaagaaatttcgaagaaaccgccattgaggcacaaagtcatcttcagagggctttgctgaaatgcacggagatgctgttgaagcgaccaggacgacttatggccgaaccgcaagatgtgcgcttcctaatcattgtcctcgccaaccctcttttattaccaaagcacgagtcatttgctggacactttcagctaccaagtaaagagaaagggaaaagacaagcaaagcttctagatggggagggaaagtcgcctatgggccggcattctgggatcatcaagagaatattaggtcttttggccaattcttccgagatatgccatctacacctaataacgtggctgtctagattgccggaacatctattccttcagacaaaagacctcattggtaccttcgtgacttatcgactcattcgacaaaatgagagaaagagtgatcccaaaattgatgtcacagatggtttaattccgcatatgtccagcggtcgggctggaaacacaccggctactctctacgcagctctgcagccctcaaagtcaccgcggaaacacaaacagccactagacgtgaatccagcaccatataccgatgactggcagctgagagccgcggccagagtgatggctttgctagtcgctgcaaactaccatacgcgtgcccgaaagtctcactcctttgaaggacgaaggcaaggacatatcctttcagcaggcgacttttacaacacattagtcgataccttggatttcaagctcgacttcgaactatgggaatcgaaaaggggcaaattcacattttgccaataccctttcttcctaagtatctgggcaaaaatccaaattctcgagttcgacgccaaacgacaaatggcgggcaaggcgcgagaagctttcttcgacagtataatgtcaaataggaattatacgcaatatcttacactccgcgtccgccgagagtgtttagtagacgacagtctgaagcaggtcagcgaggtggtcggcagcggcagtgaggacatcaagaaggctcttcgaattgaatttcgtggagaagaaggcgttgacggcggagggttgcggaaagaatggtttctactccttgtgagggaagtctttaatcccgaccatggtcagtaa

SEQ ID NO: 15350 - protein, 488 aa, Muscodor strobelii
  misc_feature: SGI Peptide ID NO. 565082
  misc_feature (7)..(487): NCBI GI: 85110577 Blast Desc: NCU06756 [Neurospora crassa OR74A] gi|28881348|emb|CAD70390.1| related to ubiquitin-protein ligase HUL4 [Neurospora crassa] gi|28925211|gb|EAA34292.1| conserved
  misc_feature (18)..(487): NCBI GI: 156044818 Blast Desc: SS1G_10513 [Sclerotinia sclerotiorum 1980] gi|154694901|gb|EDN94639.1| SS1G_10513 [Sclerotinia sclerotiorum 1980]
  misc_feature (19)..(487): NCBI GI: 171689390 Blast Desc: protein product [Podospora anserina] gi|170944657|emb|CAP70768.1| protein product [Podospora anserina]
  misc_feature (15)..(487): NCBI GI: 46123789 Blast Desc: FG06272.1 [Gibberella zeae PH-1]
  misc_feature (3)..(487): NCBI GI: 145610557 Blast Desc: MGG_01115 [Magnaporthe grisea 70-15] gi|145017919|gb|EDK02198.1| MGG_01115 [Magnaporthe grisea 70-15]
  misc_feature (21)..(487): NCBI GI: 256732945 Blast Desc: NECHADRAFT_38788 [Nectria haematococca mpVI 77-13-4]
  misc_feature (19)..(487): NCBI GI: 116199591 Blast Desc: CHGG_07951 [Chaetomium globosum CBS 148.51] gi|88179230|gb|EAQ86698.1| CHGG_07951 [Chaetomium globosum CBS 148.51]
  misc_feature (19)..(487): NCBI GI: 154289940 Blast Desc: BC1G_15911 [Botryotinia fuckeliana B05.10] gi|150848531|gb|EDN23724.1| BC1G_15911 [Botryotinia fuckeliana B05.10]
  misc_feature (21)..(487): NCBI GI: 70990728 Blast Desc: ubiquitin-protein ligase (Hul4) [Aspergillus fumigatus Af293] gi|66847845|gb|EAL88175.1| ubiquitin-protein ligase (Hul4), [Aspergillus fumigatus Af293] gi|159130690|gb|EDP55803.1|
  misc_feature (21)..(487): NCBI GI: 121702863 Blast Desc: ubiquitin-protein ligase (Hul4), [Aspergillus clavatus NRRL 1] gi|119397839|gb|EAW08270.1| ubiquitin-protein ligase (Hul4), [Aspergillus clavatus NRRL 1]
MRRSIADSSRDHVREDPTISELDPKLLLLGNFAENGLWWTGNQDEVAPAQSSLRRHEEKPSIVTPRSPRIDWAVAMEWYYAVTNAASLWTEVRDELIRANLMPTLTELESRNFEETAIEAQSHLQRALLKCTEMLLKRPGRLMAEPQDVRFLIIVLANPLLLPKHESFAGHFQLPSKEKGKRQAKLLDGEGKSPMGRHSGIIKRILGLLANSSEICHLHLITWLSRLPEHLFLQTKDLIGTFVTYRLIRQNERKSDPKIDVTDGLIPHMSSGRAGNTPATLYAALQPSKSPRKHKQPLDVNPAPYTDDWQLRAAARVMALLVAANYHTRARKSHSFEGRRQGHILSAGDFYNTLVDTLDFKLDFELWESKRGKFTFCQYPFFLSIWAKIQILEFDAKRQMAGKAREAFFDSIMSNRNYTQYLTLRVRRECLVDDSLKQVSEVVGSGSEDIKKALRIEFRGEEGVDGGGLRKEWFLLLVREVFNPDHGQ

SEQ ID NO: 15351 - DNA, 6757 bp, Muscodor strobelii; identical to SEQ ID NO: 15345
  misc_feature: SGI EST ID NO. CUFF.36519.0
  misc_feature: Variant of the nucleotide sequence at SEQ ID NO 15349

SEQ ID NO: 15352 - DNA, 1488 bp, Muscodor strobelii
  misc_feature: SGI cDNA ID NO. 565083
  misc_feature: Encodes the peptide sequence at SEQ ID NO 15353
atgccttcgaataacgctacctgcaaccaggggagcgtgccagcgtattatctcgaggtgcttcagggatcggacgtcactgctgcgctggcgtttgcgagacagcataatgttacgctgagtgtcaagaatgctggacatgactttatgacgagaaactcggggaagaatacgttgaatctttggacgcagaatatgcagggcatggaatatcatgattcgtttgttccgaagggatgtacggaggatgctgggagagtcatggttcttggcgcgggtgttcctagtggtgatgcgcatatcttcgcagatgagcatgatagtgtgattcttggtccctattcgccaactgttgcggtgtctgctgggtggctattgggcggtggtcacggtgttctaggaccagtatacggaatgggagcagacagagtagtagagttcaacatcgtaacaccagacggcaaagagcgtaccgtcaacaaatgtcaagatcccgatcttttcttcgccctgcgaggcggcggtggaagcagcttcggtgtcgtcctcaacgctacgcatagcgttatcccgcgcaaaccccttgctttcgccaacgttcagctcccatcgaatatatcagccgaagtcgcgttggaatggatcaaactgatgatagacgagacttacgaatggggtcgtcaaggctggggcggtcacgtcgctggtacctacgttacgcacttcaatcccgtggacgagtttgtatccgacgatggcacaacagctcgggagtcgtttaagcgcgtaacagacttcgcacttgctcacggcggaacgagcgatgtcggcgtgcagccaaactggctttatatctggaataaatacctcttgcccctcgacacgatgcaaggcggtaacatgggtatgggttccagtcgactaattcccgatgaactcttcaccacagaggaaggaaagaatgcgatttggtcttatatcaaatcagccgccgaactcggtttcaaccccgtgagcttctacacgcccgtctcgacgccgtacgtttaccagcgcctgaatgaccctgaggcgtttgccaagatggagatcggcacatctttgactccagcttggtacaagtcgctctggcatatgcagacgatcggtctgatggcttggaacagctcttatgacgcgcgtctcgaattcatcaccaatcttaccaatgccaccgtgcagtccgaggttctcgcaggtcctgacgccggttcacattttaacgaggcaaacccatttatgacgggatggcaaacgtcttactatggacgtgagaactacgagaagctcctcaagatcaaagccaaatatgatcctgaaaatatcctgacgtgctggaagtgcgttggcttcgtggacactcaagatatcgactcgtcgcgttatcattgccagggaaagcttcaaaatgaagtctacgctgctttgggcttaaagccgagctcatga

SEQ ID NO: 15353 - protein, 495 aa, Muscodor strobelii
  misc_feature: SGI Peptide ID NO. 565083
  misc_feature (418)..(463): Pfam Id: PF08031 Pfam Desc: Berberine and berberine like
  misc_feature (14)..(160): Pfam Id: PF01565 Pfam Desc: FAD binding domain
  misc_feature (418)..(455): Pfam Id: PF08031 Pfam Desc: Berberine and berberine like
  misc_feature (3)..(472): NCBI GI: 242812682 Blast Desc: isoamyl alcohol oxidase, [Talaromyces stipitatus ATCC 10500] gi|218714347|gb|EED13770.1| isoamyl alcohol oxidase, [Talaromyces stipitatus ATCC 10500]
  misc_feature (5)..(472): NCBI GI: 255953123 Blast Desc: Pc21g02500 [Penicillium chrysogenum Wisconsin 54-1255] gi|211589025|emb|CAP95147.1| Pc21g02500 [Penicillium chrysogenum Wisconsin 54-1255]
  misc_feature (2)..(475): NCBI GI: 169775409 Blast Desc: [Aspergillus oryzae RIB40] gi|83770035|dbj|BAE60170.1| protein product [Aspergillus oryzae]
  misc_feature (5)..(468): NCBI GI: 226497508 Blast Desc: LOC100274467 [Zea mays] gi|194708088|gb|ACF88128.1| [Zea mays]
  misc_feature (5)..(464): NCBI GI: 159122921 Blast Desc: isoamyl alcohol oxidase, [Aspergillus fumigatus A1163]
  misc_feature (5)..(464): NCBI GI: 70982616 Blast Desc: isoamyl alcohol oxidase [Aspergillus fumigatus Af293] gi|66844460|gb|EAL84798.1| isoamyl alcohol oxidase, [Aspergillus fumigatus Af293]
  misc_feature (5)..(468): NCBI GI: 145231405 Blast Desc: An02g00460 [Aspergillus niger] gi|134056086|emb|CAK96261.1| protein product [Aspergillus niger]
  misc_feature (5)..(489): NCBI GI: 119488562 Blast Desc: FAD binding domain protein [Neosartorya fischeri NRRL 181] gi|119410889|gb|EAW20834.1| FAD binding domain protein [Neosartorya fischeri NRRL 181]
  misc_feature (5)..(475): NCBI GI: 169778333 Blast Desc: [Aspergillus oryzae RIB40] gi|83772369|dbj|BAE62499.1| protein product [Aspergillus oryzae]
  misc_feature (5)..(475): NCBI GI: 238495640 Blast Desc: isoamyl alcohol oxidase, [Aspergillus flavus NRRL3357] gi|220695706|gb|EED52049.1| isoamyl alcohol oxidase, [Aspergillus flavus NRRL3357]
MPSNNATCNQGSVPAYYLEVLQGSDVTAALAFARQHNVTLSVKNAGHDFMTRNSGKNTLNLWTQNMQGMEYHDSFVPKGCTEDAGRVMVLGAGVPSGDAHIFADEHDSVILGPYSPTVAVSAGWLLGGGHGVLGPVYGMGADRVVEFNIVTPDGKERTVNKCQDPDLFFALRGGGGSSFGVVLNATHSVIPRKPLAFANVQLPSNISAEVALEWIKLMIDETYEWGRQGWGGHVAGTYVTHFNPVDEFVSDDGTTARESFKRVTDFALAHGGTSDVGVQPNWLYIWNKYLLPLDTMQGGNMGMGSSRLIPDELFTTEEGKNAIWSYIKSAAELGFNPVSFYTPVSTPYVYQRLNDPEAFAKMEIGTSLTPAWYKSLWHMQTIGLMAWNSSYDARLEFITNLTNATVQSEVLAGPDAGSHFNEANPFMTGWQTSYYGRENYEKLLKIKAKYDPENILTCWKCVGFVDTQDIDSSRYHCQGKLQNEVYAALGLKPSS

SEQ ID NO: 15354 - DNA, 6840 bp, Muscodor strobelii
  misc_feature: SGI EST ID NO. CUFF.36520.2
  misc_feature: Variant of the nucleotide sequence at SEQ ID NO 15352
taattccttgcctctgtcctgggagatctcgggaatgtacgtaagcttcgaaggattgaagagatcgacatttagataaatgctgttgttatcaggaatggcgttctctcgaacactatctcctaattcccattccgacggtgcggtgtcgtcgttctatgtaaggccatgaagctcacacaccaaatcgcctgtctgttgactggcgcgagccttggggtatcatattccttcccatcatggaactccctaaattcaacagtcggtggtcgtctaagagcaaatccaccgatagcactcccatgttacacatcatacaacggtgaagcgaacacagtagacgacccaagatgcacaacagtccggcagaactggaaatcaggagacttccggacgaactacccaggtgcctacatgaacctgcagagcgaagtctgtctctctgagcctagcgatcagtgcgtgttggataattcgatgatacccgccggtatgccttcgaataacgctacctgcaaccaggggagcgtgccagcgtattatctcgaggtgcttcagggatcggacgtcactgctgcgctggcgtttgcgagacagcataatgttacgctgagtgtcaagaatgctggacatgactttatgacgagaaactcggggaagaatacgttgaatctttggacgcagaatatgcagggcatggaatatcatgattcgtttgttccgaagggatgtacggaggatgctgggagagtcatggttcttggcgcgggtgttcctagtggtgatgcgcatatcttcgcagatgagcatgatagtgtgattcttggtccctattcgccaactgttgcggtgtctgctgggtggctattgggcggtggtcacggtgttctaggaccagtatacggaatgggagcagacagagtagtagagttcaacatcgtaacaccagacggcaaagagcgtaccgtcaacaaatgtcaagatcccgatcttttcttcgccctgcgaggcggcggtggaagcagcttcggtgtcgtcctcaacgctacgcatagcgttatcccgcgcaaaccccttgctttcgccaacgttcagctcccatcgaatatatcagccgaagtcgcgttggaatggatcaaactgatgatagacgagacttacgaatggggtcgtcaaggctggggcggtcacgtcgctggtacctacgttacgcacttcaatcccgtggacgagtttgtatccgacgatggcacaacagctcgggagtcgtttaagcgcgtaacagacttcgcacttgctcacggcggaacgagcgatgtcggcgtgcagccaaactggctttatatctggaataaatacctcttgcccctcgacacgatgcaaggcggtaacatgggtatgggttccagtcgactaattcccgatgaactcttcaccacagaggaaggaaagaatgcgatttggtcttatatcaaatcagccgccgaactcggtttcaaccccgtgagcttctacacgcccgtctcgacgccgtacgtttaccagcgcctgaatgaccctgaggcgtttgccaagatggagatcggcacatctttgactccagcttggtacaagtcgctctggcatatgcagacgatcggtctgatggcttggaacagctcttatgacgcgcgtctcgaattcatcaccaatcttaccaatgccaccgtgcagtccgaggttctcgcaggtcctgacgccggttcacattttaacgaggcaaacccatttatgacgggatggcaaacgtcttactatggacgtgagaactacgagaagctcctcaagatcaaagccaaatatgatcctgaaaatatcctgacgtgctggaagtgcgttggcttcgtggacactcaagatatcgactcgtcgcgttatcattgccagggaaagcttcaaaatgaagtctacgctgctttgggcttaaagccgagctcatgaactagactctaatttactagtggccataaccaataatacaaattaattagcacatgttcgagtcaagcaagtctcgctctttcctgcaaaagagcatttcggtccttgaaactcatgatgtatgggtatcttataattatgtatatgaacaagctcgtggatctctcatcgacgtagctttggttattacaagccagctacaaacgacactggtcgtgatgccgaacaacggagacgagactctataccaatgggcagaaacactattcgacccagtgcctgtttgagactccttttagtgaccgtccttaactctcaaaacaccatgaaatgcagaccctgagttcgatttgtaagttacccgccattcgcgaaattacttaagcccaaacccttcactctcgttgaccgctcgccaaaggaactgttcaagtcgctcacgagaccggtattgatacagtgataaagtattgaaacaagtccgagcggaagggtaccgtccttcatcttcgccaaggcattgaatcctgatgatgagagatgctgcacccatagccggaattcgatcgctacccgtgatgaaggtcaacagcctacgctgatccttcggcgatgcgttctcaaacgtgtcccaaaaccagccaatagatttgtcagattttccattcggccagttgaaataagtagcgactgcttttagcgacgctatatcgagagcttcatccgaacctcgaacgaggagctcgatctcttcgggaccgaatagggttaatgggttgccggcacataccgtgaagaaaccgcgcttgaacggttcgaattggcgagtcacggacgtgtcgagaagatatctcacataaaggtctacatattccttgcgatttgcgtttgtgaccatccttgtctcgcccccggtacagagagctacccgctgacgggatccgtacctctcgacgtctattgcaaagtctaaacagaaagtagactgtacatctccgtcaaactcaagtagctgccgaaggcctctggccagcgctgggcgaagttctgagagatcatctagcgtgtaattcattgctggccgagagtgcccaggggtgccggcggccggcggcggtgctgcggcgagaagtttccgaaaggcaaagggaggaaatgcgacatctaatattgtggaattgtaaatagcgaggccaaagacaacgccgactaagaaatattggtccgatgtctcgaatgtattcgagttgaagtagcaaaatttcgaatcttcatcgtaaacaaagaggcctacttataggttagcatccaatacaaccattcaaaagagagcttactgaccatggtcgggattaaagacttccctcacaaggagtagaaaccattctttccgcaaccctccgccgtcaacgccttcttctccacgaaattcaattcgaagagccttcttgatgtcctcactgccgctgccgaccacctcgctgacctgcttcagactgtcgtctactaaacactctcggcggacgcggagtgtaagatattgcgtataattcctatttgacattatactgtcgaagaaagcttctcgcgccttgcccgccatttgtcgtttggcgtcgaactcgagaatttggatttttgcccagatacttaggaagaaagggtattggcaaaatgtgaatttgccccttttcgattcccatagttcgaagtcgagcttgaaatccaaggtatcgactaatgtgttgtaaaagtcgcctgctgaaaggatatgtccttgccttcgtccttcaaaggagtgagactttcgggcacgcgtatggtagtttgcagcgactagcaaagccatcactctggccgcggctctcagctgccagtcatcggtatatggtgctggattcacgtctagtggctgtttgtgtttccgcggtgactttgagggctgcagagctgcgtagagagtagccggtgtgtttccagcccgaccgctggacatatgcggaattaaaccatctgtgacatcaattttgggatcactctttctctcattttgtcgaatgagtcgataagtcacgaaggtaccaatgaggtcttttgtctgaaggaatagatgttccggcaatctagacagccacgttattaggtgtagatggcatatctcggaagaattggccaaaagacctaatattctcttgatgatcccagaatgccggcccataggcgactttccctccccatctagaagctttgcttgtcttttccctttctctttacttggtagctgaaagtgtccagcaaatgactcgtgctttggtaataaaagagggttggcgaggacaatgattaggaagcgcacatcttgcggttcggccataagtcgtcctggtcgcttcaacagcatctccgtgcatttcagcaaagccctctgaagatgactttgtgcctcaatggcggtttcttcgaaatttcttgattccaactccgtcaatgttggcatcaaatttgctcgaattaattcatcacggacctctgtccataaagaagcagcattagtcacagcgtaataccactccatggccacggcccaatcaatgcggggcgaccgaggagtcacaatcgacggcttttcttcgtgacgccgcaatgaactttgcgcaggagctacctcgtcttggtttcccgtccaccatagcccattttcggcaaaattgcccagaagaagtaatttaggatcaagctcagaaattgtaggatcctctcgcacgtgatccctgcttgaatctgcgatggagcgtcgcatggtttcggcaggccctcttgcactaacactcgatcgacgaggaatgaaggagctgttaatacatgaatgcgacccaaaacacgcaacgagatagtcctctactctcttaaacattctcttagggtctggaacaggctcttgacggctcgagcttatgtcaccgcctgcgcctggcgatattcctgatggcgacctggtatgaggcgagcttttcatgtcaagatacggtggtacagacatcttggggtcgttggtggatttgtttagcggatttagctccaagtgcagttcttcaaaatcattaaagagagcattatatgcgtattgtttcggacaattattgctaaacggcaaagagttgccggattggtcactacgctctcgggaggcgaaatagtcactggaatgatcagatcttgaggtatccccatcacaaggcgttggttgatagctcgatggtgatcccatggactgcaataatgaaaagcgcaaacagctcttgatcaactgcctcgtataatctaatgatatcgaactcgctacagagggatcgattagcaagctaccggacgagtagacagcactggagacgcacgcatatttactggtgggacaggcggggagggcacatgtgatggcgactgcgagatgccgccacgggctggccggcgaatgactggcctagcgactgagggagtatatggctggagatcgttgatggtcaaacatttggtgcacctgatgatttgagctggtcttggccatcttatcaggctggcacaagtcatacaattcccagttataaattcggtgggcccagaaggaatgccgtttccgctgctcgcttgcgacggaccctgcgccatcttattcttgctcttgtcatggccattggggagttcgtcttggtcgccttcgctgtcgaggtcgatgtcgatgttcttcttctttttggagaacagagaggggaacggattgctcatggaccgcgaatgtttgctgactggtcttgtgttgtggttggtaatatgggggttcgagcgatcgtcgtcgccggcgacggggtctcgagggacatttaacagactacgcagagggaggggcagttcgggtggcctcgaatatgctctaggtcgcggagaagggtcattgacgactagatcgcgcagggtgaagtcatattgaccgaacgaaggcctatttgtgcggccgtacatggcggcagcatggggaagctagcggacgctgactcaagtgcagatacagctggcagctaggaccttaaggacgagcgttgactgcttctgcatctggtgggttggtctgcaaaccaaaggtgaggaggcagtagcagcttgcagaagacgatatgtcgaagctgcaacggagagggtgggaatgagggagagtagagcgacgacggtgacgtatagtggctgggaggacgaggtcgggacgctagatgcgagagaaggttcccagggctctcaatccacctctcataaagaagctcacgaggtcgactttgtcacgcactggcacactagtcaccatcgaggcaatggcatttgacgggcacacctgaagagccggctgaggtgaggctgagggctggatcatcactgcatgtcagaccacagcatgcggatgaggaaagctgttggaggttgtcacgaccaagctggggtagggtatggtatgtatcaggggacgcaatgcatgccgcctatgtctatattaaagtgtgcagacccggcagagtgcctgatatcaagtacaaaaggggtagaatttgggaaaagaaagagcttgaatggggacaaggccgctctcagacgtagcagcagttaggggaatgctcaactgcaattgtaatacgaagtgagttgacgacgaatcacccttttgaaaccccatcctcgaccgcgaaaaggacccctctgtttctgcctctgccttttggccccggactaaacccaggatggcccccttgtcaaatgcaatgccacccaaagcttcccatgaagaaaacgcaaccaatctcgcggtcgcccacattc

SEQ ID NO: 15355 - DNA, 1419 bp, Muscodor strobelii
  misc_feature: SGI cDNA ID NO. 565084
  misc_feature: Encodes the peptide sequence at SEQ ID NO 15356
atggctgcgcctgtcgtaaccgtcggcgagacgaaggagttacgcggcctgaacctcatccaagcacactctcacatccgcggacttggcgtcgatgccgactcgttagaaccccgcgcctcctcccagggtcttgtcggccaggagaaggctcgcaaggctgccgccgtcatattagagatgattaaggtcggcaagatcgccggccgcgctgtcctcatcgccggtcccccgagtaccggcaagacggccatcgccatgggcatggctcagtcgctcggcccagacgtccccttcaccaccctcgcctcgtccgagatcttctccctcgaaatgtccaagaccgaggccctcacccaagccttccggaaatcgataggtgtgcgcatcaaggaggagtccgagatcatggagggcgaggtcgtcgagatccagatcgaccgcagtgtcaccggaggcgcaaagcagggcaagctcaccataaaaacgactgacatggaggccgtgtacgacatgggctccaagatgatcgatgccatgactaaggagcgcgtcatggccggcgacatcatcagcatcgacaagagcagcggcaagatcaccaagctcggccgcagctatgcacggagtcgcgactacgacgccatgggtgtcgacaccaagttcctacagtgtcccgatggcgagctgcagaagcgcaaggaggtcgttcacactgtcactctgcacgagatcgacgtcatcaactcacgaacacaaggttttcttgcactcttcagtggcgacaccggcgagatccgaagtgagattcgggaccagatcgacactaaggtgggagaatggaaggaagaaggaaaagccgagatcgtccctggcgttctcttcatcgacgaggtccacctactcgacattgaatgcttcagctacgtcaaccgcgctttagaagacgacctggccccggtcgtcatcatggctagcaacagaggaatctccaagatccggggtacagactaccgcagcccacacggtctaccacttgacttcttagatcgtgttgtcattatccagaccaaggcgtacagtccagaagagatccaacaaatcctaggcatccgagcgcaggaggaagaggtggacgtctcgcccgacgctctcgcattgctcaccaagatcggccaggagaccggtctccgctacgcgtcaaatctgattacgacgtcacaactgatttgcgccaaacgcaaggcacaccaggtcaccattgaggatgtgcagcgctctttcaagctattctacgaccctgctcgcagcatcagcttcgtatcacaatctgagaagcgactcatcggcaacgatggcgctgtcgacttcaccgtgactaatggacacggaactggcgatgctatggagattagctga

SEQ ID NO: 15356 - protein, 472 aa, Muscodor strobelii
  misc_feature: SGI Peptide ID NO. 565084
  misc_feature (123)..(434): Pfam Id: PF06068 Pfam Desc: TIP49 C-terminus
  misc_feature (3)..(472): NCBI GI: 154288480 Blast Desc: HCAG_02082 [Ajellomyces capsulatus NAm1] gi|150408676|gb|EDN04217.1| HCAG_02082 [Ajellomyces capsulatus NAm1]
  misc_feature (1)..(472): NCBI GI: 238844312 Blast Desc: transcriptional regulator [Microsporum canis CBS 113480]
  misc_feature (3)..(472): NCBI GI: 240276919 Blast Desc: RuvB-like helicase [Ajellomyces capsulatus H143]
  misc_feature (17)..(472): NCBI GI: 67516091 Blast Desc: AN0327.2 [Aspergillus nidulans FGSC A4] gi|74681526|sp|Q5BGK3.1|RUVB2_EMENI RecName: Full=RuvB-like helicase 2 gi|40746577|gb|EAA65733.1| conserved [Aspergillus FGSC
  misc_feature (1)..(462): NCBI GI: 258571635 Blast Desc: UREG_04138 [Uncinocarpus reesii 1704] gi|237904891|gb|EEP79292.1| UREG_04138 [Uncinocarpus reesii 1704]
  misc_feature (5)..(472): NCBI GI: 210076256 Blast Desc: YALI0E31449p [Yarrowia lipolytica] gi|223634706|sp|Q6C3X6.2|RUVB2_YARLI RecName: Full=RuvB-like helicase 2 gi|199426978|emb|CAG80240.2| YALI0E31449p [Yarrowia
  misc_feature (9)..(472): NCBI GI: 6325021 Blast Desc: Essential protein involved in transcription regulation; component of chromatin remodeling complexes; required for assembly and function of the INO80 complex; also referred to
  misc_feature (9)..(472): NCBI GI: 259149922 Blast Desc: Rvb2p [Saccharomyces cerevisiae EC1118]
  misc_feature (2)..(464): NCBI GI: 126133044 Blast Desc: transcriptional regulator [Pichia stipitis CBS 6054] gi|126094872|gb|ABN65018.1| transcriptional regulator [Pichia stipitis CBS 6054]
  misc_feature (2)..(468): NCBI GI: 50420731 Blast Desc: DEHA0D11000g [Debaryomyces hansenii CBS767] gi|74688911|sp|Q6BSB8.1|RUVB2_DEBHA RecName: Full=RuvB-like helicase 2 gi|49654569|emb|CAG87056.1| DEHA2D10054p [Debaryomyces
MAAPVVTVGETKELRGLNLIQAHSHIRGLGVDADSLEPRASSQGLVGQEKARKAAAVILEMIKVGKIAGRAVLIAGPPSTGKTAIAMGMAQSLGPDVPFTTLASSEIFSLEMSKTEALTQAFRKSIGVRIKEESEIMEGEVVEIQIDRSVTGGAKQGKLTIKTTDMEAVYDMGSKMIDAMTKERVMAGDIISIDKSSGKITKLGRSYARSRDYDAMGVDTKFLQCPDGELQKRKEVVHTVTLHEIDVINSRTQGFLALFSGDTGEIRSEIRDQIDTKVGEWKEEGKAEIVPGVLFIDEVHLLDIECFSYVNRALEDDLAPVVIMASNRGISKIRGTDYRSPHGLPLDFLDRVVIIQTKAYSPEEIQQILGIRAQEEEVDVSPDALALLTKIGQETGLRYASNLITTSQLICAKRKAHQVTIEDVQRSFKLFYDPARSISFVSQSEKRLIGNDGAVDFTVTNGHGTGDAMEIS

SEQ ID NO: 15357 - DNA, 2025 bp, Muscodor strobelii
  misc_feature: SGI EST ID NO. CUFF.36432.0
  misc_feature: Variant of the nucleotide sequence at SEQ ID NO 15355
cgcggttgtagtaggtagcagcagttcatgcgctgcgagctaggtacagctacttttgaataattcgtccctcgtcgtccttctgcgtctctttgcctgccgccaccacacctcgcccggctctgctctacacacatcagaccacttgtagaccattctttcctcgatcgcccacaacactcatcaacacgccaaataacacccattgattgccaagtcaagcactcaacatggctgcgcctgtcgtaaccgtcggcgagacgaaggagttacgcggcctgaacctcatccaagcacactctcacatccgcggacttggcgtcgatgccgactcgttagaaccccgcgcctcctcccagggtcttgtcggccaggagaaggctcgcaaggctgccgccgtcatattagagatgattaaggtcggcaagatcgccggccgcgctgtcctcatcgccggtcccccgagtaccggcaagacggccatcgccatgggcatggctcagtcgctcggcccagacgtccccttcaccaccctcgcctcgtccgagatcttctccctcgaaatgtccaagaccgaggccctcacccaagccttccggaaatcgataggtgtgcgcatcaaggaggagtccgagatcatggagggcgaggtcgtcgagatccagatcgaccgcagtgtcaccggaggcgcaaagcagggcaagctcaccataaaaacgactgacatggaggccgtgtacgacatgggctccaagatgatcgatgccatgactaaggagcgcgtcatggccggcgacatcatcagcatcgacaagagcagcggcaagatcaccaagctcggccgcagctatgcacggagtcgcgactacgacgccatgggtgtcgacaccaagttcctacagtgtcccgatggcgagctgcagaagcgcaaggaggtcgttcacactgtcactctgcacgagatcgacgtcatcaactcacgaacacaaggttttcttgcactcttcagtggcgacaccggcgagatccgaagtgagattcgggaccagatcgacactaaggtgggagaatggaaggaagaaggaaaagccgagatcgtccctggcgttctcttcatcgacgaggtccacctactcgacattgaatgcttcagctacgtcaaccgcgctttagaagacgacctggccccggtcgtcatcatggctagcaacagaggaatctccaagatccggggtacagactaccgcagcccacacggtctaccacttgacttcttagatcgtgttgtcattatccagaccaaggcgtacagtccagaagagatccaacaaatcctaggcatccgagcgcaggaggaagaggtggacgtctcgcccgacgctctcgcattgctcaccaagatcggccaggagaccggtctccgctacgcgtcaaatctgattacgacgtcacaactgatttgcgccaaacgcaaggcacaccaggtcaccattgaggatgtgcagcgctctttcaagctattctacgaccctgctcgcagcatcagcttcgtatcacaatctgagaagcgactcatcggcaacgatggcgctgtcgacttcaccgtgactaatggacacggaactggcgatgctatggagattagctgaacaagtacgtcttcaacaagcattattctacaaaagttcggccatgtaactcatgcatgagaggtgaatgtgaggctctgtgtctatgggagggattatggcgttgctgttttgccacggcgtttgaaggatacgaaaagatcgacaggctgcgtcaaacagtaattgacgagatagatatcacgtgtactatagatgtagaagaccatggacaattgtaacaggactgcttgcaatgtcagaggaactctttatatgcttgccgctcctgttttgtccagctacaacattatgaactcaagagaaaccattgacagctgctcattcaaggtcacgccttgaaatatgatggcgtcgtgaggctaggcaattacta

SEQ ID NO: 15358 - DNA, 1416 bp, Muscodor strobelii
  misc_feature: SGI cDNA ID NO. 565085
  misc_feature: Reduced expression when VOC is produced
  misc_feature: Encodes the peptide sequence at SEQ ID NO 15359
atgcagcctgtcgtaaccgtcggcgagacgaaggagttacgcggcctgaacctcatccaagcacactctcacatccgcggacttggcgtcgatgccgactcgttagaaccccgcgcctcctcccagggtcttgtcggccaggagaaggctcgcaaggctgccgccgtcatattagagatgattaaggtcggcaagatcgccggccgcgctgtcctcatcgccggtcccccgagtaccggcaagacggccatcgccatgggcatggctcagtcgctcggcccagacgtccccttcaccaccctcgcctcgtccgagatcttctccctcgaaatgtccaagaccgaggccctcacccaagccttccggaaatcgataggtgtgcgcatcaaggaggagtccgagatcatggagggcgaggtcgtcgagatccagatcgaccgcagtgtcaccggaggcgcaaagcagggcaagctcaccataaaaacgactgacatggaggccgtgtacgacatgggctccaagatgatcgatgccatgactaaggagcgcgtcatggccggcgacatcatcagcatcgacaagagcagcggcaagatcaccaagctcggccgcagctatgcacggagtcgcgactacgacgccatgggtgtcgacaccaagttcctacagtgtcccgatggcgagctgcagaagcgcaaggaggtcgttcacactgtcactctgcacgagatcgacgtcatcaactcacgaacacaaggttttcttgcactcttcagtggcgacaccggcgagatccgaagtgagattcgggaccagatcgacactaaggtgggagaatggaaggaagaaggaaaagccgagatcgtccctggcgttctcttcatcgacgaggtccacctactcgacattgaatgcttcagctacgtcaaccgcgctttagaagacgacctggccccggtcgtcatcatggctagcaacagaggaatctccaagatccggggtacagactaccgcagcccacacggtctaccacttgacttcttagatcgtgttgtcattatccagaccaaggcgtacagtccagaagagatccaacaaatcctaggcatccgagcgcaggaggaagaggtggacgtctcgcccgacgctctcgcattgctcaccaagatcggccaggagaccggtctccgctacgcgtcaaatctgattacgacgtcacaactgatttgcgccaaacgcaaggcacaccaggtcaccattgaggatgtgcagcgctctttcaagctattctacgaccctgctcgcagcatcagcttcgtatcacaatctgagaagcgactcatcggcaacgatggcgctgtcgacttcaccgtgactaatggacacggaactggcgatgctatggagattagctga

SEQ ID NO: 15359 - protein, 471 aa, Muscodor strobelii
  misc_feature: SGI Peptide ID NO. 565085
  misc_feature (122)..(433): Pfam Id: PF06068 Pfam Desc: TIP49 C-terminus
  misc_feature (1)..(471): NCBI GI: 116204725 Blast Desc: conserved [Chaetomium globosum CBS 148.51] gi|88176374|gb|EAQ83842.1| conserved [Chaetomium globosum CBS 148.51]
  misc_feature (5)..(471): NCBI GI: 256732952 Blast Desc: TBP-interacting protein [Nectria haematococca mpVI 77-13-4]
  misc_feature (4)..(466): NCBI GI: 85110233 Blast Desc: NCU06854 [Neurospora crassa OR74A] gi|74697042|sp|Q873C7.1|RUVB2_NEUCR RecName: Full=RuvB-like helicase 2 gi|28881201|emb|CAD70382.1| RUVB-like protein crassa]
  misc_feature (12)..(466): NCBI GI: 46123765 Blast Desc: FG06260.1 [Gibberella zeae PH-1] gi|84029465|sp|Q4I948.1|RUVB2_GIBZE RecName: Full=RuvB-like helicase 2
  misc_feature (6)..(471): NCBI GI: 156063968 Blast Desc: conserved [Sclerotinia sclerotiorum 1980] gi|154697436|gb|EDN97174.1| conserved [Sclerotinia sclerotiorum 1980]
  misc_feature (4)..(471): NCBI GI: 154303558 Blast Desc: conserved [Botryotinia fuckeliana B05.10] gi|150854661|gb|EDN29853.1| conserved [Botryotinia fuckeliana B05.10]
  misc_feature (3)..(460): NCBI GI: 171690276 Blast Desc: protein product [Podospora anserina] gi|170945086|emb|CAP71197.1| protein product [Podospora anserina]
  misc_feature (5)..(463): NCBI GI: 39942186 Blast Desc: conserved [Magnaporthe grisea 70-15] gi|145015845|gb|EDK00335.1| conserved [Magnaporthe grisea 70-15]
  misc_feature (3)..(471): NCBI GI: 189195908 Blast Desc: reptin [Pyrenophora tritici-repentis Pt-1C-BFP] gi|187980171|gb|EDU46797.1| reptin [Pyrenophora tritici-repentis Pt-1C-BFP]
  misc_feature (3)..(471): NCBI GI: 115396776 Blast Desc: ATEG_04849 [Aspergillus terreus NIH2624] gi|114193596|gb|EAU35296.1| ATEG_04849 [Aspergillus terreus NIH2624]
  misc_feature: Useful for introducing or modulating the production of volatile compounds
MQPVVTVGETKELRGLNLIQAHSHIRGLGVDADSLEPRASSQGLVGQEKARKAAAVILEMIKVGKIAGRAVLIAGPPSTGKTAIAMGMAQSLGPDVPFTTLASSEIFSLEMSKTEALTQAFRKSIGVRIKEESEIMEGEVVEIQIDRSVTGGAKQGKLTIKTTDMEAVYDMGSKMIDAMTKERVMAGDIISIDKSSGKITKLGRSYARSRDYDAMGVDTKFLQCPDGELQKRKEVVHTVTLHEIDVINSRTQGFLALFSGDTGEIRSEIRDQIDTKVGEWKEEGKAEIVPGVLFIDEVHLLDIECFSYVNRALEDDLAPVVIMASNRGISKIRGTDYRSPHGLPLDFLDRVVIIQTKAYSPEEIQQILGIRAQEEEVDVSPDALALLTKIGQETGLRYASNLITTSQLICAKRKAHQVTIEDVQRSFKLFYDPARSISFVSQSEKRLIGNDGAVDFTVTNGHGTGDAMEIS

SEQ ID NO: 15360 - DNA, 2025 bp, Muscodor strobelii; identical to SEQ ID NO: 15357
  misc_feature: SGI EST ID NO. CUFF.36432.0
  misc_feature: Variant of the nucleotide sequence at SEQ ID NO 15358

SEQ ID NO: 15361 - DNA, 2013 bp, Muscodor strobelii
  misc_feature: SGI cDNA ID NO. 565086
  misc_feature: Encodes the peptide sequence at SEQ ID NO 15362
atgagtcactcaccgaacactactcgtgaaaacggcaacagcaacggcaacaactataattacgtcaacaataatggtagtaacagtcacaccatttccactaccaacgataagacttcgcgggtccggccaaatgacatggcgccgcagcagcaacagtcaaccagcaacgaagctgatctagtcagccgcctcccgccgatcatcctgaaggccaaagatcccgaccaacagcacaggtgtgaagtcttgtatacactactagaaaaacatcgggagcgcagctccttctatgcgcaaaagaggaggcttgagcaagcaaatgagcagaggcgcttagaggcaaacaagacgaaaaccaaggcttcttccttcgccccgtaccaggaatcttctaggttcactgcatttgacaatgaacgaagaaagcaggcagacgccgttgatcgtggcttctctgatgcaatccttaacttctctgcccttgccactggtgggcagccagctgcagtcaatgatccatcagttaatcgacaggttgatcaacggcttgaggcgcaagaaaaggagctcaaagcgcacgatctgcaactcaaggagcagagtaaaaaatcagaagatcaagacacgcagattcaggaattaatcaagaccaatgagcagtacagcaagcaactggcttcctttgaagcgaacttcaagtcctttcagtcggcacaagaagcgatgaagctaagtatcgaagccatccaatcagaaaacgacgctctgaaagtcgacgtccagagcttgaaggccgaaaatcaaggtctgaagaaggagctacaggatgtcgtgaccaaggccgaggatgctgcttcgctcactgatgtagctcaagtgcaggcagaatgcgcgaacttgagcagtcagatggaacgacttgcaggttctaaagatgggtataacaagagactagaagagtttagagaagcgttggccagcatctcggatgaacttccagatatcaaaagtagggccgaagagatggacaccgataccttgaatgagatatgcgaggcatggacagcatttggccctaatctaaaagctgtctacgaagagcatgttcaacagcgcaacagtccagcagtgccatccatagaagccaaagtggagcaactgcagaaagatgtaaagcttttccaaaccgccaaaagcgacctggttcaacccatctctcgcgcttctcccgcaacggcgcagacggatttaacagaggcccaatggaacgccaaaatcgcacagctccagtctcaaatgcttgaggcaatgaatgcccatagcagtcaggtggaggacgttctcgggcaagatatcgacgaacatgagaagcgtatcaaagcactcgagcaggctaagaccagcccatcttcgagcttggatgctcgaattgacaaacttgaaaagatcgacgacaatcgccgtgttgacgtcgaaggcttggctcaaaagtttgaggacatcagcaagaagcagaaggtaatgattgacgatatcgcaactattctaagaagatatcaggatattcaaaacgccacgaagccggagcagagtccaagtcttagcgcagaacagcaagaaaagctgaattttcttgacgctatggttgcggagctcaagaaaaccacgggccgaatcgatcacaccgtcctagtaatgaatactcaatggagtaacctaacaactaaggacatggctacacagatgcttcagcatctcaatccgtatttcgataagcttttgcctcttgagaagacggtccaagatctggagaaaaagcaaaaccaaatcatcatgcagatcacgccgctcaatgaggttctacgctcattggtgccgggcgagaaacggacagcctcacctaatcatctgggcctcgatgaacctgcgaagaaaaggaggttagatacaaacggtagctcacttccaccgctgcggaaggcaagcagtcacgctctacctcgttcatga

SEQ ID NO: 15362 - protein, 670 aa, Muscodor strobelii
  misc_feature: SGI Peptide ID NO. 565086
MSHSPNTTRENGNSNGNNYNYVNNNGSNSHTISTTNDKTSRVRPNDMAPQQQQSTSNEADLVSRLPPIILKAKDPDQQHRCEVLYTLLEKHRERSSFYAQKRRLEQANEQRRLEANKTKTKASSFAPYQESSRFTAFDNERRKQADAVDRGFSDAILNFSALATGGQPAAVNDPSVNRQVDQRLEAQEKELKAHDLQLKEQSKKSEDQDTQIQELIKTNEQYSKQLASFEANFKSFQSAQEAMKLSIEAIQSENDALKVDVQSLKAENQGLKKELQDVVTKAEDAASLTDVAQVQAECANLSSQMERLAGSKDGYNKRLEEFREALASISDELPDIKSRAEEMDTDTLNEICEAWTAFGPNLKAVYEEHVQQRNSPAVPSIEAKVEQLQKDVKLFQTAKSDLVQPISRASPATAQTDLTEAQWNAKIAQLQSQMLEAMNAHSSQVEDVLGQDIDEHEKRIKALEQAKTSPSSSLDARIDKLEKIDDNRRVDVEGLAQKFEDISKKQKVMIDDIATILRRYQDIQNATKPEQSPSLSAEQQEKLNFLDAMVAELKKTTGRIDHTVLVMNTQWSNLTTKDMATQMLQHLNPYFDKLLPLEKTVQDLEKKQNQIIMQITPLNEVLRSLVPGEKRTASPNHLGLDEPAKKRRLDTNGSSLPPLRKASSHALPRS

SEQ ID NO: 15363 - DNA, 4602 bp, Muscodor strobelii
  misc_feature: SGI EST ID NO. CUFF.36448.0
  misc_feature: Variant of the nucleotide sequence at SEQ ID NO 15361
gccatcttttccatttgtcacctaacagtaccgtgcccaatgattttcagcccttttgcgttcgcattccatctcgtgcacacctacctcagcaaacgacgtgttttgcaagcggcacctgcctcctctctcctctttcactactctgtctcgtccgggcctttcatacctctgtcctccgtgaatgtgcgaccgagtactcgggtatcggtttgccaagacacagcagccattcgcgtaattgctatcgagttacgcgacactccgcccgtcgcgactgccgtctattttcttgcaccttcagcccccgagtcgacattgaatgttgggcactttagctgggatgaagcgattggcgccgtagcaactgcaacatgggaagccgtcacccccacgacttcggtcgcgagaggccttcttactgggaaaataactatcgaccctccgagcacgaccgcaacaagccacctacaggcccaaggaatcaccatccgcagagccccgtagactcaagatccccgcgagactatcgtaatgggaataggcttccatcacgacctcagcgaccggaaaacaatcgatccgctagcgcaatgagtcactcaccgaacactactcgtgaaaacggcaacagcaacggcaacaactataattacgtcaacaataatggtagtaacagtcacaccatttccactaccaacgataagacttcgcgggtccggccaaatgacatggcgccgcagcagcaacagtcaaccagcaacgaagctgatctagtcagccgcctcccgccgatcatcctgaaggccaaagatcccgaccaacagcacaggtgtgaagtcttgtatacactactagaaaaacatcgggagcgcagctccttctatgcgcaaaagaggaggcttgagcaagcaaatgagcagaggcgcttagaggcaaacaagacgaaaaccaaggcttcttccttcgccccgtaccaggaatcttctaggttcactgcatttgacaatgaacgaagaaagcaggcagacgccgttgatcgtggcttctctgatgcaatccttaacttctctgcccttgccactggtgggcagccagctgcagtcaatgatccatcagttaatcgacaggttgatcaacggcttgaggcgcaagaaaaggagctcaaagcgcacgatctgcaactcaaggagcagagtaaaaaatcagaagatcaagacacgcagattcaggaattaatcaagaccaatgagcagtacagcaagcaactggcttcctttgaagcgaacttcaagtcctttcagtcggcacaagaagcgatgaagctaagtatcgaagccatccaatcagaaaacgacgctctgaaagtcgacgtccagagcttgaaggccgaaaatcaaggtctgaagaaggagctacaggatgtcgtgaccaaggccgaggatgctgcttcgctcactgatgtagctcaagtgcaggcagaatgcgcgaacttgagcagtcagatggaacgacttgcaggttctaaagatgggtataacaagagactagaagagtttagagaagcgttggccagcatctcggatgaacttccagatatcaaaagtagggccgaagagatggacaccgataccttgaatgagatatgcgaggcatggacagcatttggccctaatctaaaagctgtctacgaagagcatgttcaacagcgcaacagtccagcagtgccatccatagaagccaaagtggagcaactgcagaaagatgtaaagcttttccaaaccgccaaaagcgacctggttcaacccatctctcgcgcttctcccgcaacggcgcagacggatttaacagaggcccaatggaacgccaaaatcgcacagctccagtctcaaatgcttgaggcaatgaatgcccatagcagtcaggtggaggacgttctcgggcaagatatcgacgaacatgagaagcgtatcaaagcactcgagcaggctaagaccagcccatcttcgagcttggatgctcgaattgacaaacttgaaaagatcgacgacaatcgccgtgttgacgtcgaaggcttggctcaaaagtttgaggacatcagcaagaagcagaaggtaatgattgacgatatcgcaactattctaagaagatatcaggatattcaaaacgccacgaagccggagcagagtccaagtcttagcgcagaacagcaagaaaagctgaattttcttgacgctatggttgcggagctcaagaaaaccacgggccgaatcgatcacaccgtcctagtaatgaatactcaatggagtaacctaacaactaaggacatggctacacagatgcttcagcatctcaatccgtatttcgataagcttttgcctcttgagaagacggtccaagatctggagaaaaagcaaaaccaaatcatcatgcagatcacgccgctcaatgaggttctacgctcattggtgccgggcgagaaacggacagcctcacctaatcatctgggcctcgatgaacctgcgaagaaaaggaggttagatacaaacggtagctcacttccaccgctgcggaaggcaagcagtcacgctctacctcgttcatgaaccagcttgatggtcaaacctgctctatatttttgactgattatgtgcgcaccggatataccccttgcttttgctgtgtttatggcgtttacgggcaggcactgggcgtttcttaggagttgcgtgggcgggccacacggtgtcacaggatcggagatctatgtggatctgactgtgatcacgattcatagcatcggcgccatgcgttcgtgggatgtgcgacgctttcgttatagaaatgagataatagggggaatgggctgggcaacccgtccatagtcatcttgtatgatacccccatgaacatagtgctctaataggatcgggcagttgctcaaaagaccaatgtgtacacagcaatgaatgtgatgccatttgctgtcatggtcgttacgagctgatcgtagagaaagagcgaaaaattttaataactctgctaataaaatggcggaagaacgaataggatatgtaattgtgatatgaactgttattgatctgcgttggaacattcaacggacaagagattcgaaattatgtgaggagttcaggaaccaatacatcgtgatcgccacaggcacaagacggttgagatctcgtcaagtcgtttgcctccagatacgaacacaagacccttgtagtttcaatgacaattcctaaatgattcataactgtattcgtgacgatctatcatcgcttcatctagtctgtccttttagttttgtatatgcctcaacgccgtatgtatgcctcaatttttgtatgccttttcaagaccatttgtactgtgttatgtgacacatgctatatgctttgtagttccgcatccctgagatctcacctcaaagattcaataacccgccattctcgtaactcataacaatttcaagccaccagtgacctgatccacgaggctcttgggcgcaggcccaacaccaagaacagtcaaactaccaggatcgatctgtgtacgcccagcatcctgtatgacctcggccgtgatgccgaggctccgggccgtgcccatgagcgtgagcaactcgtcttcggacttgacctggaccgcgactttcgcctgtcctaggttctcccagcgcttgagaagcatggcttcggtagatgacgggttgcgggctgcgccgcgggagagcgtcttgtagcaggctagggtggcgtgggagcattgcgctgctatcttgcctttggtcatgccgagatctgtgcgcacgacgagcatgagtttgcattcttcgttgggatttgttcctgcgttgatggtggattctcgcgggtgtgcggcttcggcgtctttctttgcgcttcttggggttgaggggatgttctcttctggggaatcattctgcttctttttcttgtcgttcttttcgtcattgttttcaacgcgtagaccctgccgtctgtctgcctctacgccattcacccagttaggggcgtggtcgaggatcgtgtcatgttcgtctatgtcggattcttcggactcgggagcgtcggcgagaaaccgcttgcgctctgtgacgagctcgggagatatgagatagccccttatggagtagatgccgagggcgaacccggagaggaaggctactagggatgtggttatgaccacggttgagatgttgtcggacatggcgagtgcgagtgcccaagtcagcacctgcagtcggggtttggaatgtaggtggatcaagatgttggcgctagttgcgtatttggcatgtatttcggcaattgagtttctttgtttctgaaatttggtgttggagattatataatggtggcacggtagtattggttgggagatcccgttgtagaaaaaacttgggtgaggttacaaatgtgtggaattctatgcagcttggttcgatggtgttgttggcacaaaacttcaaagtcgggttgatttgccccacgtcccccaaacagccttgcagatagctgatgtacaagtctacgggctagttcccaagcttgtgtggat

SEQ ID NO: 15364 - DNA, 1101 bp, Muscodor strobelii
  misc_feature: SGI cDNA ID NO. 565087
  misc_feature: Encodes the peptide sequence at SEQ ID NO 15365
atggaacgacttgcaggttctaaagatgggtataacaagagactagaagagtttagagaagcgttggccagcatctcggatgaacttccagatatcaaaagtagggccgaagagatggacaccgataccttgaatgagatatgcgaggcatggacagcatttggccctaatctaaaagctgtctacgaagagcatgttcaacagcgcaacagtccagcagtgccatccatagaagccaaagtggagcaactgcagaaagatgtaaagcttttccaaaccgccaaaagcgacctggttcaacccatctctcgcgcttctcccgcaacggcgcagacggatttaacagaggcccaatggaacgccaaaatcgcacagctccagtctcaaatgcttgaggcaatgaatgcccatagcagtcaggtggaggacgttctcgggcaagatatcgacgaacatgagaagcgtatcaaagcactcgagcaggctaagaccagcccatcttcgagcttggatgctcgaattgacaaacttgaaaagatcgacgacaatcgccgtgttgacgtcgaaggcttggctcaaaagtttgaggacatcagcaagaagcagaaggtaatgattgacgatatcgcaactattctaagaagatatcaggatattcaaaacgccacgaagccggagcagagtccaagtcttagcgcagaacagcaagaaaagctgaattttcttgacgctatggttgcggagctcaagaaaaccacgggccgaatcgatcacaccgtcctagtaatgaatactcaatggagtaacctaacaactaaggacatggctacacagatgcttcagcatctcaatccgtatttcgataagcttttgcctcttgagaagacggtccaagatctggagaaaaagcaaaaccaaatcatcatgcagatcacgccgctcaatgaggttctacgctcattggtgccgggcgagaaacggacagcctcacctaatcatctgggcctcgatgaacctgcgaagaaaaggaggttagatacaaacggtagctcacttccaccgctgcggaaggcaagcagtcacgctctacctcgttcatga

SEQ ID NO: 15365 - protein, 366 aa, Muscodor strobelii
  misc_feature: SGI Peptide ID NO. 565087
MERLAGSKDGYNKRLEEFREALASISDELPDIKSRAEEMDTDTLNEICEAWTAFGPNLKAVYEEHVQQRNSPAVPSIEAKVEQLQKDVKLFQTAKSDLVQPISRASPATAQTDLTEAQWNAKIAQLQSQMLEAMNAHSSQVEDVLGQDIDEHEKRIKALEQAKTSPSSSLDARIDKLEKIDDNRRVDVEGLAQKFEDISKKQKVMIDDIATILRRYQDIQNATKPEQSPSLSAEQQEKLNFLDAMVAELKKTTGRIDHTVLVMNTQWSNLTTKDMATQMLQHLNPYFDKLLPLEKTVQDLEKKQNQIIMQITPLNEVLRSLVPGEKRTASPNHLGLDEPAKKRRLDTNGSSLPPLRKASSHALPRS

SEQ ID NO: 15366 - DNA, 4602 bp, Muscodor strobelii; identical to SEQ ID NO: 15363
  misc_feature: SGI EST ID NO. CUFF.36448.0
  misc_feature: Variant of the nucleotide sequence at SEQ ID NO 15364

SEQ ID NO: 15367 - DNA, 774 bp, Muscodor strobelii
  misc_feature: SGI cDNA ID NO. 565088
  misc_feature: Reduced expression when VOC is produced
  misc_feature: Encodes the peptide sequence at SEQ ID NO 15368
atgtccgacaacatctcaaccgtggtcataaccacatccctagtagccttcctctccgggttcgccctcggcatctactccataaggggctatctcatatctcccgagctcgtcacagagcgcaagcggtttctcgccgacgctcccgagtccgaagaatccgacatagacgaacatgacacgatcctcgaccacgcccctaactgggtgaatggcgtagaggcagacagacggcagggtctacgcgttgaaaacaatgacgaaaagaacgacaagaaaaagaagcagaatgattccccagaagagaacatcccctcaaccccaagaagcgcaaagaaagacgccgaagccgcacacccgcgagaatccaccatcaacgcaggaacaaatcccaacgaagaatgcaaactcatgctcgtcgtgcgcacagatctcggcatgaccaaaggcaagatagcagcgcaatgctcccacgccaccctagcctgctacaagacgctctcccgcggcgcagcccgcaacccgtcatctaccgaagccatgcttctcaagcgctgggagaacctaggacaggcgaaagtcgcggtccaggtcaagtccgaagacgagttgctcacgctcatgggcacggcccggagcctcggcatcacggccgaggtcatacaggatgctgggcgtacacagatcgatcctggtagtttgactgttcttggtgttgggcctgcgcccaagagcctcgtggatcaggtcactggtggcttgaaattgttatga

SEQ ID NO: 15368 - protein, 257 aa, Muscodor strobelii
  misc_feature: SGI Peptide ID NO. 565088
  misc_feature (144)..(243): Pfam Id: PF01981 Pfam Desc: Peptidyl-tRNA hydrolase PTH2
  misc_feature (1)..(257): NCBI GI: 116199627 Blast Desc: CHGG_07969 [Chaetomium globosum CBS 148.51] gi|88179248|gb|EAQ86716.1| CHGG_07969 [Chaetomium globosum CBS 148.51]
  misc_feature (6)..(257): NCBI GI: 145610569 Blast Desc: MGG_01099 [Magnaporthe grisea 70-15] gi|145017936|gb|EDK02215.1| MGG_01099 [Magnaporthe grisea 70-15]
  misc_feature (8)..(257): NCBI GI: 46117126 Blast Desc: FG04405.1 [Gibberella zeae PH-1]
  misc_feature (8)..(257): NCBI GI: 256729472 Blast Desc: [Nectria haematococca mpVI 77-13-4]
  misc_feature (6)..(257): NCBI GI: 164427967 Blast Desc: NCU01501 [Neurospora crassa OR74A] gi|16416066|emb|CAB91445.2| conserved [Neurospora crassa] gi|157071956|gb|EAA27714.2| conserved [Neurospora crassa OR74A]
  misc_feature (6)..(257): NCBI GI: 171688688 Blast Desc: protein product [Podospora anserina] gi|170944306|emb|CAP70416.1| protein product [Podospora anserina]
  misc_feature (6)..(257): NCBI GI: 154302579 Blast Desc: BC1G_09866 [Botryotinia fuckeliana B05.10] gi|150855355|gb|EDN30547.1| BC1G_09866 [Botryotinia fuckeliana B05.10]
  misc_feature (6)..(257): NCBI GI: 156055412 Blast Desc: SS1G_05058 [Sclerotinia sclerotiorum 1980] gi|154702842|gb|EDO02581.1| SS1G_05058 [Sclerotinia sclerotiorum 1980]
  misc_feature (132)..(257): NCBI GI: 169609066 Blast Desc: SNOG_07618 [Phaeosphaeria nodorum SN15] gi|111063964|gb|EAT85084.1| SNOG_07618 [Phaeosphaeria nodorum SN15]
  misc_feature (128)..(257): NCBI GI: 189200170 Blast Desc: peptidyl-tRNA hydrolase 2, mitochondrial precursor [Pyrenophora tritici-repentis Pt-1C-BFP] gi|187983521|gb|EDU49009.1| peptidyl-tRNA hydrolase 2, precursor
  misc_feature: Useful for introducing or modulating the production of volatile compounds
MSDNISTVVITTSLVAFLSGFALGIYSIRGYLISPELVTERKRFLADAPESEESDIDEHDTILDHAPNWVNGVEADRRQGLRVENNDEKNDKKKKQNDSPEENIPSTPRSAKKDAEAAHPRESTINAGTNPNEECKLMLVVRTDLGMTKGKIAAQCSHATLACYKTLSRGAARNPSSTEAMLLKRWENLGQAKVAVQVKSEDELLTLMGTARSLGITAEVIQDAGRTQIDPGSLTVLGVGPAPKSLVDQVTGGLKLL

SEQ ID NO: 15369 - DNA, 2256 bp, Muscodor strobelii
  misc_feature: SGI cDNA ID NO. 565089
  misc_feature: Encodes the peptide sequence at SEQ ID NO 15370
atggaggatgctgcaaagtcgactcagaccctagcagatcaagtcctacccaagcagccctactatctctccctctcccccacgcgcaagtaccgaatccaccccgacgagaagcgcctagatgagcaagacatcagacatctccagtacaccaccttggtcggtggtgaggcagatcgcggcgtgctgatcacccgcgcctacttcaccgttcgcgacgaccagctcatccccagcaaggcaccagctcccatacccccagtcgaccccaccaagcctcggaagaaggtctcgcttaaagactacaagaagaaggtagagggggaatcgccgccgaaatcaggcgataagcccaacggcttgcctaccgtaaaagagaaggacgaaagcaagagttctacaggcctctctgcgaaagacatggatggccaccgcgatgtcaagaggtctctcgcgaacggaaaggctgagtcaacccatcgacgctctccctctcccgagcgacggaaaaggctacatgacaccgaggacagctccaagcccgcgaagcgcttaaagacggaaaatgcgaccccgaacggcaagacttccgacatcgcgagagaaggaaattcacagaagtctgcacggataaagagcgaggtcaaagagtcgaaatcgatttctgtactgaatggtaaattggcaacgaacaattcgcctcgcggcgtgtcccccaagccttctgcggcaatcaatggccagtcaaaaactgcatcaaatggccaatcgacgcacaagagggcggccagcagcaatgaatcagtcacgcgtccaatcccgaggttgttatcgccattgaatttatcaaagctcatgcccgatgaagtcaacacagactcgccgatggagagtgcccgaccgagtcccaagaagaaaccggtagaatcgggaagcttgaagtcactgcctaagaagccacgagctgaacccgaaacaacacccgttacgaagaagcgcaaaattccacctctgctgtcacctacgttaccagcaattgtcatggaagaactggcgagatttgacaagaaaactggaacaccactgaaagacacgagccaaaagagtagccaggcctccgactctcctgatagttctaaaaaaggcggcaagtttccaaaacatgaggagaccatacacgtggagaacaaggccaagaaggagcaatatctcgtgaccctgaagtataagagacgtcaagcgaagactattgaacgacttctgaatctgcctccctcgggtggcaagaggaaggccgatccgccaagaaaagaggaccgaattcaacgtgaaaggccaggaagtgtagagcctggcacggcacgcaagcgcctaccagcagcagtcgatgccagcgagggatccaagcgacccaagacagcagagagcctgcgtccttccactccaccgaagcaatcaaccacgatgtcgcgaattgcatccagcagctcgcaagcgggaacgcctggcgctgccaatagccttacgccgtctacccagttgactgcggagaaacgacgtccacaagtcgaacccgaaaaggcacaaaaggctgccagacttcatggccgccacaagatcttcatggagctcggaacaaaactcaaacacgagcgagatggcattatgaagggcagagttggaattaaggagcgcgaacatcagattgccgtcgcagccggcatccaatccctgctgctgtatatgtatgcggtcaaatcacagagtgatgcgttcgatttagaacgacagcctcgtcggtcgcagtcctggaaagaggtcctacctttgttcaaagtcgtcaagtctgactgcaagaacaatcacccgctccaggcattgctgtctcgtattgaaggcatttgcgtgagctacatgggtcgatctctgtggttcgcctctaaggaacccaacacgctcgatcaattgatatccgtcaacaggcacgagtccgatgcttggcgcgaagctgatatgacgcgacggaaaatgggaatcttcgacggcaattctagcacctccgatggaggtgcgttgggaaagctggtagaccgactcggcccctggacgactcccgaagaatccattcccgtagctctggaggtcctccgaaaagtgatccgattggatggatcatggaagcctcatgaagaacttaccaaaatcggacatactattaccaatggcgctcctgggcaaaccgcattacgaccttag

SEQ ID NO: 15370 - protein, 751 aa, Muscodor strobelii
  misc_feature: SGI Peptide ID NO. 565089
  misc_feature (1)..(728): NCBI GI: 261356656 Blast Desc: conserved [Verticillium albo-atrum VaMs.102]
  misc_feature (4)..(727): NCBI GI: 39942182 Blast Desc: MGG_03171 [Magnaporthe grisea 70-15] gi|145015847|gb|EDK00337.1| MGG_03171 [Magnaporthe grisea 70-15]
  misc_feature (1)..(728): NCBI GI: 85110227 Blast Desc: NCU06851 [Neurospora crassa OR74A] gi|28881198|emb|CAD70379.1| [Neurospora crassa] gi|28925001|gb|EAA34089.1| [Neurospora crassa OR74A]
  misc_feature (1)..(718): NCBI GI: 46123761 Blast Desc: FG06258.1 [Gibberella zeae PH-1]
  misc_feature (1)..(728): NCBI GI: 256732498 Blast Desc: NECHADRAFT_92522 [Nectria haematococca mpVI 77-13-4]
  misc_feature (335)..(728): NCBI GI: 116204719 Blast Desc: CHGG_10243 [Chaetomium globosum CBS 148.51] gi|88176371|gb|EAQ83839.1| CHGG_10243 [Chaetomium globosum CBS 148.51]
  misc_feature (246)..(636): NCBI GI: 255931613 Blast Desc: Pc12g05160 [Penicillium chrysogenum Wisconsin 54-1255] gi|211581982|emb|CAP80143.1| Pc12g05160 [Penicillium chrysogenum Wisconsin 54-1255]
  misc_feature (324)..(636): NCBI GI: 115385947 Blast Desc: [Aspergillus terreus NIH2624] gi|114187967|gb|EAU29667.1| [Aspergillus terreus NIH2624]
  misc_feature (324)..(636): NCBI GI: 238490087 Blast Desc: conserved [Aspergillus flavus NRRL3357] gi|220698669|gb|EED55009.1| conserved [Aspergillus flavus NRRL3357]
  misc_feature (394)..(727): NCBI GI: 154298231 Blast Desc: [Botryotinia fuckeliana B05.10] gi|150858146|gb|EDN33338.1| [Botryotinia fuckeliana B05.10]
MEDAAKSTQTLADQVLPKQPYYLSLSPTRKYRIHPDEKRLDEQDIRHLQYTTLVGGEADRGVLITRAYFTVRDDQLIPSKAPAPIPPVDPTKPRKKVSLKDYKKKVEGESPPKSGDKPNGLPTVKEKDESKSSTGLSAKDMDGHRDVKRSLANGKAESTHRRSPSPERRKRLHDTEDSSKPAKRLKTENATPNGKTSDIAREGNSQKSARIKSEVKESKSISVLNGKLATNNSPRGVSPKPSAAINGQSKTASNGQSTHKRAASSNESVTRPIPRLLSPLNLSKLMPDEVNTDSPMESARPSPKKKPVESGSLKSLPKKPRAEPETTPVTKKRKIPPLLSPTLPAIVMEELARFDKKTGTPLKDTSQKSSQASDSPDSSKKGGKFPKHEETIHVENKAKKEQYLVTLKYKRRQAKTIERLLNLPPSGGKRKADPPRKEDRIQRERPGSVEPGTARKRLPAAVDASEGSKRPKTAESLRPSTPPKQSTTMSRIASSSSQAGTPGAANSLTPSTQLTAEKRRPQVEPEKAQKAARLHGRHKIFMELGTKLKHERDGIMKGRVGIKEREHQIAVAAGIQSLLLYMYAVKSQSDAFDLERQPRRSQSWKEVLPLFKVVKSDCKNNHPLQALLSRIEGICVSYMGRSLWFASKEPNTLDQLISVNRHESDAWREADMTRRKMGIFDGNSSTSDGGALGKLVDRLGPWTTPEESIPVALEVLRKVIRLDGSWKPHEELTKIGHTITNGAPGQTALRP

SEQ ID NO: 15371 - DNA, 5504 bp, Muscodor strobelii
  misc_feature: SGI EST ID NO. CUFF.36474.0
  misc_feature: Variant of the nucleotide sequence at SEQ ID NO 15369
caattcatcccatgcaacacacgctccacccccctacctcctccactgcacccaagactgccatccatcatcagatagcccatcaccagccgtactgcgccctcatgcacatgtaggacatccaggacgtccaggacattcaagcagcgcacatcgtgcccctgcccgcagcccagtcacagatcggtagagttacgccgcacgcagtacggcagcaatcaggtaccccaggcccgttcgtcctgtctctctttctgcctgtacccatctgtccgtacccaaacggcagaggcaagtaccaccttatctctgtcacgcatccatcctcgcatcctctgccttgtcttggtccgtttcgcacacccccggccacgagagctacctctccgcctttttgatactgccgcccgtctctcaattcccgatatctcctctttgacacaccacgcccaccccatcaacccaacccaccacccgccggcctcactctgccgcccctacgcgactgccgcagcgcaccggcctgcccacctcacgcctgcccactccatgggagatgcgccgctcccactgcgacgcgggtaccttggaggctggataacacccaacaaaggcggtcctacgcgaccactctagacatccaactgtctctactgcttgcgcgcacgcgcgctctcctcacacagcccatcgacccagtcgtccacaccgccgaagccccattgctgctgttcgcgctttcaagtctgccgcgaccctctttcatgacccagcggggcacttggcgcgcaacgtttcgaggttgcaggaacaaagaaaaaccatggaggatgctgcaaagtcgactcagaccctagcagatcaagtcctacccaagcagccctactatctctccctctcccccacgcgcaagtaccgaatccaccccgacgagaagcgcctagatgagcaagacatcagacatctccagtacaccaccttggtcggtggtgaggcagatcgcggcgtgctgatcacccgcgcctacttcaccgttcgcgacgaccagctcatccccagcaaggcaccagctcccatacccccagtcgaccccaccaagcctcggaagaaggtctcgcttaaagactacaagaagaaggtagagggggaatcgccgccgaaatcaggcgataagcccaacggcttgcctaccgtaaaagagaaggacgaaagcaagagttctacaggcctctctgcgaaagacatggatggccaccgcgatgtcaagaggtctctcgcgaacggaaaggctgagtcaacccatcgacgctctccctctcccgagcgacggaaaaggctacatgacaccgaggacagctccaagcccgcgaagcgcttaaagacggaaaatgcgaccccgaacggcaagacttccgacatcgcgagagaaggaaattcacagaagtctgcacggataaagagcgaggtcaaagagtcgaaatcgatttctgtactgaatggtaaattggcaacgaacaattcgcctcgcggcgtgtcccccaagccttctgcggcaatcaatggccagtcaaaaactgcatcaaatggccaatcgacgcacaagagggcggccagcagcaatgaatcagtcacgcgtccaatcccgaggttgttatcgccattgaatttatcaaagctcatgcccgatgaagtcaacacagactcgccgatggagagtgcccgaccgagtcccaagaagaaaccggtagaatcgggaagcttgaagtcactgcctaagaagccacgagctgaacccgaaacaacacccgttacgaagaagcgcaaaattccacctctgctgtcacctacgttaccagcaattgtcatggaagaactggcgagatttgacaagaaaactggaacaccactgaaagacacgagccaaaagagtagccaggcctccgactctcctgatagttctaaaaaaggcggcaagtttccaaaacatgaggagaccatacacgtggagaacaaggccaagaaggagcaatatctcgtgaccctgaagtataagagacgtcaagcgaagactattgaacgacttctgaatctgcctccctcgggtggcaagaggaaggccgatccgccaagaaaagaggaccgaattcaacgtgaaaggccaggaagtgtagagcctggcacggcacgcaagcgcctaccagcagcagtcgatgccagcgagggatccaagcgacccaagacagcagagagcctgcgtccttccactccaccgaagcaatcaaccacgatgtcgcgaattgcatccagcagctcgcaagcgggaacgcctggcgctgccaatagccttacgccgtctacccagttgactgcggagaaacgacgtccacaagtcgaacccgaaaaggcacaaaaggctgccagacttcatggccgccacaagatcttcatggagctcggaacaaaactcaaacacgagcgagatggcattatgaagggcagagttggaattaaggagcgcgaacatcagattgccgtcgcagccggcatccaatccctgctgctgtatatgtatgcggtcaaatcacagagtgatgcgttcgatttagaacgacagcctcgtcggtcgcagtcctggaaagaggtcctacctttgttcaaagtcgtcaagtctgactgcaagaacaatcacccgctccaggcattgctgtctcgtattgaaggcatttgcgtgagctacatgggtcgatctctgtggttcgcctctaaggaacccaacacgctcgatcaattgatatccgtcaacaggcacgagtccgatgcttggcgcgaagctgatatgacgcgacggaaaatgggaatcttcgacggcaattctagcacctccgatggaggtgcgttgggaaagctggtagaccgactcggcccctggacgactcccgaagaatccattcccgtagctctggaggtcctccgaaaagtgatccgattggatggatcatggaagcctcatgaagaacttaccaaaatcggacatactattaccaatggcgctcctgggcaaaccgcattacgaccttagagcggcatatctaacggaattggccgtgtcacatttgatgtacattatgaactacgactcacgaaatgataccaagatctcacattttacttcacacccatggacgggaccgcgagtcctggttgcagctaccgagccaaggcccccggcatgctttatctcggaaatcaagctatccattatttactccggcgctatctagcaacacttggtctcaggaaaggcgatgggtatcatgggtagtccgaggccattgactcatgttttcagtggattatttgctatgcataaaatcggtcggggggttacggggggaataggagactcagcagtccgaaattggcggatggcttgaggacggtgtgaagcagcgaggtacgagatatgccaagcgcacctacataatgcgcagagcttccgtgtatttgtcgtctattgttgtcctttttatgatatcccgccggcacggccgagcaatggaactcgtatcatgtgctactgatcaaaaattacatggcttgatcctctactatgtgtatgatgctgcttatgaacagtcacttagcgaagagaacaatgttttgataatcactcagataatatccacttacacatttcgaaaacaaaattcgttcataaatcttaggtattcagcatctttgggttaaatttaatactgagctgtaattcagactgctcttaggtatcttttttaccttttatctaccgctaacatattatagaattagaaaacacaatacaaagggagttgttgatacacgtgcattcatgatctcatgatggaatgaaatcgctgtcgaggaatcccttcctgtcttttacgcgaaattggctgcacgactccagctctcgtccccaacttccctgaattcgacaccctcgccaaaataaccggcgtcctgccatgccttcatcatattcccatcatacggtccctgcttagctgcgccatctcggccatccgtccatctgtactcccacatcttgaccgcatctccattcacaggcaccgatggcgtcggctcaggttcgggctcaacccaatcttcatccgtttcacgcacaaactcgcgaatcagaagctctctctcgcggtcatacacatctgggcgatcgcggccgagtagcttatcggcagcgtccgttatggcgtctatcgcgttcttgacacggatctgctctgggtcttcaggctccttctcttttgtcttctcctcgtcgacgtccatcgactctgatttgtgagtttgttgtctcttttgtttccacttgggcactttcttcgctttcgtcttattctgtccgcgtccgagacgagcgagagcctctagtgccgtctcgccgcgctctagatgtgtgatgagagatttgagcaggtcggaggtaagtttattgtcgtcatcccgcctcttctgtctctgctccgcttcgcgcttctcgtgggcctcggccgctttcttcatatccttcttacttacgccctcgagccagcggtcatgcaccgcatccgggtccacggctttccggacgaaattccctgcttcgtcaaatcgaccttcttcttgctcttgtttcaggttgaaagcctcgactttgggggcgtgtttcttgaggccgcccgccccgacctcctcgtcgacggcttcttcggcgatggccatggctttttcctcctcgtcttcgtctgaacttccttcgtctactcctatgtcgatgtgcccgccggatctggagttttcgacttgccctgctatggcgtcggcctccatgaagcggacttctttgctcttcttgcctgtcttggagtcgacggtgtcgtcggcggggtctgcgtcttcttccgcggcgaacatgtcatcgtcgtcgtcgtcttcatcttttttcgacgttgcttttgcgccagctgcacgcgatgcgccgagctcttcgcggtctgagtctgagtcgtagccgtcgatgttgacggcgccgcgctttgtggctgcgctgcccttgatgacggcctcgtctgcctcgagaaaggcgtcctggccttcatcctcatcttcggcgtctggggcgagggcggagggattgcgggtgtcgaacttgaccttcttggagtcgggctcggcgttgtggtgttgacgggcgaacttctcgcctgcgcgcttggggcgtgccgcgctgaacctggacgacattttggtgtctcaatggtgtgttggcgtgttcgattagatgtatgtatgaggataatctggatgaatgaagagggacgaataagagactatgggggagtatcgaagaatgggattgatcagcgcattatctactgggatctacacgattgtcattttctggcatgacgttgattttgcgctcggtagctagtagctgcctcctccaagtccatcagggcccc

SEQ ID NO: 15372 - DNA, 1365 bp, Muscodor strobelii
  misc_feature: SGI cDNA ID NO. 565090
  misc_feature: Reduced expression when VOC is produced
  misc_feature: Encodes the peptide sequence at SEQ ID NO 15373
atgtcgtccaggttcagcgcggcacgccccaagcgcgcaggcgagaagttcgcccgtcaacaccacaacgccgagcccgactccaagaaggtcaagttcgacacccgcaatccctccgccctcgccccagacgccgaagatgaggatgaaggccaggacgcctttctcgaggcagacgaggccgtcatcaagggcagcgcagccacaaagcgcggcgccgtcaacatcgacggctacgactcagactcagaccgcgaagagctcggcgcatcgcgtgcagctggcgcaaaagcaacgtcgaaaaaagatgaagacgacgacgacgatgacatgttcgccgcggaagaagacgcagaccccgccgacgacaccgtcgactccaagacaggcaagaagagcaaagaagtccgcttcatggaggccgacgccatagcagggcaagtcgaaaactccagatccggcgggcacatcgacataggagtagacgaaggaagttcagacgaagacgaggaggaaaaagccatggccatcgccgaagaagccgtcgacgaggaggtcggggcgggcggcctcaagaaacacgcccccaaagtcgaggctttcaacctgaaacaagagcaagaagaaggtcgatttgacgaagcagggaatttcgtccggaaagccgtggacccggatgcggtgcatgaccgctggctcgagggcgtaagtaagaaggatatgaagaaagcggccgaggcccacgagaagcgcgaagcggagcagagacagaagaggcgggatgacgacaataaacttacctccgacctgctcaaatctctcatcacacatctagagcgcggcgagacggcactagaggctctcgctcgtctcggacgcggacagaataagacgaaagcgaagaaagtgcccaagtggaaacaaaagagacaacaaactcacaaatcagagtcgatggacgtcgacgaggagaagacaaaagagaaggagcctgaagacccagagcagatccgtgtcaagaacgcgatagacgccataacggacgctgccgataagctactcggccgcgatcgcccagatgtgtatgaccgcgagagagagcttctgattcgcgagtttgtgcgtgaaacggatgaagattgggttgagcccgaacctgagccgacgccatcggtgcctgtgaatggagatgcggtcaagatgtgggagtacagatggacggatggccgagatggcgcagctaagcagggaccgtatgatgggaatatgatgaaggcatggcaggacgccggttattttggcgagggtgtcgaattcagggaagttggggacgagagctggagtcgtgcagccaatttcgcgtaa

SEQ ID NO: 15373 - protein, 454 aa, Muscodor strobelii
  misc_feature: SGI Peptide ID NO. 565090
  misc_feature (400)..(437): Pfam Id: PF02213 Pfam Desc: GYF domain
  misc_feature (1)..(453): NCBI GI: 39942188 Blast Desc: MGG_03174 [Magnaporthe grisea 70-15] gi|145015844|gb|EDK00334.1| MGG_03174 [Magnaporthe grisea 70-15]
  misc_feature (1)..(454): NCBI GI: 154303560 Blast Desc: BC1G_09351 [Botryotinia fuckeliana B05.10] gi|150854662|gb|EDN29854.1| BC1G_09351 [Botryotinia fuckeliana B05.10]
  misc_feature (1)..(454): NCBI GI: 156063970 Blast Desc: SS1G_02103 [Sclerotinia sclerotiorum 1980] gi|154697437|gb|EDN97175.1| SS1G_02103 [Sclerotinia sclerotiorum 1980]
  misc_feature (1)..(454): NCBI GI: 85110235 Blast Desc: NCU06855 [Neurospora crassa OR74A] gi|28881202|emb|CAD70383.1| conserved [Neurospora crassa] gi|28925005|gb|EAA34093.1| [Neurospora crassa OR74A]
  misc_feature (1)..(453): NCBI GI: 256732954 Blast Desc: NECHADRAFT_38236 [Nectria haematococca mpVI 77-13-4]
  misc_feature (1)..(454): NCBI GI: 116204727 Blast Desc: CHGG_10247 [Chaetomium globosum CBS 148.51] gi|88176375|gb|EAQ83843.1| CHGG_10247 [Chaetomium globosum CBS 148.51]
  misc_feature (9)..(454): NCBI GI: 238483561 Blast Desc: conserved [Aspergillus flavus NRRL3357] gi|220701069|gb|EED57407.1| conserved [Aspergillus flavus NRRL3357]
  misc_feature (9)..(454): NCBI GI: 169766790 Blast Desc: [Aspergillus oryzae RIB40] gi|83765721|dbj|BAE55864.1| protein product [Aspergillus oryzae]
  misc_feature (1)..(454): NCBI GI: 171690274 Blast Desc: protein product [Podospora anserina] gi|170945085|emb|CAP71196.1| protein product [Podospora anserina]
  misc_feature (6)..(454): NCBI GI: 240109281 Blast Desc: Lin1 family protein [Coccidioides posadasii C735 delta SOWgp]
  misc_feature: Useful for introducing or modulating the production of volatile compounds
MSSRFSAARPKRAGEKFARQHHNAEPDSKKVKFDTRNPSALAPDAEDEDEGQDAFLEADEAVIKGSAATKRGAVNIDGYDSDSDREELGASRAAGAKATSKKDEDDDDDDMFAAEEDADPADDTVDSKTGKKSKEVRFMEADAIAGQVENSRSGGHIDIGVDEGSSDEDEEEKAMAIAEEAVDEEVGAGGLKKHAPKVEAFNLKQEQEEGRFDEAGNFVRKAVDPDAVHDRWLEGVSKKDMKKAAEAHEKREAEQRQKRRDDDNKLTSDLLKSLITHLERGETALEALARLGRGQNKTKAKKVPKWKQKRQQTHKSESMDVDEEKTKEKEPEDPEQIRVKNAIDAITDAADKLLGRDRPDVYDRERELLIREFVRETDEDWVEPEPEPTPSVPVNGDAVKMWEYRWTDGRDGAAKQGPYDGNMMKAWQDAGYFGEGVEFREVGDESWSRAANFA

SEQ ID NO: 15374 - DNA, 1131 bp, Muscodor strobelii
  misc_feature: SGI cDNA ID NO. 565091
  misc_feature: Encodes the peptide sequence at SEQ ID NO 15375
atgtacaacctcgcgcgctccggcatgatgcgcggagccatgcgccgcttcgacgagtacttccgatgctatcccatggtcatggcccccggcgccgagcgccccgagctcaactacggctccaagatcttcctgcccccctccgccctccagaagatctcccagctgcacgtgcagtggcccctcatgatggagctcgtcaacggcgagaaggagaagcagacccacgccggtgtcctcgagttcgtcgccgaggaaggtcgtgcgtacatccctcactggatgatgcagagcctccaactcgaagtcggcgacataatccaggtcaagtccacatccctggagctcgccaagatggtcaagctgcagccccagtctgtcaacttcctcgacatcagcgaccccaaggccgttctcgagcgagccttccgcaacttcgccaccctcaccaaaggcgatgtcttcaactttgaatacaatgacgaggtctacgagatggccgtcctcgaggtcaagcccgaaacccctaagatgggtgtctgcatgatcgagaccgatgtctccgtcgactttgcgcctcccgtgggctacgtcgagccgactaagagcagcggcacgagcacgcctcgaagcgcccgaggagctggagccttgccggctggcggtctgctacacagccagggcaccatggcccaggccatcaactacgatgccatcgctcccaacgccacgaccgccgccgcgggtgctcgcgccgtctcttcccattttctcaacgagggccacaagctgaatgccaagaaaggcagcaaaggtccctcgccaaagccctccacgcccgtggccggtgcctcatcaaacaccgttcccgcccctcgacgacgagtcaacggtccgatgccgttgcgtctaccgcccaataagctctttttcggctacgagatcaagccggtgaagacggatgcagatagggaagcagagaaggagaatgccactagaccgcatttcgccggtcaaggacaaacgctacgaagtggtgctgtaaagcggaaaggcgatgctgatgagaaggggaaggccccggagaagaaacctagtgagggacggaggttagatggccggaagatttga

SEQ ID NO: 15375 - protein, 376 aa, Muscodor strobelii
  misc_feature: SGI Peptide ID NO. 565091
  misc_feature (14)..(194): Pfam Id: PF03152 Pfam Desc: Ubiquitin fusion degradation protein UFD1
  misc_feature (1)..(374): NCBI GI: 261356660 Blast Desc: ubiquitin fusion degradation protein [Verticillium albo-atrum VaMs.102]
  misc_feature (1)..(374): NCBI GI: 39942190 Blast Desc: MGG_03175 [Magnaporthe grisea 70-15] gi|145015843|gb|EDK00333.1| MGG_03175 [Magnaporthe grisea 70-15]
  misc_feature (1)..(375): NCBI GI: 46123755 Blast Desc: FG06255.1 [Gibberella zeae PH-1]
  misc_feature (7)..(376): NCBI GI: 85110237 Blast Desc: NCU06856 [Neurospora crassa OR74A] gi|28881203|emb|CAD70384.1| related to ubiquitin fusion degradation protein [Neurospora crassa] NCU06856 [Neurospora
  misc_feature (14)..(375): NCBI GI: 171690272 Blast Desc: protein product [Podospora anserina] gi|170945084|emb|CAP71195.1| protein product [Podospora anserina]
  misc_feature (28)..(357): NCBI GI: 116204729 Blast Desc: CHGG_10248 [Chaetomium globosum CBS 148.51] gi|88176376|gb|EAQ83844.1| CHGG_10248 [Chaetomium globosum CBS 148.51]
  misc_feature (1)..(353): NCBI GI: 189189186 Blast Desc: ubiquitin fusion degradation protein [Pyrenophora tritici-repentis Pt-1C-BFP] gi|187972538|gb|EDU40037.1| ubiquitin fusion degradation protein [Pyrenophora tritici-repentis
  misc_feature (1)..(353): NCBI GI: 121703245 Blast Desc: ubiquitin fusion degradation protein Ufd1, [Aspergillus clavatus NRRL 1] gi|119398030|gb|EAW08461.1| ubiquitin fusion degradation protein Ufd1, [Aspergillus clavatus
  misc_feature (1)..(354): NCBI GI: 169766788 Blast Desc: [Aspergillus oryzae RIB40] gi|238483559|ref|XP_002373018.1| ubiquitin fusion degradation protein Ufd1, [Aspergillus flavus NRRL3357] protein product Ufd1,
  misc_feature (5)..(375): NCBI GI: 242808131 Blast Desc: ubiquitin fusion degradation protein Ufd1, [Talaromyces stipitatus ATCC 10500] gi|218715724|gb|EED15146.1| ubiquitin fusion degradation protein Ufd1, [Talaromyces ATCC
MYNLARSGMMRGAMRRFDEYFRCYPMVMAPGAERPELNYGSKIFLPPSALQKISQLHVQWPLMMELVNGEKEKQTHAGVLEFVAEEGRAYIPHWMMQSLQLEVGDIIQVKSTSLELAKMVKLQPQSVNFLDISDPKAVLERAFRNFATLTKGDVFNFEYNDEVYEMAVLEVKPETPKMGVCMIETDVSVDFAPPVGYVEPTKSSGTSTPRSARGAGALPAGGLLHSQGTMAQAINYDAIAPNATTAAAGARAVSSHFLNEGHKLNAKKGSKGPSPKPSTPVAGASSNTVPAPRRRVNGPMPLRLPPNKLFFGYEIKPVKTDADREAEKENATRPHFAGQGQTLRSGAVKRKGDADEKGKAPEKKPSEGRRLDGRKI

SEQ ID NO: 15376 - DNA, 1827 bp, Muscodor strobelii
  misc_feature: SGI EST ID NO. CUFF.36589.1
  misc_feature: Variant of the nucleotide sequence at SEQ ID NO 15374
atgggtttcgtcattgcgatcggtacctaatggtacatcagctcctccaagctgtcttgacctccacactaaatcgtgacaggtgcatcaccagaaataaggttgagtctgtgactgtgaccgtgtttctcttgaccacattctttaagcttccgttggcttttctcaacctcctaacgcccagctgactaagtccttccattctgtcctagatagtatcaacctctgatcccacacaccaataccgcgcatcaggctacggcgacttcgatcccgacgatccgtccgccatgtacaacctcgcgcgctccggcatgatgcgcggagccatgcgccgcttcgacgagtacttccgatgctatcccatggtcatggcccccggcgccgagcgccccgagctcaactacggctccaagatcttcctgcccccctccgccctccagaagatctcccagctgcacgtgcagtggcccctcatgatggagctcgtcaacggcgagaaggagaagcagacccacgccggtgtcctcgagttcgtcgccgaggaaggtcgtgcgtacatccctcactggatgatgcagagcctccaactcgaagtcggcgacataatccaggtcaagtccacatccctggagctcgccaagatggtcaagctgcagccccagtctgtcaacttcctcgacatcagcgaccccaaggccgttctcgagcgagccttccgcaacttcgccaccctcaccaaaggcgatgtcttcaactttgaatacaatgacgaggtctacgagatggccgtcctcgaggtcaagcccgaaacccctaagatgggtgtctgcatgatcgagaccgatgtctccgtcgactttgcgcctcccgtgggctacgtcgagccgactaagagcagcggcacgagcacgcctcgaagcgcccgaggagctggagccttgccggctggcggtctgctacacagccagggcaccatggcccaggccatcaactacgatgccatcgctcccaacgccacgaccgccgccgcgggtgctcgcgccgtctcttcccattttctcaacgagggccacaagctgaatgccaagaaaggcagcaaaggtccctcgccaaagccctccacgcccgtggccggtgcctcatcaaacaccgttcccgcccctcgacgacgagtcaacggtccgatgccgttgcgtctaccgcccaataagctctttttcggctacgagatcaagccggtgaagacggatgcagatagggaagcagagaaggagaatgccactagaccgcatttcgccggtcaaggacaaacgctacgaagtggtgctgtaaagcggaaaggcgatgctgatgagaaggggaaggccccggagaagaaacctagtgagggacggaggttagatggccggaagatttgatgtgtgacggctaggagaatgatattgggcgtttggcggagttgggtggggtagatggttattactactacgttatctatcatggtgctatgactttaacgtagcttgtttcatgcgcaatgggaattgggatatttcatgatgttttgagttcttaatcttggctttgtgacccttgattgtgtggtcttgagttttgtatgtgttcggttctaggtgtgagtgtaggggcctgagtttgttgtctgagtatcttgcagtttgcttttggtttattcctgaccccagagaggcttgggcagatttgacgagcggtgttgagtacctaagtatatttggtggatcattgttctttggaatacataaaagagtagatttacggataaaataaatgtttcaaaagcag

SEQ ID NO: 15377 - DNA, 801 bp, Muscodor strobelii
  misc_feature: SGI cDNA ID NO. 565092
  misc_feature: Encodes the peptide sequence at SEQ ID NO 15378
atgtcctccaataatgacaatgccatgacgaggttcctgttcgccattttgcaacagaagaacctgaaagatattgactggaacaaagtcgctcatgatcctatccttgcgcaagagatcaccaatggccatgctgctcggatgagatattcgcgattcaagtctgcgatgcttggcctcgaaccaactcgacgcaatcgaacggcccccgcgaaatcacgggtaacaaaatccaagaaagacaccaagaacaagaagggcccggacagcgtcaagtcagagtcacctgcgggttcaccaccggctgccacccccgaacccccatcctctgctccccgagtcatcaagcaagagaacatgcattacccatataacaatcgactcacgcccgccctgacaccaggccctccatctataccacaaccagttcctccacaaagcatgaccagtgcaccgatgctgcaaacaagatttctcacgccctgcagcgacgcagatatgtataccccgtcgcctgtccttgcctgcagtcctactagcgacatggtccactcccaaacctcgtatgattatcacgagccatcctgctccgatcaggtcgatccgagctggcctcatggcaacacacatttcgctgatgctttccctttccacgattacgctgcttccgcatgcgaccatcagcacatgtaccatactcaacatacgcaagacccattgatgattcccagtcaatccattgaggaaaatatggatcgtgtcgatgtcaaacatgaggactgggaacagtttcatcattga

SEQ ID NO: 15378 - protein, 266 aa, Muscodor strobelii
  misc_feature: SGI Peptide ID NO. 565092
  misc_feature (1)..(164): NCBI GI: 256732500 Blast Desc: NECHADRAFT_99943 [Nectria haematococca mpVI 77-13-4]
  misc_feature (3)..(216): NCBI GI: 171690302 Blast Desc: protein product [Podospora anserina] gi|170945099|emb|CAP71210.1| protein product [Podospora anserina]
  misc_feature (3)..(62): NCBI GI: 116204715 Blast Desc: CHGG_10241 [Chaetomium globosum CBS 148.51] gi|88176369|gb|EAQ83837.1| CHGG_10241 [Chaetomium globosum CBS 148.51]
  misc_feature (3)..(262): NCBI GI: 85110455 Blast Desc: NCU05477 [Neurospora crassa OR74A] gi|11291642|pir||T51017 B7J19.160 [imported] - Neurospora crassa gi|28925149|gb|EAA34232.1| [Neurospora crassa OR74A] conserved
  misc_feature (1)..(178): NCBI GI: 39942196 Blast Desc: MGG_03178 [Magnaporthe grisea 70-15] gi|145015840|gb|EDK00330.1| MGG_03178 [Magnaporthe grisea 70-15]
  misc_feature (1)..(180): NCBI GI: 46123747 Blast Desc: FG06251.1 [Gibberella zeae PH-1]
  misc_feature (5)..(90): NCBI GI: 156063978 Blast Desc: SS1G_02107 [Sclerotinia sclerotiorum 1980] gi|154697441|gb|EDN97179.1| SS1G_02107 [Sclerotinia sclerotiorum 1980]
  misc_feature (25)..(79): NCBI GI: 154303566 Blast Desc: BC1G_09354 [Botryotinia fuckeliana B05.10] gi|150854665|gb|EDN29857.1| BC1G_09354 [Botryotinia fuckeliana B05.10]
  misc_feature (5)..(174): NCBI GI: 115396818 Blast Desc: [Aspergillus terreus NIH2624] gi|114193617|gb|EAU35317.1| [Aspergillus terreus NIH2624]
  misc_feature (6)..(152): NCBI GI: 226282131 Blast Desc: conserved [Paracoccidioides brasiliensis Pb01]
MSSNNDNAMTRFLFAILQQKNLKDIDWNKVAHDPILAQEITNGHAARMRYSRFKSAMLGLEPTRRNRTAPAKSRVTKSKKDTKNKKGPDSVKSESPAGSPPAATPEPPSSAPRVIKQENMHYPYNNRLTPALTPGPPSIPQPVPPQSMTSAPMLQTRFLTPCSDADMYTPSPVLACSPTSDMVHSQTSYDYHEPSCSDQVDPSWPHGNTHFADAFPFHDYAASACDHQHMYHTQHTQDPLMIPSQSIEENMDRVDVKHEDWEQFHH

SEQ ID NO: 15379 - DNA, 1731 bp, Muscodor strobelii
  misc_feature: SGI EST ID NO. CUFF.36458.0
  misc_feature: Variant of the nucleotide sequence at SEQ ID NO 15377
ttcataccctaccagtcccccggagaacaaatagtatcagaacttggctaatgcaagcactataaagatccctgcaccttctaatccatctactgtgctttttaaagtgataatcggtcatcgattgtgttcaatcttttgggggccttggatcaaatgaacttttgtagcgttacaattactcttttattcccttattctaccatcaacggctgtgcctgtggaagtccacagtattgttcctccttttctcaccctacaaactagctgatgccgcctcactatcctcggcctcaacccaattgtgatctgctcagctatttcgcaagttcgttgccagctttatctggatcacttggccatatattctcttgcttctgctcaccgactttcacataagttctatccgtgactcactccaacgattcctcctccacatgttcaggtcaacctcggaaacaagtagctgtctctatccatttcacatccagctgtgcacttgttatttggagctctcgccctctacagaatagatactgggagcttgtatcaaccgtatacaattctatcgaggccaacatgtcctccaataatgacaatgccatgacgaggttcctgttcgccattttgcaacagaagaacctgaaagatattgactggaacaaagtcgctcatgatcctatccttgcgcaagagatcaccaatggccatgctgctcggatgagatattcgcgattcaagtctgcgatgcttggcctcgaaccaactcgacgcaatcgaacggcccccgcgaaatcacgggtaacaaaatccaagaaagacaccaagaacaagaagggcccggacagcgtcaagtcagagtcacctgcgggttcaccaccggctgccacccccgaacccccatcctctgctccccgagtcatcaagcaagagaacatgcattacccatataacaatcgactcacgcccgccctgacaccaggccctccatctataccacaaccagttcctccacaaagcatgaccagtgcaccgatgctgcaaacaagatttctcacgccctgcagcgacgcagatatgtataccccgtcgcctgtccttgcctgcagtcctactagcgacatggtccactcccaaacctcgtatgattatcacgagccatcctgctccgatcaggtcgatccgagctggcctcatggcaacacacatttcgctgatgctttccctttccacgattacgctgcttccgcatgcgaccatcagcacatgtaccatactcaacatacgcaagacccattgatgattcccagtcaatccattgaggaaaatatggatcgtgtcgatgtcaaacatgaggactgggaacagtttcatcattgatcaattgatatagcggctcttgaaaactcaagatgagtcttttcccgatgagtaaagagatcacggggacgcaattgccccaaatatcatgatggcgctcatcggatgaaatgagatgaaccgatgaggtgaaggaaggatactcaagaggccgcacttttacgaattatgaatgatgtcgtagactggatgtaataatgacattgggtgtttttcctttttgaattggaaaggaagtggctggaattcacagcaatcatgagcacgtatcaattgtgttgttcttcattagctgtccagccttgtgttattctactcaatatgaaccacatattatcaacctgtttctcc

SEQ ID NO: 15380 - DNA, 600 bp, Muscodor strobelii
  misc_feature: SGI cDNA ID NO. 565093
  misc_feature: Encodes the peptide sequence at SEQ ID NO 15381
atgaataaaaactggaatgatagggccgacaaggacctattcttcaccatcctgtccgtgaagaacattggcgtcattagtggtgcggagtggaccaccattggcaaccacatgcgctccttgggctacggctttacaaatgagggatgccgccagcactttcaaggtcttcgaagagctcagcataaagccgagtcttcgaacggggtaagccctgacggtcagcggaagaatgacccgaccgcaaatcccatcactcgtcgtcccggccctggtcgtggtcgaccccgaaagcagccacttgctgctctcgataactccgatccaatgcaaacttctgaagcgatgggccctgtgtccgaaacggcgaccagtggactcaacgccccggcctctcttccaattcaaacgcccatcacggagagtgacttgatggacatagagccagcgagtgtgaatcttgaggagcagcccttgaaacgccagcgtctcgggatggacgaggagggggaagaggcaaatgacgacgaagcagttcttgcattggctgcagatagtatttccgatgctgtggatgcgtatggtgccactgacaggtga

SEQ ID NO: 15381 - protein, 199 aa, Muscodor strobelii
  misc_feature: SGI Peptide ID NO. 565093
  misc_feature (1)..(86): NCBI GI: 171690300 Blast Desc: protein product [Podospora anserina] gi|170945098|emb|CAP71209.1| protein product [Podospora anserina]
  misc_feature (2)..(100): NCBI GI: 256732956 Blast Desc: NECHADRAFT_99942 [Nectria haematococca mpVI 77-13-4]
  misc_feature (1)..(126): NCBI GI: 164424859 Blast Desc: NCU11333 [Neurospora crassa OR74A] gi|38502264|emb|CAE55934.1| [Neurospora crassa] gi|157070694|gb|EDO65093.1| [Neurospora crassa OR74A]
  misc_feature (2)..(86): NCBI GI: 46123749 Blast Desc: FG06252.1 [Gibberella zeae PH-1]
  misc_feature (2)..(86): NCBI GI: 145608366 Blast Desc: MGG_03179 [Magnaporthe grisea 70-15] gi|145015839|gb|EDK00329.1| MGG_03179 [Magnaporthe grisea 70-15]
  misc_feature (1)..(86): NCBI GI: 261356663 Blast Desc: [Verticillium albo-atrum VaMs.102]
  misc_feature (1)..(59): NCBI GI: 154303568 Blast Desc: [Botryotinia fuckeliana B05.10] gi|150854666|gb|EDN29858.1| [Botryotinia fuckeliana B05.10]
MNKNWNDRADKDLFFTILSVKNIGVISGAEWTTIGNHMRSLGYGFTNEGCRQHFQGLRRAQHKAESSNGVSPDGQRKNDPTANPITRRPGPGRGRPRKQPLAALDNSDPMQTSEAMGPVSETATSGLNAPASLPIQTPITESDLMDIEPASVNLEEQPLKRQRLGMDEEGEEANDDEAVLALAADSISDAVDAYGATDR

SEQ ID NO: 15382 - DNA, 1952 bp, Muscodor strobelii
  misc_feature: SGI EST ID NO. CUFF.36576.1
  misc_feature: Variant of the nucleotide sequence at SEQ ID NO 15380
gagccgggcgaagcaggtgccatacaaacccttgcccgcagtcgaggcctcccccgaagagctgctcgctcccaagcacagacccttacccttttctcgaagctctggcccaccagctcgagctgcgagacaagctagagagctccaatacggtactcgacgaccctcctcatcaatcaacctctcaaaagctgcattctctaacaatttattagacctgcacgtaaatcccggagtcacctagtttggaatttgagccattaatcccgctcatttcgcgtcggtgtgcgagcttgagtttactcgagggttcactgcctcgtttctcagtcctcaccaccacacgacgccggtatctcatcatgaataaaaactggaatgatagggccgacaaggacctattcttcaccatcctgtccgtgaagaacattggcgtcattagtggtgcggagtggaccaccattggcaaccacatgcgctccttgggctacggctttacaaatgagggatgccgccagcactttcaaggtcttcgaagagctcagcataaagccgagtcttcgaacggggtaagccctgacggtcagcggaagaatgacccgaccgcaaatcccatcactcgtcgtcccggccctggtcgtggtcgaccccgaaagcagccacttgctgctctcgataactccgatccaatgcaaacttctgaagcgatgggccctgtgtccgaaacggcgaccagtggactcaacgccccggcctctcttccaattcaaacgcccatcacggagagtgacttgatggacatagagccagcgagtgtgaatcttgaggagcagcccttgaaacgccagcgtctcgggatggacgaggagggggaagaggcaaatgacgacgaagcagttcttgcattggctgcagatagtatttccgatgctgtggatgcgtatggtgccactgacaggtgagtgtctatctccgggtctcggttcgttggccaatctctaattcaagggcacacaggttactacggcgaagcctaaccatgatcgtggactggtatatgctagaacactcagctcacgggctacttacaccctgcgctctcgaatggtttggaacgagagtgcaggccagtgagaatgttctacatgcattacacagtccacgcccatgcaaagaggtcacgccttgcagttgccatttgccttgacccggaaaattgacaaccaggaagcagtcctcaaaaacgcggtgctcagtttgtggtttctggaccactgggatccagttgaagacattttaccacaagctgggttcgatagaacttcagttctttatactagaatcttgaataggtagaactcgcatgattctaggaggtgttgatcaggcttatctgtgagcgtagcgtcaagagaatacaatccttttttgattttcgccaagggtgctaggcaggccaggaacagaatacgctaagtgtatgcaccaatgaggataaacgtgccgtcagactagctgagacagcaatgatacaagatttgccctcatctatgtcttacttgttgggcttcggcctattcgcagtgaccatataagcaacaccaccgcttatctactgcgtcttatcttatcgctttcagcgatgcagccccttatccagggcaattaacacatatagcatcacacagcattctagtttctgtccatcaacatacgactatttcgactgtacgcaacacatgcacgtatgccacaagtcagaggatagctagtttgatggaccgccgccatcaggtgcgtatattgcactgcacctgaatattagatagtgtgtgagctgtttttctgtcacctggcgcatcgccgaatatactgtattaccacttactgccattattgtattacaaggaaactgtatgcgagaggagggctgaatgcacgcgtttcgcacg

SEQ ID NO: 15383 - DNA, 621 bp, Muscodor strobelii
  misc_feature: SGI cDNA ID NO. 565094
  misc_feature: Elevated expression when VOC is produced
  misc_feature: Encodes the peptide sequence at SEQ ID NO 15384
atggctcccaaagcaaccaccaaatggggtgtagagacttaccaagccctctgtctcgcgttcttcaccaacagccaattcaatgttgcccagcaagctgctatcgagcaagcaatgaaggatggaggttcccccacaacttgggaggcaatccgccaatcccattccgcaatggcgccctccggtcagaagtgggatgacgcgaccaacgcgcacctgttcatgaccatcttcgaggtcctcgactatcctagcttcactccggagcacaaggaggcgatcgtcgcgaagatgaaggagaaattcaacaatgacaagctcacctggaacggaattcgacagcacctccagaagctcaagcgcaaggacggcactaccaccggcaccaattccgcccaggccaccccccagaagagtggcaagaacggcaagaacggcaagaacgcctcagccacgaccactccgaagagtggtcgcggtcgcaagcgcaacctggatgacgatgacgacgacagtgacaaggtcgacactaagaagcccaagaccgactttgacgcttccggccatgtcaagtacgagggagtcggtggagacaacgacgtcgatgatggacatgtctaa

SEQ ID NO: 15384 - protein, 206 aa, Muscodor strobelii
  misc_feature: SGI Peptide ID NO. 565094
  misc_feature: Useful for introducing or modulating the production of volatile compounds
MAPKATTKWGVETYQALCLAFFTNSQFNVAQQAAIEQAMKDGGSPTTWEAIRQSHSAMAPSGQKWDDATNAHLFMTIFEVLDYPSFTPEHKEAIVAKMKEKFNNDKLTWNGIRQHLQKLKRKDGTTTGTNSAQATPQKSGKNGKNGKNASATTTPKSGRGRKRNLDDDDDDSDKVDTKKPKTDFDASGHVKYEGVGGDNDVDDGHV

SEQ ID NO: 15385 - DNA, 1187 bp, Muscodor strobelii
  misc_feature: SGI EST ID NO. CUFF.36487.1
  misc_feature: Variant of the nucleotide sequence at SEQ ID NO 15383
gtgattccccacgctcttccagcacaatggctttgggccttagaaaaagtgcaaccttggaaaccctcaggtcatggactcttccccatctcctcaaacccgcaacctttgatctcaaccttctcctgcacacgacaagcctcaatctccatccttacctagatatctgcctttcatacacttgtcatcatctcaagccttcagcatggctcccaaagcaaccaccaaatggggtgtagagacttaccaagccctctgtctcgcgttcttcaccaacagccaattcaatgttgcccagcaagctgctatcgagcaagcaatgaaggatggaggttcccccacaacttgggaggcaatccggtaattgggacttttctttcacgtgctctgtgcctttctactttcagcttgatttcttttccttacctacctaactcgcccgcacctatctgcatccgtctgcgttcttcattgcacaaccaatcacttagcaatttgcgcccccaactcgttctcttctaaaccaacaagccaatcccattccgcaatggcgccctccggtcagaagtgggatgacgcgaccaacgcgcacctgttcatgaccatcttcgaggtcctcgactatcctagcttcactccggagcacaaggaggcgatcgtcgcgaagatgaaggagaaattcaacaatgacaagctcacctggaacggaattcgacagcacctccagaagctcaagcgcaaggacggcactaccaccggcaccaattccgcccaggccaccccccagaagagtggcaagaacggcaagaacggcaagaacgcctcagccacgaccactccgaagagtggtcgcggtcgcaagcgcaacctggatgacgatgacgacgacagtgacaaggtcgacactaagaagcccaagaccgactttgacgcttccggccatgtcaagtacgagggagtcggtggagacaacgacgtcgatgatggacatgtctaaatcggactcatgaggatactcgctttcgcccgttatgaagcctcatcaggagtgaattgagtgaaggggaaggactttgcagccgcgatgatttggctcagtgattagcacattggcactgccatgccctggacggtatggacgccttaggtagcacacaatacaaggaactgtcttcacaaaacccaat

SEQ ID NO: 15386 - DNA, 2679 bp, Muscodor strobelii
  misc_feature: SGI cDNA ID NO. 565095
  misc_feature: Reduced expression when VOC is produced
  misc_feature: Encodes the peptide sequence at SEQ ID NO 15387
atggcgccttcgctcaacacccattcctcgtttacgcggccgcgtaccagcgacagagagcgcgagggccgacctgtcactcgagaccaaggggacaacaatctcatcatacccagccgcacgtcgtctctccattctcgcatcactcagcccatcccgggcaccctgaatgacaagcctcagcagcgcagccccaagacactcactcatgcctacatggtatgtggtgttggccgggagccttcgcagtgggtgaaagccccggccccggcccagggcaagattggacacatgaagggcgctgttgggcagttctggctccctgagattctcggcagcagcccacggctggagcaagacaacgacattgctcgagctcttcatgccgctatgcgtgcctgtttcccccacgacgtcgagatctgcactggtcgcagccagccccactgcgtgcaccatgcctttgttctccagcaggactcatcgcacaccctctacggcatttcattgcgtgtctggtcacgagcggacgagaaacgagccgagaccattcgggacctcaggaagcgaactgagtcggacttctacgataacccagacgagacatactggatcccgtactgcttgtcgtttctgtcccgctaccctttgtacaatctgctgggagattacctgcgtggcatgtggatccattggaacaaggcaacgaaccttttccacgccgaagaagtctcgcgaatccttagtttcccggcccctcgactcaacgacttggtacgcatcgacatgaaggactatgctctatgctaccagtttccttcatcgccgacgggctttcagaacttcgcaatgtggcctctctggagctgcttgtctattcccaatattgtcggtgtaatcgaggctgccatgtctcccacccgccgaatcatatttgtcagtcattatccggccatgttgactgtcgctgcagagaccgttaggttctgcgtcagggtatacgaatggagcgggctttatgtgcctgttgtgcatgctcgtcatgccaaggatctggtccaagagcctggcccatatattcttggtatcactgcagagtgtcggtcgcttttcacggcgcctaccgacgcgctcgtgattgatttggatcgcaacttcgttctgacatcgagcccgcctaccgccttaagtgctggtcagcgcaataagtttgtgacacgactcactgaggctttgaacggcgatgtgtctccctccggagttccacagcacctgagatctgcttatggtggtggaaaattggtgccggcaggacagattattgtcatgcgtggagaagttgatacgatacaggaacccgaatggtggaaccaggacgcgatcatggccgttatggatcacgtgtgcgaaaaaatgggacgcaataccggcttgaaagcagtcttcggcggctctgtcaagaagcctctgatgaccaaggtgtctatgagacatctgaacgagatcgtcagagagcggaaccagtattcgcgagatgcgatggaagcatggcaagacttcataaacttgaagggccgaatggatacggaactcaataaagtcacaaagaggaataattatttggtagaggagttggaaagctggaaacaacaattccttaaattccaagcgtttgctgagcaactcactaaagagacacaagatctcaaaaccaaaattgatactcataagcgagagaatcgtagattggcgagcctcattgaccaacagaaggatgataacacccgcctctctgttcggctcactggtacggagaagcagcgcgatgatgctcttgaagctctggtactccaacaagagattgctgaagaactggagcgcgagcgcaaacgcaacaagaaggagctagctgcattacagcaaaccaactcaacaataagtcgtcagcgcgacgaggctcgtcgcgtcgtgctgcacctacggagtctcatcggtggacagtcacatcatatggaacatctcgtccgctcactcacgacaccggatgacttgatgagtgagattggcgaaggctttgatgacgcggaagaggacgaatcaaatggacgccttactcccggccatgcaaacagcaaccgcatttctgccgccagcttcaaggatgttgccgatcgccatctcaaagacaagacagatgcgatcgctcacatcatcaagaatattgcagagcagtgtcatgctgccgttgagagcttgcagctcgctcaagagtccgaaattgaacgaccaagggcgtcgcgccgtaccagcaatctgtcgaatgcacagagcgaagacagtcatgataactccactgccacatccgaggttggagatgacagtttgctccatccgtcagggcgcctttctagcatcccccctactcctgacctgatcccaaatcgtagcagcacttcaatgtcgtacgcctccactatgacgacgccagaaaggtccagtcaacaatacaacgtacacagcgaaatccctacaaaaatcgtcgaagacgacggggaggatgaactcaaccaccggagcgatgtcgacatgacgactcaagagcctggtctagtgagcaaacacgctctgctccaccggccttctggtgctcgtatcagtgctttcggcggctctcgttga

SEQ ID NO: 15387 - protein, 892 aa, Muscodor strobelii
  misc_feature: SGI Peptide ID NO. 565095
  misc_feature (204)..(385): Pfam Id: PF02141 Pfam Desc: DENN (AEX-3) domain
  misc_feature (1)..(892): NCBI GI: 46121601 Blast Desc: FG05179.1 [Gibberella zeae PH-1]
  misc_feature (1)..(890): NCBI GI: 171688926 Blast Desc: protein product [Podospora anserina] gi|170944425|emb|CAP70536.1| protein product [Podospora anserina]
  misc_feature (1)..(892): NCBI GI: 85079182 Blast Desc: NCU03364 [Neurospora crassa OR74A] gi|28881141|emb|CAD70311.1| conserved [Neurospora crassa] gi|28917357|gb|EAA27063.1| NCU03364 [Neurospora crassa OR74A]
  misc_feature (1)..(890): NCBI GI: 154314044 Blast Desc: BC1G_04965 [Botryotinia fuckeliana B05.10] gi|150849111|gb|EDN24304.1| BC1G_04965 [Botryotinia fuckeliana B05.10]
  misc_feature (1)..(890): NCBI GI: 156060695 Blast Desc: SS1G_02490 [Sclerotinia sclerotiorum 1980] gi|154699894|gb|EDN99632.1| SS1G_02490 [Sclerotinia sclerotiorum 1980]
  misc_feature (1)..(887): NCBI GI: 225558581 Blast Desc: DENN domain-containing protein [Ajellomyces capsulatus G186AR]
  misc_feature (1)..(875): NCBI GI: 119471872 Blast Desc: DENN (AEX-3) domain protein [Neosartorya fischeri NRRL 181] gi|119406390|gb|EAW16341.1| DENN (AEX-3) domain protein [Neosartorya fischeri NRRL 181]
  misc_feature (1)..(875): NCBI GI: 226286389 Blast Desc: DENN domain-containing protein [Paracoccidioides brasiliensis Pb01]
  misc_feature (59)..(892): NCBI GI: 116199893 Blast Desc: CHGG_08102 [Chaetomium globosum CBS 148.51] gi|88179381|gb|EAQ86849.1| CHGG_08102 [Chaetomium globosum CBS 148.51]
  misc_feature (1)..(875): NCBI GI: 226291844 Blast Desc: DENN domain-containing protein [Paracoccidioides brasiliensis Pb18]
  misc_feature: Useful for introducing or modulating the production of volatile compounds
MAPSLNTHSSFTRPRTSDREREGRPVTRDQGDNNLIIPSRTSSLHSRITQPIPGTLNDKPQQRSPKTLTHAYMVCGVGREPSQWVKAPAPAQGKIGHMKGAVGQFWLPEILGSSPRLEQDNDIARALHAAMRACFPHDVEICTGRSQPHCVHHAFVLQQDSSHTLYGISLRVWSRADEKRAETIRDLRKRTESDFYDNPDETYWIPYCLSFLSRYPLYNLLGDYLRGMWIHWNKATNLFHAEEVSRILSFPAPRLNDLVRIDMKDYALCYQFPSSPTGFQNFAMWPLWSCLSIPNIVGVIEAAMSPTRRIIFVSHYPAMLTVAAETVRFCVRVYEWSGLYVPVVHARHAKDLVQEPGPYILGITAECRSLFTAPTDALVIDLDRNFVLTSSPPTALSAGQRNKFVTRLTEALNGDVSPSGVPQHLRSAYGGGKLVPAGQIIVMRGEVDTIQEPEWWNQDAIMAVMDHVCEKMGRNTGLKAVFGGSVKKPLMTKVSMRHLNEIVRERNQYSRDAMEAWQDFINLKGRMDTELNKVTKRNNYLVEELESWKQQFLKFQAFAEQLTKETQDLKTKIDTHKRENRRLASLIDQQKDDNTRLSVRLTGTEKQRDDALEALVLQQEIAEELERERKRNKKELAALQQTNSTISRQRDEARRVVLHLRSLIGGQSHHMEHLVRSLTTPDDLMSEIGEGFDDAEEDESNGRLTPGHANSNRISAASFKDVADRHLKDKTDAIAHIIKNIAEQCHAAVESLQLAQESEIERPRASRRTSNLSNAQSEDSHDNSTATSEVGDDSLLHPSGRLSSIPPTPDLIPNRSSTSMSYASTMTTPERSSQQYNVHSEIPTKIVEDDGEDELNHRSDVDMTTQEPGLVSKHALLHRPSGARISAFGGSR

SEQ ID NO: 15388 - DNA, 3579 bp, Muscodor strobelii
  misc_feature: SGI EST ID NO. CUFF.36540.0
  misc_feature: Variant of the nucleotide sequence at SEQ ID NO 15386
cgcgagcacccgtccacttaatcccctgcagcagtagaccctgctctgcacatcggcgcaaacttccctaccgtcggtaccctacccttctctgtcttctaccttagctacgaccatcttctttccctcgcacccctttccttctgccttctaccttcgttcccgggctctcgaagtgccaacagcaagtctgtgacccttcgttctcacagtccggcgacagaggacgacagctcgtctgttgcgtccctccatcgcccgcagattccaaccaaggctcctcgaggaagaccgcactgtctttgtcgagcatcctgagtttcattccctcgtttggacctcctgtgtagtcgtcgtcttctcctgcatagctcattcttcagaccacggctggtgccgtccctgtctgtgcggtctctcaggtgaatatactatcatatcgaccccacggcagttttccatttgcaatcaacatggcgccttcgctcaacacccattcctcgtttacgcggccgcgtaccagcgacagagagcgcgagggccgacctgtcactcgagaccaaggggacaacaatctcatcatacccagccgcacgtcgtctctccattctcgcatcactcagcccatcccgggcaccctgaatgacaagcctcagcagcgcagccccaagacactcactcatgcctacatggtatgtggtgttggccgggagccttcgcagtgggtgaaagccccggccccggcccagggcaagattggacacatgaagggcgctgttgggcagttctggctccctgagattctcggcagcagcccacggctggagcaagacaacgacattgctcgagctcttcatgccgctatgcgtgcctgtttcccccacgacgtcgagatctgcactggtcgcagccagccccactgcgtgcaccatgcctttgttctccagcaggactcatcgcacaccctctacggcatttcattgcgtgtctggtcacgagcggacgagaaacgagccgagaccattcgggacctcaggaagcgaactgagtcggacttctacgataacccagacgagacatactggatcccgtactgcttgtcgtttctgtcccgctaccctttgtacaatctgctgggagattacctgcgtggcatgtggatccattggaacaaggcaacgaaccttttccacgccgaagaagtctcgcgaatccttagtttcccggcccctcgactcaacgacttggtacgcatcgacatgaaggactatgctctatgctaccagtttccttcatcgccgacgggctttcagaacttcgcaatgtggcctctctggagctgcttgtctattcccaatattgtcggtgtaatcgaggctgccatgtctcccacccgccgaatcatatttgtcagtcattatccggccatgttgactgtcgctgcagagaccgttaggttctgcgtcagggtatacgaatggagcgggctttatgtgcctgttgtgcatgctcgtcatgccaaggatctggtccaagagcctggcccatatattcttggtatcactgcagagtgtcggtcgcttttcacggcgcctaccgacgcgctcgtgattgatttggatcgcaacttcgttctgacatcgagcccgcctaccgccttaagtgctggtcagcgcaataagtttgtgacacgactcactgaggctttgaacggcgatgtgtctccctccggagttccacagcacctgagatctgcttatggtggtggaaaattggtgccggcaggacagattattgtcatgcgtggagaagttgatacgatacaggaacccgaatggtggaaccaggacgcgatcatggccgttatggatcacgtgtgcgaaaaaatgggacgcaataccggcttgaaagcagtcttcggcggctctgtcaagaagcctctgatgaccaaggtgtctatgagacatctgaacgagatcgtcagagagcggaaccagtattcgcgagatgcgatggaagcatggcaagacttcataaacttgaagggccgaatggatacggaactcaataaagtcacaaagaggaataattatttggtagaggagttggaaagctggaaacaacaattccttaaattccaagcgtttgctgagcaactcactaaagagacacaagatctcaaaaccaaaattgatactcataagcgagagaatcgtagattggcgagcctcattgaccaacagaaggatgataacacccgcctctctgttcggctcactggtacggagaagcagcgcgatgatgctcttgaagctctggtactccaacaagagattgctgaagaactggagcgcgagcgcaaacgcaacaagaaggagctagctgcattacagcaaaccaactcaacaataagtcgtcagcgcgacgaggctcgtcgcgtcgtgctgcacctacggagtctcatcggtggacagtcacatcatatggaacatctcgtccgctcactcacgacaccggatgacttgatgagtgagattggcgaaggctttgatgacgcggaagaggacgaatcaaatggacgccttactcccggccatgcaaacagcaaccgcatttctgccgccagcttcaaggatgttgccgatcgccatctcaaagacaagacagatgcgatcgctcacatcatcaagaatattgcagagcagtgtcatgctgccgttgagagcttgcagctcgctcaagagtccgaaattgaacgaccaagggcgtcgcgccgtaccagcaatctgtcgaatgcacagagcgaagacagtcatgataactccactgccacatccgaggttggagatgacagtttgctccatccgtcagggcgcctttctagcatcccccctactcctgacctgatcccaaatcgtagcagcacttcaatgtcgtacgcctccactatgacgacgccagaaaggtccagtcaacaatacaacgtacacagcgaaatccctacaaaaatcgtcgaagacgacggggaggatgaactcaaccaccggagcgatgtcgacatgacgactcaagagcctggtctagtgagcaaacacgctctgctccaccggccttctggtgctcgtatcagtgctttcggcggctctcgttgatgtcaatataccctaactgcaaatttgaagagttgttgcgctcttccgtgatgtcatttcattgcttgaactggcggggcctcatagctcgtgtgttctgttcaaaatgtgtatacgggtgtactaattgtttgtaatgttgagtctatgtgaagctcacattagcaaatggcgttgatctggagttttgtcatatacagttttattaccggcctgtccggccatttgcctactataacttctctggtacaggacctaaacatcaagcaggtgattaggcgatgagcaccttcgagagatcgatcagtcaggtctcgggtcattctatttgtggagctgaacgacaagttctacaagccttcattttttccacctccatagctacagctcaatatattctctattgtctgctcaaaatagatcggcc

SEQ ID NO: 15389 - DNA, 2730 bp, Muscodor strobelii
  misc_feature: SGI cDNA ID NO. 565096
  misc_feature: Encodes the peptide sequence at SEQ ID NO 15390
atggcgccttcgctcaacacccattcctcgtttacgcggccgcgtaccagcgacagagagcgcgagggccgacctgtcactcgagaccaaggggacaacaatctcatcatacccagccgcacgtcgtctctccattctcgcatcactcagcccatcccgggcaccctgaatgacaagcctcagcagcgcagccccaagacactcactcatgcctacatggtatgtggtgttggccgggagccttcgcagtgggtgaaagccccggccccggcccagggcaagattggacacatgaagggcgctgttgggcagttctggctccctgagattctcggcagcagcccacggctggagcaagacaacgacattgctcgagctcttcatgccgctatgcgtgcctgtttcccccacgacgtcgagatctgcactggtcgcagccagccccactgcgtgcaccatgcctttgttctccagcaggactcatcgcacaccctctacggcatttcattgcgtgtctggtcacgagcggacgagaaacgagccgagaccattcgggacctcaggaagcgaactgagtcggacttctacgataacccagacgagacatactggatcccgtactgcttgtcgtttctgtcccgctaccctttgtacaatctgctgggagattacctgcgtggcatgtggatccattggaacaaggcaacgaaccttttccacgccgaagaagtctcgcgaatccttagtttcccggcccctcgactcaacgacttggtacgcatcgacatgaaggactatgctctatgctaccagtttccttcatcgccgacgggctttcagaacttcgcaatgtggcctctctggagctgcttgtctattcccaatattgtcggtgtaatcgaggctgccatgtctcccacccgccgaatcatatttgtcagtcattatccggccatgttgactgtcgctgcagagaccgttaggttctgcgtcagggtatacgaatggagcgggctttatgtgcctgttgtgcatgctcgtcatgccaaggatctggtccaagagcctggcccatatattcttggtatcactgcagagtgtcggtcgcttttcacggcgcctaccgacgcgctcgtgattgatttggatcgcaacttcgttctgacatcgagcccgcctaccgccttaagtgctggtcagcgcaataagtttgtgacacgactcactgaggctttgaacggcgatgtgtctccctccggagttccacagcacctgagatctgcttatggtggtggaaaattggtgccggcaggacagattattgtcatgcgtggagaagttgatacgatacaggaacccgaatggtggaaccaggacgcgatcatggccgttatggatcacgtgtgcgaaaaaatgggacgcaataccggcttgaaagcagtcttcggcggctctgtcaagaagcctctgatgaccaaggtgtctatgagacatctgaacgagatcgtcagagagcggaaccagtattcgcgagatgcgatggaagcatggcaagacttcataaacttgaagggccgaatggatacggaactcaataaagtcacaaagaggaataattatttggtagaggagttggaaagctggaaacaacaattccttaaattccaagcgtttgctgagcaactcactaaagagacacaagatctcaaaaccaaaattgatactcataagcgagagaatcgtagattggcgagcctcattgaccaacagaaggatgataacacccgcctctctgttcggctcactggtacggagaagcagcgcgatgatgctcttgaagctctggtactccaacaagagattgctgaagaactggagcgcgagcgcaaacgcaacaagaaggagctagctgcattacagcaaaccaactcaacaataagtcgtcagcgcgacgaggctcgtcgcgtcgtgctgcacctacggagtctcatcggtggacagtcacatcatatggaacatctcgtccgctcactcacgacaccggatgacttgatgagtgagattggcgaaggctttgatgacgcggaagaggacgaatcaaatggtaagccagatgataataccccagagagaataagatcactaaacgttacaggacgccttactcccggccatgcaaacagcaaccgcatttctgccgccagcttcaaggatgttgccgatcgccatctcaaagacaagacagatgcgatcgctcacatcatcaagaatattgcagagcagtgtcatgctgccgttgagagcttgcagctcgctcaagagtccgaaattgaacgaccaagggcgtcgcgccgtaccagcaatctgtcgaatgcacagagcgaagacagtcatgataactccactgccacatccgaggttggagatgacagtttgctccatccgtcagggcgcctttctagcatcccccctactcctgacctgatcccaaatcgtagcagcacttcaatgtcgtacgcctccactatgacgacgccagaaaggtccagtcaacaatacaacgtacacagcgaaatccctacaaaaatcgtcgaagacgacggggaggatgaactcaaccaccggagcgatgtcgacatgacgactcaagagcctggtctagtgagcaaacacgctctgctccaccggccttctggtgctcgtatcagtgctttcggcggctctcgttga

SEQ ID NO: 15390 - protein, 909 aa, Muscodor strobelii
  misc_feature: SGI Peptide ID NO. 565096
  misc_feature (204)..(385): Pfam Id: PF02141 Pfam Desc: DENN (AEX-3) domain
  misc_feature (1)..(909): NCBI GI: 46121601 Blast Desc: FG05179.1 [Gibberella zeae PH-1]
  misc_feature (1)..(907): NCBI GI: 171688926 Blast Desc: protein product [Podospora anserina] gi|170944425|emb|CAP70536.1| protein product [Podospora anserina]
  misc_feature (1)..(909): NCBI GI: 85079182 Blast Desc: NCU03364 [Neurospora crassa OR74A] gi|28881141|emb|CAD70311.1| conserved [Neurospora crassa] gi|28917357|gb|EAA27063.1| NCU03364 [Neurospora crassa OR74A]
  misc_feature (1)..(907): NCBI GI: 154314044 Blast Desc: BC1G_04965 [Botryotinia fuckeliana B05.10] gi|150849111|gb|EDN24304.1| BC1G_04965 [Botryotinia fuckeliana B05.10]
  misc_feature (1)..(907): NCBI GI: 156060695 Blast Desc: SS1G_02490 [Sclerotinia sclerotiorum 1980] gi|154699894|gb|EDN99632.1| SS1G_02490 [Sclerotinia sclerotiorum 1980]
  misc_feature (1)..(904): NCBI GI: 225558581 Blast Desc: DENN domain-containing protein [Ajellomyces capsulatus G186AR]
  misc_feature (1)..(892): NCBI GI: 119471872 Blast Desc: DENN (AEX-3) domain protein [Neosartorya fischeri NRRL 181] gi|119406390|gb|EAW16341.1| DENN (AEX-3) domain protein [Neosartorya fischeri NRRL 181]
  misc_feature (1)..(892): NCBI GI: 226286389 Blast Desc: DENN domain-containing protein [Paracoccidioides brasiliensis Pb01]
  misc_feature (1)..(892): NCBI GI: 226291844 Blast Desc: DENN domain-containing protein [Paracoccidioides brasiliensis Pb18]
  misc_feature (1)..(892): NCBI GI: 70992311 Blast Desc: DENN (AEX-3) domain protein [Aspergillus fumigatus Af293] gi|21627822|emb|CAD37154.1| [Aspergillus fumigatus] gi|66848637|gb|EAL88966.1| DENN (AEX-3) domain protein fumigatus
MAPSLNTHSSFTRPRTSDREREGRPVTRDQGDNNLIIPSRTSSLHSRITQPIPGTLNDKPQQRSPKTLTHAYMVCGVGREPSQWVKAPAPAQGKIGHMKGAVGQFWLPEILGSSPRLEQDNDIARALHAAMRACFPHDVEICTGRSQPHCVHHAFVLQQDSSHTLYGISLRVWSRADEKRAETIRDLRKRTESDFYDNPDETYWIPYCLSFLSRYPLYNLLGDYLRGMWIHWNKATNLFHAEEVSRILSFPAPRLNDLVRIDMKDYALCYQFPSSPTGFQNFAMWPLWSCLSIPNIVGVIEAAMSPTRRIIFVSHYPAMLTVAAETVRFCVRVYEWSGLYVPVVHARHAKDLVQEPGPYILGITAECRSLFTAPTDALVIDLDRNFVLTSSPPTALSAGQRNKFVTRLTEALNGDVSPSGVPQHLRSAYGGGKLVPAGQIIVMRGEVDTIQEPEWWNQDAIMAVMDHVCEKMGRNTGLKAVFGGSVKKPLMTKVSMRHLNEIVRERNQYSRDAMEAWQDFINLKGRMDTELNKVTKRNNYLVEELESWKQQFLKFQAFAEQLTKETQDLKTKIDTHKRENRRLASLIDQQKDDNTRLSVRLTGTEKQRDDALEALVLQQEIAEELERERKRNKKELAALQQTNSTISRQRDEARRVVLHLRSLIGGQSHHMEHLVRSLTTPDDLMSEIGEGFDDAEEDESNGKPDDNTPERIRSLNVTGRLTPGHANSNRISAASFKDVADRHLKDKTDAIAHIIKNIAEQCHAAVESLQLAQESEIERPRASRRTSNLSNAQSEDSHDNSTATSEVGDDSLLHPSGRLSSIPPTPDLIPNRSSTSMSYASTMTTPERSSQQYNVHSEIPTKIVEDDGEDELNHRSDVDMTTQEPGLVSKHALLHRPSGARISAFGGSR

SEQ ID NO: 15391 - DNA, 3579 bp, Muscodor strobelii; identical to SEQ ID NO: 15388
  misc_feature: SGI EST ID NO. CUFF.36540.0
  misc_feature: Variant of the nucleotide sequence at SEQ ID NO 15389

SEQ ID NO: 15392 - DNA, 1407 bp, Muscodor strobelii
  misc_feature: SGI cDNA ID NO. 565097
  misc_feature: Encodes the peptide sequence at SEQ ID NO 15393
atgtcggacctaaaggcgaacgtgagcgagactgcgtccggcttccacgtcgagggtttcgagaaaatcgagtatgatttcacttttgttgatggtgttttcgataccgccaacccgggtctagcagattgctatcaacgctggggtagagtgctggccgtcacagacaagaatgtgtatgcgctatacggcgaaaaaatggttgagtacttcaaacatttcaatctcgatctcaaagtccaccagacctctattggtgaaaaggccaagacgattgacacattcctcgaaattgcgaattctatgacggactttggcatcattcgaaaggagcctgtactcgttgttggaggaggactcgtcactgatgtcgcaggtttcgcgtgtgcggcgtatcgtagaaactccaacttcatacgagttccaacgacggttattgggcttattgatgctagcgtctcaatcaaagttgctgtgaattacgggcgatacaagaaccgcttgggtgcataccacgcgcctctacatactttcctcgacttcaattttctccggacgcttcctacttcgcaagtgcgaaatggcttcgccgaactcatcaaaatctcatcttgcgctcatttagaggtctttgaactgctcgatcgatactgtgaacaattgattcaaaccaaatttggtcgtaatcatgggtctcccagtgagatccgtgaggctgcagacattattaatcgtgagggcatttacgagatgctgaagttggaaacgcccaatttgcatgaaatcggcctggatcgtataattgcctttggtcacacttggtcgcctctgcatgaactcatacccgagccccctctgcgacatggacatgcaatctcgattgacatggcatattctgccacgctcgcaaattcacgaggactactttcagacgacgaacatcatcgcctgcttgccctattttccagagctggcctaacaattgatcatccacagttcaacgaggaagttcttgaaaaggggactgcggctatcctgaaaactcgggacgggctattgcgccttgctgtgcccaacccgcttgggtcttgtacatttatcaatgacgcaactccacaagaactgaaagatgcgctacacaaacacaagaatttggccaataaatttccccgtggtggtgcaggagttgaggcttacgttgacagtagcgacactgggtatactgacttggcgagcgagaacatgggtgtaacaaacgcggtaaaagaagcagccgctcaagctcttgatggtccgttgaatgcttcttcggttaatgggggtatttctgctgttgcgaatcttgttaatggtcatgacgcggatgtttgtgaaggactttcggatgggatcaaggctcaggcttga

SEQ ID NO: 15393 - protein, 468 aa, Muscodor strobelii
  misc_feature: SGI Peptide ID NO. 565097
  misc_feature (29)..(349): Pfam Id: PF01761 Pfam Desc: 3-dehydroquinate synthase
  misc_feature (50)..(214): Pfam Id: PF01761 Pfam Desc: 3-dehydroquinate synthase
  misc_feature (285)..(339): Pfam Id: PF01761 Pfam Desc: 3-dehydroquinate synthase
  misc_feature (1)..(415): NCBI GI: 39975675 Blast Desc: MGG_00016 [Magnaporthe grisea 70-15] gi|145019157|gb|EDK03436.1| MGG_00016 [Magnaporthe grisea 70-15]
  misc_feature (1)..(452): NCBI GI: 156049259 Blast Desc: SS1G_08336 [Sclerotinia sclerotiorum 1980] gi|154692735|gb|EDN92473.1| SS1G_08336 [Sclerotinia sclerotiorum 1980]
  misc_feature (1)..(408): NCBI GI: 121714705 Blast Desc: 3-dehydroquinate synthase, [Aspergillus clavatus NRRL 1] gi|119403117|gb|EAW13537.1| 3-dehydroquinate synthase, [Aspergillus clavatus NRRL 1]
  misc_feature (1)..(452): NCBI GI: 67540466 Blast Desc: AN6403.2 [Aspergillus nidulans FGSC A4] gi|40739235|gb|EAA58425.1| AN6403.2 [Aspergillus nidulans FGSC A4] gi|259479373|tpe|CBF69538.1| TPA: conserved [Aspergillus FGSC
  misc_feature (1)..(462): NCBI GI: 189193563 Blast Desc: 2-epi-5-epi-valiolone synthase [Pyrenophora tritici-repentis Pt-1C-BFP] gi|187978684|gb|EDU45310.1| 2-epi-5-epi-valiolone synthase [Pyrenophora tritici-repentis
  misc_feature (1)..(385): NCBI GI: 154317417 Blast Desc: BC1G_03060 [Botryotinia fuckeliana B05.10] gi|150844234|gb|EDN19427.1| BC1G_03060 [Botryotinia fuckeliana B05.10]
  misc_feature (1)..(437): NCBI GI: 261360082 Blast Desc: 2-epi-5-epi-valiolone synthase [Verticillium albo-atrum VaMs.102]
  misc_feature (1)..(435): NCBI GI: 256724644 Blast Desc: [Nectria haematococca mpVI 77-13-4]
  misc_feature (1)..(440): NCBI GI: 46126401 Blast Desc: FG07578.1 [Gibberella zeae PH-1]
  misc_feature (1)..(403): NCBI GI: 119512135 Blast Desc: 3-dehydroquinate synthase [Nodularia spumigena CCY9414] gi|119463225|gb|EAW44170.1| 3-dehydroquinate synthase [Nodularia spumigena CCY9414]
  misc_feature (50)..(386): SWISSPROT Homolog: EC 4.2.3.4 3-dehydroquinate synthase
MSDLKANVSETASGFHVEGFEKIEYDFTFVDGVFDTANPGLADCYQRWGRVLAVTDKNVYALYGEKMVEYFKHFNLDLKVHQTSIGEKAKTIDTFLEIANSMTDFGIIRKEPVLVVGGGLVTDVAGFACAAYRRNSNFIRVPTTVIGLIDASVSIKVAVNYGRYKNRLGAYHAPLHTFLDFNFLRTLPTSQVRNGFAELIKISSCAHLEVFELLDRYCEQLIQTKFGRNHGSPSEIREAADIINREGIYEMLKLETPNLHEIGLDRIIAFGHTWSPLHELIPEPPLRHGHAISIDMAYSATLANSRGLLSDDEHHRLLALFSRAGLTIDHPQFNEEVLEKGTAAILKTRDGLLRLAVPNPLGSCTFINDATPQELKDALHKHKNLANKFPRGGAGVEAYVDSSDTGYTDLASENMGVTNAVKEAAAQALDGPLNASSVNGGISAVANLVNGHDADVCEGLSDGIKAQA

SEQ ID NO: 15394 - DNA, 768 bp, Muscodor strobelii
  misc_feature: SGI cDNA ID NO. 565098
  misc_feature: Encodes the peptide sequence at SEQ ID NO 15395
atgtcaacggacgccgcacaagataagtttgtaggggtgccttacagagaccaagaggaggtctattttaacgatggccgagagttcgagttgcttcgatatgtcctcaatcacgaacaaattgaccagctcagaggaagtccccaagccattctcgataccatcgatgagtttgggcgcactcagaaatatcttatgaacatcggagcttataagtcgaaaactgtcgtggacttgattaaatctaaacgccctaaggttatagttgagctcggcggatacgtcggctattccgcaatcgcatttggtgcagctcagcgagagatcggaggcgacatttactacagtcttgaaaagagccccgaatttggacatgtcattgagaagctggtcgaactagctggactttccgatattgtcaaagtgaaagtcggatccagctctgactcgctaaagcagttgcacaccgagggtgtcttaaaattcgtcgatcttttgtttctcgatcatgtaaaaccattatatacaccggacctaaagctatgtgaagaacttggactgatcggcgttggtacagtcttagccgcggataacgtgatcaagccaggtaaccctccgtatcttgagtatgtgaggagctcagtttcggagaagaggaggcggttgaccgatgttctggactctgaccccaagggcaacccgaacttgcaatatgagagcgagctcattcgaggttgggagccgagcggtgtacctgtgagtagttaa

SEQ ID NO: 15395 - protein, 255 aa, Muscodor strobelii
  misc_feature: SGI Peptide ID NO. 565098
  misc_feature (15)..(254): NCBI GI: 261360081 Blast Desc: catechol O-methyltransferase [Verticillium albo-atrum VaMs.102]
  misc_feature (3)..(252): NCBI GI: 145611958 Blast Desc: MGG_00015 [Magnaporthe grisea 70-15] gi|145019158|gb|EDK03437.1| MGG_00015 [Magnaporthe grisea 70-15]
  misc_feature (15)..(252): NCBI GI: 67540464 Blast Desc: AN6402.2 [Aspergillus nidulans FGSC A4] gi|40739234|gb|EAA58424.1| AN6402.2 [Aspergillus nidulans FGSC A4] gi|259479374|tpe|CBF69540.1| TPA: conserved [Aspergillus FGSC
  misc_feature (16)..(254): NCBI GI: 121714703 Blast Desc: O-methyltransferase, [Aspergillus clavatus NRRL 1] gi|119403116|gb|EAW13536.1| O-methyltransferase, [Aspergillus clavatus NRRL 1]
  misc_feature (15)..(252): NCBI GI: 256732310 Blast Desc: NECHADRAFT_40790 [Nectria haematococca mpVI 77-13-4]
  misc_feature (16)..(252): NCBI GI: 169601420 Blast Desc: SNOG_03575 [Phaeosphaeria nodorum SN15] gi|111067660|gb|EAT88780.1| SNOG_03575 [Phaeosphaeria nodorum SN15]
  misc_feature (16)..(252): NCBI GI: 189193561 Blast Desc: catechol O-methyltransferase [Pyrenophora tritici-repentis Pt-1C-BFP] gi|187978683|gb|EDU45309.1| catechol O-methyltransferase [Pyrenophora tritici-repentis Pt-1C-BFP]
  misc_feature (15)..(252): NCBI GI: 154317413 Blast Desc: BC1G_03058 [Botryotinia fuckeliana B05.10] gi|150844232|gb|EDN19425.1| BC1G_03058 [Botryotinia fuckeliana B05.10]
  misc_feature (15)..(252): NCBI GI: 46105232 Blast Desc: FG00244.1 [Gibberella zeae PH-1]
  misc_feature (9)..(252): NCBI GI: 239607619 Blast Desc: O-methyltransferase [Ajellomyces dermatitidis ER-3]
  misc_feature (26)..(244): SWISSPROT Homolog: EC 2.1.1.6 Catechol O-methyltransferase
MSTDAAQDKFVGVPYRDQEEVYFNDGREFELLRYVLNHEQIDQLRGSPQAILDTIDEFGRTQKYLMNIGAYKSKTVVDLIKSKRPKVIVELGGYVGYSAIAFGAAQREIGGDIYYSLEKSPEFGHVIEKLVELAGLSDIVKVKVGSSSDSLKQLHTEGVLKFVDLLFLDHVKPLYTPDLKLCEELGLIGVGTVLAADNVIKPGNPPYLEYVRSSVSEKRRRLTDVLDSDPKGNPNLQYESELIRGWEPSGVPVSS

SEQ ID NO: 15396 - DNA, 1723 bp, Muscodor strobelii
  misc_feature: SGI EST ID NO. CUFF.36510.0
  misc_feature: Variant of the nucleotide sequence at SEQ ID NO 15394
gcaatatcgatgccatagaaaacaagcccaattagggttcaaatagtctcggccatcagctaggagctgttcggttcttacatgtatgccgtcatgactaatctgtaaactattaaattttacttggaatgcacaagaagcgtcactaaaacgtcttcatgcctttttttgagtcaattgcgtgatgactttggtacccgatagtctagagcaacttgtacagacgacatacccgcaaacagcaatttgcgcttccgccgagccagatgcgtgcatttcttcacattcatgccgtagaatgtacaccacagcaattcttgacctgactatgtggtacattgcgcacggcaaaactagcccgtcgaacggcgtttgtggccgagacacacgtgcaataatggtcgatgcttgcatgtgtatcggtattgcttggtatctcatcatctctgtggttaagccattcccacttgatagctagatgtggatcagcaagaaagtcgatgacattgacatgcatcggtgtgacacatcacattccagcgtgatctacctattttgcaagcaaataattgtactttgccagttgcctctaagactgttacccccgaagtatgctatctctccagcgtgcagcaaagtccacagatctgtcaagccaaatgtcaacggacgccgcacaagataagtttgtaggggtgccttacagagaccaagaggaggtctattttaacgatggccgagagttcgagttgcttcgatatgtcctcaatcacgaacaaattgaccagctcagaggaagtccccaagccattctcgataccatcgatgagtttgggcgcactcagaaatatcttatgaacatcggagcttataagtcgaaaactgtcgtggacttgattaaatctaaacgccctaaggttatagttgagctcggcggatacgtcggctattccgcaatcgcatttggtgcagctcagcgagagatcggaggcgacatttactacagtcttgaaaagagccccgaatttggacatgtcattgagaagctggtcgaactagctggactttccgatattgtcaaagtgaaagtcggatccagctctgactcgctaaagcagttgcacaccgagggtgtcttaaaattcgtcgatcttttgtttctcgatcatgtaaaaccattatatacaccggacctaaagctatgtgaagaacttggactgatcggcgttggtacagtcttagccgcggataacggtaagttgctcgaacacaactgattatgacgacgactgatggtccttagtgatcaagccaggtaaccctccgtatcttgagtatgtgaggagctcagtttcggagaagaggaggcggttgaccgatgttctggactctgaccccaagggcaacccgaacttgcaatatgagagcgagctcattcgaggttgggagccgagcggtgtacctgatgcaatagaaataagccgatgcgtttctattcaggagtgaatacgcgtgctttgagcgatgaatactttccagtgaatgcagcgagggtgcatgtggcaatctaggcattgcatctaatgatccttaatttggattgtcaccttctccatcacgtgtagcgaatttatctcgcttagacattgtgtcgagatcatcttcaatcatgattgaataaatgtcaggttgcgtacaaatcgatgctactcaaatcaagccg

SEQ ID NO: 15397 - DNA, 1587 bp, Muscodor strobelii
  misc_feature: SGI cDNA ID NO. 565099
  misc_feature: Encodes the peptide sequence at SEQ ID NO 15398
atggcggtgtccatttccgccaaaaccctcttggggttcgcggcagtatcttacgtggtgtacagaatcctgcattcgatgtttgtatctcgtcgaaacgcagctaaagcacgagagctcaggtgccaggagcctccatgcgagcaaaacaggctgcctttcggctacgaccaagctcaacggtttggtaaggcggataaggcaatgcagatgcccacagatatcatcaaccgattcgatgaagtcggtagctacacataccggttcaatttcatgggattgacgggtttcagaaccgccgaacctaagaatatccaagctattctcgcaactcaatttgctgactttgacttgggaccgttgagaaaaagcacattttggcccgtattaggagctggaatcttcacgtccgacggagaaggatggaaacattctcgagcgatgttgcgccctcaattcacacgtgaccaaatcagcgatctcgacctggaggagacacatgttcagaatatgatgaaagttttagacaacagaaagacacctgataactcaatcgacaccgatctgctaccatactttttcaaccttacattggatagcgcgacagagttcttgattggggagtcaaccaatagtcagcttgttgagctcgggtatcaagacaacagtaatggaacgggacattcggctacaaagtttggcagtgcctttgacgttgctctgaaaggtctcgcggcaagaggaagattgatgaacttctactggctccacaatcctaaggaattccgtgaagctgcgcggttttctcacgagttcgtggaccaatttgtccaacgcgcgcttgcgaaatcggccgaggagaagaacacagggggcgaagatagatacacgctcctcgacgctctggtagaggaaacgcgagaccctgtccggctacgttctgagcttctccatattttactcgcggggcgcgatacgactgcgtcgcacctcggatgggttttccactatctgtctcgtgatccacatcggtaccaaaagctccggcaggcgatcctagacgacttcggcacatacaatgagccgcactcgcggatcactttctcaaggctcaaggactgcagatacttgcgctacgtgaatgatgaggcccttcgcctgaatccgctggtgccgataaattcccggcgatccaacaaagatacgacactcccgatgggtggcggacctgacggtcgatctccaatattcgttccggcgggaaccgaagtcaactatagcgttcatgccatgcaacgccggaaggacctatggggcgccgatgcgaatgaattcgtgccagagagatgggagagtagaaaatcgggttgggagtacctgccgttcaacggtgggccgagaatctgcatcggtcaacaatttgccctaacggaagcaagctacgttattgtgaggcttatgcagcgattcgatcggatggagagcttgatgggaaaggacgagatcgtgaaacataatctgcatttaaccaacagcattggaaacggagtaaaagttagactacatgcggctgcgccagggacttag

SEQ ID NO: 15398 - protein, 528 aa, Muscodor strobelii
  misc_feature: SGI Peptide ID NO. 565099
  misc_feature (45)..(519): Pfam Id: PF00067 Pfam Desc: Cytochrome P450
  misc_feature (312)..(491): Pfam Id: PF00067 Pfam Desc: Cytochrome P450
  misc_feature (13)..(524): NCBI GI: 154300280 Blast Desc: BC1G_11329 [Botryotinia fuckeliana B05.10] gi|150856652|gb|EDN31844.1| BC1G_11329 [Botryotinia fuckeliana B05.10]
  misc_feature (13)..(525): NCBI GI: 154303347 Blast Desc: BC1G_09422 [Botryotinia fuckeliana B05.10] gi|150854985|gb|EDN30177.1| BC1G_09422 [Botryotinia fuckeliana B05.10]
  misc_feature (1)..(524): NCBI GI: 156054264 Blast Desc: SS1G_05980 [Sclerotinia sclerotiorum 1980] gi|154703760|gb|EDO03499.1| SS1G_05980 [Sclerotinia sclerotiorum 1980]
  misc_feature (5)..(524): NCBI GI: 189200681 Blast Desc: cytochrome P450 52A12 [Pyrenophora tritici-repentis Pt-1C-BFP] gi|187983776|gb|EDU49264.1| cytochrome P450 52A12 [Pyrenophora tritici-repentis Pt-1C-BFP]
  misc_feature (10)..(524): NCBI GI: 255950120 Blast Desc: Pc22g19240 [Penicillium chrysogenum Wisconsin 54-1255] gi|211592844|emb|CAP99212.1| Pc22g19240 [Penicillium chrysogenum Wisconsin 54-1255]
  misc_feature (9)..(512): NCBI GI: 115391153 Blast Desc: ATEG_03903 [Aspergillus terreus NIH2624] gi|114194005|gb|EAU35705.1| ATEG_03903 [Aspergillus terreus NIH2624]
  misc_feature (10)..(525): NCBI GI: 212537573 Blast Desc: cytochrome P450 family protein, [Penicillium marneffei ATCC 18224] gi|210068684|gb|EEA22775.1| cytochrome P450 family protein, [Penicillium marneffei ATCC 18224]
  misc_feature (10)..(525): NCBI GI: 119480837 Blast Desc: cytochrome P450 family protein, [Neosartorya fischeri NRRL 181] gi|119408601|gb|EAW18550.1| cytochrome P450 family protein, [Neosartorya fischeri NRRL 181]
  misc_feature (10)..(525): NCBI GI: 159129370 Blast Desc: cytochrome P450 family protein, [Aspergillus fumigatus A1163]
  misc_feature (10)..(525): NCBI GI: 71001214 Blast Desc: cytochrome P450 family protein [Aspergillus fumigatus Af293] gi|66852926|gb|EAL93250.1| cytochrome P450 family protein, [Aspergillus fumigatus Af293]
  misc_feature (3)..(490): SWISSPROT Homolog: EC 1.14.14.1 Unspecific monooxygenase
MAVSISAKTLLGFAAVSYVVYRILHSMFVSRRNAAKARELRCQEPPCEQNRLPFGYDQAQRFGKADKAMQMPTDIINRFDEVGSYTYRFNFMGLTGFRTAEPKNIQAILATQFADFDLGPLRKSTFWPVLGAGIFTSDGEGWKHSRAMLRPQFTRDQISDLDLEETHVQNMMKVLDNRKTPDNSIDTDLLPYFFNLTLDSATEFLIGESTNSQLVELGYQDNSNGTGHSATKFGSAFDVALKGLAARGRLMNFYWLHNPKEFREAARFSHEFVDQFVQRALAKSAEEKNTGGEDRYTLLDALVEETRDPVRLRSELLHILLAGRDTTASHLGWVFHYLSRDPHRYQKLRQAILDDFGTYNEPHSRITFSRLKDCRYLRYVNDEALRLNPLVPINSRRSNKDTTLPMGGGPDGRSPIFVPAGTEVNYSVHAMQRRKDLWGADANEFVPERWESRKSGWEYLPFNGGPRICIGQQFALTEASYVIVRLMQRFDRMESLMGKDEIVKHNLHLTNSIGNGVKVRLHAAAPGT

SEQ ID NO: 15399 - DNA, 1943 bp, Muscodor strobelii
  misc_feature: SGI EST ID NO. CUFF.36555.0
  misc_feature: Variant of the nucleotide sequence at SEQ ID NO 15397
ttgaaatttccaaaaccattcagcttcacttagtacattccgtgaaggtattccatcgtagaaaccgtcttcaatctttattcaaggctctctcatcaagcctatcatggcggtgtccatttccgccaaaaccctcttggggttcgcggcagtatcttacgtggtgtacagaatcctgcattcgatgtttgtatctcgtcgaaacgcagctaaagcacgagagctcaggtgccaggagcctccatgcgagcaaaacaggctgcctttcggctacgaccaagctcaacggtttggtaaggcggataaggcaatgcagatgcccacagatatcatcaaccgattcgatgaagtcggtagctacacataccggttcaatttcatgggattgacgggtttcagaaccgccgaacctaagaatatccaagctattctcgcaactcaatttgctgactttgacttgggaccgttgagaaaaagcacattttggcccgtattaggagctggaatcttcacgtccgacggagaaggatggaaacattctcgagcgatgttgcgccctcaattcacacgtgaccaaatcagcgatctcgacctggaggagacacatgttcagaatatgatgaaagttttagacaacagaaagacacctgataactcaatcgacaccgatctgctaccatactttttcaaccttacattggatagcgcgacagagttcttgattggggagtcaaccaatagtcagcttgttgagctcgggtatcaagacaacagtaatggaacgggacattcggctacaaagtttggcagtgcctttgacgttgctctgaaaggtctcgcggcaagaggaagattgatgaacttctactggctccacaatcctaaggaattccgtgaagctgcgcggttttctcacgagttcgtggaccaatttgtccaacgcgcgcttgcgaaatcggccgaggagaagaacacagggggcgaagatagatacacgctcctcgacgctctggtagaggaaacgcgagaccctgtccggctacgttctgagcttctccatattttactcgcggggcgcgatacgactgcgtcgcacctcggatgggttttccactatctgtctcgtgatccacatcggtaccaaaagctccggcaggcgatcctagacgacttcggcacatacaatgagccgcactcgcggatcactttctcaaggctcaaggactgcagatacttgcgctacgtgaatgatgaggcccttcgcctgaatccgctggtgccgataaattcccggcgatccaacaaagatacgacactcccgatgggtggcggacctgacggtcgatctccaatattcgttccggcgggaaccgaagtcaactatagcgttcatgccatgcaacgccggaaggacctatggggcgccgatgcgaatgaattcgtgccagagagatgggagagtagaaaatcgggttgggagtacctgccgttcaacggtgggccgagaatctgcatcggtcaacaatttgccctaacggaagcaagctacgttattgtgaggcttatgcagcgattcgatcggatggagagcttgatgggaaaggacgagatcgtgaaacataatctgcatttaaccaacagcattggaaacggagtaaaagttagactacatgcggctgcgccagggacttagtcgagcttgaccatcgttacaactttcaactctacgttagatgcaagttggtgggtatagtgcgagacttctatccatctgaattagcatgctagtcattcaaacgcgatttccattaggaaaccaaacctctactgtaaatgatacagatcttgtcgtctatctattcgctaagaccctagaggcaacactacgccagtgtgtccggaatctcgaatcatgaaagcatcgtgggccttatcaacgtcga

SEQ ID NO: 15400 - DNA, 558 bp, Muscodor strobelii
  misc_feature: SGI cDNA ID NO. 565100
  misc_feature: Reduced expression when VOC is produced
  misc_feature: Encodes the peptide sequence at SEQ ID NO 15401
atgtcagtccataccgtggccttatcatcttcccacacgttctcaaaatcatgtgttgagtcaataacacttctcgagggcgaaggcgttgagggagattgccacaatggcgagactgtgcagcaccgaagcagattgcacatcaaaccgccgccagcaaacttgcgacaagtccatcttattccaatggaagtacttgcagagcatgggcttctaccgggtgatatcggtgacaatgtcgcaacgaagaatgttgatcttttgtctttgggcactggtgcgaggctgcatttcgtatccgatcagaaatctaccatcgaagcgatgagagaaccacatgccatcataaagcttcaaggggtccgaaacccatgccatcagattgaaaaattccgtcgtggcttgcaggaaagattcgtcgtccgtgatgagaacaggaagatcgtcgcaaggaaggctggagtgatgggcactgttgaagccagaggaataatcgaggtggggatgaggatcattatcgatcgcgcggaaaagttcatcgctctagagtgcgtatga

SEQ ID NO: 15401 - protein, 185 aa, Muscodor strobelii
  misc_feature: SGI Peptide ID NO. 565100
  misc_feature (1)..(184): NCBI GI: 238843896 Blast Desc: MOSC [Microsporum canis CBS 113480]
  misc_feature (3)..(185): NCBI GI: 70985741 Blast Desc: conserved [Aspergillus fumigatus Af293] gi|66846005|gb|EAL86338.1| conserved [Aspergillus fumigatus Af293] gi|159128489|gb|EDP53604.1| conserved [Aspergillus A1163]
  misc_feature (3)..(185): NCBI GI: 119473583 Blast Desc: NFIA_001170 [Neosartorya fischeri NRRL 181] gi|119406820|gb|EAW16770.1| conserved [Neosartorya fischeri NRRL 181]
  misc_feature (3)..(185): NCBI GI: 121712327 Blast Desc: conserved [Aspergillus clavatus NRRL 1] gi|119401927|gb|EAW12349.1| conserved [Aspergillus clavatus NRRL 1]
  misc_feature (1)..(185): NCBI GI: 225556307 Blast Desc: MOSC domain-containing protein [Ajellomyces capsulatus G186AR]
  misc_feature (1)..(185): NCBI GI: 240276563 Blast Desc: MOSC domain-containing protein [Ajellomyces capsulatus H143]
  misc_feature (11)..(185): NCBI GI: 240105350 Blast Desc: CPC735_049130 [Coccidioides posadasii C735 delta SOWgp]
  misc_feature (1)..(182): NCBI GI: 258567706 Blast Desc: [Uncinocarpus reesii 1704] gi|237906043|gb|EEP80444.1| [Uncinocarpus reesii 1704]
  misc_feature (3)..(185): NCBI GI: 67904640 Blast Desc: AN9307.2 [Aspergillus nidulans FGSC A4] gi|40747218|gb|EAA66374.1| AN9307.2 [Aspergillus nidulans FGSC A4] gi|259488142|tpe|CBF87373.1| TPA: conserved [Aspergillus FGSC
  misc_feature (11)..(163): NCBI GI: 119194337 Blast Desc: CIMG_01543 [Coccidioides immitis RS]
  misc_feature: Useful for introducing or modulating the production of volatile compounds
MSVHTVALSSSHTFSKSCVESITLLEGEGVEGDCHNGETVQHRSRLHIKPPPANLRQVHLIPMEVLAEHGLLPGDIGDNVATKNVDLLSLGTGARLHFVSDQKSTIEAMREPHAIIKLQGVRNPCHQIEKFRRGLQERFVVRDENRKIVARKAGVMGTVEARGIIEVGMRIIIDRAEKFIALECV

SEQ ID NO: 15402 - DNA, 3553 bp, Muscodor strobelii
  misc_feature: SGI EST ID NO. CUFF.37116.0
  misc_feature: Variant of the nucleotide sequence at SEQ ID NO 15400
cacgtcgttaagtaataaatcgacatttgacaatatattttattttagtagtcatcagcaaagcaactgtttcaccttctgattctgttgatgggtcagcatctcgtcgctatgtctaaatgcactagttgcctttatcattatgctctcgcgtgatgctatgtcaatgaatgtcgacacaactggctatttgcgaattcacgagaggcttgatgaaagtagtaatactgttcgttgacgtcgtatatcgtatttgatgatttgcgtgtgcgtgagtcttttatagccgtgtacggcgaagatgactcaattgactacctcatcggagccaactacaatttaaagatagaccaccaatttaatgggtcaccccagaagttagtcttgactgttccagacttccactccggattctcaggctgaagcagaatcaactctaacggggaagaataaaagagaatattatgtcagtccataccgtggccttatcatcttcccacacgttctcaaaatcatgtgttgagtcaataacacttctcgagggcgaaggcgttgagggagattgccacaatggcgagactgtgcagcaccgaagcagattgcacatcaaaccgccgccagcaaacttgcgacaagtccatcttattccaatggaagtacttgcagagcatgggcttctaccgggtgatatcggtgacaatgtcgcaacgaagaatgttgatcttttgtctttgggcactggtgcgaggctgcatttcgtatccgatcagaaatctaccatcgaagcgatgagagaaccacatgccatcataaagcttcaaggggtccgaaacccatgccatcagattgaaaaattccgtcgtggcttgcaggaaagattcgtcgtccgtgatgagaacaggaagatcgtcgcaaggaaggctggagtgatgggcactgttgaagccagaggaataatcgaggtggggatgaggatcattatcgatcgcgcggaaaagttcatcgctctagagtgcgtatgatatttgtgattgttctccatgatagttgtggtctggtagtagcacgtaagatttgtcgggattgttgttgtgagtatggtgtctagcagtcagcagatagtgtatgagctgtgattctggtcgcctagagcatcgcctattgaaactgttcaatttcaactgtatcatacctgctgtatgaaatgtataactacttgttgtgtacgagaagagagtcgaatgcgcgggcatttcgaaaaaggaaaaacacactatgagatatttgatgattgttctgtctctgtctggtagtgaaacatataaatatgttcgaggcacgtatcagttttcaggacaaacgtcaacatacaactttactttcgccatcctttttcaaaacattgaatttggatcatttcatgtatgtccgagacttaatgctaggaaagtcgtaaggtaaggaattccagggtgccacgaaacataatcaaacctccctcttctttctcggcggaactttttaacaaagtctgtgattgtgcgtattgctaaatatctagacgtttttcatatcaagaccgagtattaattaggcgtcgaaccgatttctggatagactgataaatataatcttgatccgcaaaattcatgcaatttaggttcagtgggtatcgatacaaagtacagtacaacaaacaaagggtattccagccgaaagttaccatccttaatcatcaacaaagccttgtcaaacacgcgtcattggttacttcccgtatgcaggttgacgaggacctaaacattttcaatgacgcgggcgttcaaagcctgatggaatgactggtctccctcgtcgccattgccctcagcaaattgctgattcgcatcactcatggaggcgttgaaggcggctgagccgggcatggtctggttagcagccggtaggaagatgaccttggaatttgccgatttggccatagcttgcatagcctcgagatagcggatctgcatggcgggcgcggagcttaggatgtcggcggcctggcgcatgagcttggcgctctcaacctctgccttggcagcaatgatcttgctctctccaatacgcttgctctgggcggccatggacagggagccctgaagctcttggctgaaaacgatatctttgatcagcatgctctcgacctggacgccccatcctccggccacatcttcaatgatctcgctgatgctctgggcaatctcctcgcgacgttcgatgacgtcctggagtacgcgggcaccaacaacgtggcgtagggtcgtctgggttcgctcaatgagagcctgcttcacatttgcgatgccgaaggcgaccttgtgcggctggacgacgtggtagtagatgacggacgtgagatcgacggtgacgttgtccttggtcatgcagacctgtcgtgggacctctataacttgattagcggccgcttcagaggtaagacaaatattacgcaccagcaatctggatcttgacatcgacctgtatcagtcgctcgctgagaggattgatcttaaccaaaccaggatcgacagccttgtagaacttgccaaacttggtgacgaggccaacgtggccctgcgaaacttgcttgtagggattcgggcactagaagaattcgagttagcaattggtcttcatggcgtgattgcgaagattcggaagtcttgacgcctttttttttgtccttttctagtctgatttttgcacttgcgccagagcgcgaagaagccagctcccaaaagtttctaaataagtagaaaacatctccagaaattacttacgcagatacagcaaggcaccgctccaactgttccgataactgtgccgaaagcgttgatcatcgaaccataccagcccttggggttggcatcgtcggcgacgatctgggcatagctctgctgcagatcacccctctgagggggaacaacgctcatcggagcctgaaaataatatagtcagctttcatttcttgcgtactttggcaacaattagcgcgtctcgatccgtgccatttaagagcaacaaagcgtccattcttgacacgcgctacgaagtatattgccaagggatactcatacggacctgggttcgaaagccggaagtaccgttggtctcaggtgcttttccgtgagcggcggaagcgctacttcgttccgttgaggtgtccatgactgcgacttgaagaagttgtaagttgtcacgttaaggcgtgaagcagtaagagatgttcggtagaccaatgatggattgaagctgaaacgtggtacggttgacaggggaatggcgttgcgaagggcggggaggggaaatatttataagacaagctatgagcaacaacctagcaaaccaaatatgcaacggcctgctctaccgaatagtcacaacatgtagctgaaccccatcaccttcttgcagcaacttagaatgacattttggcacatgtaggccatcagcctattatagttagcttagaaattacatacattaaacaccgagctctactgatgctttc

SEQ ID NO: 15403 - DNA, 1047 bp, Muscodor strobelii
  misc_feature: SGI cDNA ID NO. 565101
  misc_feature: Reduced expression when VOC is produced
  misc_feature: Encodes the peptide sequence at SEQ ID NO 15404
atggacacctcaacggaacgaagtagcgcttccgccgctcacggaaaagcacctgagaccaacggtacttccggctttcgaacccaggctccgatgagcgttgttccccctcagaggggtgatctgcagcagagctatgcccagatcgtcgccgacgatgccaaccccaagggctggtatggttcgatgatcaacgctttcggcacagttatcggaacagttggagcggtgccttgctgtatctgctgcccgaatccctacaagcaagtttcgcagggccacgttggcctcgtcaccaagtttggcaagttctacaaggctgtcgatcctggtttggttaagatcaatcctctcagcgagcgactgatacaggtcgatgtcaagatccagattgctgaggtcccacgacaggtctgcatgaccaaggacaacgtcaccgtcgatctcacgtccgtcatctactaccacgtcgtccagccgcacaaggtcgccttcggcatcgcaaatgtgaagcaggctctcattgagcgaacccagacgaccctacgccacgttgttggtgcccgcgtactccaggacgtcatcgaacgtcgcgaggagattgcccagagcatcagcgagatcattgaagatgtggccggaggatggggcgtccaggtcgagagcatgctgatcaaagatatcgttttcagccaagagcttcagggctccctgtccatggccgcccagagcaagcgtattggagagagcaagatcattgctgccaaggcagaggttgagagcgccaagctcatgcgccaggccgccgacatcctaagctccgcgcccgccatgcagatccgctatctcgaggctatgcaagctatggccaaatcggcaaattccaaggtcatcttcctaccggctgctaaccagaccatgcccggctcagccgccttcaacgcctccatgagtgatgcgaatcagcaatttgctgagggcaatggcgacgagggagaccagtcattccatcaggctttgaacgcccgcgtcattgaaaatgtttag

SEQ ID NO: 15404 - protein, 348 aa, Muscodor strobelii
  misc_feature: SGI Peptide ID NO. 565101
  misc_feature (88)..(259): Pfam Id: PF01145 Pfam Desc: SPFH domain / Band 7 family
  misc_feature (9)..(348): NCBI GI: 15721878 Blast Desc: stomatin-like protein [Gibberella fujikuroi]
  misc_feature (6)..(348): NCBI GI: 39968635 Blast Desc: MGG_02410 [Magnaporthe grisea 70-15] gi|145013992|gb|EDJ98633.1| MGG_02410 [Magnaporthe grisea 70-15]
  misc_feature (11)..(348): NCBI GI: 171690164 Blast Desc: protein product [Podospora anserina] gi|170945030|emb|CAP71141.1| protein product [Podospora anserina]
  misc_feature (14)..(348): NCBI GI: 164427377 Blast Desc: NCU03388 [Neurospora crassa OR74A] gi|28881163|emb|CAD70333.1| related to stomatin [Neurospora crassa] gi|157071717|gb|EAA27599.2| NCU03388 [Neurospora crassa
  misc_feature (2)..(348): NCBI GI: 46138789 Blast Desc: FG10909.1 [Gibberella zeae PH-1]
  misc_feature (10)..(348): NCBI GI: 256728886 Blast Desc: [Nectria haematococca mpVI 77-13-4]
  misc_feature (13)..(348): NCBI GI: 156054184 Blast Desc: SS1G_05940 [Sclerotinia sclerotiorum 1980] gi|154703720|gb|EDO03459.1| SS1G_05940 [Sclerotinia sclerotiorum 1980]
  misc_feature (11)..(348): NCBI GI: 169763682 Blast Desc: [Aspergillus oryzae RIB40] gi|83770769|dbj|BAE60902.1| protein product [Aspergillus oryzae]
  misc_feature (11)..(348): NCBI GI: 238489641 Blast Desc: stomatin family protein [Aspergillus flavus NRRL3357] gi|220698446|gb|EED54786.1| stomatin family protein [Aspergillus flavus NRRL3357]
  misc_feature (11)..(348): NCBI GI: 242782030 Blast Desc: stomatin family protein [Talaromyces stipitatus ATCC 10500] gi|218720067|gb|EED19486.1| stomatin family protein [Talaromyces stipitatus ATCC 10500]
  misc_feature: Useful for introducing or modulating the production of volatile compounds
MDTSTERSSASAAHGKAPETNGTSGFRTQAPMSVVPPQRGDLQQSYAQIVADDANPKGWYGSMINAFGTVIGTVGAVPCCICCPNPYKQVSQGHVGLVTKFGKFYKAVDPGLVKINPLSERLIQVDVKIQIAEVPRQVCMTKDNVTVDLTSVIYYHVVQPHKVAFGIANVKQALIERTQTTLRHVVGARVLQDVIERREEIAQSISEIIEDVAGGWGVQVESMLIKDIVFSQELQGSLSMAAQSKRIGESKIIAAKAEVESAKLMRQAADILSSAPAMQIRYLEAMQAMAKSANSKVIFLPAANQTMPGSAAFNASMSDANQQFAEGNGDEGDQSFHQALNARVIENV

SEQ ID NO: 15405 - DNA, 3246 bp, Muscodor strobelii
  misc_feature: SGI EST ID NO. CUFF.37117.1
  misc_feature: Variant of the nucleotide sequence at SEQ ID NO 15403
gctgaaagcatcagtagagctcggtgtttaatgtatgtaatttctaagctaactataataggctgatggcctacatgtgccaaaatgtcattctaagttgctgcaagaaggtgatggggttcagctacatgttgtgactattcggtagagcaggccgttgcatatttggtttgctaggttgttgctcatagcttgtcttataaatatttcccctccccgcccttcgcaacgccattcccctgtcaaccgtaccacgtttcagcttcaatccatcattggtctaccgaacatctcttactgcttcacgccttaacgtgacaacttacaacttcttcaagtcgcagtcatggacacctcaacggaacgaagtagcgcttccgccgctcacggaaaagcacctgagaccaacggtacttccggctttcgaacccaggctccgatgagcgttgttccccctcagaggggtgatctgcagcagagctatgcccagatcgtcgccgacgatgccaaccccaagggctggtatggttcgatgatcaacgctttcggcacagttatcggaacagttggagcggtgccttgctgtatctgctgcccgaatccctacaagcaagtttcgcagggccacgttggcctcgtcaccaagtttggcaagttctacaaggctgtcgatcctggtttggttaagatcaatcctctcagcgagcgactgatacaggtcgatgtcaagatccagattgctgaggtcccacgacaggtctgcatgaccaaggacaacgtcaccgtcgatctcacgtccgtcatctactaccacgtcgtccagccgcacaaggtcgccttcggcatcgcaaatgtgaagcaggctctcattgagcgaacccagacgaccctacgccacgttgttggtgcccgcgtactccaggacgtcatcgaacgtcgcgaggagattgcccagagcatcagcgagatcattgaagatgtggccggaggatggggcgtccaggtcgagagcatgctgatcaaagatatcgttttcagccaagagcttcagggctccctgtccatggccgcccagagcaagcgtattggagagagcaagatcattgctgccaaggcagaggttgagagcgccaagctcatgcgccaggccgccgacatcctaagctccgcgcccgccatgcagatccgctatctcgaggctatgcaagctatggccaaatcggcaaattccaaggtcatcttcctaccggctgctaaccagaccatgcccggctcagccgccttcaacgcctccatgagtgatgcgaatcagcaatttgctgagggcaatggcgacgagggagaccagtcattccatcaggctttgaacgcccgcgtcattgaaaatgtttaggtcctcgtcaacctgcatacgggaagtaaccaatgacgcgtgtttgacaaggctttgttgatgattaaggatggtaactttcggctggaataccctttgtttgttgtactgtactttgtatcgatacccactgaacctaaattgcatgaattttgcggatcaagattatatttatcagtctatccagaaatcggttcgacgcctaattaatactcggtcttgatatgaaaaacgtctagatatttagcaatacgcacaatcacagactttgttaaaaagttccgccgagaaagaagagggaggtttgattatgtttcgtggcaccctggaattccttaccttacgactttcctagcattaagtctcggacatacatgaaatgatccaaattcaatgttttgaaaaaggatggcgaaagtaaagttgtatgttgacgtttgtcctgaaaactgatacgtgcctcgaacatatttatatgtttcactaccagacagagacagaacaatcatcaaatatctcatagtgtgtttttcctttttcgaaatgcccgcgcattcgactctcttctcgtacacaacaagtagttatacatttcatacagcaggtatgatacagttgaaattgaacagtttcaataggcgatgctctaggcgaccagaatcacagctcatacactatctgctgactgctagacaccatactcacaacaacaatcccgacaaatcttacgtgctactaccagaccacaactatcatggagaacaatcacaaatatcatacgcactctagagcgatgaacttttccgcgcgatcgataatgatcctcatccccacctcgattattcctctggcttcaacagtgcccatcactccagccttccttgcgacgatcttcctgttctcatcacggacgacgaatctttcctgcaagccacgacggaatttttcaatctgatggcatgggtttcggaccccttgaagctttatgatggcatgtggttctctcatcgcttcgatggtagatttctgatcggatacgaaatgcagcctcgcaccagtgccttataccagatttagtgaagaatacaaaaacatatagcgtactgacaacaacatacccaaagacaaaagatcaacattcttcgttgcgacattgtcaccgatatcacccggtagaagcccatgctctgcaagtacttccattggaataagatggacttgtcgcaagtttgctggcggcggtttgatgtgcaatctgcttcggtgctgcacagtctcgccattgtggcaatctccctcaacgccttcgccctcgagaagtgttattgactcaacacatgattttgagaacgtgtgggaagatgataaggccacggtatggactgacataatattctcttttattcttccccgttagagttgattctgcttcagcctgagaatccggagtggaagtctggaacagtcaagactaacttctggggtgacccattaaattggtggtctatctttaaattgtagttggctccgatgaggtagtcaattgagtcatcttcgccgtacacggctataaaagactcacgcacacgcaaatcatcaaatacgatatacgacgtcaacgaacagtattactactttcatcaagcctctcgtgaattcgcaaatagccagttgtgtcgacattcattgacatagcatcacgcgagagcataatgataaaggcaactagtgcatttagacatagcgacgagatgctgacccatcaacagaatcagaaggtgaaacagttgctttgctgatgactactaaaataaaatatattgtcaaatgtcgatttattacttaacgacgtg

SEQ ID NO: 15406 - DNA, 2061 bp, Muscodor strobelii
  misc_feature: SGI cDNA ID NO. 565102
  misc_feature: Elevated expression when VOC is produced
  misc_feature: Encodes the peptide sequence at SEQ ID NO 15407
atggacccaggaacggtcattgctatagttcagctctcagcttcggttcttaaactcggccgtgacattgccttcgagttctttggtcctgaaagagtccccgataagctcaagcaccttaataccagactacagatacttaacacatttttagaaagaatcctcaagcaacctagcgcaccggataaactttcaacgactgactttcctggatcagcctcaatattgaagacgctgacagaatgcaaattgtttctcgaacaatatcggtctttactctaccaaaaaaaaggactcggtgccgcaacacaaagaatcattctgacagttgggccagacgcatctcgaatcgatgaatttcacaaaaagattgatcagcactatacggagctagaacaatggcgaatgggagatctggcggacatgatggacgagttgaggtcacttattatatccacgcggggttccatttctagcccatcacttgactccgttccgactctcccgggctctgagccaagcgaacacagccaggagatcgagtatttgcggaaactatctaccttcgaagctcacgcccagtcttccgcgaaccatcacttacctttaccgacattccacagctcgcctgtcttaagggcccaatctcgaccgccttccttaggttcaattcccgaattaccaccatcgtcctatactcccgtttctgttgaacataccaatcgaaactccaccagttctggcagtagtttcttggctgatatcctaggacaagttggagacacaaatgttaacgcgtctccgacatcaaatctaaacgaatcggggcaacgtaatcgcaggtcttctggtggcactttatctaggccaaacaaccacgtcatattagaattaggcgaattggccaaccgacacagaatacagttcgacacagattgttacgatgtacacgaggagacgatgggacgcgtgatagattgggtcaatcatgaagttcgcatacggcatttcgtgccctctgatattggacgaatcccgtataccaagccaaatgatcctaaaatggaggtcacatttctgcctcgggggtcaagacatcgctttgagattattactacgtcaggccctagtttggtaacggaaaaatttcggtatcaattcagccgtaagatagatcgtgaggcatttcagcgccgtttgcgagttcgggagtatctagagatgatacaggttgtgaggatccacagcgcagcagagagaaacatcgctatgaacatacatctgaaggtttgggggcgtaactatcagaacgcagaaccaacgatgtcctttgcatatcttggagagaacgagtcaaaccatcacgtcgagtatatcttacgatggttcagaaggactgcagagaccaaaggtgatacaagacttattttaagaccgtattcggaagagaccgacttgagctacgggccttccgtcgaaggatcgaataagaagtcctcgccattgtcgagtatccgaagaaggatgtcaggcgggtcggtttcctcatccgggtcgcggtctccttctttgcacggcaatgccccgattctatatgagctgagcggcaaaagagcccctgagcacgtccgaaaacttggatatttggagatcgagtttcaaaactccagattgcgagataattttgtaaatgcttgcttcgaggcccatcatgccaggtcaagattaagacgggggacaatgggctcggacgcagactccttgagcccgaattcagcatcgatattctcctcgaactctcccagtgtaggtcaagtgataaccccacaaaccggcgctatccagtctgaaagcacaactcttgtttccggtaccagcgacatcggaagtggtgatattagacttccaagtccagctcttcagagctctatacctagtgtcaactttaacaatgtctctccgttcatcatgccccgccccgcagttcctgatacatcccagcgagagacgagagacacttcaccgactaatagacagacggaatggcgaacggaagaataa

SEQ ID NO: 15407 - protein, 686 aa, Muscodor strobelii
  misc_feature: SGI Peptide ID NO. 565102
  misc_feature: Useful for introducing or modulating the production of volatile compounds
MDPGTVIAIVQLSASVLKLGRDIAFEFFGPERVPDKLKHLNTRLQILNTFLERILKQPSAPDKLSTTDFPGSASILKTLTECKLFLEQYRSLLYQKKGLGAATQRIILTVGPDASRIDEFHKKIDQHYTELEQWRMGDLADMMDELRSLIISTRGSISSPSLDSVPTLPGSEPSEHSQEIEYLRKLSTFEAHAQSSANHHLPLPTFHSSPVLRAQSRPPSLGSIPELPPSSYTPVSVEHTNRNSTSSGSSFLADILGQVGDTNVNASPTSNLNESGQRNRRSSGGTLSRPNNHVILELGELANRHRIQFDTDCYDVHEETMGRVIDWVNHEVRIRHFVPSDIGRIPYTKPNDPKMEVTFLPRGSRHRFEIITTSGPSLVTEKFRYQFSRKIDREAFQRRLRVREYLEMIQVVRIHSAAERNIAMNIHLKVWGRNYQNAEPTMSFAYLGENESNHHVEYILRWFRRTAETKGDTRLILRPYSEETDLSYGPSVEGSNKKSSPLSSIRRRMSGGSVSSSGSRSPSLHGNAPILYELSGKRAPEHVRKLGYLEIEFQNSRLRDNFVNACFEAHHARSRLRRGTMGSDADSLSPNSASIFSSNSPSVGQVITPQTGAIQSESTTLVSGTSDIGSGDIRLPSPALQSSIPSVNFNNVSPFIMPRPAVPDTSQRETRDTSPTNRQTEWRTEE

SEQ ID NO: 15408 - DNA, 3452 bp, Muscodor strobelii
  misc_feature: SGI EST ID NO. CUFF.36659.1
  misc_feature: Variant of the nucleotide sequence at SEQ ID NO 15406
tatacatgccattactgcaccagccgtggtgcccagaagggtcgtcaagttaataattaaagacaagcttgatgctccatactggcagctcggatagacataactcaaagctggaccgataacatttacagaaaagatactgtaagacgttgtgaaaaagcccgaggcagcaacccaccatacgcgccattgaaacccgtccaagccaggacggtcaatcacggcttggattgcagcatcagggtcttgaggatcctttaaacaacattatcagctgtcaagcacagtacatacacagactacttactactcacatattcgatttcatcagctactcgtcgagcgccggcattcaatgacgaaaagtagccccccatgacagcgtatactatttggcgcaacgatcgatgtcgttaacccgcccagtcaactctcacgaaccggattcaggttactatccattgtatgtatagttgcgtgctgggcggctcgaaatcacttggcaagtagtcaatctgcctttgtggcgtttatggatccatccgtgtcactcattcgaggcaaggaccatggccaacgtttgacatggtgttcagaagctgccgagaaccccaataatcatgtattgtatttctgtgtgccttccgacgagctcagccgcaatgcaatgggatcgtgaccatcggtgaacatactagcgaagcgagcgtcagtccgaattgagttgcctggactcgggtcgcagacgatccaaaataggcattgtatacaaaaacgtgcctcgatggagacttctaattggcgactattgctccacccttgtctactcccaatatttcgctttcatgatgcccaagccgacaggatcgtctaaacgcagaaagcctcaaatgaagaacgagatgtgcgttgtgtcgcgcgacacgataggttaattgacatcctacgctatgtgcccagactttcgggttcgtcttgcaccagcttatatcggctgcctcttattgacccacacgttattatacccttcctaataagttatctcttccatgctgcgtcacacctttcagtgtgctttgtaggttcgctgttgcgggttatagtatgagacttgtcttttgagcatggacccaggaacggtcattgctatagttcagctctcagcttcggttcttaaactcggccgtgacattgccttcgagttctttggtcctgaaagagtccccgataagctcaagcaccttaataccagactacagatacttaacacatttttagaaagaatcctcaagcaacctagcgcaccggataaactttcaacgactgactttcctggatcagcctcaatattgaagacgctgacagaatgcaaattgtttctcgaacaatatcggtctttactctaccaaaaaaaaggactcggtgccgcaacacaaagaatcattctgacagttgggccagacgcatctcgaatcgatgaatttcacaaaaagattgatcagcactatacggagctagaacaatggcgaatgggagatctggcggacatgatggacgagttgaggtcactgttagtgtgctaagtatctagataccaaagaatgggtagagaacccagctaaagtagcatacatagtattatatccacgcggggttccatttctagcccatcacttgactccgttccgactctcccgggctctgagccaagcgaacacagccaggagatcgagtatttgcggaaactatctaccttcgaagctcacgcccagtcttccgcgaaccatcacttacctttaccgacattccacagctcgcctgtcttaagggcccaatctcgaccgccttccttaggttcaattcccgaattaccaccatcgtcctatactcccgtttctgttgaacataccaatcgaaactccaccagttctggcagtagtttcttggctgatatcctaggacaagttggagacacaaatgttaacgcgtctccgacatcaaatctaaacgaatcggggcaacgtaatcgcaggtcttctggtggcactttatctaggccaaacaaccacgtcatattagaattaggcgaattggccaaccgacacagaatacagttcgacacagattgttacgatgtacacgaggagacgatgggacgcgtgatagattgggtcaatcatgaagttcgcatacggcatttcgtgccctctgatattggacgaatcccgtataccaagccaaatgatcctaaaatggaggtcacatttctgcctcgggggtcaagacatcgctttgagattattactacgtcaggccctagtttggtaacggaaaaatttcggtatcaattcagccgtaagatagatcgtgaggcatttcagcgccgtttgcgagttcgggagtatctagagatgatacaggttgtgaggatccacagcgcagcagagagaaacatcgctatgaacatacatctgaaggtttgggggcgtaactatcagaacgcagaaccaacgatgtcctttgcatatcttggagagaacgagtcaaaccatcacgtcgagtatatcttacgatggttcagaaggactgcagagaccaaaggtgatacaagacttattttaagaccgtattcggaagagaccgacttgagctacgggccttccgtcgaaggatcgaataagaagtcctcgccattgtcgagtatccgaagaaggatgtcaggcgggtcggtttcctcatccgggtcgcggtctccttctttgcacggcaatgccccgattctatatgagctgagcggcaaaagagcccctgagcacgtccgaaaacttggatatttggagatcgagtttcaaaactccagattgcgagataattttgtaaatgcttgcttcgaggcccatcatgccaggtcaagattaagacgggggacaatgggctcggacgcagactccttgagcccgaattcagcatcgatattctcctcgaactctcccagtgtaggtcaagtgataaccccacaaaccggcgctatccagtctgaaagcacaactcttgtttccggtaccagcgacatcggaagtggtgatattagacttccaagtccagctcttcagagctctatacctagtgtcaactttaacaatgtctctccgttcatcatgccccgccccgcagttcctgatacatcccagcgagagacgagagacacttcaccgactaatagacagacggaatggcgaacggaagaataagattttgttcctgagaccattcatatttcgcagcgtttaggtggatacactacgctgctgtaggactcgacatagtttcatgccatccaaattgatacttttgaaactgaacgaacttcttttgcttttatgtgtactattatttgtgccgattgatttttccaatgaatagactaggagaaacattgacatcagtcctcg

SEQ ID NO: 15409 - DNA, 1053 bp, Muscodor strobelii
  misc_feature: SGI cDNA ID NO. 565103
  misc_feature: Encodes the peptide sequence at SEQ ID NO 15410
atgcctctacacctcctcggcaagaaatcatggaatgtctacaaccccgccaacatcgcccgcgtcaagaaagacgaggccgaagcccaagcccgccaagaagccgaggacaaacgccgacaagacctcgacgcagagaggcggctcgctatcttgcgtggcgagtctcctcctccactgccagcggccgctgaagacgaaccctctgagtcccacgcccatcacaagccaccccgcgaccagccccacgaccatgatctcccgcgagaccggaggaagcgcaagcgcttcggcgaggatgacaccgacttcgagatgcgcatagcgagagatcgtgccgacgcccccaccacgcccccacatggccacattgcgcttttcccggaagacgacgacccccgtgggaagaagaagaagaacgaggaagcggagagggagtcagccgcgaagcgacgtgaatacgaggaccaatacactatgcgcttctccaacgccgctggccagggaggagctggcgttacagagtccggaccctggtatacctcaaaagacgtgggcagcactagagagaacatgagtcctgcatcgcaaccacatggcaaaaacgtctggggaaaagacgacccaaaaaggagagaccgagacgccgcgagagtcgtcgctaatgatccgctcgcgatgatgaagcgaggcgcagctaaagcgcgcgacgtggaaagggagagacgggcgctcaacgaagagaaggccagagaggtctaccagctgcgcaaggaggaacagagacgtgaaaggaagaggaggcatcaaatcatgaacaccggcatcgagaacgccgatcgaggtcccctaatcgtgacgggcaagaaaggcaccatcgccgtcgttcttcagaccgtcggcacgagcacaggcattcccatgggcatcatggcaaaagcagtcaaaacggggactctcgccgcgatccaacacatgccaaccgggatgcatcgacaaattcgcgacgagttttggcgaaaacggatcactactaggatttcatgggtttag

SEQ ID NO: 15410 - protein, 350 aa, Muscodor strobelii
  misc_feature: SGI Peptide ID NO. 565103
  misc_feature (1)..(325): NCBI GI: 67525279 Blast Desc: AN3097.2 [Aspergillus nidulans FGSC A4] gi|40744492|gb|EAA63668.1| AN3097.2 [Aspergillus nidulans FGSC A4] gi|259485955|tpe|CBF83414.1| TPA: conserved [Aspergillus FGSC
  misc_feature (1)..(262): NCBI GI: 121705962 Blast Desc: conserved [Aspergillus clavatus NRRL 1] gi|119399390|gb|EAW09818.1| conserved [Aspergillus clavatus NRRL 1]
  misc_feature (1)..(260): NCBI GI: 255936785 Blast Desc: Pc13g09970 [Penicillium chrysogenum Wisconsin 54-1255] gi|211584039|emb|CAP92066.1| Pc13g09970 [Penicillium chrysogenum Wisconsin 54-1255]
  misc_feature (4)..(256): NCBI GI: 256728889 Blast Desc: NECHADRAFT_26610 [Nectria haematococca mpVI 77-13-4]
  misc_feature (1)..(320): NCBI GI: 119491249 Blast Desc: NFIA_064800 [Neosartorya fischeri NRRL 181] gi|119411373|gb|EAW21316.1| conserved [Neosartorya fischeri NRRL 181]
  misc_feature (4)..(260): NCBI GI: 70999304 Blast Desc: conserved [Aspergillus fumigatus Af293] gi|66852008|gb|EAL92333.1| conserved [Aspergillus fumigatus Af293]
  misc_feature (4)..(260): NCBI GI: 159127386 Blast Desc: conserved [Aspergillus fumigatus A1163]
  misc_feature (1)..(260): NCBI GI: 171690184 Blast Desc: protein product [Podospora anserina] gi|170945040|emb|CAP71151.1| protein product [Podospora anserina]
  misc_feature (1)..(240): NCBI GI: 164427374 Blast Desc: NCU03386 [Neurospora crassa OR74A] gi|157071716|gb|EAA27597.2| [Neurospora crassa OR74A]
  misc_feature (4)..(271): NCBI GI: 238483295 Blast Desc: conserved [Aspergillus flavus NRRL3357] gi|220700936|gb|EED57274.1| conserved [Aspergillus flavus NRRL3357]
MPLHLLGKKSWNVYNPANIARVKKDEAEAQARQEAEDKRRQDLDAERRLAILRGESPPPLPAAAEDEPSESHAHHKPPRDQPHDHDLPRDRRKRKRFGEDDTDFEMRIARDRADAPTTPPHGHIALFPEDDDPRGKKKKNEEAERESAAKRREYEDQYTMRFSNAAGQGGAGVTESGPWYTSKDVGSTRENMSPASQPHGKNVWGKDDPKRRDRDAARVVANDPLAMMKRGAAKARDVERERRALNEEKAREVYQLRKEEQRRERKRRHQIMNTGIENADRGPLIVTGKKGTIAVVLQTVGTSTGIPMGIMAKAVKTGTLAAIQHMPTGMHRQIRDEFWRKRITTRISWV

SEQ ID NO: 15411 - DNA, 666 bp, Muscodor strobelii
  misc_feature: SGI cDNA ID NO. 565104
  misc_feature: Reduced expression when VOC is produced
  misc_feature: Encodes the peptide sequence at SEQ ID NO 15412
atggccgacacggcagaaccagggtcagttgcgccagcatctgctgccaccaccgcaaaccccatcattttgcgagcgccatccaaatatctagaggacccttccaaaccggccctgacaactgcaggagaacgatttatgccaccatccgctcagtggctctggggaacctgggctgtgacccactcgacgctatccatgtggaagtctgcacaaaacgtacggattacatacacgccccagaaggaagaccagactgtctttgacaatctcgtcgagtacgagaagaaaaacggcaagggtggtgtcaagtctgtccacggcaccgagaaaccggatcccaaagtgctctccgcttggaactggcgcggcaaaggatggctcgctatcgcgagtagccactgggaggttctaggctggggcgatcgtgctctgccaaacggtgacgttgagcgctgggctgtcacgtggttcgcgtccactttgttcacggaagaaggcgtcgatatctattgcgatcgccgcgagggtctcagcaaggagacggccgacgacatcatcaagacgctcaaagagctcaaggacgcacccaaactggtcgacaatgtgcagaagaagatgatggagatccccattagtctgccttggaaggagagcaagaaatga

SEQ ID NO: 15412 - protein, 221 aa, Muscodor strobelii
  misc_feature: SGI Peptide ID NO. 565104
  misc_feature (22)..(217): NCBI GI: 145606290 Blast Desc: MGG_02412 [Magnaporthe grisea 70-15] gi|145013990|gb|EDJ98631.1| MGG_02412 [Magnaporthe grisea 70-15]
  misc_feature (9)..(218): NCBI GI: 85082036 Blast Desc: NCU03385 [Neurospora crassa OR74A] gi|28881160|emb|CAD70330.1| [Neurospora crassa] gi|28917911|gb|EAA27596.1| conserved [Neurospora crassa OR74A]
  misc_feature (15)..(220): NCBI GI: 261356764 Blast Desc: conserved [Verticillium albo-atrum VaMs.102]
  misc_feature (21)..(218): NCBI GI: 46138773 Blast Desc: FG10901.1 [Gibberella zeae PH-1]
  misc_feature (17)..(212): NCBI GI: 154320688 Blast Desc: BC1G_01816 [Botryotinia fuckeliana B05.10] gi|150853505|gb|EDN28697.1| BC1G_01816 [Botryotinia fuckeliana B05.10]
  misc_feature (22)..(212): NCBI GI: 156040413 Blast Desc: SS1G_12223 [Sclerotinia sclerotiorum 1980] gi|154696279|gb|EDN96017.1| SS1G_12223 [Sclerotinia sclerotiorum 1980]
  misc_feature (67)..(218): NCBI GI: 256729073 Blast Desc: NECHADRAFT_39825 [Nectria haematococca mpVI 77-13-4]
  misc_feature (43)..(193): NCBI GI: 145241069 Blast Desc: An08g10770 [Aspergillus niger] gi|134077710|emb|CAK45750.1| protein product [Aspergillus niger]
  misc_feature (20)..(218): NCBI GI: 171690182 Blast Desc: protein product [Podospora anserina] gi|170945039|emb|CAP71150.1| protein product [Podospora anserina]
  misc_feature (22)..(211): NCBI GI: 255945635 Blast Desc: Pc20g10960 [Penicillium chrysogenum Wisconsin 54-1255] gi|211588320|emb|CAP86425.1| Pc20g10960 [Penicillium chrysogenum Wisconsin 54-1255]
  misc_feature: Useful for introducing or modulating the production of volatile compounds
MADTAEPGSVAPASAATTANPIILRAPSKYLEDPSKPALTTAGERFMPPSAQWLWGTWAVTHSTLSMWKSAQNVRITYTPQKEDQTVFDNLVEYEKKNGKGGVKSVHGTEKPDPKVLSAWNWRGKGWLAIASSHWEVLGWGDRALPNGDVERWAVTWFASTLFTEEGVDIYCDRREGLSKETADDIIKTLKELKDAPKLVDNVQKKMMEIPISLPWKESKK

SEQ ID NO: 15413 - DNA, 6566 bp, Muscodor strobelii
  misc_feature: SGI EST ID NO. CUFF.36748.1
  misc_feature: Variant of the nucleotide sequence at SEQ ID NO 15411
cgagactcaactccttcttgatctatcgtgaagagctttttctgcttcagagattatcacttcgttgtgactcaaccaagtttcatcttgaccaaacatacatacacccaagacatatacgcacaaagactcttagtcttacacgttgtccacttcttcctaagcgctatctggccttgtctatctcaatacctagcacgtatcgctattggatatccactccagacaccctaccaccgtagcttcacatcatacctatcaaaatggctgcctactcttcgcaatactacaccagcgggatgacgatcccctccaaggacggtgacatgtcctacacatatccctacggctacaccagctcatcctacagtgtgtcgcctcccgagacgacagatccgtctgtcatctcttccggcggcgcaacgtactcttacggcggaagcggccacagtgctatggtgtcttccggctccgctgctaccggctaccacggtgcttcgggtgctaatggcgacgactgctactattacagcagtgacagcgccgggtccgccagcggtgttgacttcaatgagtatatgcaagatcgatttgcggactcattcgacccgctggagatggaccgaagtgtagttcgacaagcacaagcatccggaactttgaacgccaaacaccgcgagctgatggagctccaagcaaaagcacaagctcgcctcgccaagtcgcgcgcaagattcgccgacggcatgcgcgacgcacaggaagtacgatcaaatctggagtggacgtccaagaaagtttcatcgctaaagaagaaggccgagaagaagcactcaaaagagtaccaaaaggcgcgggagcgatatccctcgcccgagtactagagtactatcttaactgcaatatttgagccgcatcgcaccacatcacgtagcggcggcagagcctcaaaaacggggttagcatgatcaacgacaaaaagcgaataatcatatccagcacatcacttcatcacgctattttctccaccttctacaagtgtcattttttaactcataattcggattctttcagaggcgttctcggcgtattctacgatacaagtagtggagaattggattctcgtcttccccatgcgaatgagagtgacaaggtgcacaatggggtgtgacgggaatgcaagattcccatatgcgagatcgcgcgccgtcgtttctgccacgtgcgcgggaacgctgccgaaacgcacacgccccctccttgggcacgaccttttgctttttctgactaacagtgctattttcggtgacttattacacgcaccctcgacaagggtgggagcgttaggctcgaggatgtaccatttttgggtgtctgtcttgcgcggtggctggtgggcgataccgtgaccgcgcggcaagagatagacgcccactggatcgctgctttacgcagatgttggcgtggtacaccacccaggagggcgtgtaggcagtggtagcaggggacgggagagctacgtcttgttcctgcatcttgtttgctgtgccagttctccatgcgggtagcagactgccacagggtgctgctgatgcgagacgggtaagctagcgagggatcggggatgtcaactggtttccttaacgagattacgaatgatgattggacggtatggaacggatttgggggatacatgggctaaaaagtacatgatcttggtattgagcaagggcgtaggcacgtacgcgagacagcataccatgcgtgcgaccagtgtggtccgagggctggtacatctgcgacgtgcgtgaccgagccccgggaacagcctgctcggctcgcgaggagggcgtagaggtgtgatgaccttagagacacactaggggggcggatgaccgattgtctatgtatcttgtagataggccatgctcccacacacacacacacacacagacatcacacagccgtagaagagcgcacctttccacttcgggtctataggtttccccatttcggacaggaaatggtcgcgtaggcggtagctgcccttgagaagtcgcagttagttggcatgattggacagagacggccatagctgtaatacattgattgcccttttcggagacatggcccatgtcacagcaatgtacccaagttgtagacagtgtcaaatgtacctgtatgtctccttatcaaaagtaacacggacgcgtaagggccatgtcagtatgtatggcgagagatgaccgcccaaccacacgacaagcagtgcgcctcgtgtatgtatatgcatgcgtatgtgtgtgcgtcgaagggtgtcacgtgatcttgtgttgcgtgaggaacggaggcttctggtcaatattggatcagggggacagccttccataaaggtatgggtgataggtatgtttaccgcaagagcagatactaggtatgtaagtccattcctatccttagacacttgggttccagctgaccatgaacacgcagcatacgccaacctaaagccctgccgcatctccagtcgcaacatgctccaaggcgtagaccgtgatgccaagtcaggtgcgagctgtcttagcttcctcccaagatacccactgtcccaggggctcgaagcccatggatgtttcgagcttttcccagggattgactatgaaggccggatcatagtagtcctcccaccacttgccaccttgttgcctatgctggttccggtcttgatggcgtccccggatgccgccgcggcttggcaataccccagaatggaccgatgggggaggtttcgggggcagattcggggtcattgggccaccgaaagatgtaccgatcctggattggactgggtcggctgggtcaggagccgaagaaggtgcggtttcgagatgttgaggctcggggccgaggtcttcagcttgagacacgcccggttgtgacgcagcgccgggtgcgataccgtcttcgccgtcatcgtcaaggtcaatctcatcgtggttctgcagccggtgaccgagcggggtcatgttggaaccggtggtggtcgggtgaagcgggatggtcgcgctcggggcgatgacggcgtcggcggtggggttgaacttgcggcgcttgctgggcttctgcgcgccgaagctggagaaacccatggccgcagccatggcatcggaagtgtcgtcgacgtccatgacggctgcggcgttgtttgcgcctgtgcccagtctgtgcccaacgcggggtggcgaagttgggtcgacaagaagtcaaatattgttggcgacgacgggagataattgactaaggtactgagcagcgacagggatgttggagtaggcggtgacactgttctaagtccttgccgctatgaatggcattgagactggcaaattgtgtgtttgccggcgtgaagcgtcatggcagtagccgcactgcaaacgtagtgtacacggtggaatgaggctgagaaataaggcttgaaattgcgactctaaccattcgctcgacgtgccattcggtgcccaagatcatacccagaaagcggtgggaatagtcaatggaaagagccgccaacaacctgttacgactcacaatgccaatcacaattgacgactagaccgaatttacctaccttgatcctcctctccaggcctggggaagagcagggggttccctggcaatccttaaggtacggactatgcgtaagttttgtttaagtgtgagtttggagagcgagacaagacgactcaacaccatagcccgagccagtccacaacaacggtcaatcccagacatcccacgcccgagatgagttactgcgagcggcagccagccgaaaatggcggaggacacgcaacgaaagcattgattgtccagtcccacaacagcttttgcgatcctatcgaagagctccagattgggggctgccgcccaacgcgaatgggcaagctagggcaccaggccaagaccagctacgccgactaacaccaaagcaagacgggccaagcgattacttgagtcttgaacccagtaattctaggatacatttctaagtcctgacgagtctggtggtcttgatgccgagcaaaggttagtccctacagatcaatttcaacatgcagggatgtgaattgcttccgccgtgattatgtgaaaccagaggctcatagctcttcgcgcggactcaattaattttattgacatcattggtccctgaacccgaccccggatcttccaacatccgacggacctactactccaggagctatgtcacagagctacaaaacccatcgtctctcgaacttacatttcaggaattcaccagctgtcttcttgacttactccctcaaccacaatttcactgtttatcagaggtgctttacgaaatggccgacacggcagaaccagggtcagttgcgccagcatctgctgccaccaccgcaaaccccatcattttgcgagcgccatccaaatatctagaggacccttccaaaccggccctgacaactgcaggagaacgatttatgccaccatccgctcagtggctctggggaacctgggctgtgacccactcgacgctatccatgtggaagtctgcacaaaacgtacggattacatacacgccccagaaggaagaccagactgtctttgacaatctcgtcgagtacgagaagaaaaacggcaagggtggtgtcaagtctgtccacggcaccgagaaaccggatcccaaagtgctctccgcttggaactggcgcggcaaaggatggctcgctatcgcgagtagccactgggaggttctaggctggggcgatcgtgctctgccaaacggtgacgttgagcgctgggctgtcacgtggttcgcgtccactttgttcacggaagaaggcgtcgatatctattgcgatcgccgcgagggtctcagcaaggagacggccgacgacatcatcaagacgctcaaagagctcaaggacgcacccaaactggtcgacaatgtgcagaagaagatgatggagatccccattagtctgccttggaaggagagcaagaaatgagcaccttgcggcgtgatagtcttgctttgctgcattgttattgatatttgacgctcggagcatatatgatacccaataggattaggaagacacgtggaaggccgctgcaaataataatgattaattcatacttgatatcacctatggggcacgtgcatgggtatctgaagctgtaaaaaatgaacccgtaacgccatgctctgatgtccctaaacccatgaaatcctagtagtgatccgttttcgccaaaactcgtcgcgaatttgtcgatgcatcccggttggcatgtgttggatcgcggcgagagtccccgttttgactgcttttgccatgatgcccatgggaatgcctgtgctcgtgccgacggtctgaagaacgacggcgatggtgcctttcttgcccgtcacgattaggggacctcgatcggcgttctcgatgccggtgttcatgatttctgtagcgaatcttgtcgtcgagagaggtcccttccagttcctgggcatcactacgatgcctcctcttcctttcacgtctctgttcctccttgcgcagctggtagacctctctggccttctcttcgttgagcgcccgtctctccctttccacgtcgcgcgctttagctgcgcctcgcttcatcatcgcgagcggatcattagcgacgactctcgcggcgtctcggtctctcctttttgggtcgtcttttccccagacgtttttgccatgtggttgcgatgcaggactcatgttctctctagtgctgcccacgtcttttgaggtataccagggtccggactctgtaacgccagctcctccctggccagcggcgttggagaagcgcatagtgtattggtcctcgtattcacgtcgcttcgcggctgactccctctccgcttcctcgttcttcttcttcttcccacgggggtcgtcgtcttccgggaaaagcgcaatgtggccatgcttgtcaacgagcggggcgttgctggtcttgcttgtgttggggtgcaaggcggtactgggggcgtggtgggggcgtcggcacgatctctcgctatgcgcatctcgaagtcggtgtcatcctcgccgaagcgcttgcgcttcctccggtctcgcgggagatcatggtcgtggggctggtcgcggggtggcttgtgatgggcgtgggactcagagggttcgtcttcagcggccgctggcagtggaggaggagactcgccacgcaagatagcgagccgcctctctgcgtcgaggtcttgtcggcgtttgtcctcggcttcttggcgggcttgggcttcggcctcgtctttcttgacgcgggcgatgttggcggggttgtagacattccatgatttcttgccgaggaggtgtagaggcatggttcacgttatcgcatgtgtgagtgtcttgtaggttaatagaaatgctgagactatgcaagctacgacatatcaaggcgacgtctagagagactggtgggcaactagagaagtgggatgaacattcctcggtggacatggcggg

SEQ ID NO: 15414 - DNA, 624 bp, Muscodor strobelii
  misc_feature: SGI cDNA ID NO. 565105
  misc_feature: Encodes the peptide sequence at SEQ ID NO 15415
atggacgtcgacgacacttccgatgccatggctgcggccatgggtttctccagcttcggcgcgcagaagcccagcaagcgccgcaagttcaaccccaccgccgacgccgtcatcgccccgagcgcgaccatcccgcttcacccgaccaccaccggttccaacatgaccccgctcggtcaccggctgcagaaccacgatgagattgaccttgacgatgacggcgaagacggtatcgcacccggcgctgcgtcacaaccgggcgtgtctcaagctgaagacctcggccccgagcctcaacatctcgaaaccgcaccttcttcggctcctgacccagccgacccagtccaatccaggatcggtacatctttcggtggcccaatgaccccgaatctgcccccgaaacctcccccatcggtccattctggggtattgccaagccgcggcggcatccggggacgccatcaagaccggaaccagcataggcaacaaggtggcaagtggtgggaggactactatgatccggccttcatagtcaatccctgggaaaagctcgaaacatccatgggcttcgagcccctgggacagtgggtatcttgggaggaagctaagacagctcgcacctga

SEQ ID NO: 15415 - protein, 207 aa, Muscodor strobelii
  misc_feature: SGI Peptide ID NO. 565105
  misc_feature (1)..(207): NCBI GI: 256728890 Blast Desc: NECHADRAFT_79981 [Nectria haematococca mpVI 77-13-4]
  misc_feature (2)..(207): NCBI GI: 46138771 Blast Desc: FG10900.1 [Gibberella zeae PH-1]
  misc_feature (1)..(197): NCBI GI: 156040411 Blast Desc: [Sclerotinia sclerotiorum 1980] gi|154696278|gb|EDN96016.1| [Sclerotinia sclerotiorum 1980]
  misc_feature (1)..(197): NCBI GI: 154320686 Blast Desc: [Botryotinia fuckeliana B05.10] gi|150853504|gb|EDN28696.1| [Botryotinia fuckeliana B05.10]
  misc_feature (10)..(198): NCBI GI: 261356890 Blast Desc: [Verticillium albo-atrum VaMs.102]
  misc_feature (2)..(196): NCBI GI: 39968641 Blast Desc: [Magnaporthe grisea 70-15] gi|145013989|gb|EDJ98630.1| [Magnaporthe grisea 70-15]
MDVDDTSDAMAAAMGFSSFGAQKPSKRRKFNPTADAVIAPSATIPLHPTTTGSNMTPLGHRLQNHDEIDLDDDGEDGIAPGAASQPGVSQAEDLGPEPQHLETAPSSAPDPADPVQSRIGTSFGGPMTPNLPPKPPPSVHSGVLPSRGGIRGRHQDRNQHRQQGGKWWEDYYDPAFIVNPWEKLETSMGFEPLGQWVSWEEAKTART

SEQ ID NO: 15416 - DNA, 5610 bp, Muscodor strobelii
  misc_feature: SGI EST ID NO. CUFF.36747.0
  misc_feature: Variant of the nucleotide sequence at SEQ ID NO 15414
cccgccatgtccaccgaggaatgttcatcccacttctctagttgcccaccagtctctctagacgtcgccttgatatgtcgtagcttgcatagtctcagcatttctattaacctacaagacactcacacatgcgataacgtgaaccatgcctctacacctcctcggcaagaaatcatggaatgtctacaaccccgccaacatcgcccgcgtcaagaaagacgaggccgaagcccaagcccgccaagaagccgaggacaaacgccgacaagacctcgacgcagagaggcggctcgctatcttgcgtggcgagtctcctcctccactgccagcggccgctgaagacgaaccctctgagtcccacgcccatcacaagccaccccgcgaccagccccacgaccatgatctcccgcgagaccggaggaagcgcaagcgcttcggcgaggatgacaccgacttcgagatgcgcatagcgagagatcgtgccgacgcccccaccacgcccccagtaccgccttgcaccccaacacaagcaagaccagcaacgccccgctcgttgacaagcatggccacattgcgcttttcccggaagacgacgacccccgtgggaagaagaagaagaacgaggaagcggagagggagtcagccgcgaagcgacgtgaatacgaggaccaatacactatgcgcttctccaacgccgctggccagggaggagctggcgttacagagtccggaccctggtatacctcaaaagacgtgggcagcactagagagaacatgagtcctgcatcgcaaccacatggcaaaaacgtctggggaaaagacgacccaaaaaggagagaccgagacgccgcgagagtcgtcgctaatgatccgctcgcgatgatgaagcgaggcgcagctaaagcgcgcgacgtggaaagggagagacgggcgctcaacgaagagaaggccagagaggtctaccagctgcgcaaggaggaacagagacgtgaaaggaagaggaggcatcgtagtgatgcccaggaactggaagggacctctctcgacgacaagattcgctacagaaatcatgaacaccggcatcgagaacgccgatcgaggtcccctaatcgtgacgggcaagaaaggcaccatcgccgtcgttcttcagaccgtcggcacgagcacaggcattcccatgggcatcatggcaaaagcagtcaaaacggggactctcgccgcgatccaacacatgccaaccgggatgcatcgacaaattcgcgacgagttttggcgaaaacggatcactactaggatttcatgggtttagggacatcagagcatggcgttacgggttcattttttacagcttcagatacccatgcacgtgccccataggtgatatcaagtatgaattaatcattattatttgcagcggccttccacgtgtcttcctaatcctattgggtatcatatatgctccgagcgtcaaatatcaataacaatgcagcaaagcaagactatcacgccgcaaggtgctcatttcttgctctccttccaaggcagactaatggggatctccatcatcttcttctgcacattgtcgaccagtttgggtgcgtccttgagctctttgagcgtcttgatgatgtcgtcggccgtctccttgctgagaccctcgcggcgatcgcaatagatatcgacgccttcttccgtgaacaaagtggacgcgaaccacgtgacagcccagcgctcaacgtcaccgtttggcagagcacgatcgccccagcctagaacctcccagtggctactcgcgatagcgagccatcctttgccgcgccagttccaagcggagagcactttgggatccggtttctcggtgccgtggacagacttgacaccacccttgccgtttttcttctcgtactcgacgagattgtcaaagacagtctggtcttccttctggggcgtgtatgtaatccgtacgttttgtgcagacttccacatggatagcgtcgagtgggtcacagcccaggttccccagagccactgagcggatggtggcataaatcgttctcctgcagttgtcagggccggtttggaagggtcctctagatatttggatggcgctcgcaaaatgatggggtttgcggtggtggcagcagatgctggcgcaactgaccctggttctgccgtgtcggccatttcgtaaagcacctctgataaacagtgaaattgtggttgagggagtaagtcaagaagacagctggtgaattcctgaaatgtaagttcgagagacgatgggttttgtagctctgtgacatagctcctggagtagtaggtccgtcggatgttggaagatccggggtcgggttcagggaccaatgatgtcaataaaattaattgagtccgcgcgaagagctatgagcctctggtttcacataatcacggcggaagcaattcacatccctgcatgttgaaattgatctgtagggactaacctttgctcggcatcaagaccaccagactcgtcaggacttagaaatgtatcctagaattactgggttcaagactcaagtaatcgcttggcccgtcttgctttggtgttagtcggcgtagctggtcttggcctggtgccctagcttgcccattcgcgttgggcggcagcccccaatctggagctcttcgataggatcgcaaaagctgttgtgggactggacaatcaatgctttcgttgcgtgtcctccgccattttcggctggctgccgctcgcagtaactcatctcgggcgtgggatgtctgggattgaccgttgttgtggactggctcgggctatggtgttgagtcgtcttgtctcgctctccaaactcacacttaaacaaaacttacgcatagtccgtaccttaaggattgccagggaaccccctgctcttccccaggcctggagaggaggatcaaggtaggtaaattcggtctagtcgtcaattgtgattggcattgtgagtcgtaacaggttgttggcggctctttccattgactattcccaccgctttctgggtatgatcttgggcaccgaatggcacgtcgagcgaatggttagagtcgcaatttcaagccttatttctcagcctcattccaccgtgtacactacgtttgcagtgcggctactgccatgacgcttcacgccggcaaacacacaatttgccagtctcaatgccattcatagcggcaaggacttagaacagtgtcaccgcctactccaacatccctgtcgctgctcagtaccttagtcaattatctcccgtcgtcgccaacaatatttgacttcttgtcgacccaacttcgccaccccgcgttgggcacagactgggcacaggcgcaaacaacgccgcagccgtcatggacgtcgacgacacttccgatgccatggctgcggccatgggtttctccagcttcggcgcgcagaagcccagcaagcgccgcaagttcaaccccaccgccgacgccgtcatcgccccgagcgcgaccatcccgcttcacccgaccaccaccggttccaacatgaccccgctcggtcaccggctgcagaaccacgatgagattgaccttgacgatgacggcgaagacggtatcgcacccggcgctgcgtcacaaccgggcgtgtctcaagctgaagacctcggccccgagcctcaacatctcgaaaccgcaccttcttcggctcctgacccagccgacccagtccaatccaggatcggtacatctttcggtggcccaatgaccccgaatctgcccccgaaacctcccccatcggtccattctggggtattgccaagccgcggcggcatccggggacgccatcaagaccggaaccagcataggcaacaaggtggcaagtggtgggaggactactatgatccggccttcatagtcaatccctgggaaaagctcgaaacatccatgggcttcgagcccctgggacagtgggtatcttgggaggaagctaagacagctcgcacctgacttggcatcacggtctacgccttggagcatgttgcgactggagatgcggcagggctttaggttggcgtatgctgcgtgttcatggtcagctggaacccaagtgtctaaggataggaatggacttacatacctagtatctgctcttgcggtaaacatacctatcacccatacctttatggaaggctgtccccctgatccaatattgaccagaagcctccgttcctcacgcaacacaagatcacgtgacacccttcgacgcacacacatacgcatgcatatacatacacgaggcgcactgcttgtcgtgtggttgggcggtcatctctcgccatacatactgacatggcccttacgcgtccgtgttacttttgataaggagacatacaggtacatttgacactgtctacaacttgggtacattgctgtgacatgggccatgtctccgaaaagggcaatcaatgtattacagctatggccgtctctgtccaatcatgccaactaactgcgacttctcaagggcagctaccgcctacgcgaccatttcctgtccgaaatggggaaacctatagacccgaagtggaaaggtgcgctcttctacggctgtgtgatgtctgtgtgtgtgtgtgtgtgtgggagcatggcctatctacaagatacatagacaatcggtcatccgcccccctagtgtgtctctaaggtcatcacacctctacgccctcctcgcgagccgagcaggctgttcccggggctcggtcacgcacgtcgcagatgtaccagccctcggaccacactggtcgcacgcatggtatgctgtctcgccttacccgtctcgcatcagcagcaccctgtggcagtctgctacccgcatggagaactggcacagcaaacaagatgcaggaacaagacgtagctctcccgtcccctgctaccactgcctacacgccctcctgggtggtgtaccacgccaacatctgcgtaaagcagcgatccagtgggcgtctatctcttgccgcgcggtcacggtatcgcccaccagccaccgcgcaagacagacacccaaaaatggtacatcctcgagcctaacgctcccacccttgtcgagggtgcgtgtaataagtcaccgaaaatagcactgttagtcagaaaaagcaaaaggtcgtgcccaaggagggggcgtgtgcgtttcggcagcgttcccgcgcacgtggcagaaacgacggcgcgcgatctcgcatatgggaatcttgcattcccgtcacaccccattgtgcaccttgtcactctcattcgcatggggaagacgagaatccaattctccactacttgtatcgtagaatacgccgagaacgcctctgaaagaatccgaattatgagttaaaaaatgacacttgtagaaggtggagaaaatagcgtgatgaagtgatgtgctggatatgattattcgctttttgtcgttgatcatgctaaccccgtttttgaggctctgccgccgctacgtgatgtggtgcgatgcggctcaaatattgcagttaagatagtactctagtactcgggcgagggatatcgctcccgcgccttttggtactcttttgagtgcttcttctcggc

SEQ ID NO: 15417 - DNA, 621 bp, Muscodor strobelii
  misc_feature: SGI cDNA ID NO. 565106
  misc_feature: Elevated expression when VOC is produced
  misc_feature: Encodes the peptide sequence at SEQ ID NO 15418
atggctgcctactcttcgcaatactacaccagcgggatgacgatcccctccaaggacggtgacatgtcctacacatatccctacggctacaccagctcatcctacagtgtgtcgcctcccgagacgacagatccgtctgtcatctcttccggcggcgcaacgtactcttacggcggaagcggccacagtgctatggtgtcttccggctccgctgctaccggctaccacggtgcttcgggtgctaatggcgacgactgctactattacagcagtgacagcgccgggtccgccagcggtgttgacttcaatgagtatatgcaagatcgatttgcggactcattcgacccgctggagatggaccgaagtgtagttcgacaagcacaagcatccggaactttgaacgccaaacaccgcgagctgatggagctccaagcaaaagcacaagctcgcctcgccaagtcgcgcgcaagattcgccgacggcatgcgcgacgcacaggaagtacgatcaaatctggagtggacgtccaagaaagtttcatcgctaaagaagaaggccgagaagaagcactcaaaagagtaccaaaaggcgcgggagcgatatccctcgcccgagtactag

SEQ ID NO: 15418 - protein, 206 aa, Muscodor strobelii
  misc_feature: SGI Peptide ID NO. 565106
  misc_feature (4)..(205): NCBI GI: 85082029 Blast Desc: NCU03383 [Neurospora crassa OR74A] gi|28881158|emb|CAD70328.1| conserved [Neurospora crassa] gi|28917909|gb|EAA27594.1| [Neurospora crassa OR74A]
  misc_feature (4)..(205): NCBI GI: 256729074 Blast Desc: [Nectria haematococca mpVI 77-13-4]
  misc_feature (4)..(205): NCBI GI: 46138769 Blast Desc: FG10899.1 [Gibberella zeae PH-1]
  misc_feature (9)..(205): NCBI GI: 261356891 Blast Desc: conserved [Verticillium albo-atrum VaMs.102]
  misc_feature (4)..(205): NCBI GI: 116199961 Blast Desc: CHGG_08136 [Chaetomium globosum CBS 148.51] gi|88179415|gb|EAQ86883.1| CHGG_08136 [Chaetomium globosum CBS 148.51]
  misc_feature (3)..(206): NCBI GI: 156040401 Blast Desc: SS1G_12217 [Sclerotinia sclerotiorum 1980] gi|154696273|gb|EDN96011.1| SS1G_12217 [Sclerotinia sclerotiorum 1980]
  misc_feature (3)..(206): NCBI GI: 154320678 Blast Desc: BC1G_01811 [Botryotinia fuckeliana B05.10] gi|150853500|gb|EDN28692.1| BC1G_01811 [Botryotinia fuckeliana B05.10]
  misc_feature (4)..(206): NCBI GI: 145606288 Blast Desc: MGG_11914 [Magnaporthe grisea 70-15] gi|145013988|gb|EDJ98629.1| MGG_11914 [Magnaporthe grisea 70-15]
  misc_feature (1)..(206): NCBI GI: 171690178 Blast Desc: protein product [Podospora anserina] gi|170945037|emb|CAP71148.1| protein product [Podospora anserina]
  misc_feature (13)..(204): NCBI GI: 169600697 Blast Desc: SNOG_03192 [Phaeosphaeria nodorum SN15] gi|111068803|gb|EAT89923.1| SNOG_03192 [Phaeosphaeria nodorum SN15]
  misc_feature: Useful for introducing or modulating the production of volatile compounds
MAAYSSQYYTSGMTIPSKDGDMSYTYPYGYTSSSYSVSPPETTDPSVISSGGATYSYGGSGHSAMVSSGSAATGYHGASGANGDDCYYYSSDSAGSASGVDFNEYMQDRFADSFDPLEMDRSVVRQAQASGTLNAKHRELMELQAKAQARLAKSRARFADGMRDAQEVRSNLEWTSKKVSSLKKKAEKKHSKEYQKARERYPSPEY

SEQ ID NO: 15419 - DNA, 6566 bp, Muscodor strobelii; identical to SEQ ID NO: 15413
  misc_feature: SGI EST ID NO. CUFF.36748.1
  misc_feature: Variant of the nucleotide sequence at SEQ ID NO 15417

SEQ ID NO: 15420 - DNA, 1584 bp, Muscodor strobelii
  misc_feature: SGI cDNA ID NO. 565107
  misc_feature: Encodes the peptide sequence at SEQ ID NO 15421
atgccgtcctcattcttcgacgcgcacctcaatcttccctacttgatctggcccagcgcgaggacccagggacaggaaccagggcggacggagcactaccacaacaataccgcagcagggcccgtctctgctgcatcaccgccgttcaacctggatccagcagccattctcgccatcttcaccagccctttctccgtctctgcggcgacgtcgcccacagctgcctcagcccctacctgcgaagcgaggggcagggaccggcgtcctggctctgctgcttgctactggcctttacgcttttacgatttacgacatatcttcaccggcatcatctcagctccttctctgcctcccttccaatacgccatgtcagttcgcacgaggcgcggggtgcctgccacgcctgccatgccgcgggtcatatcccccagtcccacgccctccgactccaacgaccgcagcccggccgtcggcaacgctggcagttacttcggtccagtcaccagatcagcggctcgtcgccgtcagacgggcaacatcacgccacaggatcccatccaagagacagctgatgaagagtcagatcctgagctccggagagcccggacacggtcgcggagccccatagcaacccgtaaggcttctgggctatccatgtccaaggtcgatagcgaggctaccgcaagtttgatggccgtccccactatgaccacaaacggaacaacgatatcttctgacggccatctggcgcctcccgccttctcacctagcttcgcgtcaggctggagttggcgagacatcagccgcagcccgagtccgctggggctaataccgatccatcgccatttcaagacacttattcacaagcatgaagtgcctaggaaagcgctgcacgtttccattggattctttgtctactggttgtatgtcacaggcacgcaggtttccgccgtccctccatttctgatggcggccctgattcccattgcatccgttgattttctccgccacaaatacgcgagcctgaatcgcttctacgtcaagtatcttggcgcgttaatgcgtgagacggagtatgccggctggaatggcgtggtattctatcttctcggtgcatggatagttctgcgtttcttccccaaagatgtttctgtcgtagccgtcatgttactcagctggtgcgatactgcggcctcaacgttcggccggctctatgggagatacactcctaggattcgtaggggcaagtcgttggcgggttcgttcgccgcgtttcttgtaggaatatttatcgctggctggttctggggctatttggcccctcgaacggggcctttccccggggaagaaccgttcatgttcaaaggctttttgcggcttccacagcttgcattggacgtgctgggactggacgaggcacaagccaccgtaactggctctgctgctctctgtgtgatgagcttgtggtctggtttagttgtagctggaagtgaagtggtcgatatatttggatgggacgacaatttgacaattccggttctttccggcattggcatctggggctttcttaagattttcggctag

SEQ ID NO: 15421 - protein, 527 aa, Muscodor strobelii
  misc_feature: SGI Peptide ID NO. 565107
  misc_feature (292)..(526): Pfam Id: PF01148 Pfam Desc: Cytidylyltransferase family
  misc_feature (292)..(446): Pfam Id: PF01148 Pfam Desc: Cytidylyltransferase family
  misc_feature (94)..(526): NCBI GI: 256729075 Blast Desc: NECHADRAFT_4054 [Nectria haematococca mpVI 77-13-4]
  misc_feature (123)..(527): NCBI GI: 171690174 Blast Desc: protein product [Podospora anserina] gi|170945035|emb|CAP71146.1| protein product [Podospora anserina]
  misc_feature (23)..(526): NCBI GI: 46138765 Blast Desc: FG10897.1 [Gibberella zeae PH-1]
  misc_feature (123)..(527): NCBI GI: 116199965 Blast Desc: CHGG_08138 [Chaetomium globosum CBS 148.51] gi|88179417|gb|EAQ86885.1| CHGG_08138 [Chaetomium globosum CBS 148.51]
  misc_feature (127)..(527): NCBI GI: 164427372 Blast Desc: NCU03381 [Neurospora crassa OR74A] gi|28881157|emb|CAD70327.1| conserved [Neurospora crassa] gi|157071715|gb|EAA27592.2| NCU03381 [Neurospora crassa OR74A]
  misc_feature (75)..(527): NCBI GI: 145606284 Blast Desc: MGG_02416 [Magnaporthe grisea 70-15] gi|145013986|gb|EDJ98627.1| MGG_02416 [Magnaporthe grisea 70-15]
  misc_feature (135)..(527): NCBI GI: 240108402 Blast Desc: phosphatidate cytidylyltransferase family protein [Coccidioides posadasii C735 delta SOWgp]
  misc_feature (135)..(527): NCBI GI: 119186893 Blast Desc: CIMG_03494 [Coccidioides immitis RS]
  misc_feature (128)..(527): NCBI GI: 258563550 Blast Desc: conserved [Uncinocarpus reesii 1704] gi|237908027|gb|EEP82428.1| conserved [Uncinocarpus reesii 1704]
  misc_feature (133)..(526): NCBI GI: 225560222 Blast Desc: conserved [Ajellomyces capsulatus G186AR]
MPSSFFDAHLNLPYLIWPSARTQGQEPGRTEHYHNNTAAGPVSAASPPFNLDPAAILAIFTSPFSVSAATSPTAASAPTCEARGRDRRPGSAACYWPLRFYDLRHIFTGIISAPSLPPFQYAMSVRTRRGVPATPAMPRVISPSPTPSDSNDRSPAVGNAGSYFGPVTRSAARRRQTGNITPQDPIQETADEESDPELRRARTRSRSPIATRKASGLSMSKVDSEATASLMAVPTMTTNGTTISSDGHLAPPAFSPSFASGWSWRDISRSPSPLGLIPIHRHFKTLIHKHEVPRKALHVSIGFFVYWLYVTGTQVSAVPPFLMAALIPIASVDFLRHKYASLNRFYVKYLGALMRETEYAGWNGVVFYLLGAWIVLRFFPKDVSVVAVMLLSWCDTAASTFGRLYGRYTPRIRRGKSLAGSFAAFLVGIFIAGWFWGYLAPRTGPFPGEEPFMFKGFLRLPQLALDVLGLDEAQATVTGSAALCVMSLWSGLVVAGSEVVDIFGWDDNLTIPVLSGIGIWGFLKIFG

SEQ ID NO: 15422 - DNA, 2559 bp, Muscodor strobelii
  misc_feature: SGI cDNA ID NO. 565108
  misc_feature: Encodes the peptide sequence at SEQ ID NO 15423
atggacctgcgcaacggtctgtttggccgacggcctgcgcccgccgacacctcgacgcctccataccagtcgccgcctccattccagtcccgcgaacagggctacgaccagcgccagacccggaatgtcgagcagtcccgaccactgctgggcccgtcctcgcaggcgaaccctccgcgcgcctatcccccgccgaatgccaaccgccacgactacccaccgccagcccagcccaacgcctcgcgcggctacccctcgcaacaacccacccgccaggacttcgctccaccgtctcagcccaactccgccgctggcttcgcgccgccgccccagcagagacggcgcgatccctccctcttccaagtggccaagctgactgatgtcgatgctctgttttccaacatatgccacgtctccgtagacgatttcccggaatacgctacttcgggggacggcttcgtcattcttgtgaaccgccagtatcacctgacagcggttactgttcgaggcttaccttcgtccctgatcggcttgtctgcaccccagcgtcagtcgctcgcggccgaggaaggcgaggagatacatgttgaagtcgccaagggagagccaccacacctcgtcaacgtaaccgtcgaggcgcggttcaagaatgagatcaaccataaggctgatttcgacgctcccgaagtcgccgagtccgttttgaaagacgcttttctccactccttcagcgacacggtcattcaacgccaccagctagtttttggcatgcccaaaaaaaaacatccagatcacaagttttgcttcaagatcctagactttactgttttcgacgggcgtgaaacaagctttgggaaagttgataggaaattcacaaccgacatcgagttcaagatgaatagcaacacatccgttctcaaaataaactacccgcgggcactcattacttctaacatcaaactcgccgacttgggcatcggaggtcttgatggagagtttatgaccattttccgacgtgcttttgcatcccggacctacccccctcgtataatcagacagctgggccaagagcacgtgaagggtctcttactctatggacccccaggcactggcaagaccctcattgctagacagctctccaagagattcctcggtgtgcccgaagagaatatcaagatcatcaatggccccgaaatcctggacaaatatgtcggtggctccgaggagaacgttcgcaaagtgttcgcagctgcagagaaggaatggagagaaaagggggatgccagtggtcttcacgtcattatattcgacgaactggacgccgtatgcaagcaacgagggagtggtgttggcggcggcactggcactggtgatactgttgttaatcagctcttatctaaactggatggcgtcgagcaactcggcaatatccttctcatcggcatgacgaatcgaaaggatatgattgatgacgctctcctccgacctggccgtctcgaagtacatgtggaaatctcattgccagacgaacatggccgtctgcaaatcctaaacattcacacgcaagccctacgtcgtacaagaaagctggcagcagatgttgacctgaaagaatttgcaagcgtgaccaaaaacttttccggtgcagagctatctggtctcgtcagggctgccctctcttatgcctttactcggcattcagaggtcggcggcgctaccgagggtgccggaagcagcggtgaagacctcatggttatgcgcgacgacttgatgctggctttggacgacattcagcctgcatttggtgtttcagaggatcaactcaagctttccatgccgaatgggatcatacactacagcccgcatattgaatctatcctatccacaggcttccgctttgctcaggcaattcgcacctctgagaaattgaatttgttctccttgttgatccacggtccccatggtgccggaaaaacagccctggcaacagatattggcctcaagtcacaattccccttcgttaaaatagttagacctgttgataccggaaccagcgaacctgctaagcttgaatatttccggcggacattctcggatgcctataaatcgagcttgagtatagtcatattggacaacatcgaaaagataatcgaatggaatcctatcggaccgagattttccaatgcagttgttcagtatatcagtgccctgcttgaagcccaacccccaaaggggaaaaagatccttatcatagctaccacaagccaacgctcgatgcttcatcaacacggaaccttcgagttcgatagggagattgctgtcccagcagtgaaagatcacgcggagcttgcgcagctcttgatagcatctggcagattagataccgaagatgtcaacacgaccttgagcgagctacaatcaatcactggcaaccaagaggttgggataggtgttaaagcggtcttttccgccattgaatcggctctcactagagaacccattgctcaaagtttagcggaagacttgagtgccatcatagcatccacgagttcatattga

SEQ ID NO: 15423 - protein, 852 aa, Muscodor strobelii
  misc_feature: SGI Peptide ID NO. 565108
  misc_feature (361)..(564): Pfam Id: PF00004 Pfam Desc: ATPase family associated with various cellular activities (AAA)
  misc_feature (361)..(383): Pfam Id: PF07728 Pfam Desc: ATPase family associated with various cellular activities (AAA)
  misc_feature (97)..(847): NCBI GI: 85082044 Blast Desc: vesicular-fusion protein SEC18 [Neurospora crassa OR74A] gi|28881162|emb|CAD70332.1| NsfA protein [Neurospora crassa] gi|28917913|gb|EAA27598.1| vesicular-fusion protein SEC18
  misc_feature (101)..(829): NCBI GI: 119186743 Blast Desc: CIMG_03419 [Coccidioides immitis RS]
  misc_feature (101)..(829): NCBI GI: 240108453 Blast Desc: Vesicle fusion factor, [Coccidioides posadasii C735 delta SOWgp]
  misc_feature (108)..(852): NCBI GI: 39968651 Blast Desc: MGG_02418 [Magnaporthe grisea 70-15] gi|145013984|gb|EDJ98625.1| MGG_02418 [Magnaporthe grisea 70-15]
  misc_feature (81)..(828): NCBI GI: 121705964 Blast Desc: vesicular fusion ATPase, [Aspergillus clavatus NRRL 1] gi|119399391|gb|EAW09819.1| vesicular fusion ATPase, [Aspergillus clavatus NRRL 1]
  misc_feature (54)..(827): NCBI GI: 115391631 Blast Desc: vesicular-fusion protein SEC18 [Aspergillus terreus NIH2624] gi|114194244|gb|EAU35944.1| vesicular-fusion protein SEC18 [Aspergillus terreus NIH2624]
  misc_feature (65)..(828): NCBI GI: 238837782 Blast Desc: vesicle-fusing ATPase [Microsporum canis CBS 113480]
  misc_feature (68)..(828): NCBI GI: 226281149 Blast Desc: vesicular-fusion protein SEC18 [Paracoccidioides brasiliensis Pb01]
  misc_feature (80)..(846): NCBI GI: 19115602 Blast Desc: secretory pathway protein Sec18 () [Schizosaccharomyces pombe] gi|15214289|sp|Q9P7Q4.1|SEC18_SCHPO RecName: Full=Vesicular-fusion protein sec18 secretory pathway ()
  misc_feature (64)..(849): NCBI GI: 156040417 Blast Desc: SS1G_12225 [Sclerotinia sclerotiorum 1980] gi|154696281|gb|EDN96019.1| SS1G_12225 [Sclerotinia sclerotiorum 1980]
  misc_feature (120)..(833): SWISSPROT Homolog: EC 3.6.4.6 Vesicle-fusing ATPase
MDLRNGLFGRRPAPADTSTPPYQSPPPFQSREQGYDQRQTRNVEQSRPLLGPSSQANPPRAYPPPNANRHDYPPPAQPNASRGYPSQQPTRQDFAPPSQPNSAAGFAPPPQQRRRDPSLFQVAKLTDVDALFSNICHVSVDDFPEYATSGDGFVILVNRQYHLTAVTVRGLPSSLIGLSAPQRQSLAAEEGEEIHVEVAKGEPPHLVNVTVEARFKNEINHKADFDAPEVAESVLKDAFLHSFSDTVIQRHQLVFGMPKKKHPDHKFCFKILDFTVFDGRETSFGKVDRKFTTDIEFKMNSNTSVLKINYPRALITSNIKLADLGIGGLDGEFMTIFRRAFASRTYPPRIIRQLGQEHVKGLLLYGPPGTGKTLIARQLSKRFLGVPEENIKIINGPEILDKYVGGSEENVRKVFAAAEKEWREKGDASGLHVIIFDELDAVCKQRGSGVGGGTGTGDTVVNQLLSKLDGVEQLGNILLIGMTNRKDMIDDALLRPGRLEVHVEISLPDEHGRLQILNIHTQALRRTRKLAADVDLKEFASVTKNFSGAELSGLVRAALSYAFTRHSEVGGATEGAGSSGEDLMVMRDDLMLALDDIQPAFGVSEDQLKLSMPNGIIHYSPHIESILSTGFRFAQAIRTSEKLNLFSLLIHGPHGAGKTALATDIGLKSQFPFVKIVRPVDTGTSEPAKLEYFRRTFSDAYKSSLSIVILDNIEKIIEWNPIGPRFSNAVVQYISALLEAQPPKGKKILIIATTSQRSMLHQHGTFEFDREIAVPAVKDHAELAQLLIASGRLDTEDVNTTLSELQSITGNQEVGIGVKAVFSAIESALTREPIAQSLAEDLSAIIASTSSY

SEQ ID NO: 15424 - DNA, 3870 bp, Muscodor strobelii
  misc_feature: SGI EST ID NO. CUFF.36595.0
  misc_feature: Variant of the nucleotide sequence at SEQ ID NO 15422
cgtacacatcccaggtagcctgagctagacggtgcaggtacagatatgaaacagcagctctgatgatgacacttctggggcttaatccgtttagccttcagccgtccgcaaggttcattatgacctgctgcctagcaacatcttgctacctacctcctatcgcatccgtccctccccatacgtccgcctttagatcgaaaagttgaagtgtcctctgtccttcgctgatgtgagacgacatctgtccactgcattgggatttgggtactctacttaaacctcatcacgccgtgtctgatctgccacccgccatccgccatccgccatccgcccaccgcgaccacaaccatccccacgcccaccactcattgccacgccccagacagcaaccgccgtgaccctgacaccctcgcacaatggacctgcgcaacggtctgtttggccgacggcctgcgcccgccgacacctcgacgcctccataccagtcgccgcctccattccagtcccgcgaacagggctacgaccagcgccagacccggaatgtcgagcagtcccgaccactgctgggcccgtcctcgcaggcgaaccctccgcgcgcctatcccccgccgaatgccaaccgccacgactacccaccgccagcccagcccaacgcctcgcgcggctacccctcgcaacaacccacccgccaggacttcgctccaccgtctcagcccaactccgccgctggcttcgcgccgccgccccagcagagacggcgcgatccctccctcttccaagtggccaagctgactgatgtcgatgctctgttttccaacatatgccacgtctccgtagacgatttcccggaatacgctacttcgggggacggcttcgtcattcttgtgaaccgccagtatcacctgacagcggttactgttcgaggcttaccttcgtccctgatcggcttgtctgcaccccagcgtcagtcgctcgcggccgaggaaggcgaggagatacatgttgaagtcgccaagggagagccaccacacctcgtcaacgtaaccgtcgaggcgcggttcaagaatgagatcaaccataaggctgatttcgacgctcccgaagtcgccgagtccgttttgaaagacgcttttctccactccttcagcgacacggtcattcaacgccaccagctagtttttggcatgcccaaaaaaaaacatccagatcacaagttttgcttcaagatcctagactttactgttttcgacgggcgtgaaacaagctttgggaaagttgataggaaattcacaaccgacatcgagttcaagatgaatagcaacacatccgttctcaaaataaactacccgcgggcactcattacttctaacatcaaactcgccgacttgggcatcggaggtcttgatggagagtttatgaccattttccgacgtgcttttgcatcccggacctacccccctcgtataatcagacagctgggccaagagcacgtgaagggtctcttactctatggacccccaggcactggcaagaccctcattgctagacagctctccaagagattcctcggtgtgcccgaagagaatatcaagatcatcaatggccccgaaatcctggacaaatatgtcggtggctccgaggagaacgttcgcaaagtgttcgcagctgcagagaaggaatggagagaaaagggggatgccagtggtcttcacgtcattatattcgacgaactggacgccgtatgcaagcaacgagggagtggtgttggcggcggcactggcactggtgatactgttgttaatcagctcttatctaaactggatggcgtcgagcaactcggcaatatccttctcatcggcatgacgaatcgaaaggatatgattgatgacgctctcctccgacctggccgtctcgaagtacatgtggaaatctcattgccagacgaacatggccgtctgcaaatcctaaacattcacacgcaagccctacgtcgtacaagaaagctggcagcagatgttgacctgaaagaatttgcaagcgtgaccaaaaacttttccggtgcagagctatctggtctcgtcagggctgccctctcttatgcctttactcggcattcagaggtcggcggcgctaccgagggtgccggaagcagcggtgaagacctcatggttatgcgcgacgacttgatgctggctttggacgacattcagcctgcatttggtgtttcagaggatcaactcaagctttccatgccgaatgggatcatacactacagcccgcatattgaatctatcctatccacaggcttccgctttgctcaggcaattcgcacctctgagaaattgaatttgttctccttgttgatccacggtccccatggtgccggaaaaacagccctggcaacagatattggcctcaagtcacaattccccttcgttaaaatagttagacctgttgataccggaaccagcgaacctgctaagcttgaatatttccggcggacattctcggatgcctataaatcgagcttgagtatagtcatattggacaacatcgaaaagataatcgaatggaatcctatcggaccgagattttccaatgcagttgttcagtatatcagtgccctgcttgaagcccaacccccaaaggggaaaaagatccttatcatagctaccacaagccaacgctcgatgcttcatcaacacggaaccttcgagttcgatagggagattgctgtcccagcagtgaaagatcacgcggagcttgcgcagctcttgatagcatctggcagattagataccgaagatgtcaacacgaccttgagcgagctacaatcaatcactggcaaccaagaggttgggataggtgttaaagcggtcttttccgccattgaatcggctctcactagagaacccattgctcaaagtttagcggaagacttgagtgccatcatagcatccacgagttcatattgatttgacaagtagccacgactacgataagaatagaaccgtgtaattataccgattagaacacaattagaatacgatgctattagatctcgttcactgagcttgtcgtggcgagaatgcccagcttacagcaaatccctttggacaccttcgagctacctcgatatcttgatgaattagtccattgacatggtctaaaagagcaaagatgagcgggcttcaactctgcctctaaatccttcgtttagagaacggtggcgagttcgacgatcgtctcgatctcttctcttcgattccatgacgaggtgattgagcttttgggttttcacctaattggaggcatagacacagacgggacttatcaagccagaacgccggttccttcgtataatcggcattcacagctaatacgaggcgagctagttcacttgtagatccggagagacaaatctcgcgcttctaactaaccttctattctccacatttagccctgacggctttgttgtcgattatggaatcccttggttgaaatgattggtggaaacgacgaagacttcatagtccgaactatatagggaaaggctccttaatgatgaaacacgacctgctcttatgaatcaaatgtcattacattctccacgaatccatcccctgatagcaccaaagtagacatcgcggaggtctataaatgccaagagccaagaacttcaatatgctgccgagctgttcactgagttcatgacaattaagtcaaggcggaacattaagagaggatgatgctggcaaaaagtggaaatgaatggccctataaaggcaggcacttctcgcgtgctcatctgcccgtcttgtaaagaatgcgaaccatcgccagtaaaaataccgtaaagcaatagtaata

SEQ ID NO: 15425 - DNA, 810 bp, Muscodor strobelii
  misc_feature: SGI cDNA ID NO. 565109
  misc_feature: Encodes the peptide sequence at SEQ ID NO 15426
atgatgttcagcaaggtgctgcctattctgcttctcggtggagtgaccaacggggccattctacatgaccacatcactgatgcgccaacgaagacagtggatgccatcttggaccgacgagccactccaaccggcctcacgacaaccctcccagcctcagctggagcggtgacttctgcagccgcaatcgttgtcagtgggagctttgacggtggcatgaagcgttatgaacgatcaggtaacgtctgccagggacaaacagagacgggagaagcagatgccatgttcattctagaggctggcgctacactgtccaacgtgatcattggtgctacccaagccgaaggcgtccactgtcgaggaacatgcactatcaacaacgtctggtgggccgacgtgtgtgaagacgccatcacctttaaacagagcagtgggacgtcttacatcaatggtgggggggccttccacgcggaagacaagattatccagttcaacggccgaggtaccgtacaagtcaagaacttctatgccaatgattacggcaaggtggcacgaagctgcggtaactgttctggcaatggcggaccacgtaatttcatcatggacaatgttcgcgcgattgacggcggtgtcctctgtggaataaacacaaactacaaggatacatgcaagatcacaaactcatgccaggatgatgccaagtactgcgatcgatacacaggcaacagtagcggtgccgaaccaccaaagattggttctggccctgacggcacatactgtacaacaagtaatgtgagcgacaactgctga

SEQ ID NO: 15426 - protein, 269 aa, Muscodor strobelii
  misc_feature: SGI Peptide ID NO. 565109
  misc_feature (42)..(250): Pfam Id: PF03211 Pfam Desc: Pectate lyase
  misc_feature (46)..(269): NCBI GI: 242048820 Blast Desc: pectate lyase [Fusarium oxysporum f. cubense]
  misc_feature (46)..(269): NCBI GI: 3764095 Blast Desc: pectate lyase [Fusarium oxysporum f. sp. lycopersici]
  misc_feature (46)..(269): NCBI GI: 242048822 Blast Desc: pectate lyase [Fusarium oxysporum f. cubense]
  misc_feature (46)..(269): NCBI GI: 46114270 Blast Desc: FG02977.1 [Gibberella zeae PH-1]
  misc_feature (46)..(269): NCBI GI: 168156 Blast Desc: pectate lyase A [Nectria haematococca mpVI] gi|168158|gb|AAA33339.1| pectate lyase A [Nectria haematococca mpVI] gi|256722931|gb|EEU36310.1| polysaccharide lyase family 3
  misc_feature (44)..(269): NCBI GI: 39976397 Blast Desc: conserved [Magnaporthe grisea 70-15] gi|145011878|gb|EDJ96534.1| conserved [Magnaporthe grisea 70-15]
  misc_feature (29)..(269): NCBI GI: 116201269 Blast Desc: CHGG_08519 [Chaetomium globosum CBS 148.51] gi|88177037|gb|EAQ84505.1| CHGG_08519 [Chaetomium globosum CBS 148.51]
  misc_feature (46)..(269): NCBI GI: 256731663 Blast Desc: NECHADRAFT_41889 [Nectria haematococca mpVI 77-13-4]
  misc_feature (46)..(269): NCBI GI: 46136977 Blast Desc: FG10004.1 [Gibberella zeae PH-1]
  misc_feature (46)..(269): NCBI GI: 55824412 Blast Desc: pectate lyase [Gibberella zeae]
  misc_feature (69)..(240): SWISSPROT Homolog: EC 4.2.2.2 Pectate lyase
  misc_feature (69)..(240): SWISSPROT Homolog: EC 4.2.2.10 Pectin lyase
MMFSKVLPILLLGGVTNGAILHDHITDAPTKTVDAILDRRATPTGLTTTLPASAGAVTSAAAIVVSGSFDGGMKRYERSGNVCQGQTETGEADAMFILEAGATLSNVIIGATQAEGVHCRGTCTINNVWWADVCEDAITFKQSSGTSYINGGGAFHAEDKIIQFNGRGTVQVKNFYANDYGKVARSCGNCSGNGGPRNFIMDNVRAIDGGVLCGINTNYKDTCKITNSCQDDAKYCDRYTGNSSGAEPPKIGSGPDGTYCTTSNVSDNC

SEQ ID NO: 15427 - DNA, 250 bp, Muscodor strobelii
  misc_feature: SGI EST ID NO. CUFF.36573.0
  misc_feature: Variant of the nucleotide sequence at SEQ ID NO 15425
ttctgcagccgcaatcgttgtcagtgggagctttgacggtggcatgaagcgttatgaacgatcaggtaacgtctgccagggacaaacagagacgggagaagcagatgccatgttcattctagaggctggcgctacactgtccaacgtgatcattggtgctacccaagccgaaggcgtccactgtcgaggaacatgcactatcaacaacgtctggtgggccgacgtgtgtgaagacgccatcacctttaaa

SEQ ID NO: 15428 - DNA, 1443 bp, Muscodor strobelii
  misc_feature: SGI cDNA ID NO. 565110
  misc_feature: Encodes the peptide sequence at SEQ ID NO 15429
atggctcgccgaacatacaatatcgccatggtctgcgacttcttctacccacagcctggaggagtcgaaagtcacatttatcaagttgctactaagttgattgaccgcggtcacaaagtcatcgttatcacccatgcctacgatgaccgaaagggaatccgctatttgactaatggtgtcaaagtctatcacgttccgttcgccatcatctaccgctccgtcagcttccccaccgtcttttctttcttccctcttttccgcaacatcatcatccgggaacggatacagattgttcatggccatgctacccactcaactctttgtcaagaagccattctacacggcaggaccatgggattacgtaccgtgtttacagaccattcactttcgggattcgccgatactgggagtatattgacaaataaattactcaagttcaccctcagtgatgtcgatcatgtcatctgcgtcagtcatacaagtaaagaaaacacggtcctcagggctgcactcgatcctctcatggtctctgcaattcctaatgcccttgtctctgacaacttcaagccgttgcctcgccctgagccaggaagcctaccatacgctcagtatcctttgcccgctcacccccttggtcccaatgacactctcactattgtcgtggtcagtcgacttttttacaataaaggaactgatctactcactgcggctatacctcgcatcctcgaaaatcatccaaacacgcggttcattattgcaggatcagggcccaaggctatcgatcttcagcagacaatcgaacaaaatgttcttcaggacaaagtcgaaatgcttgggcctgtacgccatgaaaatgttcgcgacatcatggtcagaggccacatctaccttcatcccagtctgaccgaagcctttgggaccgtgatcgttgaagctgccagctgtggtctgtatgttgtatgcacggcggttggtggcatccccgaggtgttaccgtctcacatgactgtatttgcgaaacctgaggagaatgacctggttgctgcaacaggcaaagcaattgccgctttacgtgccaacaaggtccgcactgagaaattccatgagcaagtcaaaactatgtattcctggacgaatgtggcaatgcgtacagagcgtgtgtacagaggcattttaggtgacctcaccgaagacgagttttacggtacagaaattggcaatccgtcgcattggagccctacaagggggcgcaacttcgccctcatcgatcggctcaaacgctattatggatgtggcgtctgggccggtaagctcttttgcctatgtgtagtcattgattatttgatatttgtcctctgcgagtattggtggcctcgggaacaaatcgacattgctcgggactggccgcgaaaaccacctcctacgagtgacgatgacgagtag

SEQ ID NO: 15429 - protein, 480 aa, Muscodor strobelii
  misc_feature: SGI Peptide ID NO. 565110
  misc_feature (203)..(377): Pfam Id: PF00534 Pfam Desc: Glycosyl transferases group 1
  misc_feature (45)..(134): Pfam Id: PF08288 Pfam Desc: PIGA (GPI anchor biosynthesis)
  misc_feature (203)..(331): Pfam Id: PF00534 Pfam Desc: Glycosyl transferases group 1
  misc_feature (1)..(479): NCBI GI: 46108156 Blast Desc: FG00960.1 [Gibberella zeae PH-1]
  misc_feature (5)..(479): NCBI GI: 116205337 Blast Desc: conserved [Chaetomium globosum CBS 148.51] gi|88176680|gb|EAQ84148.1| conserved [Chaetomium globosum CBS 148.51]
  misc_feature (1)..(473): NCBI GI: 256734671 Blast Desc: glycosyltransferase family 4 [Nectria haematococca mpVI 77-13-4]
  misc_feature (5)..(471): NCBI GI: 171689756 Blast Desc: protein product [Podospora anserina] gi|170944840|emb|CAP70952.1| protein product [Podospora anserina]
  misc_feature (4)..(471): NCBI GI: 169767008 Blast Desc: [Aspergillus oryzae RIB40] gi|83765830|dbj|BAE55973.1| protein product [Aspergillus oryzae]
  misc_feature (6)..(477): NCBI GI: 258578511 Blast Desc: phosphatidylinositol N-acetylglucosaminyltransferase GPI3 subunit [Uncinocarpus reesii 1704] gi|237903703|gb|EEP78104.1| phosphatidylinositol GPI3 subunit
  misc_feature (10)..(471): NCBI GI: 238483819 Blast Desc: phosphatidylinositol:UDP-GlcNAc transferase subunit PIG-A [Aspergillus flavus NRRL3357] gi|220701198|gb|EED57536.1| phosphatidylinositol:UDP-GlcNAc transferase subunit PIG-A flavus
  misc_feature (6)..(471): NCBI GI: 240111629 Blast Desc: phosphatidylinositol N-acetylglucosaminyltransferase GPI3 subunit, [Coccidioides posadasii C735 delta SOWgp]
  misc_feature (6)..(471): NCBI GI: 67516709 Blast Desc: AN0636.2 [Aspergillus nidulans FGSC A4] gi|40746023|gb|EAA65179.1| AN0636.2 [Aspergillus nidulans FGSC A4] gi|259489097|tpe|CBF89087.1| TPA: similar to transferase FGSC
  misc_feature (10)..(477): NCBI GI: 159131799 Blast Desc: phosphatidylinositol:UDP-GlcNAc transferase subunit PIG-A [Aspergillus fumigatus A1163]
  misc_feature (10)..(467): SWISSPROT Homolog: EC 2.4.1.198 Phosphatidylinositol N-acetylglucosaminyltransferase
MARRTYNIAMVCDFFYPQPGGVESHIYQVATKLIDRGHKVIVITHAYDDRKGIRYLTNGVKVYHVPFAIIYRSVSFPTVFSFFPLFRNIIIRERIQIVHGHATHSTLCQEAILHGRTMGLRTVFTDHSLSGFADTGSILTNKLLKFTLSDVDHVICVSHTSKENTVLRAALDPLMVSAIPNALVSDNFKPLPRPEPGSLPYAQYPLPAHPLGPNDTLTIVVVSRLFYNKGTDLLTAAIPRILENHPNTRFIIAGSGPKAIDLQQTIEQNVLQDKVEMLGPVRHENVRDIMVRGHIYLHPSLTEAFGTVIVEAASCGLYVVCTAVGGIPEVLPSHMTVFAKPEENDLVAATGKAIAALRANKVRTEKFHEQVKTMYSWTNVAMRTERVYRGILGDLTEDEFYGTEIGNPSHWSPTRGRNFALIDRLKRYYGCGVWAGKLFCLCVVIDYLIFVLCEYWWPREQIDIARDWPRKPPPTSDDDE

SEQ ID NO: 15430 - DNA, 2185 bp, Muscodor strobelii
  misc_feature: SGI EST ID NO. CUFF.36584.0
  misc_feature: Variant of the nucleotide sequence at SEQ ID NO 15428
gttattacatgtacctacatgtattcaatctcggctgtaccgtcaaccagatcggagatcgtggtatcaagcgtcgagagccatccagacttgccatcactagcttcttatacacagtaaagaagcgaccaaaggagagcggatccccgttgtacaatggtcgcattgctagaatattgagcgatgattgtttccggtgcaccagcctgcggcaccattaaaaccgccatttacccatcatctagacagatcttcgtctctcaccatgaattattgcagccttcgcaggttcagctataagtgagacacgagcgtggagggtggagtatcgctctttggtagcggatctcgtaccgcatcatcgctatggctcgccgaacatacaatatcgccatggtctgcgacttcttctacccacagcctggaggagtcgaaagtcacatttatcaagttgctactaagttgattgaccgcggtcacaaagtcatcgttatcacccatgcctacgatgaccgaaagggaatccgctatttgactaatggtgtcaaagtctatcacgttccgttcgccatcatctaccgctccgtcagcttccccaccgtcttttctttcttccctcttttccgcaacatcatcatccgggaacggatacagattgttcatggccatgctacccactcaactctttgtcaagaagccattctacacggcaggaccatgggattacgtaccgtgtttacagaccattcactttcgggattcgccgatactgggagtatattgacaaataaattactcaagttcaccctcagtgatgtcgatcatgtcatctgcgtcagtcatacaagtaaagaaaacacggtcctcagggctgcactcgatcctctcatggtctctgcaattcctaatgcccttgtctctgacaacttcaagccgttgcctcgccctgagccaggaagcctaccatacgctcagtatcctttgcccgctcacccccttggtcccaatgacactctcactattgtcgtggtcagtcgacttttttacaataaaggaactgatctactcactgcggctatacctcgcatcctcgaaaatcatccaaacacgcggttcattattgcaggatcagggcccaaggctatcgatcttcagcagacaatcgaacaaaatgttcttcaggacaaagtcgaaatgcttgggcctgtacgccatgaaaatgttcgcgacatcatggtcagaggccacatctaccttcatcccagtctgaccgaagcctttgggaccgtgatcgttgaagctgccagctgtggtctgtatgttgtatgcacggcggttggtggcatccccgaggtgttaccgtctcacatgactgtatttgcgaaacctgaggagaatgacctggttgctgcaacaggcaaagcaattgccgctttacgtgccaacaaggtccgcactgagaaattccatgagcaagtcaaaactatgtattcctggacgaatgtggcaatgcgtacagagcgtgtgtacagaggcattttaggtgacctcaccgaagacgagttttacggtacagaaattggcaatccgtcgcattggagccctacaagggggcgcaacttcgccctcatcgatcggctcaaacgctattatggatgtggcgtctgggccggtaagctcttttgcctatgtgtagtcattgattatttgatatttgtcctctgcgagtattggtggcctcgggaacaaatcgacattgctcgggactggccgcgaaaaccacctcctacgagtgacgatgacgagtagtgtttctaggacgagtaattgttgtccttttcgttaggcgtagtcggcgtctcagatggtatttaacctcgaatgagtaaatctgtactttctgagttgaacccttgagcctctgctgggcgtatgctttcttcctgtctagaatcagtcgtacaatatgaaccacagcacacgtatctagagatgtgaggtcgatagctatcaggaaaacaagagcacaagctttaatcgcacgctactttgtggtcaactccctttcgggttgctagaataaccgagttatgaaatgttaggtattcatatgctatatcggctagctttaaaagataagtgtgttcgatagggcttagagtctcgcggctctaccacagaattt

SEQ ID NO: 15431 - DNA, 2619 bp, Muscodor strobelii
  misc_feature: SGI cDNA ID NO. 565111
  misc_feature: Encodes the peptide sequence at SEQ ID NO 15432
atgtattcgcgctacatacctgcggggagacttcctgccaacagcaccggaagccttttaacacctgcctccgagcctgacagagtgctccagccatacccaacgacgtatgcgagatatgtaccaccacaaaagaccagcaccgacgctatgcaatcagctacgagcttgcagcatgtgcgctttggcaacgagcgtggattcatagacgggccgccaaccaagaaaatcaagttggcggaggcaagtaccgtctcgagcacttctcagctaggagaagcaaggcaatcgacgaaagggagaacaattgacccgcactctgttaagcaattagatgatgacgacttgggcaaatatcgagcggcgatattgcatggccacaatggagcatactcagtagataccactgaagcggtacatgaggcaacagttgcttatgatccagactctgcgagcctcacagaagagaagtccggggatcgagtagactcagagggcagaagaaagaagaaaaagggtaaatcgaaagccggtggtgaaattgctttgcgatcttacgaagatgtatcgagtggtcacagggtagtgctcgaaaagaaagcgaagtccatgcgaaacccatccgaagaagaaaacctccttgatgagccaggctcacggaacgacatctcaagcgacgcaacgccgctcaagtctgctgcatctgccaatgatggaagagtctctcctgacactgagttacacggtttagagccgatcccccagccgaaacccgttgtgccaaatatatctagaccgagctacgaaatattgccctcatggctggcttcaccaattcgtgtaaatttagactctgcagcaccctggacagagcttggccgttcgccagacttggccattactccgggaatagcagcgcgccttgctgaaaagggatatcagaaagcttttgcaatacaaaccggcgtcattcctcttctcttgccccatcactgcagagtgatgcagagcgatgtattggtatctgctgcaaccgggtcggggaagacattagcttatacgctaccaataattcgggatcttagtcaaggtagccgccacctcactagattgcgcgctctcattgttcttccaaccagggaactggtcagacaagtgcagcaagtttgcgaacaatgtgcggcagttttctctcttgaaggggcaaaacgacggccgagaattgcaacagccatggggagccaatcacttgagcaagaacagagcttgctgattgagcgggaagaacgatacgggccagggccatatgcacagcacacgaagcgttcggtccaatcgagcggactttttgatggtggccacaatgaagatacggaggactccggatacgacaccgaagacgaggagcaacaagcaatacgaaagagagaagcgaggttatcatcgttgccagatcatagcgcaaaatatagatcaaaggtcgatgtcctcatttgtactccaggaagactcgtggagcacattaaatttacccccggcttctccttggattttgtcagatggcttatcgtagatgaagccgataagctccttggccagaattttcaacagtggttgaacgttgtgattcctcgtgtgcaaaacaatgatatagccggagctcgaaatcacaaacagtcaaacttatcgggtgttcgcaaagtcattttgagcgcaacgatgacgcgagacctcgatcaactggagggcctcaagctccgtcatcccaagctcgttgtgctcgaggcttctgaaaccagacacaaagcatcagatgataatttgcttcttgaaaatgcgctccctaaatcacttagcgaagcagccctgaaagttaacgacccgcatttaaaaccactgttcttggtcgagctgcttcaaagtcaccacgttcagggtgttacccgcgaagacgacgtcactcggatttcagaggacaacgaacctaattctgatgcggtatcagaatcagaaacggattcatattcagaatcgagcatgttagatcctaagttgaccataaagtcggttcagcatgtgcaagaccggtcgccttctgtcttgatctttacgaagtcgaacgaagctacgattcgtctgtcacgtctccttaagattctcgcacccgctaatgggtccgaaattggtctgctcacgtccactacgccatataccacgcgccgagatactattcgacaattcagctccggaaaactgcgaattctcgttgcgtctgatcttgtagcccgaggtattgatcttccgtcactggaccatgtcatcaattacgacatgccatctagcattgcgtcgtatgtacatcgggttggccggacagcccgagcaggaaagtcgggtcaagcttggaccttgttcacaaatcctgaagcccgatggttctggaacgagattgcaagttcgaaacagatacagcgcggtacgccagtcgagcgtatcagggccatagaggaaaagggtgatgtttttgccgtcaaagtagctgcgtacgaagctgcgctggcccaactgggtcaagaaacccgtcaagcatggcatcaaggagataaagtgtatggctaa

SEQ ID NO: 15432 - protein, 872 aa, Muscodor strobelii
  misc_feature: SGI Peptide ID NO. 565111
  misc_feature (317)..(581): Pfam Id: PF00270 Pfam Desc: DEAD/DEAH box helicase
  misc_feature (720)..(796): Pfam Id: PF00271 Pfam Desc: Helicase conserved C-terminal domain
  misc_feature (317)..(424): Pfam Id: PF00270 Pfam Desc: DEAD/DEAH box helicase
  misc_feature (490)..(581): Pfam Id: PF00270 Pfam Desc: DEAD/DEAH box helicase
  misc_feature (246)..(861): NCBI GI: 39942298 Blast Desc: MGG_03229 [Magnaporthe grisea 70-15] gi|145015780|gb|EDK00270.1| MGG_03229 [Magnaporthe grisea 70-15]
  misc_feature (248)..(859): NCBI GI: 240111630 Blast Desc: DEAD box ATP-dependent RNA helicase, [Coccidioides posadasii C735 delta SOWgp]
  misc_feature (224)..(866): NCBI GI: 225561306 Blast Desc: ATP-dependent RNA helicase DBP6 [Ajellomyces capsulatus G186AR]
  misc_feature (224)..(866): NCBI GI: 240274402 Blast Desc: ATP-dependent RNA helicase dbp6 [Ajellomyces capsulatus H143]
  misc_feature (248)..(859): NCBI GI: 119185891 Blast Desc: CIMG_02993 [Coccidioides immitis RS]
  misc_feature (224)..(866): NCBI GI: 154282339 Blast Desc: [Ajellomyces capsulatus NAm1] gi|150410145|gb|EDN05533.1| [Ajellomyces capsulatus NAm1]
  misc_feature (248)..(863): NCBI GI: 226285824 Blast Desc: ATP-dependent RNA helicase dbp6 [Paracoccidioides brasiliensis Pb01]
  misc_feature (249)..(863): NCBI GI: 226295059 Blast Desc: ATP-dependent RNA helicase dbp6 [Paracoccidioides brasiliensis Pb18]
  misc_feature (189)..(647): NCBI GI: 171689754 Blast Desc: protein product [Podospora anserina] gi|170944839|emb|CAP70951.1| protein product [Podospora anserina]
  misc_feature (248)..(862): NCBI GI: 239612589 Blast Desc: DEAD/DEAH box helicase [Ajellomyces dermatitidis ER-3]
MYSRYIPAGRLPANSTGSLLTPASEPDRVLQPYPTTYARYVPPQKTSTDAMQSATSLQHVRFGNERGFIDGPPTKKIKLAEASTVSSTSQLGEARQSTKGRTIDPHSVKQLDDDDLGKYRAAILHGHNGAYSVDTTEAVHEATVAYDPDSASLTEEKSGDRVDSEGRRKKKKGKSKAGGEIALRSYEDVSSGHRVVLEKKAKSMRNPSEEENLLDEPGSRNDISSDATPLKSAASANDGRVSPDTELHGLEPIPQPKPVVPNISRPSYEILPSWLASPIRVNLDSAAPWTELGRSPDLAITPGIAARLAEKGYQKAFAIQTGVIPLLLPHHCRVMQSDVLVSAATGSGKTLAYTLPIIRDLSQGSRHLTRLRALIVLPTRELVRQVQQVCEQCAAVFSLEGAKRRPRIATAMGSQSLEQEQSLLIEREERYGPGPYAQHTKRSVQSSGLFDGGHNEDTEDSGYDTEDEEQQAIRKREARLSSLPDHSAKYRSKVDVLICTPGRLVEHIKFTPGFSLDFVRWLIVDEADKLLGQNFQQWLNVVIPRVQNNDIAGARNHKQSNLSGVRKVILSATMTRDLDQLEGLKLRHPKLVVLEASETRHKASDDNLLLENALPKSLSEAALKVNDPHLKPLFLVELLQSHHVQGVTREDDVTRISEDNEPNSDAVSESETDSYSESSMLDPKLTIKSVQHVQDRSPSVLIFTKSNEATIRLSRLLKILAPANGSEIGLLTSTTPYTTRRDTIRQFSSGKLRILVASDLVARGIDLPSLDHVINYDMPSSIASYVHRVGRTARAGKSGQAWTLFTNPEARWFWNEIASSKQIQRGTPVERIRAIEEKGDVFAVKVAAYEAALAQLGQETRQAWHQGDKVYG

SEQ ID NO: 15433 - DNA, 1170 bp, Muscodor strobelii
  misc_feature: SGI cDNA ID NO. 565112
  misc_feature: Elevated expression when VOC is produced
  misc_feature: Encodes the peptide sequence at SEQ ID NO 15434
atggaattgatcaatgcaagaacactcgaactcgaaaaaccccaaaatcgtgcaccctatcaaataccaccttatgctattctctcgcatagatggagtacggacccggagaaagacgaagtgacttatcaagagataaaagataatagaggaaaagctgttgcaaagaagggctgggaaaaaatccagtggtactgctgcgaccgagcactccgtgatggttacgaatgggcttgggtagacacgtgctgcattaacaaagcaaacagtacggtatacagtgaagctatcaactccatgtaccgctggtacgccgacagcgcagtttgttatgtctaccttgaagatgtgaagtctaacaacccagatctatccgagcccgctgaggctcacatacttcatggaatcgaagactggctcaccatggcccctattggtcgttatgattatttcggcgagtatgaaggcgagcgcgacgacctttatcattaccatatgcagtgcttcacctacgccattgcagagcagcaaaatcgtcaaaaggaatgcgtgaggaacataactagaaatgcagcttatggacaatatatgagtaatagattctcaagcgagttcgaggagagccaatggttcaagagaggatggactctgcaagagctgcttgctcctcaacgggtcgagtttttcaaccgagagtggacgtttctagggacgaaacaatcccttcagacacaagtcgctatggttactgggatcgacacccagtacctccttggccatacccctctctttggtgtcccggccggccgcatcttcaactgggcctcgaataggcgcactaccgtgctggaagacatggcatattgtctctttggattttttgatgtcaacttgccagtcatatatggagaaggggaaaaagcttttataaggttgcaggaagagatcatccgtcaatatgatgactatagcgtgttcctctggggctttgggggccagactcaaaagcttagagaaggcgacaccctctccttcctgacaactttggaaccatctcttgcgttctcgcctaaattggaacagagtcaccatcctgagacaacgccagccgatgtctatatcaagtcgtggtatatttacccagatgcgatcggagcccgtaccgcataa

SEQ ID NO: 15434 - protein, 389 aa, Muscodor strobelii
  misc_feature: SGI Peptide ID NO. 565112
  misc_feature (25)..(219): Pfam Id: PF06985 Pfam Desc: Heterokaryon incompatibility protein (HET)
  misc_feature (25)..(114): Pfam Id: PF06985 Pfam Desc: Heterokaryon incompatibility protein (HET)
  misc_feature (198)..(219): Pfam Id: PF06985 Pfam Desc: Heterokaryon incompatibility protein (HET)
  misc_feature (1)..(330): NCBI GI: 171683780 Blast Desc: protein product [Podospora anserina] gi|170941850|emb|CAP67503.1| protein product [Podospora anserina]
  misc_feature (1)..(338): NCBI GI: 145249734 Blast Desc: An14g05830 [Aspergillus niger] gi|134081889|emb|CAK42144.1| protein product [Aspergillus niger]
  misc_feature (1)..(348): NCBI GI: 145608538 Blast Desc: MGG_06555 [Magnaporthe grisea 70-15] gi|145016004|gb|EDK00494.1| MGG_06555 [Magnaporthe grisea 70-15]
  misc_feature (1)..(328): NCBI GI: 171683732 Blast Desc: protein product [Podospora anserina] gi|170941826|emb|CAP67479.1| protein product [Podospora anserina]
  misc_feature (1)..(329): NCBI GI: 85107313 Blast Desc: NCU06608 [Neurospora crassa OR74A] gi|28923954|gb|EAA33114.1| conserved [Neurospora crassa OR74A]
  misc_feature (23)..(376): NCBI GI: 171677823 Blast Desc: protein product [Podospora anserina] gi|170936980|emb|CAP61638.1| protein product [Podospora anserina]
  misc_feature (1)..(328): NCBI GI: 256720642 Blast Desc: NECHADRAFT_28132 [Nectria haematococca mpVI 77-13-4]
  misc_feature (1)..(329): NCBI GI: 156035539 Blast Desc: SS1G_12973 [Sclerotinia sclerotiorum 1980] gi|154698378|gb|EDN98116.1| SS1G_12973 [Sclerotinia sclerotiorum 1980]
  misc_feature (1)..(339): NCBI GI: 169595686 Blast Desc: SNOG_00587 [Phaeosphaeria nodorum SN15] gi|111070962|gb|EAT92082.1| SNOG_00587 [Phaeosphaeria nodorum SN15]
  misc_feature (22)..(328): NCBI GI: 169621807 Blast Desc: SNOG_14116 [Phaeosphaeria nodorum SN15] gi|111057233|gb|EAT78353.1| SNOG_14116 [Phaeosphaeria nodorum SN15]
  misc_feature: Useful for introducing or modulating the production of volatile compounds
MELINARTLELEKPQNRAPYQIPPYAILSHRWSTDPEKDEVTYQEIKDNRGKAVAKKGWEKIQWYCCDRALRDGYEWAWVDTCCINKANSTVYSEAINSMYRWYADSAVCYVYLEDVKSNNPDLSEPAEAHILHGIEDWLTMAPIGRYDYFGEYEGERDDLYHYHMQCFTYAIAEQQNRQKECVRNITRNAAYGQYMSNRFSSEFEESQWFKRGWTLQELLAPQRVEFFNREWTFLGTKQSLQTQVAMVTGIDTQYLLGHTPLFGVPAGRIFNWASNRRTTVLEDMAYCLFGFFDVNLPVIYGEGEKAFIRLQEEIIRQYDDYSVFLWGFGGQTQKLREGDTLSFLTTLEPSLAFSPKLEQSHHPETTPADVYIKSWYIYPDAIGARTA

SEQ ID NO: 15435 - DNA, 6121 bp, Muscodor strobelii
  misc_feature: SGI EST ID NO. CUFF.36666.3
  misc_feature: Variant of the nucleotide sequence at SEQ ID NO 15433
cttgaaactcattgtctcatagtctgattacccctcaaaataatcttcctacttcaagcatcactgtcttgtttttttttttgagagactcaagagcgattttagtcacatttcagactgatagcgaagatccgacgaccaaaattgctcatagtgacatcgttctatttcgatatggaattgatcaatgcaagaacactcgaactcgaaaaaccccaaaatcgtgcaccctatcaaataccaccttatgctattctctcgcatagatggagtacggacccggagaaagacgaagtgacttatcaagagataaaagataatagaggaaaagctgttgcaaagaagggctgggaaaaaatccagtgactgctgcgaccgagcactccgtgatggttacgaatgggcttgggtagacacgtgctgcattaacaaagcaaacagtacggtatacagtgaagctatcaactccatgtaccgctggtacgccgacagcgcagtttgttatgtctaccttgaagatgtgaagtctaacaacccagatctatccgagcccgctgaggctcacatacttcatggaatcgaagactggctcaccatggcccctattggtcgttatgattatttcggcgagtatgaaggcgagcgcgacgacctttatcattaccatatgcagtgcttcacctacgccattgcagagcagcaaaatcgtcaaaaggaatgcgtgaggaacataactagaaatgcagcttatggacaatatatgagtaatagattctcaagcgagttcgaggagagccaatggttcaagagaggatggactctgcaagagctgcttgctcctcaacgggtcgagtttttcaaccgagagtggacgtttctagggacgaaacaatcccttcagacacaagtcgctatggttactgggatcgacacccagtacctccttggccatacccctctctttggtgtcccggccggccgcatcttcaactgggcctcgaataggcgcactaccgtgctggaagacatggcatattgtctctttggattttttgatgtcaacttgccagtcatatatggagaaggggaaaaagcttttataaggttgcaggaagagatcatccgtcaatatgatgactatagcgtgttcctctggggctttgggggccagactcaaaagcttagagaaggcgacaccctctccttcctgacaactttggaaccatctcttgcgttctcgcctaagtgctttgatcatcacaataccattgtacttccccaggggctcccgtggcgattatatagtgaacatactgggagaatgtatcgaaaatcagatgatcgagatcttgacgagataagaggcccaaccaaacacgtgaccgaaaccatagattggaacagagtcaccatcctgagacaacgccagccgatgtctatatcaagtcgtggtatatttacccagatgcgatcggagcccgtaccgcataaagccaaagggcggagactacgactagcatttacaaactgcttctaccactctgaaggagaagaatatcctatttacatcttggtggaagaacaaaatctccaaagtggcagtcatgcgaagagtcgtcacatagggcgatcgcagtactatgaaaattgcgccaaatgggatgggcccttttgcatggaaaaaacggtaaatcttgaagaagacatggaaggcatcattgcccagcctccatatgcttcgattcgtagaagcgtggctctaatggcagatgcagaaggcgaaagggcaacactgcacctctctacccggaagatggcgaagccattgaaccagccctggccaatgctcaggtttgcattgtggacaccgatatcatcttccaagtcgtcgaatgttacagtgtggagcttcaataccaacccactcccatggtacatagacgacgatgggatgatgatgaactggggatacctcgatggaggtccgtcggaggggatatctatctatcttagtcgcgatgctctccgtcttcaccacccgtacatttctacaattgggctttttgtcctccgagtttcaaatcaaaacaccgcggtattttattacttcgggctaggacttgtcgggagcaacaatcgatggtggtgtgcgttggaggccacagcgtcagaccctccaaacccatcagaactggaccacgtatggaatttggtcatattgaagtacgcgtctgggtttacaatacaaactcacaaatttaccgatttcattcatgttaggcactcggatacagactcactttcagtctgcattagaccagaacacgaggatttgacgaagtgtttttcccgagtaattatccaggctatcattgttccaacgcgaccggaaagcgcgactcccaatccgcttcccaagcggctaatatcggaatgcaaatgcgaaagtgtttgtgagtggtgcggtccgaataggttcccaattccggttggaagcgaacagtcccgcgtattgccttccaccagcacagaatgtcacgaagaggagacaaataaatcgaacaagttttcgtacttttcctcatttctttgtgaaaaacccaccaagacgcagattgaggatgggatagtgtcattcgaagatgaggacgacgtaggagacgggccatttggactaatcaatatccgatggagcgacctccaaagactggaacaggcgcgtcaacgcatggaagaaacaccgtctgacgctgatagtccagatcagctgattgaaagggcaatctatgctcaattttttggctgggatcccgctttaaaatacggagcccgtctcttgtcttatcgactcctagagacattagttagagcaatgataagagctatggtgctgaggcaccaagctagggaaaagtgcgaatggaagttgtgggaagtttccaaatgggacttctccgacctctatgagcgcatccaggaatgcaagggcgatggacgcccttctgatgatctcaccaagtggccaactaagtgggagaaaactgaccattcgtggacatatcgagatcctgaagcgcaggacaaagtatacgtcttcgacaacttcaactatcgtgagcctaagtatgaaatacgtcaagagggcggactactggtaaagaagtatgctgcgatgtggcttctagtggaagttgttcaagatcaaatgagattgggcatggtggacgcatggcgagatccccattcatgggcgccagcacgagcgtacaacctggagctaccgaaaatagatccgctagataaatttcgttgaatggggttcaattaagtcgtatgaactaatgtcttgaaaagctacccgctgctcgtcgcgggagatatcaatacaaatcttattagccatacactttatctccttgatgccatgcttgacgggtttcttgacccagttgggccagcgcagcttcgtacgcagctactttgacggcaaaaacatcacccttttcctctatggccctgatacgctcgactggcgtaccgcgctgtatctgtttcgaacttgcaatctcgttccagaaccatcgggcttcaggatttgtgaacaaggtccaagcttgacccgactttcctgctcgggctgtccggccaacccgatgtacatacgacgcaatgctagatggcatgtcgtaattgatgacatggtccagtgacggaagatcaatacctcgggctacaagatcagacgcaacgagaattcgcagttttccggagctgaattgtcgaatagtatctcggcgcgtggtatatggcgtagtggacgtgagcagaccaatttcggacccattagcgggtgcgagaatcttaaggagacgtgacagacgaatcgtagcttcgttcgacttcgtaaagatcaagacagaaggcgaccggtcttgcacatgctgaaccgactttatggtcaacttaggatctaacatgctcgattctgaatatgaatccgtttctgattctgataccgcatcagaattaggttcgttgtcctctgaaatccgagtgacgtcgtcttcgcgggtaacaccctgaacgtggtgactttgaagcagctcgaccaagaacagtggttttaaatgcgggtcgttaactttcagggctgcttcgctaagtgatttagggagcgcattttcaagaagcaaattatcatctgatgctttgtgtctggtttcagaagcctcgagcacaacgagcttgggatgacggagcttgaggccctccagttgatcgaggtctcgcgtcatcgttgcgctcaaaatgactttgcgaacacccgataagtttgactgtttgtgatttcgagctccggctatatcattgttttgcacacgaggaatcacaacgttcaaccactgttgaaaattctggccaaggagcttatcggcttcatctacgataagccatctgacaaaatccaaggagaagccgggggtaaatttaatgtgctccacgagtcttcctggagtacaaatgaggacatcgacctttgatctatattttgcgctatgatctggcaacgatgataacctcgcttctctctttcgtattgcttgttgctcctcgtcttcggtgtcgtatccggagtcctccgtatcttcattgtggccaccatcaaaaagtccgctcgattggaccgaacgcttcgtgtgctgtgcatatggccctggcccgtatcgttcttcccgctcaatcagcaagctctgttcttgctcaagtgattggctccccatggctgttgcaattctcggccgtcgttttgccccttcaagagagaaaactgccgcacattgttcgcaaacttgctgcacttgtctgaccagttccctggttggaagaacaatgagagcgcgcaatctagtgaggtggcggctaccttgactaagatcccgaattattggtagcgtataagctaatgtcttccccgacccggttgcagcagataccaatacatcgctctgcatcactctgcagtgatggggcaagagaagaggaatgacgccggtttgtattgcaaaagctttctgatatcccttttcagcaaggcgcgctgctattcccggagtaatggccaagtctggcgaacggccaagctctgtccagggtgctgcagagtctaaatttacacgaattggtgaagccagccatgagggcaatatttcgtagctcggtctagatatatttggcacaacgggtttcggctgggggatcggctctaaaccgtgtaactcagtgtcaggagagactcttccatcattggcagatgcagcagacttgagcggcgttgcgtcgcttgagatgtcgttccgtgagcctggctcatcaaggaggttttcttcttcggatgggtttcgcatggacttcgctttcttttcgagcactaccctgtgaccactcgatacatcttcgtaagatcgcaaagcaatttcaccaccggctttcgatttaccctttttcttctttcttctgccctctgagtctactcgatccccggacttctcttctgtgaggctcgcagagtctggatcataagcaactgttgcctcatgtaccgcttcagtggtatctactgagtatgctccattgtggccatgcaatatcgccgctcgatatttgcccaagtcgtcatcatctaattgcttaacagagtgcgggtcaattgttctccctttcgtcgattgccttgcttctcctagctgagaagtgctcgagacggtacttgcctccgccaacttgattttcttggttggcggcccgtctatgaatccacgctcgttgccaaagcgcacatgctgcaagctcgtagctgattgcatagcgtcggtgctggtcttttgtggtggtacatatctcgcatacgtcgttgggtatggctggagcactctgtcaggctcggaggcaggtgttaaaaggcttccggtgctgttggcaggaagtctccccgcaggtatgtagcgcgaatacatctccgatgaatttttggagattcagaggttgcattaggttttgcgagaaagcatgccaccttgcgaatgagaattgcatgatgagttctgccgccattggaagtttg

SEQ ID NO: 15436 - DNA, 2331 bp, Muscodor strobelii
  misc_feature: SGI cDNA ID NO. 565113
  misc_feature: Encodes the peptide sequence at SEQ ID NO 15437
atgccccgccaaatcctcccacctagaccaattcccatgaagcgcccggagatcgacctgagtgccatgttcaatcacgagcaggcgaagcagctcgaggttctcatgtgcgccatcatggacgagatgcaggggcaaattcgcgacaatttcgacaagctgacgcttacccaagttgatcccactgaaggcattactcctcccaaggccattgttctatccgtgccgaaccctcgcagcgagaagtatcgatgccaatacggagaccttggactacttctgaagaaacctgacttcgatgaccgcgaggctttgagacagatgatgaagtcccaccccgccaaccaatctggtcctccaaccagtcccacgctcacaattccgaagaccgtcgacgaggctactgccaactccaaaaagtctgaagttgagttagtcattgtcagcctatctgagatgaagcgagacgcgttgagtcacttcggcaaatggcgcggaaatgtcttcagacgaatgcatgacatcgtcatcaagaatggtggcaatggtagcaacgttgtccgccaagtacaacaaccagcgccaggcaatgccacacgaggcggctcgtccgcgagaacaagagctgctagacctcccggacctggaccttctagtgaggcgtctaatgcccagcatgtccagcaatatcctcccatgtatactgcgctgcgccagagcccccaaggagaagcgtgccttggttcttcacataatgcttctgctgttttggggttggaccagtactcatcttatgctcgcattgcactactcaaacttgctactgcactgcaaatcccaacttttgtgcttttgcaggatgagtatagagtctcgcaagccttagctcagatcgtcagtggcatttccgcagaggaggtggcgcagaagcgagccgaggagggaaaagcgggaaaacgctggagagcaaatggtggtcaagctcctgcggccgttgtcttttccgacattcttgcggagcctctgatcgccgcaggtgtcggtaccgtcttcggaggcgtcggactcagcacgtcagcagcagcgcttttgttgggaggtctcggtgcgattgagagcaccgtctctgtcggtaccttgttcggtctgtacggagcccgtcaaggcggcaagacgatggaagcgtatgcaaaagacatccaagacttcgccttgatgccagttcatggtcatccgcaagccgaactcatcgatccaaaagacgtgccggctgagaatcgcagaatgcgcgttactgttggcgtttgcggttgggtcacaaaggagaatgactttcaatatccttggaagatattaggtgatcagaatgaagtttatgctataagatgggagcttgagcctttgatgaagattggtgcggctctccgcgcaatgaccgcaagcaaggactggagcgatgccaagaacgagatagcgaaacgcactgtatttggctgcttgaaggactcccactggccgaccgtactgatcaaggcaagcaaggtcgtggataacccctggacggtagcaatggtgcgcgcagaaaaggcaggcctcgttctcgctgagattctcaacaacaaagtccaaggagaaagagcagttacacttgttggctacgggctcggcgctcgcgtcatttatgcttgtctgatgtctttatcagagaaacgctcatttggcgtcgtcgaaaatgcagtgctcattggttgcccctgtccctcggaggttcacgtttgggccgcaatgaagagtgtcgtgacgggccggctagtaaacgtgtactcaaggaacgactgtgttctcggttttatgtacagaacctgtgcctggcagtatggtgtcgcgggcctccagccagttcgcgaggtgcctcgggttgagaacgttgatctgagcaagaacgttaagaaccatcttgactatcaattccacgtcggcggtatcttgaagaaacttggctgggaggatattgactactcccaagtccaggagaacgaagcccaactctcggtcgtcacagatgacaaagaggtgacagaacaggagcttgaagcaggacctcacttgcagagtggaaatgttccatcacgacgaaagggtgaccagaagaacaaacccgctaccagacagaaccgcgtcgggcctaaaggaggccctgtcccaaggaatccgcaagcgcaatcgacggcacgtcaaggcaatcacaaaccgtccagcaaaccgactcgtccagccaaagagaatcagcgacagggcacgggtccgcgccatcagactcgggcttcttga

SEQ ID NO: 15437 - protein, 776 aa, Muscodor strobelii
  misc_feature: SGI Peptide ID NO. 565113
  misc_feature (319)..(669): Pfam Id: PF05277 Pfam Desc: Domain of function (DUF726)
  misc_feature (338)..(669): Pfam Id: PF05277 Pfam Desc: Domain of function (DUF726)
  misc_feature (150)..(716): NCBI GI: 116204871 Blast Desc: CHGG_10319 [Chaetomium globosum CBS 148.51] gi|88176447|gb|EAQ83915.1| CHGG_10319 [Chaetomium globosum CBS 148.51]
  misc_feature (17)..(676): NCBI GI: 154298011 Blast Desc: BC1G_12158 [Botryotinia fuckeliana B05.10] gi|150858285|gb|EDN33477.1| BC1G_12158 [Botryotinia fuckeliana B05.10]
  misc_feature (139)..(676): NCBI GI: 156055942 Blast Desc: SS1G_05323 [Sclerotinia sclerotiorum 1980] gi|154703107|gb|EDO02846.1| SS1G_05323 [Sclerotinia sclerotiorum 1980]
  misc_feature (150)..(730): NCBI GI: 85082258 Blast Desc: NCU01672 [Neurospora crassa OR74A] gi|16944435|emb|CAB91262.2| conserved [Neurospora crassa] gi|28917958|gb|EAA27642.1| [Neurospora crassa OR74A]
  misc_feature (9)..(703): NCBI GI: 261353050 Blast Desc: DUF726 domain-containing protein [Verticillium albo-atrum VaMs.102]
  misc_feature (6)..(685): NCBI GI: 171689026 Blast Desc: protein product [Podospora anserina] gi|170944475|emb|CAP70586.1| protein product [Podospora anserina]
  misc_feature (107)..(684): NCBI GI: 189198670 Blast Desc: PTRG_05339 [Pyrenophora tritici-repentis Pt-1C-BFP] gi|187982771|gb|EDU48259.1| PTRG_05339 [Pyrenophora tritici-repentis Pt-1C-BFP]
  misc_feature (89)..(678): NCBI GI: 154281735 Blast Desc: conserved [Ajellomyces capsulatus NAm1] gi|150411859|gb|EDN07247.1| conserved [Ajellomyces capsulatus NAm1]
  misc_feature (150)..(698): NCBI GI: 225684757 Blast Desc: transmembrane and coiled-coil domains 4 [Paracoccidioides brasiliensis Pb03]
  misc_feature (17)..(698): NCBI GI: 261195284 Blast Desc: DUF726 domain-containing protein [Ajellomyces dermatitidis SLH14081] gi|239587918|gb|EEQ70561.1| DUF726 domain-containing protein [Ajellomyces dermatitidis SLH14081]
MPRQILPPRPIPMKRPEIDLSAMFNHEQAKQLEVLMCAIMDEMQGQIRDNFDKLTLTQVDPTEGITPPKAIVLSVPNPRSEKYRCQYGDLGLLLKKPDFDDREALRQMMKSHPANQSGPPTSPTLTIPKTVDEATANSKKSEVELVIVSLSEMKRDALSHFGKWRGNVFRRMHDIVIKNGGNGSNVVRQVQQPAPGNATRGGSSARTRAARPPGPGPSSEASNAQHVQQYPPMYTALRQSPQGEACLGSSHNASAVLGLDQYSSYARIALLKLATALQIPTFVLLQDEYRVSQALAQIVSGISAEEVAQKRAEEGKAGKRWRANGGQAPAAVVFSDILAEPLIAAGVGTVFGGVGLSTSAAALLLGGLGAIESTVSVGTLFGLYGARQGGKTMEAYAKDIQDFALMPVHGHPQAELIDPKDVPAENRRMRVTVGVCGWVTKENDFQYPWKILGDQNEVYAIRWELEPLMKIGAALRAMTASKDWSDAKNEIAKRTVFGCLKDSHWPTVLIKASKVVDNPWTVAMVRAEKAGLVLAEILNNKVQGERAVTLVGYGLGARVIYACLMSLSEKRSFGVVENAVLIGCPCPSEVHVWAAMKSVVTGRLVNVYSRNDCVLGFMYRTCAWQYGVAGLQPVREVPRVENVDLSKNVKNHLDYQFHVGGILKKLGWEDIDYSQVQENEAQLSVVTDDKEVTEQELEAGPHLQSGNVPSRRKGDQKNKPATRQNRVGPKGGPVPRNPQAQSTARQGNHKPSSKPTRPAKENQRQGTGPRHQTRAS

SEQ ID NO: 15438 - DNA, 4062 bp, Muscodor strobelii
  misc_feature: SGI EST ID NO. CUFF.36640.1
  misc_feature: Variant of the nucleotide sequence at SEQ ID NO 15436
ctaattctaactattgagatctatactggcgcacgtccctacctcttgtattctgctccttccgtacacaatcaacactctgttgcaacttcccataattgcctgcggttgcttacgactgctcaagatcgactcacgactgcccacgactgttgacagccagttaaccctcacaatgtctttatttactgaaactgagtctatggcagagattccagcatctcccacatctcccacacctctcacatcccccccatccccaacctcgtcaggcgatgagagccagacaactgcagacaagatgccccgccaaatcctcccacctagaccaattcccatgaagcgcccggagatcgacctgagtgccatgttcaatcacgagcaggcgaagcagctcgaggttctcatgtgcgccatcatggacgagatgcaggggcaaattcgcgacaatttcgacaagctgacgcttacccaagttgatcccactgaaggcattactcctcccaaggccattgttctatccgtgccgaaccctcgcagcgagaagtatcgatgccaatacggagaccttggactacttctgaagaaacctgacttcgatgaccgcgaggctttgagacagatgatgaagtcccaccccgccaaccaatctggtcctccaaccagtcccacgctcacaattccgaagaccgtcgacgaggctactgccaactccaaaaagtctgaagttgagttagtcattgtcagcctatctgagatgaagcgagacgcgttgagtcacttcggcaaatggcgcggaaatgtcttcagacgaatgcatgacatcgtcatcaagaatggtggcaatggtagcaacgttgtccgccaagtacaacaaccagcgccaggcaatgccacacgaggcggctcgtccgcgagaacaagagctgctagacctcccggtaagtcgctcttctgcagctatcacggcaacacgtcgcgctccacttctaggaacaaactattcctcacattatttgttcatcacctactatctatcacgcaatataatagcgttgtcctttagtaagcgtgcactgacaaataatacaggacctggaccttctagtgaggcgtctaatgcccagcatgtccagcaatatcctcccatgtatactgcgctgcgccagagcccccaaggagaagcgtgccttggttcttcacataatgcttctgctgttttggggttggaccagtactcatcttatgctcgcattgcactactcaaacttgctactgcactgcaaatcccaacttttgtgcttttgcaggatgagtatagagtctcgcaagccttagctcagatcgtcagtggcatttccgcagaggaggtggcgcagaagcgagccgaggagggaaaagcgggaaaacgctggagagcaaatggtggtcaagctcctgcggccgttgtcttttccgacattcttgcggagcctctgatcgccgcaggtgtcggtaccgtcttcggaggcgtcggactcagcacgtcagcagcagcgcttttgttgggaggtctcggtgcgattgagagcaccgtctctgtcggtaccttgttcggtctgtacggagcccgtcaaggcggcaagacgatggaagcgtatgcaaaagacatccaagacttcgccttgatgccagttcatggtcatccgcaagccgaactcatcgatccaaaagacgtgccggctgagaatcgcagaatgcgcgttactgttggcgtttgcggttgggtcacaaaggagaatgactttcaatatccttggaagatattaggtgatcagaatgaagtttatgctataagatgggagcttgagcctttgatgaagattggtgcggctctccgcgcaatgaccgcaagcaaggactggagcgatgccaagaacgagatagcgaaacgcactgtatttggctgcttgaaggactcccactggccgaccgtactgatcaaggcaagcaaggtcgtggataacccctggacggtagcaatggtgcgcgcagaaaaggcaggcctcgttctcgctgagattctcaacaacaaagtccaaggagaaagagcagttacacttgttggctacgggctcggcgctcgcgtcatttatgcttgtctgatgtctttatcagagaaacgctcatttggcgtcgtcgaaaatgcagtgctcattggttgcccctgtccctcggaggttcacgtttgggccgcaatgaagagtgtcgtgacgggccggctagtaaacgtgtactcaaggaacgactgtgttctcggttttatgtacagaacctgtgcctggcagtatggtgtcgcgggcctccagccagttcgcgaggtgcctcgggttgagaacgttgatctgagcaagaacgttaagaaccatcttgactatcaattccacgtcggcggtatcttgaagaaacttggctgggaggatattgactactcccaagtccaggagaacgaagcccaactctcggtcgtcacagatgacaaagaggtgacagaacaggagcttgaagcaggacctcacttgcagagtggaaatgttccatcacgacgaaagggtgaccagaagaacaaacccgctaccagacagaaccgcgtcgggcctaaaggaggccctgtcccaaggaatccgcaagcgcaatcgacggcacgtcaaggcaatcacaaaccgtccagcaaaccgactcgtccagccaaagagaatcagcgacagggcacgggtccgcgccatcagactcgggcttcttgaacgcgcgtccctctcctgagagcggcacatgagagaagttatgacatatactatacaaaggggcgagtcgtcctgaaggcgtgaaacagcaacccagttactggttgtacagttatcttgacacttctgctagtgccgttcaccgagtagtccatcaaagcagaattagagtcgtagatacttgagttcactcgtgttatatgaagaatgcatttcaagacttgcccattcgtagcgtgtgacaatccgcaagtgatgtatacatcacacatcgtgcctgttgattcgtttcatataatagcgagaacgctttgtagcagttgacggtgagctgctgccccatcatgctggggtcgcacccgaagtgtgagagagtctattccgaaggtccagcgctccgcaccacaaaaaaccgaccaccggccgtttcactggcactaccaagtacattccaatcccgctgttgattgtacatctctctcggctgctccgatttttgatgcaatactgccacatcttcacttgactgcacagccaatgcggtccgccgccgtggacgcttagcgtgcccaacaatctcttcccggcccaacgcactctgcagatccgccagtccaatggtctgttcatgcaaaccattccctgtctcgtcgcgtatcacgcgtaggggtgacacgcccgtcgtgtcaacgctttggattgagcgcacaaaatggagctgcgaagataaggtcgacagcatccgagtctgctcagcttcggtagctggttggggaagggcagataggcggagaaggtgggccagagtcctgggttccagaccactggacgtcgagggcgacgatgaggcaggtgggaggagagtgcgaatggaccaagttggctcgacgagaagggcagcaagatcggctgtgttggtaggcggagaaggctgtgtgcgggatggtcgcgacaagcttgtaatcgattgtgccgcgttggatctgctgtgagtgcgtcgggtgcgaattgattgttgcaacactctgcggcactgtttacatatggttgaattcatgatgctctaggatgtgaacgacacgcgcgtttgtgatagtgcgtacgcttggtgatgcatctgtaggcagcaagatttgaagttggcaacccaatcttggaggataaaacccataaggtacctgtcaacgtactccacagcctctggtcgtcacaattattaggagagagggagaagccaacgttcacaagatcgatttctagctatagcactcatatagaa

SEQ ID NO: 15439 - DNA, 963 bp, Muscodor strobelii
  misc_feature: SGI cDNA ID NO. 565114
  misc_feature: Encodes the peptide sequence at SEQ ID NO 15440
atgtcgggatccaatgaccctcgcgccttgatgcagcaggcggacaagacccttgcatccgctggcggcggcttcttgcgtagttttttcagcagcgaggacaagtacgagaccgccttggagctatacaagacagctgcaggcggatttagaagaagcaaccagcattgggaatccggacaggctttcgagaaagctgctgccgtggctcagaagcataccgataaccgtgctgacatgcgcaagaacctggaagatgccgcagaggcgtatacggcagaccatcctcaggacgccctcagatgctacagtatgctagtcgaggactttgacaacaataaccagcttgatcgagcggcccaaaaaaaagctaagatgggccagatctacctgacgttacatgacagaaagagtgctatgaaatgctacgaagaggctggcgatatgtcgaaagccaagggaccaaacaccgcaaggaattactgggacaccgcggcacgccaaatgatagaggagaacgagtttcatagagcgatccaaacctacaaaaaaatcaccgcctcctacgttggcgacgataagcgccacatcctcagataccaagaattcaaagccgtcatcaacgaaggactgtgcttcctggccattggcgatttgaacggtgttgatggacccatcgctaagtccgagtctctgaaatctgaaaccgacaagaaatggattcagctcctgcaggatctgaaagaagcaatggacaagagggatgatgagagtttcaagagagtgtggaaggagtacaacagacagtttggcaacgacaacgatgcagcagccaggcagcacatcctttcacatatgaagagctactatttcccgaacatcgatgccccagagcacggtgctcagcacagtcgtcggcatgcgaccacggcgtttgacgccgatgacgaggagtatttgtag

SEQ ID NO: 15440 - protein, 320 aa, Muscodor strobelii
  misc_feature: SGI Peptide ID NO. 565114
  misc_feature (6)..(259): NCBI GI: 67540194 Blast Desc: AN6267.2 [Aspergillus nidulans FGSC A4] gi|40739461|gb|EAA58651.1| AN6267.2 [Aspergillus nidulans FGSC A4] gi|259479521|tpe|CBF69819.1| TPA: vesicular-fusion protein
  misc_feature (4)..(259): NCBI GI: 154298013 Blast Desc: BC1G_12159 [Botryotinia fuckeliana B05.10] gi|150858286|gb|EDN33478.1| BC1G_12159 [Botryotinia fuckeliana B05.10]
  misc_feature (4)..(259): NCBI GI: 255932079 Blast Desc: Pc12g07610 [Penicillium chrysogenum Wisconsin 54-1255] gi|211582215|emb|CAP80388.1| Pc12g07610 [Penicillium chrysogenum Wisconsin 54-1255]
  misc_feature (4)..(259): NCBI GI: 156055938 Blast Desc: SS1G_05321 [Sclerotinia sclerotiorum 1980] gi|154703105|gb|EDO02844.1| SS1G_05321 [Sclerotinia sclerotiorum 1980]
  misc_feature (4)..(260): NCBI GI: 39973465 Blast Desc: vesicular-fusion protein sec17, [Magnaporthe grisea 70-15] gi|145017914|gb|EDK02193.1| vesicular-fusion protein sec17, [Magnaporthe grisea 70-15]
  misc_feature (3)..(259): NCBI GI: 240107177 Blast Desc: vesicular-fusion protein sec17, [Coccidioides posadasii C735 delta SOWgp]
  misc_feature (3)..(259): NCBI GI: 119190247 Blast Desc: CIMG_05171 [Coccidioides immitis RS]
  misc_feature (8)..(268): NCBI GI: 116204875 Blast Desc: CHGG_10321 [Chaetomium globosum CBS 148.51] gi|88176449|gb|EAQ83917.1| CHGG_10321 [Chaetomium globosum CBS 148.51]
  misc_feature (4)..(259): NCBI GI: 261353052 Blast Desc: alpha-soluble NSF attachment protein [Verticillium albo-atrum VaMs.102]
  misc_feature (4)..(259): NCBI GI: 169774699 Blast Desc: [Aspergillus oryzae RIB40] gi|238496713|ref|XP_002379592.1| vesicular-fusion protein sec17 [Aspergillus flavus NRRL3357] gi|83769680|dbj|BAE59815.1| protein
MSGSNDPRALMQQADKTLASAGGGFLRSFFSSEDKYETALELYKTAAGGFRRSNQHWESGQAFEKAAAVAQKHTDNRADMRKNLEDAAEAYTADHPQDALRCYSMLVEDFDNNNQLDRAAQKKAKMGQIYLTLHDRKSAMKCYEEAGDMSKAKGPNTARNYWDTAARQMIEENEFHRAIQTYKKITASYVGDDKRHILRYQEFKAVINEGLCFLAIGDLNGVDGPIAKSESLKSETDKKWIQLLQDLKEAMDKRDDESFKRVWKEYNRQFGNDNDAAARQHILSHMKSYYFPNIDAPEHGAQHSRRHATTAFDADDEEYL

SEQ ID NO: 15441 - DNA, 1520 bp, Muscodor strobelii
  misc_feature: SGI EST ID NO. CUFF.36610.0
  misc_feature: Variant of the nucleotide sequence at SEQ ID NO 15439
ctctgccttccattgaacagacaggagaggggtggtagccggatttagtactagcacctggtaggctgacacgtcaaatccaacatacgtacgtcacttcttttctcagatcttacaccgcctgcctcctaggtcaaccaaccgcttgacaccagcaacgctgtcaccttgcctgccgacccttcagcctacagcaagcccgatttgtagcctggcgagttggggtctttctggagtttcaattcatcacaccgcacgcaaacctgtaacttgcctctatttgcctccaccagccaccatcattatacatcgtacactactacactggtcatcatgtcgggatccaatgaccctcgcgccttgatgcagcaggcggacaagacccttgcatccgctggcggcggcttcttgcgtagttttttcagcagcgaggacaagtacgagaccgccttggagctatacaagacagctgcaggcggatttagaagaagcaaccagcattgggaatccggacaggctttcgagaaagctgctgccgtggctcagaagcataccgataaccgtgctgacatgcgcaagaacctggaagatgccgcagaggcgtatacggcagaccatcctcaggacgccctcagatgctacagtatgctagtcgaggactttgacaacaataaccagcttgatcgagcggcccaaaaaaaagctaagatgggccagatctacctgacgttacatgacagaaagagtgctatgaaatgctacgaagaggctggcgatatgtcgaaagccaagggaccaaacaccgcaaggaattactgggacaccgcggcacgccaaatgatagaggagaacgagtttcatagagcgatccaaacctacaaaaaaatcaccgcctcctacgttggcgacgataagcgccacatcctcagataccaagaattcaaagccgtcatcaacgaaggactgtgcttcctggccattggcgatttgaacggtgttgatggacccatcgctaagtccgagtctctgaaatctgaaaccgacaagaaatggattcagctcctgcaggatctgaaagaagcaatggacaagagggatgatgagagtttcaagagagtgtggaaggagtacaacagacagtttggcaacgacaacgatgcagcagccaggcagcacatcctttcacatatgaagagctactatttcccgaacatcgatgccccagagcacggtgctcagcacagtcgtcggcatgcgaccacggcgtttgacgccgatgacgaggagtatttgtagtgagtggtgataggcggacagactccatagatagagtaaatataaatatacccattagctaaggcgtgactaatcggatagcttgtctaactcagtttcggataacctgacgcataacgcagggataaatacgcatctaaacgactggattacgctcatagagcgtgccgaattatggctgtttgagaaaacaaatcaccagccagaacatgatagagtccgcg

SEQ ID NO: 15442 - DNA, 848 bp, Muscodor strobelii
  misc_feature: SGI cDNA ID NO. 565115
  misc_feature: Encodes the peptide sequence at SEQ ID NO 15443
atgaagagacacaccgtctcatcacttccacctgcatatacatctctacataccgccagcaaatcaaagtcactcttcgacatcccaacacgccttgagaagatacggatacgcgataccaaaggcgacagcccatccgagagctttgagcttgcgccgttcagccgaagtgacatccctcctagggaattctggcaagcccgcgttcaggaccagaggctcgctgaattgagtgctgccgagtgctacgagacagccaaagcatacgtgaatgcagctgtcaccaaaaagccaggctggcgggagaaacttatcacatttgatgacagccccgcgtcggccgacggtgaaggacggaaaaaatcaatttctgcattcgcattacactatgtggcaatcatgcttatgtccgtaggcacaaaacagaccaactggctcacttcccatatacttcacacgctctcaactttggggtacgttccgagtctactcagcttcgtacgtacgggcatgagggcaggacagctgaactctccgcgcttcgaaccaacggttgcagcattcaatcagctattggaccagataggggatagcaaagccacgagcaaaggcatcgaaaccgactttgctgccgatgcttgcacgctccgcggtatcatgtatgcaaaagtaggcacagaggaaagcgagaagctggcgctgcggtggtttcggcgggcttttgagatctcaaaagactctgcaaaaagcccagaagcaagcagtgaaacttcaccaggacgtcctctgaatccgaactggcaatgggctgcgaccttcgccatgtctgttgccgagatcaatcgtaa

SEQ ID NO: 15443 - protein, 282 aa, Muscodor strobelii
  misc_feature: SGI Peptide ID NO. 565115
  misc_feature (54)..(206): NCBI GI: 85091771 Blast Desc: NCU07552 [Neurospora crassa OR74A] gi|28920462|gb|EAA29829.1| [Neurospora crassa OR74A]
MKRHTVSSLPPAYTSLHTASKSKSLFDIPTRLEKIRIRDTKGDSPSESFELAPFSRSDIPPREFWQARVQDQRLAELSAAECYETAKAYVNAAVTKKPGWREKLITFDDSPASADGEGRKKSISAFALHYVAIMLMSVGTKQTNWLTSHILHTLSTLGYVPSLLSFVRTGMRAGQLNSPRFEPTVAAFNQLLDQIGDSKATSKGIETDFAADACTLRGIMYAKVGTEESEKLALRWFRRAFEISKDSAKSPEASSETSPGRPLNPNWQWAATFAMSVAEINR

SEQ ID NO: 15444 - DNA, 1111 bp, Muscodor strobelii
  misc_feature: SGI EST ID NO. CUFF.36601.0
  misc_feature: Variant of the nucleotide sequence at SEQ ID NO 15442
ataacatacatgtatctaggtagtctttaagccatccgctaatctggatctgtcctgtcagagatggatcagtccatgcttatttgatacgagattcaagagtgtggatttataaaatccttcaaactgggcaatcttggtcaaggcacacacatgacttctattgtgagagaggtctgagattctatcaacatggtattctcaacatctacgtgcagacaatgcacgagacaactaagccgcctatctcagccatcgaaaaatcccatgaagagacacaccgtctcatcacttccacctgcatatacatctctacataccgccagcaaatcaaagtcactcttcgacatcccaacacgccttgagaagatacggatacgcgataccaaaggcgacagcccatccgagagctttgagcttgcgccgttcagccgaagtgacatccctcctagggaattctggcaagcccgcgttcaggaccagaggctcgctgaattgagtgctgccgagtgctacgagacagccaaagcatacgtgaatgcagctgtcaccaaaaagccaggctggcgggagaaacttatcacatttgatgacagccccgcgtcggccgacggtgaaggacggaaaaaatcaatttctgcattcgcattacactatgtggcaatcatgcttatgtccgtaggcacaaaacagaccaactggctcacttcccatatacttcacacgctctcaactttggggtacgttccgagtctactcagcttcgtacgtacgggcatgagggcaggacagctgaactctccgcgcttcgaaccaacggttgcagcattcaatcagctattggaccagataggggatagcaaagccacgagcaaaggcatcgaaaccgactttgctgccgatgcttgcacgctccgcggtatcatgtatgcaaaagtaggcacagaggaaagcgagaagctggcgctgcggtggtttcggcgggcttttgagatctcaaaagactctgcaaaaagcccagaagcaagcagtgaaacttcaccaggacgtcctctgaatccgaactggcaatgggctgcgaccttcgccatgtctgttgccgagatcaatc

SEQ ID NO: 15445 - DNA, 1209 bp, Muscodor strobelii
  misc_feature: SGI cDNA ID NO. 565116
  misc_feature: Reduced expression when VOC is produced
  misc_feature: Encodes the peptide sequence at SEQ ID NO 15446
atggctcccctcacgagaagacgggcagccaaagcccagaaggatgcacaggccgaaatatcagagtcagacgcagccagccacgatgtgtccttcgacgaacccatagctctgcgcagcaaacggaaagacgagtctcctgcaagcagcgcaaagaccccaaagcgcgggcagattgaggttaggatagaggaagacgaggcaaccccaacatctaggaagaagcatatcgaggtccagatccccagttccgccttcaataccacgcgcagcatcagaaccagcccagtccccgactcccaggaagaacctaagagcgattccgatgacgagcctgagccaccttcaccacccgagcccaagagcgcatccaaacaattacaagacgaggccttgcaggagcttgccaaacaatcgcagaccacagatcccaacagcgaggctacaccccagcccaaagcagccaaatctacacatgttgtattcggagacgacgacgatgtagacaacttcgtcgctgctgctgctgctactgctgataccagcacgaagaaggagtcaaatcaagatgacgatgaggacgaggaagaaagcgacgatgatgctgcgccagaggctgtctcaacttccgccgcagcacagcaaaacctgaagtcggctcaggccgccgtaaaagcagcagaaaaacaagaagcgactttgaagcgtaagcgacaagagcgcaacgatctattcagacaacaagccgagaagcggaaacgtacgcgtaagacaaaacccagcacatcaaaaaggaacgacgtatcacaagatgagagtgaaggagaacaggaacatagacaggagccaagtgtcaacaagcgccggcgcataagcgggaagctccctgatatgctaccagcggagcttctgacagactcaagcgaagacgaggaggagggggaccatggggcactggtcaaaagggtcgccaagaagccgcagaagacaacatttgaatcggcgatacaagtgttatctaaggaaggcaagcgcccgcgcgacgaagtggtcggttcaacgcgttatcgggtattggcagagcagagcaaccagcggctcgcgcccaaggccaacaagcagtcgctgagagctaaacaggatctactcaggaggaacaggcaaggcattacgacgaacaaaaagagaggattcttcgtgaagaggtag

SEQ ID NO: 15446 - protein, 402 aa, Muscodor strobelii
  misc_feature: SGI Peptide ID NO. 565116
  misc_feature (297)..(386): Pfam Id: PF08297 Pfam Desc: U3 snoRNA associated
  misc_feature (148)..(401): NCBI GI: 256732732 Blast Desc: NECHADRAFT_100154 [Nectria haematococca mpVI 77-13-4]
  misc_feature (204)..(398): NCBI GI: 171686404 Blast Desc: protein product [Podospora anserina] gi|170943163|emb|CAP68816.1| protein product [Podospora anserina]
  misc_feature (200)..(399): NCBI GI: 154305038 Blast Desc: [Botryotinia fuckeliana B05.10] gi|150853772|gb|EDN28964.1| [Botryotinia fuckeliana B05.10]
  misc_feature (230)..(401): NCBI GI: 116207870 Blast Desc: CHGG_03228 [Chaetomium globosum CBS 148.51] gi|88183825|gb|EAQ91293.1| CHGG_03228 [Chaetomium globosum CBS 148.51]
  misc_feature (203)..(399): NCBI GI: 156052529 Blast Desc: [Sclerotinia sclerotiorum 1980] gi|154704210|gb|EDO03949.1| [Sclerotinia sclerotiorum 1980]
  misc_feature (152)..(401): NCBI GI: 46124771 Blast Desc: FG06763.1 [Gibberella zeae PH-1]
  misc_feature (155)..(388): NCBI GI: 240275963 Blast Desc: conserved [Ajellomyces capsulatus H143]
  misc_feature (155)..(375): NCBI GI: 225563367 Blast Desc: sporulation protein [Ajellomyces capsulatus G186AR]
  misc_feature (147)..(388): NCBI GI: 239610473 Blast Desc: conserved [Ajellomyces dermatitidis ER-3]
  misc_feature (147)..(388): NCBI GI: 261195518 Blast Desc: conserved [Ajellomyces dermatitidis SLH14081] gi|239588035|gb|EEQ70678.1| conserved [Ajellomyces dermatitidis SLH14081]
  misc_feature: Useful for introducing or modulating the production of volatile compounds
MAPLTRRRAAKAQKDAQAEISESDAASHDVSFDEPIALRSKRKDESPASSAKTPKRGQIEVRIEEDEATPTSRKKHIEVQIPSSAFNTTRSIRTSPVPDSQEEPKSDSDDEPEPPSPPEPKSASKQLQDEALQELAKQSQTTDPNSEATPQPKAAKSTHVVFGDDDDVDNFVAAAAATADTSTKKESNQDDDEDEEESDDDAAPEAVSTSAAAQQNLKSAQAAVKAAEKQEATLKRKRQERNDLFRQQAEKRKRTRKTKPSTSKRNDVSQDESEGEQEHRQEPSVNKRRRISGKLPDMLPAELLTDSSEDEEEGDHGALVKRVAKKPQKTTFESAIQVLSKEGKRPRDEVVGSTRYRVLAEQSNQRLAPKANKQSLRAKQDLLRRNRQGITTNKKRGFFVKR

SEQ ID NO: 15447 - DNA, 1513 bp, Muscodor strobelii
  misc_feature: SGI EST ID NO. CUFF.36604.0
  misc_feature: Variant of the nucleotide sequence at SEQ ID NO 15445
tgcaagacgacttatcttatcgactgccccggaaaataaaaaagttacggcaagttgagacatcccaccaccatttagctgtaggccaatccacctcagcaccaccataattcacatcatggctcccctcacgagaagacgggcagccaaagcccagaaggatgcacaggccgaaatatcagagtcagacgcagccagccacgatgtgtccttcgacgaacccatagctctgcgcagcaaacggaaagacgagtctcctgcaagcagcgcaaagaccccaaagcgcgggcagattgaggttaggatagaggaagacgaggcaaccccaacatctaggaagaagcatatcgaggtccagatccccagttccgccttcaataccacgcgcagcatcagaaccagcccagtccccgactcccaggaagaacctaagagcgattccgatgacgagcctgagccaccttcaccacccgagcccaagagcgcatccaaacaattacaagacgaggccttgcaggagcttgccaaacaatcgcagaccacagatcccaacagcgaggctacaccccagcccaaagcagccaaatctacacatgttgtattcggagacgacgacgatgtagacaacttcgtcgctgctgctgctgctactgctgataccagcacgaagaaggagtcaaatcaagatgacgatgaggacgaggaagaaagcgacgatgatgctgcgccagaggctgtctcaacttccgccgcagcacagcaaaacctgaagtcggctcaggccgccgtaaaagcagcagaaaaacaagaagcgactttgaagcgtaagcgacaagagcgcaacgatctattcagacaacaagccgagaagcggaaacgtacgcgtaagacaaaacccagcacatcaaaaaggaacgacgtatcacaagatgagagtgaaggagaacaggaacatagacaggagccaagtgtcaacaagcgccggcgcataagcgggaagctccctgatatgctaccagcggagcttctgacagactcaagcgaagacgaggaggagggggaccatggggcactggtcaaaagggtcgccaagaagccgcagaagacaacatttgaatcggcgatacaagtgttatctaaggaaggcaagcgcccgcgcgacgaagtggtcggttcaacgcgttatcgggtattggcagagcagagcaaccagcggctcgcgcccaaggccaacaagcagtcgctgagagctaaacaggatctactcaggaggaacaggcaaggcattacgacgaacaaaaagagaggattcttcgtgaagaggtaggagacagacaatggcagatacccaggtgcttctaaccccatgattgctacattcgtgtgttttgtgattacatgcgtgaatgtgacattcataccacaatcatatgtagaatgttggtaactatgccgccgaatagttcgcttttcgctcagacagtctacctggaccaaatacgcaacacatgaa

SEQ ID NO: 15448 - DNA, 1644 bp, Muscodor strobelii
  misc_feature: SGI cDNA ID NO. 565118
  misc_feature: Encodes the peptide sequence at SEQ ID NO 15449
atgtctctgaacatccccaacgcccctaactcggggttgttcaagcagggttataataactacgactccgaagatggcgccgtcctccgaaacatcgacgcctgccgtgccatatcctctaccgtccagacctctttcgggccctacggccgcaacaagatcatcatcaaccacctccagaagatgatcctgacctccgatgcggccaccatattaaaagagctcgacgtggtccaccccgccgctaagctcctagtcatggccagtcagcagcaggaggccgagatgggcgacgctaccaacctcgtcatcgtcctcgccggtgagctgctgaagaaggctgaggacctgttgcgcatgggtctaaagaccgccgacatcgtcaccggctacgagcgcgcccagacctttgccctcgaggccctagagaagcttgtagtagacaaagtcgacgacatcagagatcaggacgagctcagcaaggccatccgcaccgtcgtagccagcaagcagaacggcaacgaggagatcctagcagacctggtcgctgaggccgtcctcgctgtcatgcccaagaaccccgtcaacttcaacgtcgacaacatacgtgttgtcaagatcatgggcggcagcttggagcagagccgcgtcgtcaagggtatggtcttccccaaggaacccgacggatccatcaagaaggccaagaaggccaaagtcggtgtcttctcgtgtcccatcgatatggcccagaccgagacaaagggaaccgtcttgctacacaacgccaaagagatgatggacttctccaagggcgaggagactcagctcgagactgccatcaaggaactgcacgacgtcggtctgagagtagtcattgctggctccacagttggagaactcgccatgcattacctcaaccgctacggcatccttgtcatcaagatcctcagcaaatttgagttgcgaagaatttgccgtgtcgtcggtgccacaccccttgccagactgggcgcgcctatgcccgacgagatgggatccgtggatatcgttgagactcttgagattggtggagaccgagtgactgtattcagacaagaggacgaggtcacgaggacagccactttggtacttcgtggtgccacacagaaccacttagatgacgtagagcgcgccgtcgacgatggtgtaaatgtagttaaggcaattacccgtgacccaaggctggtgcccggagcgggtgccacagagatccagctggtagagaggatacaagctttcggtgacaagacctcgggtctaccacagtactctatccgcaaatacggcgaggcattcgaggtcgttgcgcgtactatcgcggagagcgctggactcgacgcaacggaagtattgagtaacctatacgccgcacaccacaagaaggacgagtggacaacaggtgttgatattgagaacgaggatgataccggcacgttagatgccaaggaggagggtatcttagatctcatggtgagcaaggcctgggctatcaagttagctacagaggcggcacggactgtgctatcggtagaccagattatcgtggcaaggcaagcaggcggtccgaagcctcccggacccaacccgaactgggatgaggattag

SEQ ID NO: 15449 - protein, 547 aa, Muscodor strobelii
  misc_feature: SGI Peptide ID NO. 565118
  misc_feature (38)..(531): Pfam Id: PF00118 Pfam Desc: TCP-1/cpn60 chaperonin family
  misc_feature (1)..(547): NCBI GI: 70994010 Blast Desc: t-complex protein 1, theta subunit [Aspergillus fumigatus Af293] gi|66849486|gb|EAL89814.1| t-complex protein 1, theta subunit, [Aspergillus fumigatus Af293]
  misc_feature (1)..(547): NCBI GI: 145258560 Blast Desc: An04g07340 [Aspergillus niger] gi|134074702|emb|CAK44734.1| protein product [Aspergillus niger]
  misc_feature (1)..(547): NCBI GI: 115492447 Blast Desc: T-complex protein 1 subunit theta [Aspergillus terreus NIH2624] gi|114197711|gb|EAU39411.1| T-complex protein 1 subunit theta [Aspergillus terreus NIH2624]
  misc_feature (1)..(547): NCBI GI: 213401907 Blast Desc: chaperonin-containing T-complex theta subunit Cct8 [Schizosaccharomyces japonicus yFS275] gi|211999773|gb|EEB05433.1| chaperonin-containing T-complex theta
  misc_feature (1)..(546): NCBI GI: 50409800 Blast Desc: DEHA0A13717g [Debaryomyces hansenii CBS767] gi|49652571|emb|CAG84884.1| DEHA2A13288p [Debaryomyces hansenii]
  misc_feature (1)..(547): NCBI GI: 19112198 Blast Desc: chaperonin-containing T-complex theta subunit Cct8 () [Schizosaccharomyces pombe] gi|12644353|sp|P78921.3|TCPQ_SCHPO RecName: Full= T-complex protein 1 subunit theta; AltName: theta
  misc_feature (1)..(547): NCBI GI: 1749752 Blast Desc: protein product [Schizosaccharomyces pombe]
  misc_feature (1)..(547): NCBI GI: 150951090 Blast Desc: component of chaperonin-containing T-complex [Pichia stipitis CBS 6054] gi|149388312|gb|EAZ63315.2| component of chaperonin-containing T-complex [Pichia stipitis CBS 6054]
  misc_feature (2)..(547): NCBI GI: 50550433 Blast Desc: YALI0D11220p [Yarrowia lipolytica] gi|49648557|emb|CAG80877.1| YALI0D11220p [Yarrowia lipolytica]
  misc_feature (1)..(547): NCBI GI: 260943820 Blast Desc: CLUG_03449 [Clavispora lusitaniae ATCC 42720] gi|238849857|gb|EEQ39321.1| CLUG_03449 [Clavispora lusitaniae ATCC 42720]
MSLNIPNAPNSGLFKQGYNNYDSEDGAVLRNIDACRAISSTVQTSFGPYGRNKIIINHLQKMILTSDAATILKELDVVHPAAKLLVMASQQQEAEMGDATNLVIVLAGELLKKAEDLLRMGLKTADIVTGYERAQTFALEALEKLVVDKVDDIRDQDELSKAIRTVVASKQNGNEEILADLVAEAVLAVMPKNPVNFNVDNIRVVKIMGGSLEQSRVVKGMVFPKEPDGSIKKAKKAKVGVFSCPIDMAQTETKGTVLLHNAKEMMDFSKGEETQLETAIKELHDVGLRVVIAGSTVGELAMHYLNRYGILVIKILSKFELRRICRVVGATPLARLGAPMPDEMGSVDIVETLEIGGDRVTVFRQEDEVTRTATLVLRGATQNHLDDVERAVDDGVNVVKAITRDPRLVPGAGATEIQLVERIQAFGDKTSGLPQYSIRKYGEAFEVVARTIAESAGLDATEVLSNLYAAHHKKDEWTTGVDIENEDDTGTLDAKEEGILDLMVSKAWAIKLATEAARTVLSVDQIIVARQAGGPKPPGPNPNWDED

SEQ ID NO: 15450 - DNA, 2145 bp, Muscodor strobelii
  misc_feature: SGI EST ID NO. CUFF.36638.0
  misc_feature: Variant of the nucleotide sequence at SEQ ID NO 15448
cgcagcttcaccctgtaaagcacctgaaagctccactgaatttttctaacgcggagtgcttcccctacctgaagtgttgagacggcgggcacatcaacaaacacacgaggtcctgattccacggctttgtggctacaatccctcaactcaccacctcgccagacgacaacaaagcacgaagggactgctggacataccagctccgccgccatgtctctgaacatccccaacgcccctaactcggggttgttcaagcagggttataataactacgactccgaagatggcgccgtcctccgaaacatcgacgcctgccgtgccatatcctctaccgtccagacctctttcgggccctacggccgcaacaagatcatcatcaaccacctccagaagatgatcctgacctccgatgcggccaccatattaaaagagctcgacgtggtccaccccgccgctaagctcctagtcatggccagtcagcagcaggaggccgagatgggcgacgctaccaacctcgtcatcgtcctcgccggtgagctgctgaagaaggctgaggacctgttgcgcatgggtctaaagaccgccgacatcgtcaccggctacgagcgcgcccagacctttgccctcgaggccctagagaagcttgtagtagacaaagtcgacgacatcagagatcaggacgagctcagcaaggccatccgcaccgtcgtagccagcaagcagaacggcaacgaggagatcctagcagacctggtcgctgaggccgtcctcgctgtcatgcccaagaaccccgtcaacttcaacgtcgacaacatacgtgttgtcaagatcatgggcggcagcttggagcagagccgcgtcgtcaagggtatggtcttccccaaggaacccgacggatccatcaagaaggccaagaaggccaaagtcggtgtcttctcgtgtcccatcgatatggcccagaccgagacaaagggaaccgtcttgctacacaacgccaaagagatgatggacttctccaagggcgaggagactcagctcgagactgccatcaaggaactgcacgacgtcggtctgagagtagtcattgctggctccacagttggagaactcgccatgcattacctcaaccgctacggcatccttgtcatcaagatcctcagcaaatttgagttgcgaagaatttgccgtgtcgtcggtgccacaccccttgccagactgggcgcgcctatgcccgacgagatgggatccgtggatatcgttgagactcttgagattggtggagaccgagtgactgtattcagacaagaggacgaggtcacgaggacagccactttggtacttcgtggtgccacacagaaccacttagatgacgtagagcgcgccgtcgacgatggtgtaaatgtagttaaggcaattacccgtgacccaaggctggtgcccggagcgggtgccacagagatccagctggtagagaggatacaagctttcggtgacaagacctcgggtctaccacagtactctatccgcaaatacggcgaggcattcgaggtcgttgcgcgtactatcgcggagagcgctggactcgacgcaacggaagtattgagtaacctatacgccgcacaccacaagaaggacgagtggacaacaggtgttgatattgagaacgaggatgataccggcacgttagatgccaaggaggagggtatcttagatctcatggtgagcaaggcctgggctatcaagttagctacagaggcggcacggactgtgctatcggtagaccagattatcgtggcaaggcaagcaggcggtccgaagcctcccggacccaacccgaactgggatgaggattagacaaaattttgtttatgaagcgaggctcggttcgtcatttaggcattgggttggagttgtagaaggttaccaatcaacgaacatcccaagacccgcacttggttccgtgggcttcgttactgtgtctgaatgagatgcttaatgcctggttctactttcgtgagtcttgtaatgtgtcaatgatttgacggtcacagcaaaatgtagtaactggcttaaaaccgcactgccctcattctgcttgttttctctcctatatagcaaccaacttatcctcccgaccagtttctt

SEQ ID NO: 15451 - DNA, 792 bp, Muscodor strobelii
  misc_feature: SGI cDNA ID NO. 565119
  misc_feature: Reduced expression when VOC is produced
  misc_feature: Encodes the peptide sequence at SEQ ID NO 15452
atggagtacagcagcgctgacattcccattcgctctgtagcacatcctcatcctccctcattaccgccgaccgtcgaggaggcctaccgccgaaaatgtatccagctgaaagagcgctctaaagagatcgaggaggagaacgatgcctaccgactccgtcttcatcgcctcaagcgccagatccagaagttgcgtctcgagcgagcctttctcctagagcagatctccaagcgcacaagcaccaacgtcgaggattcagagggcagcccaagccctcctcccacgccccaagacaagcccctgcgcataaagcgaaaccaccccaaggagcacggcggccgaagcaccaatggcgctgccaagccgcccaagcgacccagcaacgcattcgagatatactgcaacgacaagcgacccatcctccaggaagagaacaaggacaagatcgctgcaggcgagttcagactcgaggaagagctagctagaggctggaaggacctcgacgaggacgagaagaacgccttccaaaagcggtacgagaacgagctcgaggagtggaggcaggcgcgcgacagtttcaagcagggggttaaggacgcctctgggcggtctcgcggccgggcttcccgcggcggcggcgggcgctcccgagttgaggagtcgatgcaggacgaagagctcgacgacgacaatgaccaggatgtcgagatgggcgaggcggaccaggaccccggccacgccgctgatcaggacacggaccctgagaccgaggtcgacgacaacgatggctag

SEQ ID NO: 15452 - protein, 263 aa, Muscodor strobelii
  misc_feature: SGI Peptide ID NO. 565119
  misc_feature (123)..(194): Pfam Id: PF00505 Pfam Desc: HMG (high mobility group) box
  misc_feature (18)..(193): NCBI GI: 116207760 Blast Desc: CHGG_03173 [Chaetomium globosum CBS 148.51] gi|88183770|gb|EAQ91238.1| CHGG_03173 [Chaetomium globosum CBS 148.51]
  misc_feature (19)..(185): NCBI GI: 145611766 Blast Desc: MGG_00136 [Magnaporthe grisea 70-15] gi|145019017|gb|EDK03296.1| MGG_00136 [Magnaporthe grisea 70-15]
  misc_feature (14)..(193): NCBI GI: 164423956 Blast Desc: NCU07568 [Neurospora crassa OR74A] gi|157070304|gb|EAA29377.2| conserved [Neurospora crassa OR74A]
  misc_feature (5)..(180): NCBI GI: 46124765 Blast Desc: FG06760.1 [Gibberella zeae PH-1]
  misc_feature (9)..(180): NCBI GI: 256732734 Blast Desc: NECHADRAFT_79239 [Nectria haematococca mpVI 77-13-4]
  misc_feature (17)..(107): NCBI GI: 154291864 Blast Desc: BC1G_14948 [Botryotinia fuckeliana B05.10] gi|150846556|gb|EDN21749.1| BC1G_14948 [Botryotinia fuckeliana B05.10]
  misc_feature (17)..(107): NCBI GI: 156047938 Blast Desc: SS1G_08700 [Sclerotinia sclerotiorum 1980] gi|154693097|gb|EDN92835.1| SS1G_08700 [Sclerotinia sclerotiorum 1980]
  misc_feature (12)..(259): NCBI GI: 171686270 Blast Desc: protein product [Podospora anserina] gi|170943096|emb|CAP68749.1| protein product [Podospora anserina]
  misc_feature (21)..(107): NCBI GI: 189207376 Blast Desc: conserved [Pyrenophora tritici-repentis Pt-1C-BFP] gi|187976115|gb|EDU42741.1| conserved [Pyrenophora tritici-repentis Pt-1C-BFP]
  misc_feature (21)..(107): NCBI GI: 169619269 Blast Desc: SNOG_12829 [Phaeosphaeria nodorum SN15] gi|111058509|gb|EAT79629.1| SNOG_12829 [Phaeosphaeria nodorum SN15]
  misc_feature: Useful for introducing or modulating the production of volatile compounds
MEYSSADIPIRSVAHPHPPSLPPTVEEAYRRKCIQLKERSKEIEEENDAYRLRLHRLKRQIQKLRLERAFLLEQISKRTSTNVEDSEGSPSPPPTPQDKPLRIKRNHPKEHGGRSTNGAAKPPKRPSNAFEIYCNDKRPILQEENKDKIAAGEFRLEEELARGWKDLDEDEKNAFQKRYENELEEWRQARDSFKQGVKDASGRSRGRASRGGGGRSRVEESMQDEELDDDNDQDVEMGEADQDPGHAADQDTDPETEVDDNDG

SEQ ID NO: 15453 - DNA, 4122 bp, Muscodor strobelii
  misc_feature: SGI EST ID NO. CUFF.36749.2
  misc_feature: Variant of the nucleotide sequence at SEQ ID NO 15451
ggcccatgaatttgaggcgatggtaggggagctggtgtagctgatgcgctgaggtcggccttgaaaccttcaaacccaccgagccatgtccatgcagacgcgcatctgaactgcgcttgttattctcccttccattctattttagccccctgcctcacgaccaccatctaatccgtccattttgtttgcacacctgtcatatccaagatcgcataaccacccaccaacaggtaccaatcgccattgccattagcatccgattaaagcacttgccaacgtgcccatcccgtatcgcgaggtacaaacactcattcagcctttcgagatggctcctcaatattcacatcctcatcctccctcattaccgccgaccgtcgaggaggcctaccgccgaaaatgtatccagctgaaagagcgctctaaagagatcgaggaggagaacgatgcctaccgactccgtcttcatcgcctcaagcgccagatccagaagttgcgtctcgagcgagcctttctcctagagcagatctccaagcgcacaagcaccaacgtcgaggattcagagggcagcccaagccctcctcccacgccccaagacaagcccctgcgcataaagcgaaaccaccccaaggagcacggcggccgaagcaccaatggcgctgccaagccgcccaagcgacccagcaacgcattcgagatatactgcaacgacaagcgacccatcctccaggaagagaacaaggacaagatcgctgcaggcgagttcagactcgaggaagagctagctagaggctggaaggacctcgacgaggacgagaagaacgccttccaaaagcggtacgagaacgagctcgaggagtggaggcaggcgcgcgacagtttcaagcagggggttaaggacgcctctgggcggtctcgcggccgggcttcccgcggcggcggcgggcgctcccgagttgaggagtcgatgcaggacgaagagctcgacgacgacaatgaccaggatgtcgagatgggcgaggcggaccaggaccccggccacgccgctgatcaggacacggaccctgagaccgaggtcgacgacaacgatggctagaggctggtcgccgacgacggtcggcggcagacgtggcagaggcatatgccatacattacaagacgatcagtaagacgacggatttgatgacgtttgttggtgcttgataaagttttttgtacagcatctctcatgggtataataaaccatgacgaggagaaagatcaacgataccacactgcttgttattcgtttctgtggtatcatgggaaaagggtaatcggcgttaaaactagggattgtgtctgatcatggcaagacagatcagatcagatcatacagggctagatattcctcaaaaatgcttatgccaaaagaactcggttcagaagaacgactatcaaattatcatgcgtcattcctgaactcgaaatgcgtacgaattgcatgcgcatcccatcctcctctcatatacatttgttgatcttacatttcaggcaattggtgttaagcacttcaaaacgacactcaattgcggagtgactcatcgcttgctgtttcgtattattatctgccagtattccatgctgtgaagcttgacctcttgtgctgggttttgtctctaaactaattacaccatgtaatgattacagtacgcgctcttttttacatgagaaacgccccgcatagcaccaagccggaagcgcactatagcgcaaggccaaacgttaggccattgatgaggcatgttgtacgcggtagcagaatgtcgtgtgtggtttgccaagttccgtgccctagggactaagctggatatgatgtagcatgtgcatagctgcaggaatgaaatatccatgatttagtccacaccggcataaaggtcaacgacaatgttgacggcggcgactaggatctctgctgcgatgaggataatgactatagtttgcgaagcagtcgttagctatgtgataactctgacgtcgcagacaaaacggggagacaccgcgtaccaatccattcaagcatctcgccatggccatgactcagctgatctttaagcaccgccagaagatccgcaataacatccaaccgctccgtcaatagcccaacgcgctgatccatctcgaggtaagagcgaacggcctggtagacaggctcgaggtgcggttctacccagaagagctcaggcgtgtcgagcacgctgccgtttaggtggatgttgatgcgcaggatgaagagctcgcctatctgcatgttgatctgagaccgggaaagcgcgatcttgcctgtcagggcgatctgcgtgggtatgtctttgcatgcttctaccgttgatgcgatcagctcctcgaaaagagacgtctgtggatacagtgtaagtaaacagaaatgaaccggagtctactaagggtaatgcgagcgttaccttgacactttgcgcaagcgcatgcgatattgctaatttggtcatataattccctttgtctctcaacgtgatgaagtcgttgtatatccgggcctggtactcgcgcgtgtagtaaaaattgaagcactccgtctcgacatcgtccgggtctagcttttctaactcgaacttggcgatatctttgagaaagcgttgctcgtgagcaggcgacataccccatattaccacaaccccgtagtcgaaaagaaacacctccggtgtgtgtacctgagtatcgaagtcggcgtctacactcggatgtgcgtgtgattcgtgtattactccgttgtctgggtaggcaaggttgctgtgggcatcccggccattcttatatggctgctgggattgtaagtctgagaagggctgttgctgataggcattagagtgttcctcaacttcgctgtccgaatggcgtcgctcgtatgtatgtactggtcgctggttggcttccgtggcggcttctatcctctcagtcgcctttcccgtgccgtaattatatggcgaatatatgcattcgtcgatcagcttcgggtttgcccctctagtcttaccccggcctttcaagaagcgcatgagcccctcggtctggtatttgttcgcagtgcagtacgccgtgactcgcggaagcctgtcacggtctgccttgcccagtctcgcagcatcccgcctggccatgggatcctttatgcgggtgtactgggagtagacgtcgcgcccgctctcctcgtcgggctctgcctcgtcgacttcaggggcgggaagcagcttcagcttctgagcgttcttggagcttctctggggtccgtgttttggcacgacggcggggggtagagcggtgaagacggcgccatggctgttgcgtcggcgcaaacggctgttgagggctgagagcatcggtgggtgagcagctggggggccgcgcgcggcggcggtcgtcgagggggtgtcgagagcgtgagtagagccgggagaagagctgagcgaggggggatcgatggttctcgacacgggattcgcattgaaggtgacattgcgggctgtccgggggcgctccgtatcttgacgcagcagaggggtcctctcggagcccgaggcagagcccgtcgatgccatagctgcacggccgtggccaccttcggcctcggcggcgaagagctaaagttgtcgcaaggagtcgtcgctcgagccaagtcgtgggatgcacacagcgacgcagcagtcactgtacagatgaaattaagcaattgcagatctcaatagtactattgggcgataagtgagacgtggagcgcgagatggcggtgactgggcggtgactgggcggtgactgggcggtcgcagtcttggtgtagagtgtcgagctcgatcgtctctatccccgtcagccctcaactcaaaatcgcatgaggcccgtaaaacgtgaactgaggccggaggtggcgtgcaagacgttaggtatgctgtgaactacctaggtaccctatggattggtacgaggtctagaagctagtacctggccatgagctctgcgattacctctggtgattgtacagtactcaaatttcgtggtagaggcgacaatgctcgtcgtctcgctaattgagcacaatgacgttgactttct

SEQ ID NO: 15454 - DNA, 1581 bp, Muscodor strobelii
  misc_feature: SGI cDNA ID NO. 565120
  misc_feature: Reduced expression when VOC is produced
  misc_feature: Encodes the peptide sequence at SEQ ID NO 15455
atggcatcgacgggctctgcctcgggctccgagaggacccctctgctgcgtcaagatacggagcgcccccggacagcccgcaatgtcaccttcaatgcgaatcccgtgtcgagaaccatcgatcccccctcgctcagctcttctcccggctctactcacgctctcgacaccccctcgacgaccgccgccgcgcgcggccccccagctgctcacccaccgatgctctcagccctcaacagccgtttgcgccgacgcaacagccatggcgccgtcttcaccgctctaccccccgccgtcgtgccaaaacacggaccccagagaagctccaagaacgctcagaagctgaagctgcttcccgcccctgaagtcgacgaggcagagcccgacgaggagagcgggcgcgacgtctactcccagtacacccgcataaaggatcccatggccaggcgggatgctgcgagactgggcaaggcagaccgtgacaggcttccgcgagtcacggcgtactgcactgcgaacaaataccagaccgaggggctcatgcgcttcttgaaaggccggggtaagactagaggggcaaacccgaagctgatcgacgaatgcatatattcgccatataattacggcacgggaaaggcgactgagaggatagaagccgccacggaagccaaccagcgaccagtacatacatacgagcgacgccattcggacagcgaagttgaggaacactctaatgcctatcagcaacagcccttctcagacttacaatcccagcagccatataagaatggccgggatgcccacagcaaccttgcctacccagacaacggagtaatacacgaatcacacgcacatccgagtgtagacgccgacttcgatactcaggtacacacaccggaggtgtttcttttcgactacggggttgtggtaatatggggtatgtcgcctgctcacgagcaacgctttctcaaagatatcgccaagttcgagttagaaaagctagacccggacgatgtcgagacggagtgcttcaatttttactacacgcgcgagtaccaggcccggatatacaacgacttcatcacgttgagagacaaagggaattatatgaccaaattagcaatatcgcatgcgcttgcgcaaagtgtcaagacgtctcttttcgaggagctgatcgcatcaacggtagaagcatgcaaagacatacccacgcagatcgccctgacaggcaagatcgcgctttcccggtctcagatcaacatgcagataggcgagctcttcatcctgcgcatcaacatccacctaaacggcagcgtgctcgacacgcctgagctcttctgggtagaaccgcacctcgagcctgtctaccaggccgttcgctcttacctcgagatggatcagcgcgttgggctattgacggagcggttggatgttattgcggatcttctggcggtgcttaaagatcagctgagtcatggccatggcgagatgcttgaatggattgtcattatcctcatcgcagcagagatcctagtcgccgccgtcaacattgtcgttgacctttatgccggtgtggactaa

SEQ ID NO: 15455 - protein, 526 aa, Muscodor strobelii
  misc_feature: SGI Peptide ID NO. 565120
  misc_feature (164)..(474): Pfam Id: PF02582 Pfam Desc: Uncharacterised ACR, YagE family COG1723
  misc_feature (299)..(474): Pfam Id: PF02582 Pfam Desc: Uncharacterised ACR, YagE family COG1723
  misc_feature (3)..(524): NCBI GI: 46124763 Blast Desc: FG06759.1 [Gibberella zeae PH-1]
  misc_feature (3)..(524): NCBI GI: 256733194 Blast Desc: NECHADRAFT_92838 [Nectria haematococca mpVI 77-13-4]
  misc_feature (10)..(526): NCBI GI: 85090825 Blast Desc: sporulation protein RMD1 [Neurospora crassa OR74A] gi|28919978|gb|EAA29367.1| sporulation protein RMD1 [Neurospora crassa OR74A]
  misc_feature (20)..(526): NCBI GI: 171686268 Blast Desc: protein product [Podospora anserina] gi|170943095|emb|CAP68748.1| protein product [Podospora anserina]
  misc_feature (7)..(525): NCBI GI: 116207758 Blast Desc: CHGG_03172 [Chaetomium globosum CBS 148.51] gi|88183769|gb|EAQ91237.1| CHGG_03172 [Chaetomium globosum CBS 148.51]
  misc_feature (1)..(524): NCBI GI: 156047940 Blast Desc: SS1G_08701 [Sclerotinia sclerotiorum 1980] gi|154693098|gb|EDN92836.1| SS1G_08701 [Sclerotinia sclerotiorum 1980]
  misc_feature (6)..(524): NCBI GI: 261360400 Blast Desc: sporulation protein RMD1 [Verticillium albo-atrum VaMs.102]
  misc_feature (10)..(526): NCBI GI: 39975451 Blast Desc: MGG_00128 [Magnaporthe grisea 70-15] gi|145019026|gb|EDK03305.1| MGG_00128 [Magnaporthe grisea 70-15]
  misc_feature (6)..(524): NCBI GI: 189206724 Blast Desc: YagE family protein [Pyrenophora tritici-repentis Pt-1C-BFP] gi|187975789|gb|EDU42415.1| YagE family protein [Pyrenophora tritici-repentis Pt-1C-BFP]
  misc_feature (1)..(524): NCBI GI: 154291866 Blast Desc: BC1G_14949 [Botryotinia fuckeliana B05.10] gi|150846557|gb|EDN21750.1| BC1G_14949 [Botryotinia fuckeliana B05.10]
  misc_feature: Useful for introducing or modulating the production of volatile compounds
MASTGSASGSERTPLLRQDTERPRTARNVTFNANPVSRTIDPPSLSSSPGSTHALDTPSTTAAARGPPAAHPPMLSALNSRLRRRNSHGAVFTALPPAVVPKHGPQRSSKNAQKLKLLPAPEVDEAEPDEESGRDVYSQYTRIKDPMARRDAARLGKADRDRLPRVTAYCTANKYQTEGLMRFLKGRGKTRGANPKLIDECIYSPYNYGTGKATERIEAATEANQRPVHTYERRHSDSEVEEHSNAYQQQPFSDLQSQQPYKNGRDAHSNLAYPDNGVIHESHAHPSVDADFDTQVHTPEVFLFDYGVVVIWGMSPAHEQRFLKDIAKFELEKLDPDDVETECFNFYYTREYQARIYNDFITLRDKGNYMTKLAISHALAQSVKTSLFEELIASTVEACKDIPTQIALTGKIALSRSQINMQIGELFILRINIHLNGSVLDTPELFWVEPHLEPVYQAVRSYLEMDQRVGLLTERLDVIADLLAVLKDQLSHGHGEMLEWIVIILIAAEILVAAVNIVVDLYAGVD

SEQ ID NO: 15456 - DNA, 3382 bp, Muscodor strobelii
  misc_feature: SGI EST ID NO. CUFF.36750.3
  misc_feature: Variant of the nucleotide sequence at SEQ ID NO 15454
cgagcattgtcgcctctaccacgaaatttgagtactgtacaatcaccagaggtaatcgcagagctcatggccaggtactagcttctagacctcgtaccaatccatagggtacctaggtagttcacagcatacctaacgtcttgcacgccacctccggcctcagttcacgttttacgggcctcatgcgattttgagttgagggctgacggggatagagacgatcgagctcgacactctacaccaagactgcgaccgcccagtcaccgcccagtcaccgcccagtcaccgccatctcgcgctccacgtctcacttatcgcccaatagtactattgagatctgcaattgcttaatttcatctgtacagtgactgctgcgtcgctgtgtgcatcccacgacttggctcgagcgacgactccttgcgacaactttagctcttcgccgccgaggccgaaggtggccacggccgtgcagctatggcatcgacgggctctgcctcgggctccgagaggacccctctgctgcgtcaagatacggagcgcccccggacagcccgcaatgtcaccttcaatgcgaatcccgtgtcgagaaccatcgatcccccctcgctcagctcttctcccggctctactcacgctctcgacaccccctcgacgaccgccgccgcgcgcggccccccagctgctcacccaccgatgctctcagccctcaacagccgtttgcgccgacgcaacagccatggcgccgtcttcaccgctctaccccccgccgtcgtgccaaaacacggaccccagagaagctccaagaacgctcagaagctgaagctgcttcccgcccctgaagtcgacgaggcagagcccgacgaggagagcgggcgcgacgtctactcccagtacacccgcataaaggatcccatggccaggcgggatgctgcgagactgggcaaggcagaccgtgacaggcttccgcgagtcacggcgtactgcactgcgaacaaataccagaccgaggggctcatgcgcttcttgaaaggccggggtaagactagaggggcaaacccgaagctgatcgacgaatgcatatattcgccatataattacggcacgggaaaggcgactgagaggatagaagccgccacggaagccaaccagcgaccagtacatacatacgagcgacgccattcggacagcgaagttgaggaacactctaatgcctatcagcaacagcccttctcagacttacaatcccagcagccatataagaatggccgggatgcccacagcaaccttgcctacccagacaacggagtaatacacgaatcacacgcacatccgagtgtagacgccgacttcgatactcaggtacacacaccggaggtgtttcttttcgactacggggttgtggtaatatggggtatgtcgcctgctcacgagcaacgctttctcaaagatatcgccaagttcgagttagaaaagctagacccggacgatgtcgagacggagtgcttcaatttttactacacgcgcgagtaccaggcccggatatacaacgacttcatcacgttgagagacaaagggaattatatgaccaaattagcaatatcgcatgcgcttgcgcaaagtgtcaagacgtctcttttcgaggagctgatcgcatcaacggtagaagcatgcaaagacatacccacgcagatcgccctgacaggcaagatcgcgctttcccggtctcagatcaacatgcagataggcgagctcttcatcctgcgcatcaacatccacctaaacggcagcgtgctcgacacgcctgagctcttctgggtagaaccgcacctcgagcctgtctaccaggccgttcgctcttacctcgagatggatcagcgcgttgggctattgacggagcggttggatgttattgcggatcttctggcggtgcttaaagatcagctgagtcatggccatggcgagatgcttgaatggattgtcattatcctcatcgcagcagagatcctagtcgccgccgtcaacattgtcgttgacctttatgccggtgtggactaaatcatggatatttcattcctgcagctatgcacatgctacatcatatccagcttagtccctagggcacggaacttggcaaaccacacacgacattctgctaccgcgtacaacatgcctcatcaatggcctaacgtttggccttgcgctatagtgcgcttccggcttggtgctatgcggggcgtttctcatgtaaaaaagagcgcgtactgtaatcattacatggtgtaattagtttagagacaaaacccagcacaagaggtcaagcttcacagcatggaatactggcagataataatacgaaacagcaagcgatgagtcactccgcaattgagtgtcgttttgaagtgcttaacaccaattgcctgaaatgtaagatcaacaaatgtatatgagaggaggatgggatgcgcatgcaattcgtacgcatttcgagttcaggaatgacgcatgataatttgatagtcgttcttctgaaccgagttcttttggcataagcatttttgaggaatatctagccctgtatgatctgatctgatctgtcttgccatgatcagacacaatccctagttttaacgccgattacccttttcccatgataccacagaaacgaataacaagcagtgtggtatcgttgatctttctcctcgtcatggtttattatacccatgagagatgctgtacaaaaaactttatcaagcaccaacaaacgtcatcaaatccgtcgtcttactgatcgtcttgtaatgtatggcatatgcctctgccacgtctgccgccgaccgtcgtcggcgaccagcctctagccatcgttgtcgtcgacctcggtctcagggtccgtgtcctgatcagcggcgtggccggggtcctggtccgcctcgcccatctcgacatcctggtcattgtcgtcgtcgagctcttcgtcctgcatcgactcctcaactcgggagcgcccgccgccgccgcgggaagcccggccgcgagaccgcccagaggcgtccttaaccccctgcttgaaactgtcgcgcgcctgcctccactcctcgagctcgttctcgtaccgcttttggaaggcgttcttctcgtcctcgtcgaggtccttccagcctctagctagctcttcctcgagtctgaactcgcctgcagcgatcttgtccttgttctcttcctggaggatgggtcgcttgtcgttgcagtatatctcgaatgcgttgctgggtcgcttgggcggcttggcagcgccattggtgcttcggccgccgtgctccttggctgattctcatggcaagttagaccgggtattaggttcagacaagaaagatggcttacg

SEQ ID NO: 15457 - DNA, 2013 bp, Muscodor strobelii
  misc_feature: SGI cDNA ID NO. 565121
  misc_feature: Encodes the peptide sequence at SEQ ID NO 15458
atggctgatcagtgcattgtctgtctggacaatctggacgtgcaacaaccgtcacctcctcccctgcctccccctgattcccataacactgaccatggcatttcgactactccgctgaccgagtccaaccccaccattggcgcctctgatctagaattgccaccatcgccaaatctgacactaaatctcaaagcgcatgagagcaacaatacaaatattctcaccacatcaccaggcaatgatgacgacaataggattgccatgattcaggtttgcggccatgtacttcatgatgcttgcttgcgagaatggaccggcaaggccaacagctgcccaatatgtcgccaggcttttcatttggtgcatgttcatgacaaagttggaggtacgctgatctactcatacaaagtagaggacaagaaacaggttgccgaatttgatccgcaagcatggctcgatgagaatcctgaagaggaggaagaatcgaagccgtgccctatttgcaatctggccgaccatgaagaagttctccttctttgcgatagttgcgacactccctaccatacatactgtgtcggcctagatagtgttcctcgcggccattggttctgtctcgaatgtgctgaggaagctgctcaactactggtcgcagagctcgacgagtccgatgtatcggccggtggtctctcaggtttctccgacggtcggtctgattatctgcctcgtacccaagcgaccatgcgacgtgctagacagcgcgctcgctcggatgaatggcaaggtgcatggggtcaaattgcaggtcacgtttgggatgtcctaaacattgatctcgacaaccacgacgatgacgaagcgttgcacaattaccgacggtcgcagcagcggagggaaagagaacgacgtgaatatcagagatggcagcaacgtctcaatattgcaagtcgtcttggcgctcatgatgtattcgccgaaaacctctctcgtgttatccctcagcgaatggtccgtccgccgccgccgccgccacccccacaggagacgcccgaagaagtgcaagcctggggggcgttagagaaggcgatggaagccgagagtcccaatcgtccaaccacaagtcatcggaagcgcaagtctcgctccgtaacggcgtccccagcagaaccgccagcgccgcaagagaggagactgaaacggcctaggacccggagagtgcctacgcaatccgagggttcttcctctaatacgggatcgacgacgcaggttgtgcagtcaagctccgtcgccacatcgtcctcgaacggcagggcgggatcccccttacctgtcttggaaggaccgtcgtttctctcgtctctattgaaggaggtggagatgagcacgccttctgacgatgagaatatccaaatgctgtttgctagaaccagaccaagcacggatatgctttcccctgtgacatcaccctccccatcagcacacagcagtccgcgggcgctatcgactacacctccaccccgctcactaaatgagcgtcctggatctcccctttcactgatgtccagaattgaacctgtctaccccccggctaacttcaatgcactcccaaggaatggcggcgaccatagtgattctgagtcccgtccgcgccagcagcactcacaacacgccaatggagtaacacacacgacagagatccgacagccacgaccacgaagacatcggcattcggagatggggacaacgacggtacgctcgtcagatgtttcacccagccggctcgtcttaccatttgagatgaaggagagtatcagcggcatcgttaaggacgcattgaaaccgcactggaaatccggacaactcacggcagatcagtacgcgaatatcaaccgcgatctgagccacaagctctacaaggaagtgtctgaacaagaactcgacgatcaagctcggagccggttcgaaaagattgccaacaaagaagtggcacgtgctgtcgaggatctcaaggcatag

SEQ ID NO: 15458 - protein, 670 aa, Muscodor strobelii
  misc_feature: SGI Peptide ID NO. 565121
  misc_feature (164)..(210): Pfam Id: PF00628 Pfam Desc: PHD-finger
  misc_feature (5)..(114): Pfam Id: PF00097 Pfam Desc: Zinc finger, C3HC4 type (RING finger)
  misc_feature (92)..(114): Pfam Id: PF00097 Pfam Desc: Zinc finger, C3HC4 type (RING finger)
  misc_feature (1)..(670): NCBI GI: 171686276 Blast Desc: protein product [Podospora anserina] gi|170943099|emb|CAP68752.1| protein product [Podospora anserina]
  misc_feature (1)..(670): NCBI GI: 85090831 Blast Desc: NCU07561 [Neurospora crassa OR74A] gi|28919981|gb|EAA29370.1| [Neurospora crassa OR74A]
  misc_feature (1)..(670): NCBI GI: 116207774 Blast Desc: CHGG_03180 [Chaetomium globosum CBS 148.51] gi|88183777|gb|EAQ91245.1| CHGG_03180 [Chaetomium globosum CBS 148.51]
  misc_feature (118)..(670): NCBI GI: 145602133 Blast Desc: MGG_12926 [Magnaporthe grisea 70-15] gi|145010568|gb|EDJ95224.1| MGG_12926 [Magnaporthe grisea 70-15]
  misc_feature (2)..(661): NCBI GI: 46124757 Blast Desc: FG06756.1 [Gibberella zeae PH-1]
  misc_feature (1)..(668): NCBI GI: 154315679 Blast Desc: BC1G_04412 [Botryotinia fuckeliana B05.10] gi|150847352|gb|EDN22545.1| BC1G_04412 [Botryotinia fuckeliana B05.10]
  misc_feature (81)..(670): NCBI GI: 256732736 Blast Desc: NECHADRAFT_100156 [Nectria haematococca mpVI 77-13-4]
  misc_feature (1)..(669): NCBI GI: 156033159 Blast Desc: SS1G_13655 [Sclerotinia sclerotiorum 1980] gi|154699058|gb|EDN98796.1| SS1G_13655 [Sclerotinia sclerotiorum 1980]
  misc_feature (1)..(669): NCBI GI: 259483356 Blast Desc: TPA: PHD and RING finger domain protein, (AFU_orthologue; AFUA_2G16870) [Aspergillus nidulans FGSC A4]
  misc_feature (1)..(669): NCBI GI: 240278585 Blast Desc: PHD and RING finger domain-containing protein c [Ajellomyces capsulatus H143]
MADQCIVCLDNLDVQQPSPPPLPPPDSHNTDHGISTTPLTESNPTIGASDLELPPSPNLTLNLKAHESNNTNILTTSPGNDDDNRIAMIQVCGHVLHDACLREWTGKANSCPICRQAFHLVHVHDKVGGTLIYSYKVEDKKQVAEFDPQAWLDENPEEEEESKPCPICNLADHEEVLLLCDSCDTPYHTYCVGLDSVPRGHWFCLECAEEAAQLLVAELDESDVSAGGLSGFSDGRSDYLPRTQATMRRARQRARSDEWQGAWGQIAGHVWDVLNIDLDNHDDDEALHNYRRSQQRRERERREYQRWQQRLNIASRLGAHDVFAENLSRVIPQRMVRPPPPPPPPQETPEEVQAWGALEKAMEAESPNRPTTSHRKRKSRSVTASPAEPPAPQERRLKRPRTRRVPTQSEGSSSNTGSTTQVVQSSSVATSSSNGRAGSPLPVLEGPSFLSSLLKEVEMSTPSDDENIQMLFARTRPSTDMLSPVTSPSPSAHSSPRALSTTPPPRSLNERPGSPLSLMSRIEPVYPPANFNALPRNGGDHSDSESRPRQQHSQHANGVTHTTEIRQPRPRRHRHSEMGTTTVRSSDVSPSRLVLPFEMKESISGIVKDALKPHWKSGQLTADQYANINRDLSHKLYKEVSEQELDDQARSRFEKIANKEVARAVEDLKA

SEQ ID NO: 15459 - DNA, 4311 bp, Muscodor strobelii
  misc_feature: SGI EST ID NO. CUFF.36662.0
  misc_feature: Variant of the nucleotide sequence at SEQ ID NO 15457
gtttgatggtcacgctaggaccagacggcataggatgaaattgtccgtttcccagctgcgttaccgtacttcccagttggctgcagctgaatcggtatgacctaaggtctacagtatgatagcagaagtaggtctcgacgcgcaaagcccatgctgccattgtaggttgcgtcgataggcacttgatctcactagaccaaccactggcactgcctcacatttcccagaacccaaactatcgagctgtgtgtgccactccaaaaccctcctctttctaacggcctagctcacaatgcttcaaccgactttgttctcctcatctcattctcggactggttgagcacattataatattattcgcaaagaacattaatcaaccatcttattcatactaaaatattatctacacacatctgactcctatctgcggtccctccgtccacgtatacctatctcccctgcctctttgtattacgaaggcactcatctttctgccttacattcacaccccactcttacagtatccagtctacctatagattgctcatagccatagggaaaattgacgaaccgttacaagtcgcactgaattcacttgtgcatgtatactgtgtttcccgctcttctagttccaaatacaggttctagatacaccaagagacaggcagtacacaaataggctttctcatacggtcattccaagcctgcaacaacctgggttcaaactccagtggcccctgcgcaagcgatcatcactcctcctgactttgagaatactgtcccaaccaatctttcctctcatccttcctctgtctccctctcgccccccacacacacttccatcactctttattagcggaaggaaagcggcaattaggcaggcctagcatccccagcgaggttgctcgtgcctgcgccatatgcacataccttattagctacatacatcttgtgcatattgtatgcatacagacggggccaagttctttgcgaataaagtgtcacagtcagaagcggcagcccctccatcttcaatttacctgccgatttatctggacctgcctatcacaacggattatacaactcgcctcgactttctttgttgttcctgtcgaggcgtatgatcgttcctccacccatcaaaacttatcccattttgttgtcatttttcgatgatcaaagctcacaaacccaacttcaacgttctcacaacgcattacaacagcattgctttcccaaagctccgcttcattgctagctagctatctgcaccacacactacacacttgtacaaagacaccagcttggccgcttactagtaaccttttcaccttcgtattaattgttcatatcgacacaagaaaagaagaagaaaggttgcaagtgagtagttatctagtactttcggcacaggctcaagtcgacaatacttgtcaatactgcgcaataattcgcggacactcgagcatatcgtgacgcaattccactcatccaagaatctggtctgcgtacgcccaacaggctacacgcagctttttgcttgacttacatccaaggacacgccaccaatccatcaccaaccgctgccagtcccgcgcagctgagctgagctcacgccacggacaatcgccctgacacgtctgagttatttgcctcctacacctctttcagcctttggctaagcaggcgttattattcctgtcctcggtattttgctaccgccgacagcagattacgcataaggcttaagtaaagtcttttaatgtccgaattccagttacggcaatccatgaaaatctgctcgaatggctgatcagtgcattgtctgtctggacaatctggacgtgcaacaaccgtcacctcctcccctgcctccccctgattcccataacactgaccatggcatttcgactactccgctgaccgagtccaaccccaccattggcgcctctgatctagaattgccaccatcgccaaatctgacactaaatctcaaagcgcatgagagcaacaatacaaatattctcaccacatcaccaggcaatgatgacgacaataggattgccatgattcaggtttgcggccatgtacttcatgatgcttgcttgcgagaatggaccggcaaggccaacagctgcccaatatgtcgccaggcttttcatttggtgcatgttcatgacaaagttggaggtacgctgatctactcatacaaagtagaggacaagaaacaggttgccgaatttgatccgcaagcatggctcgatgagaatcctgaagaggaggaagaatcgaagccgtgccctatttgcaatctggccgaccatgaagaagttctccttctttgcgatagttgcgacactccctaccatacatactgtgtcggcctagatagtgttcctcgcggccattggttctgtctcgaatgtgctgaggaagctgctcaactactggtcgcagagctcgacgagtccgatgtatcggccggtggtctctcaggtttctccgacggtcggtctgattatctgcctcgtacccaagcgaccatgcgacgtgctagacagcgcgctcgctcggatgaatggcaaggtgcatggggtcaaattgcaggtcacgtttgggatgtcctaaacattgatctcgacaaccacgacgatgacgaagcgttgcacaattaccgacggtcgcagcagcggagggaaagagaacgacgtgaatatcagagatggcagcaacgtctcaatattgcaagtcgtcttggcgctcatgatgtattcgccgaaaacctctctcgtgttatccctcagcgaatggtccgtccgccgccgccgccgccacccccacaggagacgcccgaagaagtgcaagcctggggggcgttagagaaggcgatggaagccgagagtcccaatcgtccaaccacaagtcatcggaagcgcaagtctcgctccgtaacggcgtccccagcagaaccgccagcgccgcaagagaggagactgaaacggcctaggacccggagagtgcctacgcaatccgagggttcttcctctaatacgggatcgacgacgcaggttgtgcagtcaagctccgtcgccacatcgtcctcgaacggcagggcgggatcccccttacctgtcttggaaggaccgtcgtttctctcgtctctattgaaggaggtggagatgagcacgccttctgacgatgagaatatccaaatgctgtttgctagaaccagaccaagcacggatatgctttcccctgtgacatcaccctccccatcagcacacagcagtccgcgggcgctatcgactacacctccaccccgctcactaaatgagcgtcctggatctcccctttcactgatgtccagaattgaacctgtctaccccccggctaacttcaatgcactcccaaggaatggcggcgaccatagtgattctgagtcccgtccgcgccagcagcactcacaacacgccaatggagtaacacacacgacagagatccgacagccacgaccacgaagacatcggcattcggagatggggacaacgacggtacgctcgtcagatgtttcacccagccggctcgtcttaccatttgagatgaaggagagtatcagcggcatcgttaaggacgcattgaaaccgcactggaaatccggacaactcacggcagatcagtacgcgaatatcaaccgcgatctgagccacaagctctacaaggaagtgtctgaacaagaactcgacgatcaagctcggagccggttcgaaaagattgccaacaaagaagtggcacgtgctgtcgaggatctcaaggcatagtgcgacaacttttgtatgacagcatgggacaaggcgcatatttgaattaggcattttcaactgtctgcgaactttcggctgcgacctagatcttgatacccctttattcgaattgcagtggcgcttacctgggtctggttgctatttaccttgtacaatcatgggttgggcgcagcatgcatatgacagcagggagtttaatgggtagagccatggagttatctgcacgtggattcatcggcggtttgaagcatttgctgagttagtaattagacatgggagtcggcacggcgtggtatatgtggtttacagcagttttcatggcgacgtcaagttggaagagcacacataatggtgaacccatacgtagaagacgtagtcgacacggtctactgaagtattaatcaaaccaacctgccaattacacgtaccatcatagaaatacgagagagcatctcctcccatcatcattccctattgctggggattgcat

SEQ ID NO: 15460 - DNA, 873 bp, Muscodor strobelii
  misc_feature: SGI cDNA ID NO. 565122
  misc_feature: Reduced expression when VOC is produced
  misc_feature: Encodes the peptide sequence at SEQ ID NO 15461
atggaagacaagaagggcgagctcctccaacacgcccgggattttgccacgtccaaagatctttacgagcttctctccgtaacgccggaagcgacacaacccgaggtgcaccgcgcatggcgcaaagcttcactcaaacaccaccccgacaaggcgacgaacttcgacccggagatatggcagctgttcgagcgggcgcgagatgtcctgagctcgcctgaggcgagggcggcgtacgatggcgctagagcagccgccgtacaggcgcagaaggcgcgcgctgcgctcgacgcaaagaggagggagatgatcgaggatctcgaggcaagagagagaggcgtcaagaggaaagcgagtaacgaggagaacggagggagacatatgatgaccgaggcggagaagaggagagagagagggagagggagggctgaggaaccgagcgagtcgaaccccgtcgaagacgagcccatcaaacatccgtcaccacagcccaagatcgacaatgcacacgcacaacgggaggcaagcgcaaaagagacaaacctgtcacataccacagacgactacgatgcccgaatagccgatatcgagcgccgcctagagcagcacaaggcagagaagaaagcacgaaaagcagagaaaaaggccaagaagtcacggaagggcaccgaagaacattctgcttcaaacggcggtactaccacaactacgacacaacccacaacaaccacaccagcacctcactctgatccaccgccgcccgatcccgaaaatccctttgcatccacaatggccaagctacgcgccgcacagcgagagaaagagcggaagaaggccgaagccgctgctgccatggagactggtgatacataa

SEQ ID NO: 15461 - protein, 290 aa, Muscodor strobelii
  misc_feature: SGI Peptide ID NO. 565122
  misc_feature (20)..(80): Pfam Id: PF00226 Pfam Desc: DnaJ domain
  misc_feature (7)..(280): NCBI GI: 116191919 Blast Desc: CHGG_05677 [Chaetomium globosum CBS 148.51] gi|88181590|gb|EAQ89058.1| CHGG_05677 [Chaetomium globosum CBS 148.51]
  misc_feature (1)..(117): NCBI GI: 256733213 Blast Desc: NECHADRAFT_79286 [Nectria haematococca mpVI 77-13-4]
  misc_feature (4)..(115): NCBI GI: 46125847 Blast Desc: FG07301.1 [Gibberella zeae PH-1]
  misc_feature (1)..(105): NCBI GI: 39977167 Blast Desc: MGG_06486 [Magnaporthe grisea 70-15] gi|145016088|gb|EDK00578.1| MGG_06486 [Magnaporthe grisea 70-15]
  misc_feature (20)..(166): NCBI GI: 154296576 Blast Desc: BC1G_12696 [Botryotinia fuckeliana B05.10] gi|150843279|gb|EDN18472.1| BC1G_12696 [Botryotinia fuckeliana B05.10]
  misc_feature (16)..(116): NCBI GI: 240275343 Blast Desc: cell cycle control protein [Ajellomyces capsulatus H143]
  misc_feature (7)..(116): NCBI GI: 226284886 Blast Desc: pre-mRNA-splicing factor cwc23 [Paracoccidioides brasiliensis Pb01]
  misc_feature (16)..(116): NCBI GI: 225561736 Blast Desc: conserved [Ajellomyces capsulatus G186AR]
  misc_feature (7)..(116): NCBI GI: 261189573 Blast Desc: cell cycle control protein [Ajellomyces dermatitidis SLH14081] gi|239591433|gb|EEQ74014.1| cell cycle control protein [Ajellomyces dermatitidis SLH14081] gi|239613036|gb|EEQ90023.1|
  misc_feature (16)..(138): NCBI GI: 119174724 Blast Desc: CIMG_09324 [Coccidioides immitis RS]
  misc_feature: Useful for introducing or modulating the production of volatile compounds
MEDKKGELLQHARDFATSKDLYELLSVTPEATQPEVHRAWRKASLKHHPDKATNFDPEIWQLFERARDVLSSPEARAAYDGARAAAVQAQKARAALDAKRREMIEDLEARERGVKRKASNEENGGRHMMTEAEKRRERGRGRAEEPSESNPVEDEPIKHPSPQPKIDNAHAQREASAKETNLSHTTDDYDARIADIERRLEQHKAEKKARKAEKKAKKSRKGTEEHSASNGGTTTTTTQPTTTTPAPHSDPPPPDPENPFASTMAKLRAAQREKERKKAEAAAAMETGDT

SEQ ID NO: 15462 - DNA, 1578 bp, Muscodor strobelii
  misc_feature: SGI cDNA ID NO. 565123
  misc_feature: Reduced expression when VOC is produced
  misc_feature: Encodes the peptide sequence at SEQ ID NO 15463
atgtctgagcacggcaatagctctgcccaggcttccgagcctgtggccttgaatgcaccaaactcgtcgcgtgacttcgccaacatgggaactattggagccacgccgcccacatcgactcccattcccatgatgtcgtcctctcctggaccactccgacctgccctcggtggccgtcctcggggcgccggaactcctagactcggcttggccattccgccgtcgcccaataagcctctcgtaagaccacagctcactgtttccgttgccacacccatggccaacaacgctacgccatacgagccgtcaaggaccggtatccagcctggtcagtcggccagtggaggcagtgaaagcagtgccgcacactcgaggtctggcagttttggaccgctagacggaagagcaagcaatcctacctcggcaggctctcagttctcggcgctctcgttcgcgtcacagtatggtatcggatcccggcctcaaggaacacccgacccaatttccgcagttggatctatctattccgagaggagcgaaggcggcataggcatggagcgtgacgggagcacacagggactagaaatcagctttgataaactggcgctggacaaggcacggaatgctgatgtcgaagaccttgacgatgagggttggaagattgctagcatggaaaatcgtatcatagagttgggcagcctgggcgagggagctggtggtgctgtcacccgatgccagctgaagggtgggaagaccatattcgcgttgaaggtgatcacaacgaatcccgacccagacgttaagaaacagattgtacgggaaatcaacttcaacaaagagtgtgcttctgatcatatatgtcgttactggggggcttttgttgaccccgccaccgccacaatttctattgcgatggaattttgcgaaggcggctccctcgacagtatttataaggaagtcaagagactgggtgggcgaacaggcgagaaagtactcgggaaggtcgccgaaggtgtactgggtggcctcacgtaccttcacggcaagaagatcatccaccgtgatatcaagccctcaaacattttgttatgtcgcaatggcgaggtgaagctgtgcgactttggcgtatccggtgagtttggaaccaaaggagacgccaacacatttattgggacgagttactacatggctcctgaacgcattacgggacaaagctataccattacttctgatgtttggtctactggcgtgaccctcctggaggttgcccagcatcgatttccgttccctgcggatggcacagaaatgcaaccaagggcaggtctcattgatctgctgacttacatcgtccgacaacccataccaaaactgaaggatgagcctgacgccaatatcttctggagcgatagcttcaaatactttattgaatgctgcctcgagaaggaaccatctcgtcgtgccacaccatggaggatgcttgaacatccgtggatgctcgacatgcgcggcaagcgtgtcaacatggagaaatatctatcccaagtatggggatgggatgaagcagcaacgaaatcttga

SEQ ID NO: 15463 - protein, 525 aa, Muscodor strobelii
  misc_feature: SGI Peptide ID NO. 565123
  misc_feature (228)..(498): Pfam Id: PF00069 Pfam Desc: Protein kinase domain
  misc_feature (228)..(377): Pfam Id: PF07714 Pfam Desc: Protein tyrosine kinase
  misc_feature (37)..(518): NCBI GI: 46125835 Blast Desc: FG07295.1 [Gibberella zeae PH-1]
  misc_feature (47)..(518): NCBI GI: 154298932 Blast Desc: BC1G_11713 [Botryotinia fuckeliana B05.10] gi|150857618|gb|EDN32810.1| BC1G_11713 [Botryotinia fuckeliana B05.10]
  misc_feature (52)..(520): NCBI GI: 171686906 Blast Desc: protein product [Podospora anserina] gi|170943414|emb|CAP69067.1| protein product [Podospora anserina]
  misc_feature (52)..(520): NCBI GI: 38373932 Blast Desc: MAP kinase kinase 1 [Podospora anserina]
  misc_feature (47)..(518): NCBI GI: 156064103 Blast Desc: SS1G_00059 [Sclerotinia sclerotiorum 1980] gi|154690921|gb|EDN90659.1| SS1G_00059 [Sclerotinia sclerotiorum 1980]
  misc_feature (33)..(519): NCBI GI: 261354091 Blast Desc: MAP kinase kinase MKK1/SSP32 [Verticillium albo-atrum VaMs.102]
  misc_feature (47)..(520): NCBI GI: 39977159 Blast Desc: MGG_06482 [Magnaporthe grisea 70-15] gi|21930142|gb|AAM82166.1|AF525688_1 MAP kinase kinase [Magnaporthe grisea] gi|145016094|gb|EDK00584.1| MGG_06482 grisea
  misc_feature (40)..(520): NCBI GI: 4106374 Blast Desc: mitogen-activated protein kinase kinase CPKK1 [Cryphonectria parasitica]
  misc_feature (38)..(520): NCBI GI: 116191929 Blast Desc: CHGG_05682 [Chaetomium globosum CBS 148.51] gi|88181595|gb|EAQ89063.1| CHGG_05682 [Chaetomium globosum CBS 148.51]
  misc_feature (74)..(520): NCBI GI: 11991502 Blast Desc: mitogen-activated protein kinase kinase [Blumeria graminis]
  misc_feature (210)..(516): SWISSPROT Homolog: EC 2.7.12.2 Mitogen-activated protein kinase kinase
  misc_feature: Useful for introducing or modulating the production of volatile compounds
MSEHGNSSAQASEPVALNAPNSSRDFANMGTIGATPPTSTPIPMMSSSPGPLRPALGGRPRGAGTPRLGLAIPPSPNKPLVRPQLTVSVATPMANNATPYEPSRTGIQPGQSASGGSESSAAHSRSGSFGPLDGRASNPTSAGSQFSALSFASQYGIGSRPQGTPDPISAVGSIYSERSEGGIGMERDGSTQGLEISFDKLALDKARNADVEDLDDEGWKIASMENRIIELGSLGEGAGGAVTRCQLKGGKTIFALKVITTNPDPDVKKQIVREINFNKECASDHICRYWGAFVDPATATISIAMEFCEGGSLDSIYKEVKRLGGRTGEKVLGKVAEGVLGGLTYLHGKKIIHRDIKPSNILLCRNGEVKLCDFGVSGEFGTKGDANTFIGTSYYMAPERITGQSYTITSDVWSTGVTLLEVAQHRFPFPADGTEMQPRAGLIDLLTYIVRQPIPKLKDEPDANIFWSDSFKYFIECCLEKEPSRRATPWRMLEHPWMLDMRGKRVNMEKYLSQVWGWDEAATKS

SEQ ID NO: 15464 - DNA, 3911 bp, Muscodor strobelii
  misc_feature: SGI EST ID NO. CUFF.36912.1
  misc_feature: Variant of the nucleotide sequence at SEQ ID NO 15462
gcatcttcaacaccttctccaacaacggcaacagcgactgcaacaccgtccttttcagtcgtgtgtctgttcctcctttgcttctgtattctgtgcttcccaacatctgcataccacgctaccgctcctactgctgccatctgctccgacgcccagctgtgtcttggaccaccccccacctgggcccccaatacccgtcacacgacttcggtgtccctcattcacgctgcggtcctgttgctcattctggcctctctttccctcgacgacctgttaccacatccgtttgtctcgaaccttctattgagtcgagaagttgccatctagactacgtatccagttgctagcttttacagccctgtggcaaaatatctgtgagcctgtacgcctggaaacgggcgccaacgcagcccgatgtctgagcacggcaatagctctgcccaggcttccgagcctgtggccttgaatgcaccaaactcgtcgcgtgacttcgccaacatgggaactattggagccacgccgcccacatcgactcccattcccatgatgtcgtcctctcctggaccactccgacctgccctcggtggccgtcctcggggcgccggaactcctagactcggcttggccattccgccgtcgcccaataagcctctcgtaagaccacagctcactgtttccgttgccacacccatggccaacaacgctacgccatacgagccgtcaaggaccggtatccagcctggtcagtcggccagtggaggcagtgaaagcagtgccgcacactcgaggtctggcagttttggaccgctagacggaagagcaagcaatcctacctcggcaggctctcagttctcggcgctctcgttcgcgtcacagtatggtatcggatcccggcctcaaggaacacccgacccaatttccgcagttggatctatctattccgagaggagcgaaggcggcataggcatggagcgtgacgggagcacacagggactagaaatcagctttgataaactggcgctggacaaggcacggaatgctgatgtcgaagaccttgacgatgagggttggaagattgctagcatggaaaatcgtatcatagagttgggcagcctgggcgagggagctggtggtgctgtcacccgatgccagctgaagggtgggaagaccatattcgcgttgaaggtgatcacaacgaatcccgacccagacgttaagaaacagattgtacgggaaatcaacttcaacaaagagtgtgcttctgatcatatatgtcgttactggggggcttttgttgaccccgccaccgccacaatttctattgcgatggaattttgcgaaggcggctccctcgacagtatttataaggaagtcaagagactgggtgggcgaacaggcgagaaagtactcgggaaggtcgccgaaggtgtactgggtggcctcacgtaccttcacggcaagaagatcatccaccgtgatatcaagccctcaaacattttgttatgtcgcaatggcgaggtgaagctgtgcgactttggcgtatccggtgagtttggaaccaaaggagacgccaacacatttattgggacgagttactacatggctcctgaacgcattacgggacaaagctataccattacttctgatgtttggtctactggcgtgaccctcctggaggttgcccagcatcgatttccgttccctgcggatggcacagaaatgcaaccaagggcaggtctcattgatctgctgacttacatcgtccgacaacccataccaaaactgaaggatgagcctgacgccaatatcttctggagcgatagcttcaaatactttattgaatgctgcctcgagaaggaaccatctcgtcgtgccacaccatggaggatgcttgaacatccgtggatgctcgacatgcgcggcaagcgtgtcaacatggagaaatatctatcccaagtatggggatgggatgaagcagcaacgaaatcttgatccgccaacatcgaaaggagattgtactcagtttacacatcactgttcgcaccatttcactaacccatacactaaaaccgcaggcagcccgatcagaatcagatgactttgaatgcatgagacgaaccgctcatcaatggtctgtggtccatcgacttacaactcataaaaagccatagttactcccgatatgaggggaagcatcaacgctaaatatcaactcgtatacccacggcatcatcatcacaaaatcagaagcaaaagcagcgcatcatcgcctactcacccatcatttgttacgaatcagtctcgtgcgtcaaacacatcacagcatgaggaaggcattgtccctacggcaaagatatcagcatgaggtcttcaggggtaaagatcatggtatacgaactacaattggatattagctagtccgttgggtaaagtttcagccattaagccaattgaacgtgtgaaaggtgttgaaagattttgaaaattaagtctacgtaatttttcctcaatgagggcactgtaccatttagtaaattgcaatacgaatgttgaggtgctggagacttgcaatctcgtcatacttgtgctcagtgttgtgttcatctgtacaagtcgaagaaggcggcatagtgtattgagtatcattatgatttggtttatgggtatcactatctaggtttgtctaccgaatgcctgccgaagggttatgtgtgtcgtgtactggcgtcaattcgtaattggtgataacgaagattttatgtatcaccagtctccatggcagcagcggcttcggccttcttccgctctttctctcgctgtgcggcgcgtagcttggccattgtggatgcaaagggattttcgggatcgggcggcggtggatcagagtgaggtgctggtgtggttgttgtgggttgtgtcgtagttgtggtagtaccgccgtttgaagcagaatgttcttcggtgcccttccgtgacttcttggcctttttctctgcttttcgtgctttcttctctgccttgtgctgctctaggcggcgctcgatatcggctattcgggcatcgtagtcgtctgtggtatgtgacaggtttgtctcttttgcgcttgcctcccgttgtgcgtgtgcattgtcgatcttgggctgtggtgacggatgtttgatgggctcgtcttcgacggggttcgactcgctcggttcctcagccctccctctccctctctctctctctttctctagcctcagcctcggcgatcaatctcttgcgttctgctatccgtctgttccctctctccatcaagaccctcttctccgcctcggtcatcatatgtctccctccgttctcctcgttactcgctttcctcttgacgcctctctctcttgcctcgagatcctcgatcatctccctcctctttgcgtcgagcgcagcgcgcgccttctgcgcctgtacggcggctgctctagcgccatcgtacgccgccctcgcctcaggcgagctcaggacatctcgcgcccgctcgaacagctgccatatctccgggtcgaagttcgtcgccttgtcggggtggtgtttgagtgaagctttgcgccatgcgcggtgcacctcgggttgtgtcgcttccggcgttacggagagaagctcgtaaagatctttggacgtggcaaaatcccgggcgtgttggaggagctcgcccttcttgtcttccatcttcgctgtttgatcgtgtgttcaggaaaggagcgacggcggatgaatagtgggtggggaggttgatggggaggttgatttatcatagatccatcctaggtagtatgtaaataaggtaacagcgactaggcgtgcgcttagaaagctggtgacaccaccgaattgcctaacgggtatagtaccgaataatatatcgcataatcgtc

SEQ ID NO: 15465 - DNA, 1554 bp, Muscodor strobelii
  misc_feature: SGI cDNA ID NO. 565124
  misc_feature: Encodes the peptide sequence at SEQ ID NO 15466
atgccatcagttgctgatccggagagtgactcggagcgtgctgagttgaacggcgcatccgagtccgagtccgactcccttgacaacggtgcatcccgtaaacgccgcaggttatctagcacacccgatgccatatctctatcaatcaatgcgccatccagactttctcggaaccttcccaagtcgcaaatttctactggtaaacccgtgctagttcaggaaccgacatcaaccattgccgttcccgttgatgcttcttcatccttcgatgatctacatctggcatcatggctaacacaatccctggcaaatatggctatcaagcgccctacgcgtattcaacagttgacgatacccgctatccttgaaggccgtgatgttataggctcgtcgaggactggttcgggaaagaccgttgcctttatggcacccatactccagcaatggtctcgtgacccgagttctgtctacgcggtcattcttactgcaaccagagaactcgctctccagatccatcaacaggttcaagccataggggcagttagatctctgaaaactttgcttgtcacaggtggtgcagacatgcgagcccaagctattgggctggctcagagaccacacgttgtgattgccacgcccggccgtcttgcagatcatatcaaatcatctggcgaagataccattattggcctgaaaaggaccaaatatgttgttcttgacgaggcggatcgcctacttgctgcaaatgggccaggaagtatgctaccagatatagaagaggtcctcggtgcattgcctccatcaactcagagacagactcttctttatacagcaacaatcacaccagaagttcgagccttgaaggacatgccagctaagcctggcaaaaagccagcatttgtatgcgaggtcgacacgcaacagcttgctgttccagatacactatctcaaatgtatctacaggtcaatgtcacccataaggaatattacctccatgcatttctcttgacagatgtcaatattgagaaatcgctcatcatattttgtaatcgagcatcaacagcacaatacctccatcacttgctatggcttcttgaacatcgggtaacggcactgcactcaaaattgccccaacgcgagagaacatccaaccttgaacgttttcgcgctcaggcagcccggattctcgtggcgacagacgtagccagcagaggtttagatatcccagaagtatcattggtagtcaactacgatattccccaagaagccgacgactatattcatcgtgtgggtcgaacggctagagcgggtcgcaagggggattgtgtctcgcttgttggcgcaagggatgtcgataggatccataacattgagcaacgtgttggcggaaacaaaatgaccgagtggaaggaggaaggcgttaaccttgagacgagatttatccgcgaccatatgaagaatgtcagtgagaagaagcgcgaggcattgcttgacattgaagagaatcgagaagtgggcggcaaacggaagaagacgaagttaagactgcagtaa

SEQ ID NO: 15466 - protein, 517 aa, Muscodor strobelii
  misc_feature: SGI Peptide ID NO. 565124
  misc_feature (111)..(287): Pfam Id: PF00270 Pfam Desc: DEAD/DEAH box helicase
  misc_feature (361)..(437): Pfam Id: PF00271 Pfam Desc: Helicase conserved C-terminal domain
  misc_feature (2)..(517): NCBI GI: 46125837 Blast Desc: FG07296.1 [Gibberella zeae PH-1] gi|91206552|sp|Q4I662.1|DBP8_GIBZE RecName: Full=ATP-dependent RNA helicase DBP8
  misc_feature (5)..(517): NCBI GI: 256733217 Blast Desc: [Nectria haematococca mpVI 77-13-4]
  misc_feature (4)..(517): NCBI GI: 85084455 Blast Desc: NCU06418 [Neurospora crassa OR74A] gi|74654303|sp|Q7RYZ7.1|DBP8_NEUCR RecName: Full=ATP-dependent RNA helicase dbp-8 gi|28918399|gb|EAA28073.1| NCU06418 crassa
  misc_feature (74)..(517): NCBI GI: 171686908 Blast Desc: protein product [Podospora anserina] gi|170943415|emb|CAP69068.1| protein product [Podospora anserina]
  misc_feature (31)..(516): NCBI GI: 154298930 Blast Desc: BC1G_11712 [Botryotinia fuckeliana B05.10] gi|160380630|sp|A6SFV4.1|DBP8_BOTFB RecName: Full=ATP-dependent RNA helicase dbp8 gi|150857617|gb|EDN32809.1| BC1G_11712 B05.10]
  misc_feature (3)..(516): NCBI GI: 156064101 Blast Desc: SS1G_00058 [Sclerotinia sclerotiorum 1980] gi|160380631|sp|A7E436.1|DBP8_SCLS1 RecName: Full=ATP-dependent RNA helicase dbp8 gi|154690920|gb|EDN90658.1| SS1G_00058 1980]
  misc_feature (25)..(517): NCBI GI: 261354092 Blast Desc: ATP-dependent RNA helicase dbp8 [Verticillium albo-atrum VaMs.102]
  misc_feature (46)..(516): NCBI GI: 152013495 Blast Desc: ATP-dependent RNA helicase dbp8 [Verticillium albo-atrum VaMs.102]
  misc_feature (46)..(516): NCBI GI: 145608646 Blast Desc: MGG_06483 [Magnaporthe grisea 70-15] gi|145016093|gb|EDK00583.1| MGG_06483 [Magnaporthe grisea 70-15]
  misc_feature (31)..(509): NCBI GI: 118578051 Blast Desc: MGG_06483 [Magnaporthe grisea 70-15] gi|145016093|gb|EDK00583.1| MGG_06483 [Magnaporthe grisea 70-15]
MPSVADPESDSERAELNGASESESDSLDNGASRKRRRLSSTPDAISLSINAPSRLSRNLPKSQISTGKPVLVQEPTSTIAVPVDASSSFDDLHLASWLTQSLANMAIKRPTRIQQLTIPAILEGRDVIGSSRTGSGKTVAFMAPILQQWSRDPSSVYAVILTATRELALQIHQQVQAIGAVRSLKTLLVTGGADMRAQAIGLAQRPHVVIATPGRLADHIKSSGEDTIIGLKRTKYVVLDEADRLLAANGPGSMLPDIEEVLGALPPSTQRQTLLYTATITPEVRALKDMPAKPGKKPAFVCEVDTQQLAVPDTLSQMYLQVNVTHKEYYLHAFLLTDVNIEKSLIIFCNRASTAQYLHHLLWLLEHRVTALHSKLPQRERTSNLERFRAQAARILVATDVASRGLDIPEVSLVVNYDIPQEADDYIHRVGRTARAGRKGDCVSLVGARDVDRIHNIEQRVGGNKMTEWKEEGVNLETRFIRDHMKNVSEKKREALLDIEENREVGGKRKKTKLRLQ

SEQ ID NO: 15467 - DNA, 1805 bp, Muscodor strobelii
  misc_feature: SGI EST ID NO. CUFF.36674.0
  misc_feature: Variant of the nucleotide sequence at SEQ ID NO 15465
cagcacccggtcgtatcggccacaacgtgaacaggagtttcggctgaatatccctgtctaacggactccggactataggctctccgtcactgacactgagctacgaagaggacaggaagtctgaaatgccatcagttgctgatccggagagtgactcggagcgtgctgagttgaacggcgcatccgagtccgagtccgactcccttgacaacggtgcatcccgtaaacgccgcaggttatctagcacacccgatgccatatctctatcaatcaatgcgccatccagactttctcggaaccttcccaagtcgcaaatttctactggtaaacccgtgctagttcaggaaccgacatcaaccattgccgttcccgttgatgcttcttcatccttcgatgatctacatctggcatcatggctaacacaatccctggcaaatatggctatcaagcgccctacgcgtattcaacagttgacgatacccgctatccttgaaggccgtgatgttataggctcgtcgaggactggttcgggaaagaccgttgcctttatggcacccatactccagcaatggtctcgtgacccgagttctgtctacgcggtcattcttactgcaaccagagaactcgctctccagatccatcaacaggttcaagccataggggcagttagatctctgaaaactttgcttgtcacaggtggtgcagacatgcgagcccaagctattgggctggctcagagaccacacgttgtgattgccacgcccggccgtcttgcagatcatatcaaatcatctggcgaagataccattattggcctgaaaaggaccaaatatgttgttcttgacgaggcggatcgcctacttgctgcaaatgggccaggaagtatgctaccagatatagaagaggtcctcggtgcattgcctccatcaactcagagacagactcttctttatacagcaacaatcacaccagaagttcgagccttgaaggacatgccagctaagcctggcaaaaagccagcatttgtatgcgaggtcgacacgcaacagcttgctgttccagatacactatctcaaatgtatctacaggtcaatgtcacccataaggaatattacctccatgcatttctcttgacagatgtcaatattgagaaatcgctcatcatattttgtaatcgagcatcaacagcacaatacctccatcacttgctatggcttcttgaacatcgggtaacggcactgcactcaaaattgccccaacgcgagagaacatccaaccttgaacgttttcgcgctcaggcagcccggattctcgtggcgacagacgtagccagcagaggtttagatatcccagaagtatcattggtagtcaactacgatattccccaagaagccgacgactatattcatcgtgtgggtcgaacggctagagcgggtcgcaagggggattgtgtctcgcttgttggcgcaagggatgtcgataggatccataacattgagcaacgtgttggcggaaacaaaatgaccgagtggaaggaggaaggcgttaaccttgagacgagatttatccgcgaccatatgaagaatgtcagtgagaagaagcgcgaggcattgcttgacattgaagagaatcgagaagtgggcggcaaacggaagaagacgaagttaagactgcagtaaatataacccattgagactttgatactgttcgtgttctttgttccattacattggaaacccgaacataccatatcaaactaattctcttactctaagtgagtagtggttcaacagactcgtggaatg

SEQ ID NO: 15468 - DNA, 786 bp, Muscodor strobelii
  misc_feature: SGI cDNA ID NO. 565125
  misc_feature: Reduced expression when VOC is produced
  misc_feature: Encodes the peptide sequence at SEQ ID NO 15469
atggtttcctcagccgcctcacccttccactcacactctcctcaccataccccatactcccccgccaggaaaagcatgtctatcacgcagacttacttcctcgcccacaaggcccgggctaagctctccaccgaggctgcccggcccgaccacaacctccgcctgctcgtcggccacgccaatctgctcgactccctgatgctcgacctcgccgacgccgaacgggagcaggagagctggttcaaccagtccgtccgcggtgccgcacccaagacacatgagagacacatacaatgggccgactcggtggtcgaggacgaggaggacgactgggaagccgactcctccgattccgactcggacagcgacatggatgacgacgaggacatcgagatggccgatgcccctctcgcccgtgcaccttcctacatgatcacaccaccctcgcccaagctccacaccatggaagcagaggacctggatgacgaagaggacgaggaggacttcgacagcctgagccttactcgatcaccatcacactccgcaacacctcctgagctcgagcacgactccgagtcttcggaggacgaggccatgcccccctcaccacccaccaccacaatgcccacattctccgaaaagcagagcgagagcacgataacaaccaagtacctgtacccaaggcaagaggaggaagaagaggacaagtcagatttctacaatgagggattctacctgccgcccaggaatcccaatcgactcatctcgacgatatcggtctactag

SEQ ID NO: 15469 - protein, 261 aa, Muscodor strobelii
  misc_feature: SGI Peptide ID NO. 565125
  misc_feature (24)..(261): NCBI GI: 85084483 Blast Desc: NCU06425 [Neurospora crassa OR74A] gi|28918406|gb|EAA28080.1| [Neurospora crassa OR74A]
  misc_feature (17)..(261): NCBI GI: 116191915 Blast Desc: CHGG_05675 [Chaetomium globosum CBS 148.51] gi|88181588|gb|EAQ89056.1| CHGG_05675 [Chaetomium globosum CBS 148.51]
  misc_feature (23)..(261): NCBI GI: 39977163 Blast Desc: MGG_06484 [Magnaporthe grisea 70-15] gi|145016091|gb|EDK00581.1| MGG_06484 [Magnaporthe grisea 70-15]
  misc_feature (1)..(261): NCBI GI: 156064441 Blast Desc: SS1G_00228 [Sclerotinia sclerotiorum 1980] gi|154691090|gb|EDN90828.1| SS1G_00228 [Sclerotinia sclerotiorum 1980]
  misc_feature (23)..(261): NCBI GI: 256733216 Blast Desc: NECHADRAFT_100171 [Nectria haematococca mpVI 77-13-4]
  misc_feature (20)..(261): NCBI GI: 46125841 Blast Desc: FG07298.1 [Gibberella zeae PH-1]
  misc_feature (23)..(221): NCBI GI: 67539868 Blast Desc: AN6104.2 [Aspergillus nidulans FGSC A4] gi|40738889|gb|EAA58079.1| AN6104.2 [Aspergillus nidulans FGSC A4] gi|259479707|tpe|CBF70177.1| TPA: [Aspergillus nidulans FGSC
  misc_feature (23)..(219): NCBI GI: 145252956 Blast Desc: An16g06890 [Aspergillus niger] gi|134083548|emb|CAK47011.1| protein product [Aspergillus niger]
  misc_feature (13)..(261): NCBI GI: 171686928 Blast Desc: protein product [Podospora anserina] gi|170943425|emb|CAP69078.1| protein product [Podospora anserina]
  misc_feature (23)..(219): NCBI GI: 255950100 Blast Desc: Pc22g19140 [Penicillium chrysogenum Wisconsin 54-1255] gi|211592834|emb|CAP99202.1| Pc22g19140 [Penicillium chrysogenum Wisconsin 54-1255]
  misc_feature: Useful for introducing or modulating the production of volatile compounds
MVSSAASPFHSHSPHHTPYSPARKSMSITQTYFLAHKARAKLSTEAARPDHNLRLLVGHANLLDSLMLDLADAEREQESWFNQSVRGAAPKTHERHIQWADSVVEDEEDDWEADSSDSDSDSDMDDDEDIEMADAPLARAPSYMITPPSPKLHTMEAEDLDDEEDEEDFDSLSLTRSPSHSATPPELEHDSESSEDEAMPPSPPTTTMPTFSEKQSESTITTKYLYPRQEEEEEDKSDFYNEGFYLPPRNPNRLISTISVY

SEQ ID NO: 15470 - DNA, 2507 bp, Muscodor strobelii
  misc_feature: SGI EST ID NO. CUFF.36710.0
  misc_feature: Variant of the nucleotide sequence at SEQ ID NO 15468
cgaacgagtccgccaatctctccgtttaagcccgagtttccctggaagtctgcgaggacacaatacacaatagtcagcaggtgattaataacagccacatacacgtacgaagctttcaatcccgcacatctcgagatcaggcattacaaaagaatcacaattcccattcccatccctcccctcatcttattttgacacacgctcagatcgaaacagaacgacacacagctctagaccacacaagcaatcagtatcgagcaatagcctgaagattaggcggtatagtccagcaccgagaacagctatccgagacaacagaccagagtattacccaatacagccagggaaagacggcccagactggatcaagtatcaagttaccaagacgacaggcgcacaatacatacaagcagggagtagtgccagcgagtgcctcattagtaccattgtaccgctgaaccctgtcgacctgttcggctctgcgaccaaggccgacccgttaaagccacccccctcagacccacgctagcagcgccaacaaaacccactggacctgaccaagtccgctgcctggtcccggaaacgagaaaaacaaaaaagtacctggcaaagtacccgagagcccgcagtcgcgcacgcctcaccgcaacggatccgagctcgatccctgcccgcaccagcacacaccccgtccacatcgacgctgtcatcgtgggcttgtacaaaagcgagcaggccctcttcgctttctgctgccttggccgtacatcggtgcctgactcacacagaaaatattgcaacaaaccacgacataatagcaccaacacacctaaccacgtccgtgcttcacgtcaacatctccagacaaagacccaacaacaaaatggtttcctcagccgcctcacccttccactcacactctcctcaccataccccatactcccccgccaggaaaagcatgtctatcacgcagacttacttcctcgcccacaaggcccgggctaagctctccaccgaggctgcccggcccgaccacaacctccgcctgctcgtcggccacgccaatctgctcgactccctgatgctcgacctcgccgacgccgaacgggagcaggagagctggttcaaccagtccgtccgcggtgccgcacccaagacacatgagagacacatacaatgggccgactcggtggtcgaggacgaggaggacgactgggaagccgactcctccgattccgactcggacagcgacatggatgacgacgaggacatcgagatggccgatgcccctctcgcccgtgcaccttcctacatgatcacaccaccctcgcccaagctccacaccatggaagcagaggacctggatgacgaagaggacgaggaggacttcgacagcctgagccttactcgatcaccatcacactccgcaacacctcctgagctcgagcacgactccgagtcttcggaggacgaggccatgcccccctcaccacccaccaccacaatgcccacattctccgaaaagcagagcgagagcacgataacaaccaagtacctgtacccaaggcaagaggaggaagaagaggacaagtcagatttctacaatgagggattctacctgccgcccaggaatcccaatcgactcatctcgacgatatcggtctactagaccgagctctcttctttttcgactttcatcacattgcattgggtttcgggtcactagcgaaaaagtgcatcacatctgcatctgggcggcgttaaaaaagaaatgataccacaacagcggcattggcattgcaatggcatcagcggtcttgttttaaactctcacacattttctatgtctcatcacggtggtcacaccggatttccttggaaggataccaggattcgaattcggcatgtggccaaggataccaaagcagctaggaattgcttgccatagacgattatggcaatatcaccactcaataggaggataaggattaggcaggttccgctcccactccgtaaaaacggatgcttaggtcgagtggaactggatctatagatacctcgtaccagaaaataaacaagttaatctcattaaactatcaacttcattctctatcgtgaattcgtaataatgtctatacatttgtgactgattaagggcactgtcacaaacccgctgatgtagaataagggcgttgctcaacagtctcgatcgacccaactgactgaaactttagtgagtcatgtttcgcggagcgaagggtacctaagctgttagaactaccatcattttcgtcgggtcacgcgagataggccacttaaggttttccctcgggatgctaaagtagtaattctcccccacgctacatccatctcattgatcaccaccaattgacacactgccagactacaatgaaaagaaaatcgatcgcatttttttgcataaatcaaagcgggactcgcagcgtattcacacaattcgcggatttccatccacactgaattggcgg

SEQ ID NO: 15471 - DNA, 1341 bp, Muscodor strobelii
  misc_feature: SGI cDNA ID NO. 565126
  misc_feature: Encodes the peptide sequence at SEQ ID NO 15472
atgcagagtctccgacacagcattcccagagggtttgcaaattatcaacctttgtcctctcggactaactacgtttgcgcttcgtgtctctcttcgagacagcagccatctcccacactctccctacgacagcgtagaagcttcgcctccggacacaggttttccgagtctcccatcctcactctgccgccgtcctccggccatgcgcgcctcaccacccgccgcctcatatctctgaccggaagcggtgcgccgcatttccttcaaggcctcgtcacgacgtggatcccaggttccggcactcctgccgaaaacaaaagccgcgaatccgcaccgccgagtccctggaactactgtggttttctgaacgccacgggtcgtgtgctgcacgatgtcttcatataccatgttccctccggctcagttggcgagcacgctttcatgattgaggtagatgcggaacaactaccagtgcttctacgccatatcaaacgctacaagttgcgcagcaagatctccgttcgcgcgatcgaaccagacgagtacagtgtctggcaagtctgggacgacaacgcagacgctgcgaatgtcacaaggcaagagacacaaccagcggcgcaacatgaaggaggggagactgtgcttcgagatctccgtgcgccagggctgggctaccgtgttctatcagctggtaccgatctaaatatacaaaatctacacttcctccaaggcgcaagcgagcccagcgatgaacaagcctaccgcgtgcgccggtactttcgaggtgtgccagagggtagttcggagatcatacccgagcaagccctcccttcagagtccaacatggacatcatgggcggcatcgatttccgaaaaggttgctacgtaggacaagaactgaccattcgcacgcgtcaccgtggggtggtgcggaagcgcattctaccagtctcattatatggcgaagaagacgccgtgccagatgtgctcgaatacaaccctcagacgacttcaattgacggaagtaaactgaacggcctcacagtcggacgcgtgaccaagaaaggccggagcgccgggacgtttctagccggtgtcgggaacataggactagctctctgccgtgtccagattatgaccgatctcgcggttcccaatgagacagcgtctgcaattactttcgatcctaccgctgaatttgaactcaagcttggcgaacagcaggaaagcaacggcgagagtcaggataaaggacctcgcatcaaagcttttattcccgaatggttgcgtagccggcttgatgaggaggctgcaaaaatgcaagcgcatcatagaccgtaa

SEQ ID NO: 15472 - protein, 446 aa, Muscodor strobelii
  misc_feature: SGI Peptide ID NO. 565126
  misc_feature (71)..(285): Pfam Id: PF01571 Pfam Desc: Aminomethyltransferase folate-binding domain
  misc_feature (293)..(396): Pfam Id: PF08669 Pfam Desc: Glycine cleavage T-protein C-terminal barrel domain
  misc_feature (293)..(316): Pfam Id: PF08669 Pfam Desc: Glycine cleavage T-protein C-terminal barrel domain
  misc_feature (4)..(436): NCBI GI: 256733215 Blast Desc: NECHADRAFT_37544 [Nectria haematococca mpVI 77-13-4]
  misc_feature (35)..(441): NCBI GI: 46125843 Blast Desc: FG07299.1 [Gibberella zeae PH-1]
  misc_feature (67)..(438): NCBI GI: 39977165 Blast Desc: MGG_06485 [Magnaporthe grisea 70-15] gi|158514087|sp|A4R8F9.1|CAF17_MAGGR RecName: Full= transferase CAF17, mitochondrial; Flags: Precursor MGG_06485 [Magnaporthe
  misc_feature (16)..(445): NCBI GI: 115387399 Blast Desc: conserved [Aspergillus terreus NIH2624] gi|114195289|gb|EAU36989.1| conserved [Aspergillus terreus NIH2624]
  misc_feature (18)..(439): NCBI GI: 225561737 Blast Desc: conserved [Ajellomyces capsulatus G186AR]
  misc_feature (25)..(430): NCBI GI: 238842624 Blast Desc: MCYG_05105 [Microsporum canis CBS 113480]
  misc_feature (25)..(433): NCBI GI: 261189571 Blast Desc: aminomethyl transferase [Ajellomyces dermatitidis SLH14081] gi|239591432|gb|EEQ74013.1| aminomethyl transferase [Ajellomyces dermatitidis SLH14081] gi|239613037|gb|EEQ90024.1|
  misc_feature (62)..(430): NCBI GI: 242777590 Blast Desc: aminomethyl transferase, [Talaromyces stipitatus ATCC 10500] gi|218722684|gb|EED22102.1| aminomethyl transferase, [Talaromyces stipitatus ATCC 10500]
  misc_feature (73)..(434): NCBI GI: 261354093 Blast Desc: conserved [Verticillium albo-atrum VaMs.102]
  misc_feature (24)..(433): NCBI GI: 212533241 Blast Desc: aminomethyl transferase, [Penicillium marneffei ATCC 18224] gi|210072141|gb|EEA26230.1| aminomethyl transferase, [Penicillium marneffei ATCC 18224]
MQSLRHSIPRGFANYQPLSSRTNYVCASCLSSRQQPSPTLSLRQRRSFASGHRFSESPILTLPPSSGHARLTTRRLISLTGSGAPHFLQGLVTTWIPGSGTPAENKSRESAPPSPWNYCGFLNATGRVLHDVFIYHVPSGSVGEHAFMIEVDAEQLPVLLRHIKRYKLRSKISVRAIEPDEYSVWQVWDDNADAANVTRQETQPAAQHEGGETVLRDLRAPGLGYRVLSAGTDLNIQNLHFLQGASEPSDEQAYRVRRYFRGVPEGSSEIIPEQALPSESNMDIMGGIDFRKGCYVGQELTIRTRHRGVVRKRILPVSLYGEEDAVPDVLEYNPQTTSIDGSKLNGLTVGRVTKKGRSAGTFLAGVGNIGLALCRVQIMTDLAVPNETASAITFDPTAEFELKLGEQQESNGESQDKGPRIKAFIPEWLRSRLDEEAAKMQAHHRP

SEQ ID NO: 15473 - DNA, 3192 bp, Muscodor strobelii
  misc_feature: SGI cDNA ID NO. 565127
  misc_feature: Encodes the peptide sequence at SEQ ID NO 15474
atgcctgttatctcgcctgagaagctggctagtctacagcagcatgcagacgatatccggaatatttgcatcctggcccacgtcgaccatggcaaaacttcgctatcagatgccctacttgcaaacaacggcatcatatcgcctaagctagccggcaaggtccgatatctcgactcccgtgccgatgagcagatcagaggcattactatggagtcttcggccatctctctatatttctccatgctccgtagatccgctcctgaagctgaacctatgcccaaagaatacctcatcaacctcatcgactccccaggtcatattgacttcagcagcgaggtctctactgcatccagattgtgtgatggtgctgttgtcctagttgacgtggtggaaggtgtatgcagtcaaaccgtcacagtgttgcggcagacatggaccgaaagattaaaaccactgttggttataaataagatcgaccgtttagtcacagaactgaagatgacccctgcagaggcctatactcatctcagcaaactcctagagcaggtcaacgcggtgctcgggagttttttccagggtgagcgtatggaagaagacttgaattggagagagcgtatggacgagcgagtggctgccgccgccgccaaggaaacgaaacaagatgatctcgaaagcgacgctggcgaattacaatttgaagagcgagacgacgaagagctctattttgctccagagaagaataatgtgatcttcagtagcgcagtcgatggctgggcatttactgtgcggcagtttgctagtctctatgaaaagaaactcggcataaagcgtaacatcatggagaaagtattgtggggtgatttctatcttgacccaaagacaaaaaaggtccttggccgtaagcacctaaagggccggaatctcaagcctatgtttgttcaacttgtgctagaacaagtgtgggcaatatacgcggcaacgactggcggcgacaacggcaaaggtgacccggtgctgctggagaaaataaccaagtccttaagcattacaataccaccacatatctctcgcgcccgagacccacggttactcatgacaacggtgttctcttcctggctaccgctctccactgccttacttgtttcagtggctgaatcattaccatcgccgaaagccgcccaagccgcacgtatggctgaaatgctagaagattcaccgggtgcaagtcacgtcgatccagaggtgaaggatgcggtggtcaatttcaagacttccaaatctgaccctgtagttgcatacgttagcaagatggtttctgtacctgagagcgaacttcctgataagaaacgtcgagttggtcagctaagtgctgaggaggcaagagaactcgcaagaagaaaacgggcagaatttgctcaagcacagcaagcagaaacgaatgggtccaataatatggcaactgcactcgaagcagtgtcattagatgactatgtcccagaagctgaagaaaagcaagcagaacccgagcacctcattggcttcgccaggatattctctggaacactttccgttggggactgcatctatgttttggcaccaaaattctctccagctaatgctcatgcggcgccagagcctcagaaagtcactgtcacagctctgtacatgctcatgggccggaatctagagagtctggactcagtacccgccggtgttgtctttggcattggcggtctcgaaggtcacatactcaagtccggcaccttgtgtagccaactcgaaggggctgtaaatttagctggcataaacatggcaggcaaacctatcgttcgtatcgcgctagaaccagtcaaccctgcagatctggataaaatgatcgagggcctcaaactgctcgtacagagcgatccctgtgctgagtatgagcagtttgcaagcggagagcatgttcttataactgcgggcgaactgcattttgaacgatgtttgttggacttgaaagaacggttcgcaagatgcgatatccaatctgataaacccatcgtgccatatcgagaaaccatcgtacgggcggaagagatgcgaccgcctgcgaacaaggaactaggaaggggtgttgttgtgagcactaccagctcgaaacaggcccagttcacgttacgagtccgccctctgccacaaaatgttaccgattttcttttgaagaacgaatcatccattaaacgcgtctattctgagcaaaagggggatgacggaacaaagagtgagagtgatggattggaagaccaacaaaacgcagacgtggacgaacatatcatcgagagcaaaacattatcagttgaagaactcaaatcaaaacttcaagaagtattggaaaagggtaagggtcgtgaagcatggaaggacgttattgacaaaatcgtggcattcggtcctcgacgcacgggtccaaatcttctagtcgatgccacgaaagatggtatattcccgaaaatattttctgaacatggtgttgaaagcgggaagcaggagtccggtgaagctctcagcgctgcccacctttgcgacaaagtcacacatgcttttcagctggctatgtatcaagggccattgtgcaacgagcctgtccagggagttggtgtcataatcgaagatatgtccatcacagccaccgaagaggatgcttcgagactaggtaggttgaccggtgagactatcacgacggtgcagcaatctattcgtcaaggctttttagactggtcgccacgcctcatgctcgctatgtattcatgtgagattcaagcaagcaccgaagtccttggccgtgtctacgacgtcctgacccgtcgccgtgggcgcgtgttgtccgaacagatgaaagaaggcactccattcttcacgatccagtcattacttccagtagtcgagtcgttcggcttttctgacgatatgcggaaaagaacttcaggtgctgcgcagccacaactcatcttcgcgggctttgaagtcctcgatgaagatcccttctgggtgcctttcaccgaggatgatctggaggatctgggcgaacttgctgataaagagaacgttgcaaagcgttacatggatcgtgtaaggcgaaagaagggtctgttcgtccagggacgacaagagcgcatcgctgccgagaagcagaagacgatgaagcgatag

SEQ ID NO: 15474 - protein, 1063 aa, Muscodor strobelii
  misc_feature: SGI Peptide ID NO. 565127
  misc_feature (510)..(590): Pfam Id: PF03144 Pfam Desc: Elongation factor Tu domain 2
  misc_feature (923)..(1011): Pfam Id: PF00679 Pfam Desc: Elongation factor G C-terminus
  misc_feature (17)..(389): Pfam Id: PF00009 Pfam Desc: Elongation factor Tu GTP binding domain
  misc_feature (928)..(1005): Pfam Id: PF00679 Pfam Desc: Elongation factor G C-terminus
  misc_feature (1)..(1063): NCBI GI: 46111377 Blast Desc: FG02570.1 [Gibberella zeae PH-1]
  misc_feature (1)..(1063): NCBI GI: 164425193 Blast Desc: NCU06278 [Neurospora crassa OR74A] gi|157070827|gb|EAA33646.2| NCU06278 [Neurospora crassa OR74A]
  misc_feature (1)..(1063): NCBI GI: 171686026 Blast Desc: protein product [Podospora anserina] gi|170942974|emb|CAP68627.1| protein product [Podospora anserina]
  misc_feature (1)..(1063): NCBI GI: 156058706 Blast Desc: SS1G_03365 [Sclerotinia sclerotiorum 1980] gi|154701152|gb|EDO00891.1| SS1G_03365 [Sclerotinia sclerotiorum 1980]
  misc_feature (28)..(1063): NCBI GI: 145601999 Blast Desc: MGG_05265 [Magnaporthe grisea 70-15] gi|145010453|gb|EDJ95109.1| MGG_05265 [Magnaporthe grisea 70-15]
  misc_feature (1)..(1063): NCBI GI: 261358400 Blast Desc: elongation factor 2 [Verticillium albo-atrum VaMs.102]
  misc_feature (1)..(1063): NCBI GI: 116207552 Blast Desc: CHGG_03069 [Chaetomium globosum CBS 148.51] gi|88183666|gb|EAQ91134.1| CHGG_03069 [Chaetomium globosum CBS 148.51]
  misc_feature (1)..(1063): NCBI GI: 189199078 Blast Desc: elongation factor 2 [Pyrenophora tritici-repentis Pt-1C-BFP] gi|187982975|gb|EDU48463.1| elongation factor 2 [Pyrenophora tritici-repentis Pt-1C-BFP]
  misc_feature (1)..(1063): NCBI GI: 119478246 Blast Desc: ribosome biogenesis protein Ria1, [Neosartorya fischeri NRRL 181] gi|119407488|gb|EAW17437.1| ribosome biogenesis protein Ria1, [Neosartorya fischeri NRRL 181]
  misc_feature (1)..(1063): NCBI GI: 169779467 Blast Desc: [Aspergillus oryzae RIB40] gi|83772937|dbj|BAE63065.1| protein product [Aspergillus oryzae]
MPVISPEKLASLQQHADDIRNICILAHVDHGKTSLSDALLANNGIISPKLAGKVRYLDSRADEQIRGITMESSAISLYFSMLRRSAPEAEPMPKEYLINLIDSPGHIDFSSEVSTASRLCDGAVVLVDVVEGVCSQTVTVLRQTWTERLKPLLVINKIDRLVTELKMTPAEAYTHLSKLLEQVNAVLGSFFQGERMEEDLNWRERMDERVAAAAAKETKQDDLESDAGELQFEERDDEELYFAPEKNNVIFSSAVDGWAFTVRQFASLYEKKLGIKRNIMEKVLWGDFYLDPKTKKVLGRKHLKGRNLKPMFVQLVLEQVWAIYAATTGGDNGKGDPVLLEKITKSLSITIPPHISRARDPRLLMTTVFSSWLPLSTALLVSVAESLPSPKAAQAARMAEMLEDSPGASHVDPEVKDAVVNFKTSKSDPVVAYVSKMVSVPESELPDKKRRVGQLSAEEARELARRKRAEFAQAQQAETNGSNNMATALEAVSLDDYVPEAEEKQAEPEHLIGFARIFSGTLSVGDCIYVLAPKFSPANAHAAPEPQKVTVTALYMLMGRNLESLDSVPAGVVFGIGGLEGHILKSGTLCSQLEGAVNLAGINMAGKPIVRIALEPVNPADLDKMIEGLKLLVQSDPCAEYEQFASGEHVLITAGELHFERCLLDLKERFARCDIQSDKPIVPYRETIVRAEEMRPPANKELGRGVVVSTTSSKQAQFTLRVRPLPQNVTDFLLKNESSIKRVYSEQKGDDGTKSESDGLEDQQNADVDEHIIESKTLSVEELKSKLQEVLEKGKGREAWKDVIDKIVAFGPRRTGPNLLVDATKDGIFPKIFSEHGVESGKQESGEALSAAHLCDKVTHAFQLAMYQGPLCNEPVQGVGVIIEDMSITATEEDASRLGRLTGETITTVQQSIRQGFLDWSPRLMLAMYSCEIQASTEVLGRVYDVLTRRRGRVLSEQMKEGTPFFTIQSLLPVVESFGFSDDMRKRTSGAAQPQLIFAGFEVLDEDPFWVPFTEDDLEDLGELADKENVAKRYMDRVRRKKGLFVQGRQERIAAEKQKTMKR

SEQ ID NO: 15475 - DNA, 5785 bp, Muscodor strobelii
  misc_feature: SGI EST ID NO. CUFF.36717.0
  misc_feature: Variant of the nucleotide sequence at SEQ ID NO 15473
ggagcattgatattctaccacgtaatatattgattctctacacatagcgaactttcagtttaagtatactttatttcgaacacgtattgtgataatatctagcaccaaactccgataccaaacgcattgacaacgcccatctcctacggtcattccaggtcaaggcaaacaacggcggatgagtgcgtgtggtcatttataattacgttgctaaatgtagtcttagtcccttgttaaactgacagacatcgagaaatcttgcaggctcattctttattctaaacccaaattgaaactacatggtgtttgtgaattatatacgtttatctgtgggcaagactgttgagagtgtatatcattggtgatattcgatgtgcaagtctgaatcattatgactgtctctctggctggttgacttaccaatcgaaaggtactacgtacgggggacaagtactgcaatggtggggtggcggggtcgacatagctgctatcaaaaacactctcttttcaattgcccctccattctttttgcagcgccagagaagtgcggactatcactacctggactcatactgatgacaccgccaatagacttgtaataatcattgaaccgcgtattcccaacaatacaactgatataattagagtgccttgctgttaccaaactcgcatcattgcgcaagcgtttgcttgttgcacatagataccgaaacagtatcatcgtactttcacaccaaatccacttacacctctatatctcatctcaatcggggaaatcttcaactcacatcccactccgcctacattatcaagtgcctctctcatagccgcgcaagatgcctgttatctcgcctgagaagctggctagtctacagcagcatgcagacgatatccggaatatttgcatcctggcccacgtcgaccatggcaaaacttcgctatcagatgccctacttgcaaacaacggcatcatatcgcctaagctagccggcaaggtccgatatctcgactcccgtgccgatgagcagatcagaggcattactatggagtcttcggccatctctctatatttctccatgctccgtagatccgctcctgaagctgaacctatgcccaaagaatacctcatcaacctcatcgactccccaggtcatattgacttcagcagcgaggtctctactgcatccagattgtgtgatggtgctgttgtcctagttgacgtggtggaaggtgtatgcagtcaaaccgtcacagtgttgcggcagacatggaccgaaagattaaaaccactgttggttataaataagatcgaccgtttagtcacagaactgaagatgacccctgcagaggcctatactcatctcagcaaactcctagagcaggtcaacgcggtgctcgggagttttttccagggtgagcgtatggaagaagacttgaattggagagagcgtatggacgagcgagtggctgccgccgccgccaaggaaacgaaacaagatgatctcgaaagcgacgctggcgaattacaatttgaagagcgagacgacgaagagctctattttgctccagagaagaataatgtgatcttcagtagcgcagtcgatggctgggcatttactgtgcggcagtttgctagtctctatgaaaagaaactcggcataaagcgtaacatcatggagaaagtattgtggggtgatttctatcttgacccaaagacaaaaaaggtccttggccgtaagcacctaaagggccggaatctcaagcctatgtttgttcaacttgtgctagaacaagtgtgggcaatatacgcggcaacgactggcggcgacaacggcaaaggtgacccggtgctgctggagaaaataaccaagtccttaagcattacaataccaccacatatctctcgcgcccgagacccacggttactcatgacaacggtgttctcttcctggctaccgctctccactgccttacttgtttcagtggctgaatcattaccatcgccgaaagccgcccaagccgcacgtatggctgaaatgctagaagattcaccgggtgcaagtcacgtcgatccagaggtgaaggatgcggtggtcaatttcaagacttccaaatctgaccctgtagttgcatacgttagcaagatggtttctgtacctgagagcgaacttcctgataagaaacgtcgagttggtcagctaagtgctgaggaggcaagagaactcgcaagaagaaaacgggcagaatttgctcaagcacagcaagcagaaacgaatgggtccaataatatggcaactgcactcgaagcagtgtcattagatgactatgtcccagaagctgaagaaaagcaagcagaacccgagcacctcattggcttcgccaggatattctctggaacactttccgttggggactgcatctatgttttggcaccaaaattctctccagctaatgctcatgcggcgccagagcctcagaaagtcactgtcacagctctgtacatgctcatgggccggaatctagagagtctggactcagtacccgccggtgttgtctttggcattggcggtctcgaaggtcacatactcaagtccggcaccttgtgtagccaactcgaaggggctgtaaatttagctggcataaacatggcaggcaaacctatcgttcgtatcgcgctagaaccagtcaaccctgcagatctggataaaatgatcgagggcctcaaactgctcgtacagagcgatccctgtgctgagtatgagcagtttgcaagcggagagcatgttcttataactgcgggcgaactgcattttgaacgatgtttgttggacttgaaagaacggttcgcaagatgcgatatccaatctgataaacccatcgtgccatatcgagaaaccatcgtacgggcggaagagatgcgaccgcctgcgaacaaggaactaggaaggggtgttgttgtgagcactaccagctcgaaacaggcccagttcacgttacgagtccgccctctgccacaaaatgttaccgattttcttttgaagaacgaatcatccattaaacgcgtctattctgagcaaaagggggatgacggaacaaagagtgagagtgatggattggaagaccaacaaaacgcagacgtggacgaacatatcatcgagagcaaaacattatcagttgaagaactcaaatcaaaacttcaagaagtattggaaaagggtaagggtcgtgaagcatggaaggacgttattgacaaaatcgtggcattcggtcctcgacgcacgggtccaaatcttctagtcgatgccacgaaagatggtatattcccgaaaatattttctgaacatggtgttgaaagcgggaagcaggagtccggtgaagctctcagcgctgcccacctttgcgacaaagtcacacatgcttttcagctggctatgtatcaagggccattgtgcaacgagcctgtccagggagttggtgtcataatcgaagatatgtccatcacagccaccgaagaggatgcttcgagactaggtaggttgaccggtgagactatcacgacggtgcagcaatctattcgtcaaggctttttagactggtcgccacgcctcatgctcgctatgtattcatgtgagattcaagcaagcaccgaagtccttggccgtgtctacgacgtcctgacccgtcgccgtgggcgcgtgttgtccgaacagatgaaagaaggcactccattcttcacgatccagtcattacttccagtagtcgagtcgttcggcttttctgacgatatgcggaaaagaacttcaggtgctgcgcagccacaactcatcttcgcgggctttgaagtcctcgatgaagatcccttctgggtgcctttcaccgaggatgatctggaggatctgggcgaacttgctgataaagagaacgttgcaaagcgttacatggatcgtgtaaggcgaaagaagggtctgttcgtccagggacgacaagagcgcatcgctgccgagaagcagaagacgatgaagcgatagtccatcatttcgttgtcttgtgtattatttatgggagctgcttattaccggtggtatggcatagaaagcgtcaggggtctgttttgatagaaaatgtcacttactcgcagttcgtatcgtcttcttgtagtggcctcgagagcatataattaagttttgagaatattcgatctgcattgatggagcggtatgggtattgagttataactatctatacaccaccaggcaagattatatcttccctgtatcatacagccatagcatggttaatcacacattttacacattacggtctatgatgcgcttgcatttttgcagcctcctcatcaagccggctacgcaaccattcgggaataaaagctttgatgcgaggtcctttatcctgactctcgccgttgctttcctgctgttcgccaagcttgagttcaaattcagcggtaggatcgaaagtaattgcagacgctgtctcattgggaaccgcgagatcggtcataatctggacacggcagagagctagtcctatgttcccgacaccggctagaaacgtcccggcgctccggcctttcttggtcacgcgtccgactgtgaggccgttcagtttacttccgtcaattgaagtcgtctgagggttgtattcgagcacatctggcacggcgtcttcttcgccatataatgagactggtagaatgcgcttccgcaccaccccacggtgacgcgtgcgaatggtcagttcttgtcctacgtagcaaccttttcggaaatcgatgccgcccatgatgtccatgttggactctgaagggagggcttgctcgggtatgatctccgaactaccctctggcacacctcgaaagtaccggcgcacgcggtaggcttgttcatcgctgggctcgcttgcgccttggaggaagtgtagattttgtatatttagatcggtaccagctgatagaacacggtagcccagccctggcgcacggagatctcgaagcacagtctcccctccttcatgttgcgccgctggttgtgtctcttgccttgtgacattcgcagcgtctgcgttgtcgtcccagacttgccagacactgtactcgtctggttcgatcgcgcgaacggagatcttgctgcgcaacttgtagcgtttgatatggcgtagaagcactggtagttgttccgcatctacctcaatcatgaaagcgtgctcgccaactgagccggagggaacatggtatatgaagacatcgtgcagcacacgacccgtggcgttcagaaaaccacagtagttccagggactcggcggtgcggattcgcggcttttgttttcggcaggagtgccggaacctgggatccacgtcgtgacgaggccttgaaggaaatgcggcgcaccgcttccggtcagagatatgaggcggcgggtggtgaggcgcgcatggccggaggacggcggcagagtgaggatgggagactcggaaaacctgtgtccggaggcgaagcttctacgctgtcgtagggagagtgtgggagatggctgctgtctcgaagagagacacgaagcgcaaacgtagttagtccgagaggacaaaggttgataatttgcaaaccctctgggaatgctgtgtcggagactctgcatggtgcaatactctagatggtactcgtcgtgcatctacatttgcacatagtcaggagctttttccgactccggtcgtaggctcgattcgtagtcttgttgttatcattgaacatacggcaatcggcttggg

SEQ ID NO: 15476 - DNA, 1437 bp, Muscodor strobelii
  misc_feature: SGI cDNA ID NO. 565128
  misc_feature: Reduced expression when VOC is produced
  misc_feature: Encodes the peptide sequence at SEQ ID NO 15477
atgagcggcctgcggaacggcgccgcccccgtgcgcaccatggaggacgacagcgacgtcgaggaggaggccctcgtcgccgactacaaggagcaggtccagtacgaggacggcatggaggagctcgagcaggtcagctcgatgacgatggcccagcagaccgacgacatccagtcccgcctcgtcgccgccgcgcagcccctcgacttctccgcgccgctcgaggtcaagttccagagctacgactcctactgcaacctcttccacttcatcctcaactccgacggccctgtcgaccttgagcccccctctcattactgggcatgggatgtcatcgacgagttcatctaccagttcaactccttttcgtcgtacagactccgcatcgcccgacaggccaacaacaatgaggaagagcgccagatcctgcgcgagaaccccaacacctggggctgctatagcgtcttgaacgtcctctattccctcatccagaggtcgcagatctcggagcagctcaccgccatgaagcgcaacgaggacccggccgccgtcgctggcgaatacggctctaagaccctctaccgcatgctcggatatttctccatcattggtctgctgcgcgtccactgtctcttgggtgacttcagcctcgcgctcaagactctcgacgacatcgaacttaacaagaaggccatgtttgcccgcgtcatggccgctcacttcaccacctactactacgtcggcttctcctacatgatgatgcaccgctatgccgatgccatcaagatgttcagccacattctggtctacgtctcgcggactaagaacttccagaagaacgcccaatacgactccatcaccaagaagaacgaccagatgtatgctcttattgctatctgtgtcgccttccaccccactcgtttggacgacactatccacaccgccgtcagggagaaatacggcgaccagctcctcaagctccagcgcggcggccccgactcgcttcccattttcgaggagctcttcagggcggcatgccctaaattcatctcgccagtcccgccagatttcgataaccccgagtctaacgtcgatccggtcgagcaccacctttctatctttatggatgaggtcaaaactaacatgtggagtcccactgttaagtcatacttgcgtctctacactactatggatctgaaaaagcttgccggtttcttggacgtcgagccggaagaactccgtggctggctgttggtgaacaagcagcgaaccaagcagcttcgctgggctgaccaggggcttctggacggcgagtgggtgaacgtcagtgatttggactacgccctgcaaggagacctgattcatatctcggaggctaaagtgggacgcaaattggtcgactggtacttacgaaacttgtctcgtacttacaactga

SEQ ID NO: 15477 - protein, 478 aa, Muscodor strobelii
  misc_feature: SGI Peptide ID NO. 565128
  misc_feature (1)..(478): NCBI GI: 46111379 Blast Desc: FG02571.1 [Gibberella zeae PH-1]
  misc_feature (1)..(477): NCBI GI: 39939948 Blast Desc: conserved [Magnaporthe grisea 70-15] gi|74588172|sp|Q5EN08.1|EIF3L_MAGGR RecName: Full=Eukaryotic translation initiation factor 3 subunit L; Short=eIF3l eukaryotic
  misc_feature (1)..(477): NCBI GI: 226700834 Blast Desc: conserved [Magnaporthe grisea 70-15] gi|74588172|sp|Q5EN08.1|EIF3L_MAGGR RecName: Full=Eukaryotic translation initiation factor 3 subunit L; Short=eIF3l eukaryotic
  misc_feature (1)..(477): NCBI GI: 156065119 Blast Desc: conserved [Sclerotinia sclerotiorum 1980] gi|229501213|sp|A7E5J5.1|EIF3L_SCLS1 RecName: Full=Eukaryotic translation initiation factor 3 subunit L; Short=eIF3l conserved
  misc_feature (1)..(478): NCBI GI: 256726179 Blast Desc: [Nectria haematococca mpVI 77-13-4]
  misc_feature (1)..(477): NCBI GI: 85109368 Blast Desc: NCU06279 [Neurospora crassa OR74A] gi|74617337|sp|Q7SB62.1|EIF3L_NEUCR RecName: Full=Eukaryotic translation initiation factor 3 subunit L; Short=eIF3l NCU06279
  misc_feature (5)..(477): NCBI GI: 116207554 Blast Desc: conserved [Chaetomium globosum CBS 148.51] gi|121922805|sp|Q2H9N4.1|EIF3L_CHAGB RecName: Full=Eukaryotic translation initiation factor 3 subunit L; Short=eIF3l conserved
  misc_feature (39)..(477): NCBI GI: 154311495 Blast Desc: conserved [Botryotinia fuckeliana B05.10] gi|150850997|gb|EDN26190.1| conserved [Botryotinia fuckeliana B05.10]
  misc_feature (5)..(477): NCBI GI: 189204642 Blast Desc: eukaryotic translation initiation factor 3 [Pyrenophora tritici-repentis Pt-1C-BFP] gi|187985755|gb|EDU51243.1| eukaryotic translation initiation 3
  misc_feature (14)..(477): NCBI GI: 240276731 Blast Desc: eukaryotic translation initiation factor 3 [Ajellomyces capsulatus H143]
  misc_feature: Useful for introducing or modulating the production of volatile compounds
MSGLRNGAAPVRTMEDDSDVEEEALVADYKEQVQYEDGMEELEQVSSMTMAQQTDDIQSRLVAAAQPLDFSAPLEVKFQSYDSYCNLFHFILNSDGPVDLEPPSHYWAWDVIDEFIYQFNSFSSYRLRIARQANNNEEERQILRENPNTWGCYSVLNVLYSLIQRSQISEQLTAMKRNEDPAAVAGEYGSKTLYRMLGYFSIIGLLRVHCLLGDFSLALKTLDDIELNKKAMFARVMAAHFTTYYYVGFSYMMMHRYADAIKMFSHILVYVSRTKNFQKNAQYDSITKKNDQMYALIAICVAFHPTRLDDTIHTAVREKYGDQLLKLQRGGPDSLPIFEELFRAACPKFISPVPPDFDNPESNVDPVEHHLSIFMDEVKTNMWSPTVKSYLRLYTTMDLKKLAGFLDVEPEELRGWLLVNKQRTKQLRWADQGLLDGEWVNVSDLDYALQGDLIHISEAKVGRKLVDWYLRNLSRTYN

SEQ ID NO: 15478 - DNA, 2182 bp, Muscodor strobelii
  misc_feature: SGI EST ID NO. CUFF.36722.0
  misc_feature: Variant of the nucleotide sequence at SEQ ID NO 15476
gtttcctctactgtgctctcgcatttcgctgtggcttcaccccctccacccaaaaattatccccacgcgccgtgtgctctgcatccatcaagtggcagtgagagactgtcgagactgtgtctgcaccatcgccctttcgaccacccgctccgacacctaccacccatctgcgatcgcctgttgcatcatgagcggcctgcggaacggcgccgcccccgtgcgcaccatggaggacgacagcgacgtcgaggaggaggccctcgtcgccgactacaaggagcaggtccagtacgaggacggcatggaggagctcgagcaggtcagctcgatgacgatggcccagcagaccgacgacatccagtcccgcctcgtcgccgccgcgcagcccctcgacttctccgcgccgctcgaggtcaagttccagagctacgactcctactgcaacctcttccacttcatcctcaactccgacggccctgtcgaccttgagcccccctctcattactgggcatgggatgtcatcgacgagttcatctaccagttcaactccttttcgtcgtacagactccgcatcgcccgacaggccaacaacaatgaggaagagcgccagatcctgcgcgagaaccccaacacctggggctgctatagcgtcttgaacgtcctctattccctcatccagaggtcgcagatctcggagcagctcaccgccatgaagcgcaacgaggacccggccgccgtcgctggcgaatacggctctaagaccctctaccgcatgctcggatatttctccatcattggtctgctgcgcgtccactgtctcttgggtgacttcagcctcgcgctcaagactctcgacgacatcgaacttaacaagaaggccatgtttgcccgcgtcatggccgctcacttcaccacctactactacgtcggcttctcctacatgatgatgcaccgctatgccgatgccatcaagatgttcagccacattctggtctacgtctcgcggactaagaacttccagaagaacgcccaatacgactccatcaccaagaagaacgaccagatgtatgctcttattgctatctgtgtcgccttccaccccactcgtttggacgacactatccacaccgccgtcagggagaaatacggcgaccagctcctcaagctccagcgcggcggccccgactcgcttcccattttcgaggagctcttcagggcggcatgccctaaattcatctcgccagtcccgccagatttcgataaccccgagtctaacgtcgatccggtcgagcaccacctttctatctttatggatgaggtcaaaactaacatgtggagtcccactgttaagtcatacttgcgtctctacactactatggatctgaaaaagcttgccggtttcttggacgtcgagccggaagaactccgtggctggctgttggtgaacaagcagcgaaccaagcagcttcgctgggctgaccaggggcttctggacggcgagtgggtgaacgtcagtgatttggactacgccctgcaaggagacctgattcatatctcggaggctaaagtgggacgcaaattggtcgactggtacttacgaaacttgtctcgtacttacaactgagccatttggcaagggaatcatgtttttcgtttatgcggataggggtcaacaggaaggacataagggtcactgtctttgtatgtggggaaatgatttacagacaaaaggctccatcctcgatttgcattgcataggcgtcacggttacgatcacgaggtcaaactcacaccatcaggctcacgccaagttgaagacgagtacatggctgaccgtttggtaaggagagggaaaacgcaacaaaatttgcggattgtctacatgaggtagataggaatagcgtcaatgcaacaattgcgatcgctaatgataattgatgaaataccctcgacttgattcgctgctgggcgatttttcggtttttatcaattatgcctaggtagtatcgatacaatgtgatagatctagagctttgacgcaacgaccggggagattccgtaggactccttatcaatgacatgcaggagctgacgtttcaccgcactgttgtacgatgttctgctctgtcttgctggtctgtgaaatggagaccggtatcgctgggtcactatcacctttaaa

SEQ ID NO: 15479 - DNA, 1362 bp, Muscodor strobelii
  misc_feature: SGI cDNA ID NO. 565129
  misc_feature: Reduced expression when VOC is produced
  misc_feature: Encodes the peptide sequence at SEQ ID NO 15480
atgtcgcacggtgagcctcatctggtggcaagcccggagagcgacgtgtcgccgggttcgcggcccacggcgcagagcggctactttgacaccaaaaacaatgcgcccagcgccagtcaggacgccaaccagccggccactcccaacgttgaaggccagccagaggagaggacaagtgcagacaatacgagcggaacagttggcgagtcgggaaacagttccgcgaatagctcccgaagagaatctctgggtaacgtcacctttcgcgcgcctcgtaatccgtcgctgccacaaggcatgaagaaaccacatggtggaagccgtatcagagaagcctcccctccgcatcacaggttcgagtctcacgtggctttcgacaatgtccctctcggcgaatcgactgtctacaaccccatctcgttcaccctcaacgtgcgacatgccgggttccagttcaaccgccgccaccgcaccttcatggttggagttgacgataactcgtactccgaccacgctcttcagtggcttttggacgagctagtcgatgacggcgacgagatagtgtgtgtcagagtgatcgagactcagacccgttcaaccgagcagacatacaaggatgatgctaagaccctaatggaccacatccaacgcagcaatacgaaggatctcgccatcagcctagtcctggaatatgctgttggaaagctacacaatacttttcagcatttgattagaatttaccaaccgtcgatgctaatcgtgggcaccaaagggcggagcatggatggcgtccatggtttccttgtgaatcggacatcgttttctaaatattgcctccagtattcgcctgtgcctgttgtcgtcgtgcgtcctactgagaaacgcgagaagaaaaaggctaagagaaacgcggatcccagccgacagagctatgtgcacatgctcgctggcgcaaaacatgaggcagatagtgagaacagtagtgtatacgagctggagccaactctgacccctgacgaggaggcacatcgtgtggccgtagctgtcggcctaccagcctcctatgaccctacgctcaagccggccgaccctaaagaattgctgagacggggacttcgatcttcgaccggcaagagcacaccggcaagagtcgcactctccgcggacaagaaggctgccgatgagtccgactcggaagaggaggaagaagaatttgaggtatcgtcaggtcaggatctgcttaagaaggagaggctgcacaagatggaatcaaacgaaggcgcagctcttcgccacgaggttagccgaagtagtaacggttctacagacagcgatgacgaaactgctggtggtaaaacgtga

SEQ ID NO: 15480 - protein, 453 aa, Muscodor strobelii
  misc_feature: SGI Peptide ID NO. 565129
  misc_feature (155)..(290): Pfam Id: PF00582 Pfam Desc: Universal stress protein family
  misc_feature (109)..(430): NCBI GI: 116207558 Blast Desc: CHGG_03072 [Chaetomium globosum CBS 148.51] gi|88183669|gb|EAQ91137.1| CHGG_03072 [Chaetomium globosum CBS 148.51]
  misc_feature (115)..(434): NCBI GI: 46111381 Blast Desc: FG02572.1 [Gibberella zeae PH-1]
  misc_feature (113)..(365): NCBI GI: 171686020 Blast Desc: protein product [Podospora anserina] gi|170942971|emb|CAP68624.1| protein product [Podospora anserina]
  misc_feature (118)..(434): NCBI GI: 256726176 Blast Desc: NECHADRAFT_5894 [Nectria haematococca mpVI 77-13-4]
  misc_feature (108)..(452): NCBI GI: 154311493 Blast Desc: BC1G_06599 [Botryotinia fuckeliana B05.10] gi|150850996|gb|EDN26189.1| BC1G_06599 [Botryotinia fuckeliana B05.10]
  misc_feature (83)..(446): NCBI GI: 156065121 Blast Desc: SS1G_00571 [Sclerotinia sclerotiorum 1980] gi|154691430|gb|EDN91168.1| SS1G_00571 [Sclerotinia sclerotiorum 1980]
  misc_feature (160)..(451): NCBI GI: 145601997 Blast Desc: MGG_05268 [Magnaporthe grisea 70-15] gi|145010450|gb|EDJ95106.1| MGG_05268 [Magnaporthe grisea 70-15]
  misc_feature (180)..(430): NCBI GI: 85082829 Blast Desc: NCU00004 [Neurospora crassa OR74A] gi|28918074|gb|EAA27755.1| [Neurospora crassa OR74A]
  misc_feature (114)..(355): NCBI GI: 71001206 Blast Desc: universal stress protein family domain protein [Aspergillus fumigatus Af293] gi|66852922|gb|EAL93246.1| universal stress protein family domain protein [Aspergillus
  misc_feature (114)..(355): NCBI GI: 255950102 Blast Desc: Pc22g19150 [Penicillium chrysogenum Wisconsin 54-1255] gi|211592835|emb|CAP99203.1| Pc22g19150 [Penicillium chrysogenum Wisconsin 54-1255]
  misc_feature: Useful for introducing or modulating the production of volatile compounds
MSHGEPHLVASPESDVSPGSRPTAQSGYFDTKNNAPSASQDANQPATPNVEGQPEERTSADNTSGTVGESGNSSANSSRRESLGNVTFRAPRNPSLPQGMKKPHGGSRIREASPPHHRFESHVAFDNVPLGESTVYNPISFTLNVRHAGFQFNRRHRTFMVGVDDNSYSDHALQWLLDELVDDGDEIVCVRVIETQTRSTEQTYKDDAKTLMDHIQRSNTKDLAISLVLEYAVGKLHNTFQHLIRIYQPSMLIVGTKGRSMDGVHGFLVNRTSFSKYCLQYSPVPVVVVRPTEKREKKKAKRNADPSRQSYVHMLAGAKHEADSENSSVYELEPTLTPDEEAHRVAVAVGLPASYDPTLKPADPKELLRRGLRSSTGKSTPARVALSADKKAADESDSEEEEEEFEVSSGQDLLKKERLHKMESNEGAALRHEVSRSSNGSTDSDDETAGGKT

SEQ ID NO: 15481 - DNA, 2836 bp, Muscodor strobelii
  misc_feature: SGI EST ID NO. CUFF.36860.1
  misc_feature: Variant of the nucleotide sequence at SEQ ID NO 15479
ctaccttttcctagtggcatcggaatttctgttaataatgcattgatttaggcacctactaggtcgaactttcaagatgtgacagcttcggatcgcttttcttcaggtctttttcgtgttgttcttgtctctttgtgcccttgttccccagattctctgcaggttgtctgggttctggacaccgttgacaactctgccttcgagttcccacttgatgcgacctctgaagcatctacatcataacaacactactgggctccagatttgcgggtattgctaagccttaaccgggtgcctcttcctctagtttttgctgctgtggacagtgtaggaaggctagaccagctgcctgtcaaggtccctcgccggtctccagaatttgacacacggatgctcccgctgtttcgatgaaattctccagctatctcagaagacacctatcgttacgtcttgctaaactcgttgcatattccactgtttatcacaccattttcttgctgtttttaatacgcaagggcattgtctagccgtgaaatttcagcactgctgttgcacaagcgggccatccgttcacaaatcttgccgattttccggcgatctcagacccagcttgatgcgctccgtccatcaaagtggaagagacagtactatcgtcagcaaaaaaaatacatagctaccaacaaacatcgccagatcttgttgtctaataaaagatcactatctaattaatctagcgatcacgcagagcgcaggactcccactgagacaaagacaacatcagctcagcctaggaggctccattcaacggcgttcgtctctacataagatacgccaggatcgcattgagaccattctctgtacagactgtttgctctctcgccgcaccatttcaaatcgaacttattcaaaaacagccagagggtgtaagccctggggctccccttctctatcccaatccacccaatgcagctcgacaagactttgcctcctccgccctctacttgaggcaacgtgagtcaggttaagacatatcgccaacatcaccagcactgcaacattttcgaagctaaaccatcgcctgccatgtcgcacggtgagcctcatctggtggcaagcccggagagcgacgtgtcgccgggttcgcggcccacggcgcagagcggctactttgacaccaaaaacaatgcgcccagcgccagtcaggacgccaaccagccggccactcccaacgttgaaggccagccagaggagaggacaagtgcagacaatacgagcggaacagttggcgagtcgggaaacagttccgcgaatagctcccgaagagaatctctgggtaacgtcacctttcgcgcgcctcgtaatccgtcgctgccacaaggcatgaagaaaccacatggtggaagccgtatcagagaagcctcccctccgcatcacaggttcgagtctcacgtggctttcgacaatgtccctctcggcgaatcgactgtctacaaccccatctcgttcaccctcaacgtgcgacatgccgggttccagttcaaccgccgccaccgcaccttcatggttggagttgacgataactcgtactccgaccacgctcttcagtggcttttggacgagctagtcgatgacggcgacgagatagtgtgtgtcagagtgatcgagactcagacccgttcaaccgagcagacatacaaggatgatgctaagaccctaatggaccacatccaacgcagcaatacgaaggatctcgccatcagcctagtcctggaatatgctgttggaaagctacacaatacttttcagcatttgattagaatttaccaaccgtcgatgctaatcgtgggcaccaaagggcggagcatggatggcgtccatggtttccttgtgaatcggacatcgttttctaaatattgcctccagtattcgcctgtgcctgttgtcgtcgtgcgtcctactgagaaacgcgagaagaaaaaggctaagagaaacgcggatcccagccgacagagctatgtgcacatgctcgctggcgcaaaacatgaggcagatagtgagaacagtagtgtatacgagctggagccaactctgacccctgacgaggaggcacatcgtgtggccgtagctgtcggcctaccagcctcctatgaccctacgctcaagccggccgaccctaaagaattgctgagacggggacttcgatcttcgaccggcaagagcacaccggcaagagtcgcactctccgcggacaagaaggctgccgatgagtccgactcggaagaggaggaagaagaatttgaggtatcgtcaggtcaggatctgcttaagaaggagaggctgcacaagatggaatcaaacgaaggcgcagctcttcgccacgaggttagccgaagtagtaacggttctacagacagcgatgacgaaactgctggtggtaaaacgtgacacggtctcacgatcgttgtgtctcgtacaaccttggattacagtggcattaatgaggcgttgttttcacgccgaagagatacccttgttgcgcaaacatctcttaggcgttgagtcatggttgccagtgactgcatgcatttgctgtattacaacattgccaggtttgcaacagacattgctttcagcgctcatgtagtatagctaggtagtcagtgctagcgatcttgtttttgcttttagggtggccttcatcctcgtattaggcaggaaataccaagattctcctcttcatcctgtaatccagttctacgagtgctcccttttgctagcaacactacagtgacctacagcagtcttcatgaccttcgcaggcttgcactagatattg

SEQ ID NO: 15482 - DNA, 1047 bp, Muscodor strobelii
  misc_feature: SGI cDNA ID NO. 565130
  misc_feature: Encodes the peptide sequence at SEQ ID NO 15483
atggcaaccgaaacgctaaccgaatctccttcaccaaggttcgagtctcacgtggctttcgacaatgtccctctcggcgaatcgactgtctacaaccccatctcgttcaccctcaacgtgcgacatgccgggttccagttcaaccgccgccaccgcaccttcatggttggagttgacgataactcgtactccgaccacgctcttcagtggcttttggacgagctagtcgatgacggcgacgagatagtgtgtgtcagagtgatcgagactcagacccgttcaaccgagcagacatacaaggatgatgctaagaccctaatggaccacatccaacgcagcaatacgaaggatctcgccatcagcctagtcctggaatatgctgttggaaagctacacaatacttttcagcatttgattagaatttaccaaccgtcgatgctaatcgtgggcaccaaagggcggagcatggatggcgtccatggtttccttgtgaatcggacatcgttttctaaatattgcctccagtattcgcctgtgcctgttgtcgtcgtgcgtcctactgagaaacgcgagaagaaaaaggctaagagaaacgcggatcccagccgacagagctatgtgcacatgctcgctggcgcaaaacatgaggcagatagtgagaacagtagtgtatacgagctggagccaactctgacccctgacgaggaggcacatcgtgtggccgtagctgtcggcctaccagcctcctatgaccctacgctcaagccggccgaccctaaagaattgctgagacggggacttcgatcttcgaccggcaagagcacaccggcaagagtcgcactctccgcggacaagaaggctgccgatgagtccgactcggaagaggaggaagaagaatttgaggtatcgtcaggtcaggatctgcttaagaaggagaggctgcacaagatggaatcaaacgaaggcgcagctcttcgccacgaggttagccgaagtagtaacggttctacagacagcgatgacgaaactgctggtggtaaaacgtga

SEQ ID NO: 15483 - protein, 348 aa, Muscodor strobelii
  misc_feature: SGI Peptide ID NO. 565130
  misc_feature (50)..(185): Pfam Id: PF00582 Pfam Desc: Universal stress protein family
  misc_feature (5)..(325): NCBI GI: 116207558 Blast Desc: CHGG_03072 [Chaetomium globosum CBS 148.51] gi|88183669|gb|EAQ91137.1| CHGG_03072 [Chaetomium globosum CBS 148.51]
  misc_feature (5)..(329): NCBI GI: 46111381 Blast Desc: FG02572.1 [Gibberella zeae PH-1]
  misc_feature (6)..(280): NCBI GI: 171686020 Blast Desc: protein product [Podospora anserina] gi|170942971|emb|CAP68624.1| protein product [Podospora anserina]
  misc_feature (13)..(329): NCBI GI: 256726176 Blast Desc: NECHADRAFT_5894 [Nectria haematococca mpVI 77-13-4]
  misc_feature (10)..(347): NCBI GI: 154311493 Blast Desc: BC1G_06599 [Botryotinia fuckeliana B05.10] gi|150850996|gb|EDN26189.1| BC1G_06599 [Botryotinia fuckeliana B05.10]
  misc_feature (10)..(341): NCBI GI: 156065121 Blast Desc: SS1G_00571 [Sclerotinia sclerotiorum 1980] gi|154691430|gb|EDN91168.1| SS1G_00571 [Sclerotinia sclerotiorum 1980]
  misc_feature (55)..(346): NCBI GI: 145601997 Blast Desc: MGG_05268 [Magnaporthe grisea 70-15] gi|145010450|gb|EDJ95106.1| MGG_05268 [Magnaporthe grisea 70-15]
  misc_feature (75)..(325): NCBI GI: 85082829 Blast Desc: NCU00004 [Neurospora crassa OR74A] gi|28918074|gb|EAA27755.1| [Neurospora crassa OR74A]
  misc_feature (6)..(250): NCBI GI: 71001206 Blast Desc: universal stress protein family domain protein [Aspergillus fumigatus Af293] gi|66852922|gb|EAL93246.1| universal stress protein family domain protein [Aspergillus
  misc_feature (6)..(250): NCBI GI: 255950102 Blast Desc: Pc22g19150 [Penicillium chrysogenum Wisconsin 54-1255] gi|211592835|emb|CAP99203.1| Pc22g19150 [Penicillium chrysogenum Wisconsin 54-1255]
MATETLTESPSPRFESHVAFDNVPLGESTVYNPISFTLNVRHAGFQFNRRHRTFMVGVDDNSYSDHALQWLLDELVDDGDEIVCVRVIETQTRSTEQTYKDDAKTLMDHIQRSNTKDLAISLVLEYAVGKLHNTFQHLIRIYQPSMLIVGTKGRSMDGVHGFLVNRTSFSKYCLQYSPVPVVVVRPTEKREKKKAKRNADPSRQSYVHMLAGAKHEADSENSSVYELEPTLTPDEEAHRVAVAVGLPASYDPTLKPADPKELLRRGLRSSTGKSTPARVALSADKKAADESDSEEEEEEFEVSSGQDLLKKERLHKMESNEGAALRHEVSRSSNGSTDSDDETAGGKT

SEQ ID NO: 15484 - DNA, 1684 bp, Muscodor strobelii
  misc_feature: SGI EST ID NO. CUFF.36860.2
  misc_feature: Variant of the nucleotide sequence at SEQ ID NO 15482
cccatccaacatctcgttctcgacgagaatgcctgcgaatgccacgacaatagcttggcctagagttggcagtgcaggcttggtttccgcaagtgttacttcgcttgagtccgcgacactactctcctgactcgttacctccgctcaccttttccctgtattctcaccgtgctgtatctcaaccctctacgcttgctgtacatccttctctccccgccctggtcgttcattgccgtcttccagtcaatggcaaccgaaacgctaaccgaatctccttcaccaaggttcgagtctcacgtggctttcgacaatgtccctctcggcgaatcgactgtctacaaccccatctcgttcaccctcaacgtgcgacatgccgggttccagttcaaccgccgccaccgcaccttcatggttggagttgacgataactcgtactccgaccacgctcttcagtggcttttggacgagctagtcgatgacggcgacgagatagtgtgtgtcagagtgatcgagactcagacccgttcaaccgagcagacatacaaggatgatgctaagaccctaatggaccacatccaacgcagcaatacgaaggatctcgccatcagcctagtcctggaatatgctgttggaaagctacacaatacttttcagcatttgattagaatttaccaaccgtcgatgctaatcgtgggcaccaaagggcggagcatggatggcgtccatggtttccttgtgaatcggacatcgttttctaaatattgcctccagtattcgcctgtgcctgttgtcgtcgtgcgtcctactgagaaacgcgagaagaaaaaggctaagagaaacgcggatcccagccgacagagctatgtgcacatgctcgctggcgcaaaacatgaggcagatagtgagaacagtagtgtatacgagctggagccaactctgacccctgacgaggaggcacatcgtgtggccgtagctgtcggcctaccagcctcctatgaccctacgctcaagccggccgaccctaaagaattgctgagacggggacttcgatcttcgaccggcaagagcacaccggcaagagtcgcactctccgcggacaagaaggctgccgatgagtccgactcggaagaggaggaagaagaatttgaggtatcgtcaggtcaggatctgcttaagaaggagaggctgcacaagatggaatcaaacgaaggcgcagctcttcgccacgaggttagccgaagtagtaacggttctacagacagcgatgacgaaactgctggtggtaaaacgtgacacggtctcacgatcgttgtgtctcgtacaaccttggattacagtggcattaatgaggcgttgttttcacgccgaagagatacccttgttgcgcaaacatctcttaggcgttgagtcatggttgccagtgactgcatgcatttgctgtattacaacattgccaggtttgcaacagacattgctttcagcgctcatgtagtatagctaggtagtcagtgctagcgatcttgtttttgcttttagggtggccttcatcctcgtattaggcaggaaataccaagattctcctcttcatcctgtaatccagttctacgagtgctcccttttgctagcaacactacagtgacctacagcagtcttcatgaccttcgcaggcttgcactagatattg

SEQ ID NO: 15485 - DNA, 1146 bp, Muscodor strobelii
  misc_feature: SGI cDNA ID NO. 565131
  misc_feature: Elevated expression when VOC is produced
  misc_feature: Encodes the peptide sequence at SEQ ID NO 15486
atgagctcttctacgtcgaaagtggtagatatccacacccatatgtatccgccagcatacgtcgaactactagaatcaagacagacgatacctttaatccggcgattcgatggagcaaaggatccccggtacatcatcctaccagctgagaaagaagctctcgataagatcacatcctccggatctccagatctatctcatctacccggcagacccgtgacgacacactactcgtcactagatcagaagctacattttatgaacacgcatggaatcgacatttcagtgatatcacttgcaaacccatggctagacttcgtcgcttcagaggcagccggcgagactgccaagtctatcaataacgctttcaacaatatgtgtgcttcggctcccgggcggcttttctttttcgcaacattacctctaactgcccctcccgagacgctgttagcagccatcggacatatccgcggcttgaagtattgcagaggtgtaatactgggcacatccggcctcgggaaaggtctagatgatccagcattaatctccgttttccgagccctggcggcgaacaaattgataatcttcttgcatccacactacggactgccgagtgaggtctggggaccgcgagctacagaagagtatggacacgtcctaccgctagctcttggattcccgatggagaccacgatagccgttgcgagaatgtatctcgcaggggtattcgacgcagttcctgatctacgcatgcttctcgcgcacagcggtggtacgctcccattccttgcaggccgtatcgagagttgcatagtccatgatgggcatctagtacgtgagggccgggtaggtccaaaacggaggacaatttggcaggttcttaaagagcaggtctatctcgacgcagtgatttattcagatgttggcctgaaagcggccatagatgctagtggtagcgataggctcatgtttggaacagatcatccgttcttcccaccgctcactagcgacgagcagggagagtgggaaagcatgacttggataaaagatgccgttgttaaagcgctcggcgatgggagcgaggaagcaaaaggtgttatgggtgggaatgcggttgaagtcttacgtctgcgtgtcgattcgtaa

SEQ ID NO: 15486 - protein, 381 aa, Muscodor strobelii
  misc_feature: SGI Peptide ID NO. 565131
  misc_feature (85)..(377): Pfam Id: PF04909 Pfam Desc: Amidohydrolase
  misc_feature (3)..(377): NCBI GI: 39977171 Blast Desc: MGG_06488 [Magnaporthe grisea 70-15] gi|145016086|gb|EDK00576.1| MGG_06488 [Magnaporthe grisea 70-15]
  misc_feature (1)..(381): NCBI GI: 46125849 Blast Desc: FG07302.1 [Gibberella zeae PH-1]
  misc_feature (1)..(379): NCBI GI: 261354086 Blast Desc: uracil-5-carboxylate decarboxylase [Verticillium albo-atrum VaMs.102]
  misc_feature (3)..(381): NCBI GI: 256732762 Blast Desc: [Nectria haematococca mpVI 77-13-4]
  misc_feature (1)..(380): NCBI GI: 85084451 Blast Desc: uracil-5-carboxylate decarboxylase [Neurospora crassa OR74A] gi|28918398|gb|EAA28072.1| uracil-5-carboxylate decarboxylase [Neurospora crassa OR74A] uracil-5-carboxylate
  misc_feature (2)..(377): NCBI GI: 169615190 Blast Desc: SNOG_10751 [Phaeosphaeria nodorum SN15] gi|160702904|gb|EAT82145.2| SNOG_10751 [Phaeosphaeria nodorum SN15]
  misc_feature (1)..(377): NCBI GI: 156058934 Blast Desc: SS1G_03479 [Sclerotinia sclerotiorum 1980] gi|154701266|gb|EDO01005.1| SS1G_03479 [Sclerotinia sclerotiorum 1980]
  misc_feature (8)..(377): NCBI GI: 189207903 Blast Desc: uracil-5-carboxylate decarboxylase [Pyrenophora tritici-repentis Pt-1C-BFP] gi|187976378|gb|EDU43004.1| uracil-5-carboxylate decarboxylase [Pyrenophora tritici-repentis
  misc_feature (8)..(378): NCBI GI: 121713850 Blast Desc: 2-amino-3-carboxymuconate-6-semialdehyde decarboxylase, [Aspergillus clavatus NRRL 1] gi|119402689|gb|EAW13110.1| decarboxylase, [Aspergillus clavatus
  misc_feature (8)..(378): NCBI GI: 67515537 Blast Desc: AN0050.2 [Aspergillus nidulans FGSC A4] gi|40746072|gb|EAA65228.1| AN0050.2 [Aspergillus nidulans FGSC A4] gi|259489762|tpe|CBF90301.1| TPA: iso-orotate decarboxylase
  misc_feature (71)..(377): SWISSPROT Homolog: EC 4.1.1.45 Aminocarboxymuconate-semialdehyde decarboxylase
  misc_feature: Useful for introducing or modulating the production of volatile compounds
MSSSTSKVVDIHTHMYPPAYVELLESRQTIPLIRRFDGAKDPRYIILPAEKEALDKITSSGSPDLSHLPGRPVTTHYSSLDQKLHFMNTHGIDISVISLANPWLDFVASEAAGETAKSINNAFNNMCASAPGRLFFFATLPLTAPPETLLAAIGHIRGLKYCRGVILGTSGLGKGLDDPALISVFRALAANKLIIFLHPHYGLPSEVWGPRATEEYGHVLPLALGFPMETTIAVARMYLAGVFDAVPDLRMLLAHSGGTLPFLAGRIESCIVHDGHLVREGRVGPKRRTIWQVLKEQVYLDAVIYSDVGLKAAIDASGSDRLMFGTDHPFFPPLTSDEQGEWESMTWIKDAVVKALGDGSEEAKGVMGGNAVEVLRLRVDS

SEQ ID NO: 15487 - DNA, 1859 bp, Muscodor strobelii
  misc_feature: SGI EST ID NO. CUFF.36731.0
  misc_feature: Variant of the nucleotide sequence at SEQ ID NO 15485
ccaccatgttgaagataacacaccctaaaggaggggcagcctatagcggggttgacctgccatagagtgtcttgctatttacacctcaattcctagttgataacaaaagcttacaggcttcttgcgagttataaccgaatactaagctattagttgtcgatttgtgcctagcctgtgctagtaggtagtccattatcctcgattctatcgagctagtttcgagtattgacatcgaaagacgtgtgccttcacttacacgtcatactcacctaccgtcggggctattgcaccacatttgagctcctaatacaacaactcgaccgagtaccattcaactttctcgctgaaccattatccatatcataatactgagattgcctcctattgagattggggcccatcaccaggatgagctcttctacgtcgaaagtggtagatatccacacccatatgtatccgccagcatacgtcgaactactagaatcaagacagacgatacctttaatccggcgattcgatggagcaaaggatccccggtacatcatcctaccagctgagaaagaagctctcgataagatcacatcctccggatctccagatctatctcatctacccggcagacccgtgacgacacactactcgtcactagatcagaagctacattttatgaacacgcatggaatcgacatttcagtgatatcacttgcaaacccatggctagacttcgtcgcttcagaggcagccggcgagactgccaagtctatcaataacgctttcaacaatatgtgtgcttcggctcccgggcggcttttctttttcgcaacattacctctaactgcccctcccgagacgctgttagcagccatcggacatatccgcggcttgaagtattgcagaggtgtaatactgggcacatccggcctcgggaaaggtctagatgatccagcattaatctccgttttccgagccctggcggcgaacaaattgataatcttcttgcatccacactacggactgccgagtgaggtctggggaccgcgagctacagaagagtatggacacgtcctaccgctagctcttggattcccgatggagaccacgatagccgttgcgagaatgtatctcgcaggggtattcgacgcagttcctgatctacgcatgcttctcgcgcacagcggtggtacgctcccattccttgcaggccgtatcgagagttgcatagtccatgatgggcatctagtacgtgagggccgggtaggtccaaaacggaggacaatttggcaggttcttaaagagcaggtctatctcgacgcagtgatttattcagatgttggcctgaaagcggccatagatgctagtggtagcgataggctcatgtttggaacagatcatccgttcttcccaccgctcactagcgacgagcagggagagtgggaaagcatgacttggataaaagatgccgttgttaaagcgctcggcgatgggagcgaggaagcaaaaggtgttatgggtgggaatgcggttgaagtcttacgtctgcgtgtcgattcgtaaactgcagtatatgaaccaagcaagtcttactccagcagataacagactagccattcgaaatgcagtctcaaaacgaaacggaacgatacatgctaatctggtaaatgagttatccgggtgcccgataaaccgtctattcgaacgtgtattatattgttctttcatcctaggaaatcactttgattcatatcaacagtataagatagcggcattcaagttagtttttatgaattgataacttctgtctgaagttgtgttcttatgcacacacaactttgcagaagttcgaacagactgtttgatat

SEQ ID NO: 15488 - DNA, 1005 bp, Muscodor strobelii
  misc_feature: SGI cDNA ID NO. 565132
  misc_feature: Encodes the peptide sequence at SEQ ID NO 15489
atggagtccgcagccgtgaagagcgacggactagtcattcccttgattgacttctccttgttcctaaatggcacatcagcgcaacgaaaggaggcagcagatgctattctccatggattccagacagctggtttcatctatctgaaggggcttccaatcacccgagattatcgtcaattcgtgttcgacacttcagccaagtacttcaggctccctgaagatacgaagatgtcacattgctggacaactcccgaagcaaatcgtggctactctgcgccgggccgtgagaagaccaccacactcacagacctagaggatgtaaagaagcttcgagacgcagtcccggatcttaaagagagtcttgaaattgggcgagagggggagcctgaccatcctaaccactggccccaagaggagggtgagcttgttggtttcaagaagacgatgctcgagttccacgataaatgcaaagagttgcacactgaggtcatgcgtgcgatcgcggtgggacttgggatcgacgagcactggttcgataagttcacggacattggtgacaataccttacgcttactgcactatcccgaagtgaagaaggatgtcttcacgataaaccccggacaggttcgcgccggagcacattcggactacggctccatcacactcctcttccaggattcaagaggaggactgcaggttcagagccccaatggtgcattcgttgacgcgacgcccatcgaggacacttgtgtagtcaatgccggtgatttactagcccgttggagtaacgactcgattaagagcacgattcatcgtgtagtagagccaccatcaggtgatggagatgtctacccggctcggtacagcattgcatatttctgcaatccaaatttcaagtcacatatagaagctatacctggaacatacgctagcgagagtgacaggaaatacgccggtatcaacagtggcgattatctggttcaaagattaactgcaacctactaa

SEQ ID NO: 15489 - protein, 334 aa, Muscodor strobelii
  misc_feature: SGI Peptide ID NO. 565132
  misc_feature (185)..(296): Pfam Id: PF03171 Pfam Desc: 2OG-Fe(II) oxygenase superfamily
  misc_feature (1)..(334): NCBI GI: 85084447 Blast Desc: thymine dioxygenase [Neurospora crassa OR74A] gi|28918397|gb|EAA28071.1| thymine dioxygenase [Neurospora crassa OR74A]
  misc_feature (1)..(334): NCBI GI: 39977169 Blast Desc: MGG_06487 [Magnaporthe grisea 70-15] gi|145016087|gb|EDK00577.1| MGG_06487 [Magnaporthe grisea 70-15]
  misc_feature (4)..(334): NCBI GI: 256733212 Blast Desc: NECHADRAFT_68571 [Nectria haematococca mpVI 77-13-4]
  misc_feature (13)..(334): NCBI GI: 46125851 Blast Desc: FG07303.1 [Gibberella zeae PH-1]
  misc_feature (1)..(334): NCBI GI: 116191923 Blast Desc: CHGG_05679 [Chaetomium globosum CBS 148.51] gi|88181592|gb|EAQ89060.1| CHGG_05679 [Chaetomium globosum CBS 148.51]
  misc_feature (3)..(334): NCBI GI: 156058932 Blast Desc: SS1G_03478 [Sclerotinia sclerotiorum 1980] gi|154701265|gb|EDO01004.1| SS1G_03478 [Sclerotinia sclerotiorum 1980]
  misc_feature (2)..(334): NCBI GI: 169615198 Blast Desc: SNOG_10755 [Phaeosphaeria nodorum SN15] gi|111061029|gb|EAT82149.1| SNOG_10755 [Phaeosphaeria nodorum SN15]
  misc_feature (3)..(333): NCBI GI: 115387383 Blast Desc: conserved [Aspergillus terreus NIH2624] gi|114195281|gb|EAU36981.1| conserved [Aspergillus terreus NIH2624]
  misc_feature (5)..(334): NCBI GI: 154308343 Blast Desc: BC1G_07917 [Botryotinia fuckeliana B05.10] gi|150853002|gb|EDN28194.1| BC1G_07917 [Botryotinia fuckeliana B05.10]
  misc_feature (4)..(334): NCBI GI: 189207603 Blast Desc: thymine dioxygenase [Pyrenophora tritici-repentis Pt-1C-BFP] gi|187976228|gb|EDU42854.1| thymine dioxygenase [Pyrenophora tritici-repentis Pt-1C-BFP]
  misc_feature (13)..(332): SWISSPROT Homolog: EC 1.21.3.1 Isopenicillin-N synthase
MESAAVKSDGLVIPLIDFSLFLNGTSAQRKEAADAILHGFQTAGFIYLKGLPITRDYRQFVFDTSAKYFRLPEDTKMSHCWTTPEANRGYSAPGREKTTTLTDLEDVKKLRDAVPDLKESLEIGREGEPDHPNHWPQEEGELVGFKKTMLEFHDKCKELHTEVMRAIAVGLGIDEHWFDKFTDIGDNTLRLLHYPEVKKDVFTINPGQVRAGAHSDYGSITLLFQDSRGGLQVQSPNGAFVDATPIEDTCVVNAGDLLARWSNDSIKSTIHRVVEPPSGDGDVYPARYSIAYFCNPNFKSHIEAIPGTYASESDRKYAGINSGDYLVQRLTATY

SEQ ID NO: 15490 - DNA, 3970 bp, Muscodor strobelii
  misc_feature: SGI EST ID NO. CUFF.36960.0
  misc_feature: Variant of the nucleotide sequence at SEQ ID NO 15488
cggcagatgggcaggttgccatcggcgcatgccgacggttctggaacacttcacatcttggccttgaactggaagcttttgtacgataagaagtgcttcaccattgcacggtcgtcttgaaaactatctttttatttcatcgcacgtcatctgcgccagtgtatcgttcattggtcataccaactactgatcgcgaaatacgggaattaccataatggagtccgcagccgtgaagagcgacggactagtcattcccttgattgacttctccttgttcctaaatggcacatcagcgcaacgaaaggaggcagcagatgctattctccatggattccagacagctggtttcatctatctgaaggggcttccaatcacccgagattatcgtcaattcgtgttcgacacttcagccaagtacttcaggctccctgaagatacgaagatgtcacattgctggacaactcccgaagcaaatcgtggctactctgcgccgggccgtgagaagaccaccacactcacagacctagaggatgtaaagaagcttcgagacgcagtcccggatcttaaagagagtcttgaaattgggcgagagggggagcctgaccatcctaaccactggccccaagaggagggtgagcttgttggtttcaagaagacgatgctcgagttccacgataaatgcaaagagttgcacactgaggtcatgcgtgcgatcgcggtgggacttgggatcgacgagcactggttcgataagttcacggacattggtgacaataccttacgcttactgcactatcccgaagtgaagaaggatgtcttcacgataaaccccggacaggttcgcgccggagcacattcggactacggctccatcacactcctcttccaggattcaagaggaggactgcaggttcagagccccaatggtgcattcgttgacgcgacgcccatcgaggacacttgtgtagtcaatgccggtgatttactagcccgttggagtaacgactcgattaagagcacgattcatcgtgtagtagagccaccatcaggtgatggagatgtctacccggctcggtacagcattgcatatttctgcaatccaaatttcaagtcacatatagaagctatacctggaacatacgctagcgagagtgacaggaaatacgccggtatcaacagtggcgattatctggttcaaagattaactgcaacctactaattcgaattgcacgaatgcagggcgggctgttccgtgtgtgccacggctaagtcgatgtatgaagttttcttcatgatcacggaggcgatatcatatttgtagttcagtaacccgagatagtcaaaaatattgcgtatgtcgacgtacaggtaatttttttttgaacatccatctatcacatgccctgcaacggggtcgcgtctttaggcaatttagcggggtggtttggagctgtcactgcgggtcatgtagtgtgtacagaagtaggtaactttacatcattgcccatggcccgtcttttacaccatcgccttgtcttgaatttcttcttcttgattggctccagacttggttttaaatgtttcttctcgccctagattctctcgatggggattcaaaatgaagaaaacgttactcctctgcttcatccatggctttaagggaggagaagacaccttcggagccaagtcggagttcgcccagcacctagccgccctcctctctgctgctcttcccaaagtcgacgtccgggccatcacctaccccaagtacgagaccagaggagacctattcgaatgcgtcgcgcgcttcagggactggctccttgagcgtgtcatcgacatcgaagtcgcaaatggcactccctctccgaccgtcgatccctcggtgcggactatccttatcggccattcgatgggcggtatagtcgccgcggagactgtcatagccctcgctagcgaaacccccattccgcatcccgacgacagtgaaaagcctgaagcggatggagaagagaaagatgaggcagatgagctgcaaacgcaaccgaaaacacaacctgcagacttcaacagtttgatgtttccctacatacagggtgttcttgcttttgacacgccttacctgggcatcgccccaggcgtagttgcccatggcgccgagagccactataacaatgccgcagcagccttcacacagctcagcggattagcgacaacgttttggggcagcaaggaccagccacagaccgggtccaaaaagccgatagctgcgcttcctgcgcctgagcccgacacagccaaggacgagaaggctgcgaaaggcgcttggggtagctggggcaaaatcgccatgtacgccgctggagccggtgctgttgccgtaggtagcactgccgcctactataaccgcgaacaaattacgacaggctggtcgtgggtgacttcacacttggagttcgtcggatgtctggcgcggggcgaggagctaaagaaacgagttcgcaatatgatacagctgaaccagaagcttgatgtcgggttcgcgaatctttacacaagacttggtgaagctgccgcgcccaagcaagtgagtatgatgggcacggtgttgggcaatcagcggacattctgcaatctgccaactaaacaagctgcgggcttctggaaggaggccgtcaacaatgcagcgaccgatgaagtaggggcgcatatggccatgttcgaatccaaggagaacccggggtacgagcagttgtccgaagaggccaggaatctcattgtgagctgggcgatgaatgaatggtacgagacgagcacgcgtagtgacctcgaatagatgggttggcagtattaagcctactgtcttgtatatatagcggctggatggatgatacctctgccttaattacttctctataccctcaaattccaacctaattccacgccatgtacacgtctcagcaccggtcttttaagaagccttttatcgttgtcgcatgtctatatgtcccaggtctcatctttattagtcgtgatttttggtctactgtgtagctttagcattagatgccttcaaaaccttgcggcgctgggccatcatgtgggtatataaaatgtaggcagctagatagagatcacatttgttagagaacattgtcgttgtggctttctaccaccttcacaaccaatggcacagcgacttacagggaggatagacaaaaacaacatatgcccaaagcaaattactatagagcgggctaatggcctgggcagggccgacagcacgccagataagccatgcctcgctcgagatgccgagtgggtaaagtatgaaaaaggcgtggtatcgcagccagtgcagcgccgacggctgccagcccgagagcgtgagcgcgaagtaggagtagcggatgacctcggtcgtgccccaggctaccagcatgctcgagtaggccgggctggcgcccagctgagggaagagatcggtgataccccatacgatggcgtagcggctgaagacttgcatgaacgtcgtgaagaagggcgcgcggactatgcctggtgttgtgaagaggaattgattagtttgtgatattagatattgaataaaaggatgggagagttacccaagacagagtgcaacacctccataccggcgagggtctgcgtccatttgcagaactcgccgactgctgggtatgcatacttgtggttgcgcaagacgttgacgcccacgatgcgaccgagcacggtcagccagaggatggcagatacggcattgtagaggatcaggtagccgttcttgactggcgatggcttgcgcgcgggttttgtcttgtcggccatctttgtggtttcgatggtttggggttttggtgtgacgtataagagggttggtggtgggaattatttacaattcccgacaagaaaagctttggggcaccaccttgcagggatctgcggatttcag

SEQ ID NO: 15491 - DNA, 1065 bp, Muscodor strobelii
  misc_feature: SGI cDNA ID NO. 565133
  misc_feature: Encodes the peptide sequence at SEQ ID NO 15492
atggagtccgcagccgtgaagagcgacggactagtcattcccttgattgacttctccttgttcctaaatggcacatcagcgcaacgaaaggaggcagcagatgctattctccatggattccagacagctggtttcatctatctgaaggggcttccaatcacccgagattatcgtcaattcgtgttcgacacttcagccaagtacttcaggctccctgaagatacgaagatgtcacattgctggacaactcccgaagcaaatcgtggctactctgcgccgggccgtgagaagaccaccacactcacagacctagaggatgtaaagaagcttcgagacgcagtcccggatcttaaagagagtcttgaaattgggcgagagggggagcctgaccatcctaaccactggccccaagaggagggtgagcttgttggtttcaagaagacgatgctcgagttccacgataaatgcaaagagttgcacactgaggtcatgcgtgcgatcgcggtgggacttgggatcgacgagcactggttcgataagttcacggacattggtgacaataccttacgcttactgcactatcccgaagtgaagaaggatgtcttcacgataaaccccggacaggttcgcgccggagcacattcggactacggctccatcacactcctcttccaggattcaagaggaggactgcaggttcagagccccaatggtgcattcgttgacgcgacgcccatcgaggacacttgtgtagtcaatgccggtgatttactagcccgttggagtaacgactcgattaagagcacgattcatcgtgtagtagagccaccatcaggtgatggagatgtctacccggctcggtacagcattgcgtacgttaaacatcatgcgaacgagtggacttggcgaatgctgacatccgaggctcatagatatttctgcaatccaaatttcaagtcacatatagaagctatacctggaacatacgctagcgagagtgacaggaaatacgccggtatcaacagtggcgattatctggttcaaagattaactgcaacctactaa

SEQ ID NO: 15492 - protein, 354 aa, Muscodor strobelii
  misc_feature: SGI Peptide ID NO. 565133
  misc_feature (185)..(296): Pfam Id: PF03171 Pfam Desc: 2OG-Fe(II) oxygenase superfamily
  misc_feature (1)..(354): NCBI GI: 85084447 Blast Desc: thymine dioxygenase [Neurospora crassa OR74A] gi|28918397|gb|EAA28071.1| thymine dioxygenase [Neurospora crassa OR74A]
  misc_feature (1)..(354): NCBI GI: 39977169 Blast Desc: MGG_06487 [Magnaporthe grisea 70-15] gi|145016087|gb|EDK00577.1| MGG_06487 [Magnaporthe grisea 70-15]
  misc_feature (4)..(354): NCBI GI: 256733212 Blast Desc: NECHADRAFT_68571 [Nectria haematococca mpVI 77-13-4]
  misc_feature (13)..(354): NCBI GI: 46125851 Blast Desc: FG07303.1 [Gibberella zeae PH-1]
  misc_feature (1)..(354): NCBI GI: 116191923 Blast Desc: CHGG_05679 [Chaetomium globosum CBS 148.51] gi|88181592|gb|EAQ89060.1| CHGG_05679 [Chaetomium globosum CBS 148.51]
  misc_feature (3)..(354): NCBI GI: 156058932 Blast Desc: SS1G_03478 [Sclerotinia sclerotiorum 1980] gi|154701265|gb|EDO01004.1| SS1G_03478 [Sclerotinia sclerotiorum 1980]
  misc_feature (3)..(353): NCBI GI: 115387383 Blast Desc: conserved [Aspergillus terreus NIH2624] gi|114195281|gb|EAU36981.1| conserved [Aspergillus terreus NIH2624]
  misc_feature (2)..(354): NCBI GI: 169615198 Blast Desc: SNOG_10755 [Phaeosphaeria nodorum SN15] gi|111061029|gb|EAT82149.1| SNOG_10755 [Phaeosphaeria nodorum SN15]
  misc_feature (5)..(354): NCBI GI: 154308343 Blast Desc: BC1G_07917 [Botryotinia fuckeliana B05.10] gi|150853002|gb|EDN28194.1| BC1G_07917 [Botryotinia fuckeliana B05.10]
  misc_feature (4)..(354): NCBI GI: 189207603 Blast Desc: thymine dioxygenase [Pyrenophora tritici-repentis Pt-1C-BFP] gi|187976228|gb|EDU42854.1| thymine dioxygenase [Pyrenophora tritici-repentis Pt-1C-BFP]
  misc_feature (13)..(273): SWISSPROT Homolog: EC 1.21.3.1 Isopenicillin-N synthase
MESAAVKSDGLVIPLIDFSLFLNGTSAQRKEAADAILHGFQTAGFIYLKGLPITRDYRQFVFDTSAKYFRLPEDTKMSHCWTTPEANRGYSAPGREKTTTLTDLEDVKKLRDAVPDLKESLEIGREGEPDHPNHWPQEEGELVGFKKTMLEFHDKCKELHTEVMRAIAVGLGIDEHWFDKFTDIGDNTLRLLHYPEVKKDVFTINPGQVRAGAHSDYGSITLLFQDSRGGLQVQSPNGAFVDATPIEDTCVVNAGDLLARWSNDSIKSTIHRVVEPPSGDGDVYPARYSIAYVKHHANEWTWRMLTSEAHRYFCNPNFKSHIEAIPGTYASESDRKYAGINSGDYLVQRLTATY

SEQ ID NO: 15493 - DNA, 3970 bp, Muscodor strobelii; identical to SEQ ID NO: 15490
  misc_feature: SGI EST ID NO. CUFF.36960.0
  misc_feature: Variant of the nucleotide sequence at SEQ ID NO 15491

SEQ ID NO: 15494 - DNA, 1218 bp, Muscodor strobelii
  misc_feature: SGI cDNA ID NO. 565134
  misc_feature: Encodes the peptide sequence at SEQ ID NO 15495
atgaagaaaacgttactcctctgcttcatccatggctttaagggaggagaagacaccttcggagccaagtcggagttcgcccagcacctagccgccctcctctctgctgctcttcccaaagtcgacgtccgggccatcacctaccccaagtacgagaccagaggagacctattcgaatgcgtcgcgcgcttcagggactggctccttgagcgtgtcatcgacatcgaagtcgcaaatggcactccctctccgaccgtcgatccctcggtgcggactatccttatcggccattcgatgggcggtatagtcgccgcggagactgtcatagccctcgctagcgaaacccccattccgcatcccgacgacagtgaaaagcctgaagcggatggagaagagaaagatgaggcagatgagctgcaaacgcaaccgaaaacacaacctgcagacttcaacagtttgatgtttccctacatacagggtgttcttgcttttgacacgccttacctgggcatcgccccaggcgtagttgcccatggcgccgagagccactataacaatgccgcagcagccttcacacagctcagcggattagcgacaacgttttggggcagcaaggaccagccacagaccgggtccaaaaagccgatagctgcgcttcctgcgcctgagcccgacacagccaaggacgagaaggctgcgaaaggcgcttggggtagctggggcaaaatcgccatgtacgccgctggagccggtgctgttgccgtaggtagcactgccgcctactataaccgcgaacaaattacgacaggctggtcgtgggtgacttcacacttggagttcgtcggatgtctggcgcggggcgaggagctaaagaaacgagttcgcaatatgatacagctgaaccagaagcttgatgtcgggttcgcgaatctttacacaagacttggtgaagctgccgcgcccaagcaagtgagtatgatgggcacggtgttgggcaatcagcggacattctgcaatctgccaactaaacaagctgcgggcttctggaaggaggccgtcaacaatgcagcgaccgatgaagtaggggcgcatatggccatgttcgaatccaaggagaacccggggtacgagcagttgtccgaagaggccaggaatctcattgtgagctgggcgatgaatgaatggtacgagacgagcacgcgtagtgacctcgaatag

SEQ ID NO: 15495 - protein, 405 aa, Muscodor strobelii
  misc_feature: SGI Peptide ID NO. 565134
  misc_feature (1)..(399): NCBI GI: 145602368 Blast Desc: MGG_12961 [Magnaporthe grisea 70-15] gi|145010791|gb|EDJ95447.1| MGG_12961 [Magnaporthe grisea 70-15]
  misc_feature (1)..(404): NCBI GI: 46125855 Blast Desc: FG07305.1 [Gibberella zeae PH-1]
  misc_feature (1)..(399): NCBI GI: 256732761 Blast Desc: NECHADRAFT_37972 [Nectria haematococca mpVI 77-13-4]
  misc_feature (1)..(400): NCBI GI: 85091664 Blast Desc: NCU08984 [Neurospora crassa OR74A] gi|28920408|gb|EAA29776.1| conserved [Neurospora crassa OR74A]
  misc_feature (1)..(400): NCBI GI: 116207488 Blast Desc: CHGG_03037 [Chaetomium globosum CBS 148.51] gi|88183634|gb|EAQ91102.1| CHGG_03037 [Chaetomium globosum CBS 148.51]
  misc_feature (1)..(399): NCBI GI: 189207799 Blast Desc: conserved [Pyrenophora tritici-repentis Pt-1C-BFP] gi|187976326|gb|EDU42952.1| conserved [Pyrenophora tritici-repentis Pt-1C-BFP]
  misc_feature (68)..(401): NCBI GI: 154309360 Blast Desc: BC1G_07574 [Botryotinia fuckeliana B05.10] gi|150852398|gb|EDN27590.1| BC1G_07574 [Botryotinia fuckeliana B05.10]
  misc_feature (1)..(402): NCBI GI: 226285409 Blast Desc: conserved [Paracoccidioides brasiliensis Pb01]
  misc_feature (32)..(399): NCBI GI: 169614930 Blast Desc: SNOG_10617 [Phaeosphaeria nodorum SN15] gi|160702849|gb|EAT82011.2| SNOG_10617 [Phaeosphaeria nodorum SN15]
  misc_feature (1)..(399): NCBI GI: 240106699 Blast Desc: CPC735_014840 [Coccidioides posadasii C735 delta SOWgp]
MKKTLLLCFIHGFKGGEDTFGAKSEFAQHLAALLSAALPKVDVRAITYPKYETRGDLFECVARFRDWLLERVIDIEVANGTPSPTVDPSVRTILIGHSMGGIVAAETVIALASETPIPHPDDSEKPEADGEEKDEADELQTQPKTQPADFNSLMFPYIQGVLAFDTPYLGIAPGVVAHGAESHYNNAAAAFTQLSGLATTFWGSKDQPQTGSKKPIAALPAPEPDTAKDEKAAKGAWGSWGKIAMYAAGAGAVAVGSTAAYYNREQITTGWSWVTSHLEFVGCLARGEELKKRVRNMIQLNQKLDVGFANLYTRLGEAAAPKQVSMMGTVLGNQRTFCNLPTKQAAGFWKEAVNNAATDEVGAHMAMFESKENPGYEQLSEEARNLIVSWAMNEWYETSTRSDLE

SEQ ID NO: 15496 - DNA, 3970 bp, Muscodor strobelii; identical to SEQ ID NO: 15490
  misc_feature: SGI EST ID NO. CUFF.36960.0
  misc_feature: Variant of the nucleotide sequence at SEQ ID NO 15494

SEQ ID NO: 15497 - DNA, 654 bp, Muscodor strobelii
  misc_feature: SGI cDNA ID NO. 565135
  misc_feature: Reduced expression when VOC is produced
  misc_feature: Encodes the peptide sequence at SEQ ID NO 15498
atggccgacaagacaaaacccgcgcgcaagccatcgccagtcaagaacggctacctgatcctctacaatgccgtatctgccatcctctggctgaccgtgctcggtcgcatcgtgggcgtcaacgtcttgcgcaaccacaagtatgcatacccagcagtcggcgagttctgcaaatggacgcagaccctcgccggtatggaggtgttgcactctgtcttgggcatagtccgcgcgcccttcttcacgacgttcatgcaagtcttcagccgctacgccatcgtatggggtatcaccgatctcttccctcagctgggcgccagcccggcctactcgagcatgctggtagcctggggcacgaccgaggtcatccgctactcctacttcgcgctcacgctctcgggctggcagccgtcggcgctgcactggctgcgataccacgcctttttcatactttacccactcggcatctcgagcgaggcatggcttatctggcgtgctgtcggccctgcccaggccattagcccgctctatagtaatttgctttgggcatatgttgtttttgtctatcctccctctgcctacattttatatacccacatgatggcccagcgccgcaaggttttgaaggcatctaatgctaaagctacacagtag

SEQ ID NO: 15498 - protein, 217 aa, Muscodor strobelii
  misc_feature: SGI Peptide ID NO. 565135
  misc_feature (61)..(212): Pfam Id: PF04387 Pfam Desc: Protein tyrosine phosphatase-like protein, PTPLA
  misc_feature (2)..(217): NCBI GI: 46125853 Blast Desc: FG07304.1 [Gibberella zeae PH-1]
  misc_feature (2)..(217): NCBI GI: 256733211 Blast Desc: NECHADRAFT_38495 [Nectria haematococca mpVI 77-13-4]
  misc_feature (9)..(214): NCBI GI: 261354083 Blast Desc: protein tyrosine phosphatase [Verticillium albo-atrum VaMs.102]
  misc_feature (6)..(212): NCBI GI: 39940536 Blast Desc: MGG_04972 [Magnaporthe grisea 70-15] gi|145010790|gb|EDJ95446.1| MGG_04972 [Magnaporthe grisea 70-15]
  misc_feature (3)..(212): NCBI GI: 154309262 Blast Desc: BC1G_07525 [Botryotinia fuckeliana B05.10] gi|150852349|gb|EDN27541.1| BC1G_07525 [Botryotinia fuckeliana B05.10]
  misc_feature (12)..(217): NCBI GI: 85091666 Blast Desc: NCU08985 [Neurospora crassa OR74A] gi|28920409|gb|EAA29777.1| [Neurospora crassa OR74A]
  misc_feature (9)..(210): NCBI GI: 156058332 Blast Desc: SS1G_03177 [Sclerotinia sclerotiorum 1980] gi|154700965|gb|EDO00704.1| SS1G_03177 [Sclerotinia sclerotiorum 1980]
  misc_feature (1)..(215): NCBI GI: 261356064 Blast Desc: protein tyrosine phosphatase protein [Verticillium albo-atrum VaMs.102]
  misc_feature (1)..(210): NCBI GI: 171686330 Blast Desc: protein product [Podospora anserina] gi|170943126|emb|CAP68779.1| protein product [Podospora anserina]
  misc_feature (3)..(212): NCBI GI: 189199520 Blast Desc: protein tyrosine phosphatase [Pyrenophora tritici-repentis Pt-1C-BFP] gi|187983196|gb|EDU48684.1| protein tyrosine phosphatase [Pyrenophora tritici-repentis Pt-1C-BFP]
  misc_feature: Useful for introducing or modulating the production of volatile compounds
MADKTKPARKPSPVKNGYLILYNAVSAILWLTVLGRIVGVNVLRNHKYAYPAVGEFCKWTQTLAGMEVLHSVLGIVRAPFFTTFMQVFSRYAIVWGITDLFPQLGASPAYSSMLVAWGTTEVIRYSYFALTLSGWQPSALHWLRYHAFFILYPLGISSEAWLIWRAVGPAQAISPLYSNLLWAYVVFVYPPSAYILYTHMMAQRRKVLKASNAKATQ

SEQ ID NO: 15499 - DNA, 4108 bp, Muscodor strobelii
  misc_feature: SGI EST ID NO. CUFF.36961.1
  misc_feature: Variant of the nucleotide sequence at SEQ ID NO 15497
ctgaaatccgcagatccctgcaaggtggtgccccaaagcttttcttgtcgggaattgtaaataattcccaccaccaaccctcttatacgtcacaccaaaaccccaaaccatcgaaaccacaaagatggccgacaagacaaaacccgcgcgcaagccatcgccagtcaagaacggctacctgatcctctacaatgccgtatctgccatcctctggctgaccgtgctcggtcgcatcgtgggcgtcaacgtcttgcgcaaccacaagtatgcatacccagcagtcggcgagttctgcaaatggacgcagaccctcgccggtatggaggtgttgcactctgtcttgggcatagtccgcgcgcccttcttcacgacgttcatgcaagtcttcagccgctacgccatcgtatggggtatcaccgatctcttccctcagctgggcgccagcccggcctactcgagcatgctggtagcctggggcacgaccgaggtcatccgctactcctacttcgcgctcacgctctcgggctggcagccgtcggcgctgcactggctgcgataccacgcctttttcatactttacccactcggcatctcgagcgaggcatggcttatctggcgtgctgtcggccctgcccaggccattagcccgctctatagtaatttgctttgggcatatgttgtttttgtctatcctccctctgcctacattttatatacccacatgatggcccagcgccgcaaggttttgaaggcatctaatgctaaagctacacagtagaccaaaaatcacgactaataaagatgagacctgggacatatagacatgcgacaacgataaaaggcttcttaaaagaccggtgctgagacgtgtacatggcgtggaattaggttggaatttgagggtatagagaagtaattaaggcagaggtatcatccatccagccgctatatatacaagacagtaggcttaatactgccaacccatctattcgaggtcactacgcgtgctcgtctcgtaccattcattcatcgcccagctcacaatgagattcctggcctcttcggacaactgctcgtaccccgggttctccttggattcgaacatggctttacagcggttcgtcagcacatagaccgtgaggtgcaattctgaagcggggtgacttatacatacccatatgcgcccctacttcatcggtcgctgcattgttgacggcctccttccagaagcccgcagcttgtttagttggcagattgcagaatgtccgctgattgcccaacaccgtgcccatcatactcacttgcttgggcgcggcagcttcaccaagtcttgtgtaaagattcgcgaacccgacatcaagcttctggttcagctgtatcatattgcgaactcgtttctttagctcctcgccccgcgccagacatccgacgaactccaagtgtgaagtcacccacgaccagcctgtcgtaatttgttcgcggttatagtaggcggcagtgctacctacggcaacagcaccggctccagcggcgtacatggcgattttgccccagctaccccaagcgcctttcgcagccttctcgtccttggctgtgtcgggctcaggcgcaggaagcgcagctatcggctttttggacccggtctgtggctggtccttgctgccccaaaacgttgtcgctaatccgctgagctgtgtgaaggctgctgcggcattgttatagtggctctcggcgccatgggcaactacgcctggggcgatgcccaggtaaggcgtgtcaaaagcaagaacaccctgtatgtagggaaacatcaaactgttgaagtctgcaggttgtgttttcggttgcgtttgcagctcatctgcctcatctttctcttctccatccgcttcaggcttttcactgtcgtcgggatgcggaatgggggtttcgctagcgagggctatgacagtctccgcggcgactataccgcccatcgaatggccgataaggatagtccgcaccgagggatcgacggtcggagagggagtgccatttgcgacttcgatgtcgatgacacgctcaaggagccagtccctgaagcgcgcgacgcattcgaataggtctcctctggtctcgtacttggggtaggtgatggcccggacgtcgactttgggaagagcagcagagaggagggcggctaggtgctgggcgaactccgacttggctccgaaggtgtcttctcctccctgtttattgcgtcacaaggttagtattcaatatcgggtacaaacaaatatgtgaacagtttagaccgagcgcgacgatgattacgacgagacacgagacaccgcgatgataatccatgggtggcaaggctaatagccaacataggcggggtcttctcaccttaaagccatggatgaagcagaggagtaacgttttcttcattttgaatccccatcgagagaatctagggcgagaagaaacatttaaaaccaagtctggagccaatcaagaagaagaaattcaagacaaggcgatggtgtaaaagacgggccatgggcaatgatgtaaagttacctacttctgtacacactacatgacccgcagtgacagctccaaaccaccccgctaaattgcctaaagacgcgaccccgttgcagggcatgtgatagatggatgttcaaaaaaaaattacctgtacgtcgacatacgcaatatttttgactatctcgggttactgaactacaaatatgatatcgcctccgtgatcatgaagaaaacttcatacatcgacttagccgtggcacacacggaacagcccgccctgcattcgtgcaattcgaattagtaggttgcagttaatctttgaaccagataatcgccactgttgataccggcgtatttcctgtcactctcgctagcgtatgttccaggtatagcttctatatgtgacttgaaatttggattgcagaaatatctatgagcctcggatgtcagcattcgccaagtccactcgttcgcatgatgtttaacgtacgcaatgctgtaccgagccgggtagacatctccatcacctgatggtggctctactacacgatgaatcgtgctcttaatcgagtcgttactccaacgggctagtaaatcaccggcattgactacacaagtgtcctcgatgggcgtcgcgtcaacgaatgcaccattggggctctgaacctgcagtcctcctcttgaatcctggaagaggagtgtgatggagccgtagtccgaatgtgctccggcgcgaacctgtccggggtttatcgtgaagacatccttcttcacttcgggatagtgcagtaagcgtaaggtattgtcaccaatgtccgtgaacttatcgaaccagtgctcgtcgatcccaagtcccaccgcgatcgcacgcatgacctcagtgtgcaactctttgcatttatcgtggaactcgagcatcgtcttcttgaaaccaacaagctcaccctcctcttggggccagtggttaggatggtcaggctccccctctcgcccaatttcaagactctctttaagatccgggactgcgtctcgaagcttctttacatcctctaggtctgtgagtgtggtggtcttctcacggcccggcgcagagtagccacgatttgcttcgggagttgtccagcaatgtgacatcttcgtatcttcagggagcctgaagtacttggctgaagtgtcgaacacgaattgacgataatctcgggtgattggaagccccttcagatagatgaaaccagctgtctggaatccatggagaatagcatctgctgcctcctttcgttgcgctgatgtgccatttaggaacaaggagaagtcaatcaagggaatgactagtccgtcgctcttcacggctgcggactccattatggtaattcccgtatttcgcgatcagtagttggtatgaccaatgaacgatacactggcgcagatgacgtgcgatgaaataaaaagatagttttcaagacgaccgtgcaatggtgaagcacttcttatcgtacaaaagcttccagttcaaggccaagatgtgaagtgttccagaaccgtcggcatgcgccgatggcaacctgcccatctgccg

SEQ ID NO: 15500 - DNA, 426 bp, Muscodor strobelii
  misc_feature: SGI cDNA ID NO. 565136
  misc_feature: Encodes the peptide sequence at SEQ ID NO 15501
atgagcagcaacacacctgtcactatcacgattgatacctctgtcatcacgcctgcacccaaaggaacacaaaccactacctcagagagtgtggtcgacagctcgcttcccaagattactatccacactacccgctctaagaaagatgccaaaactctcactccctcaggcaaaacaacggttgaccccattgctgaaccatctgcaactttctctgtgacgacgggcaaagttacaagtcttaagactcaggagctgccaacttctaccctgcttcctcagactgttgatgtcaccccagcagattgtactccgactcctgagatcacaccggcgccgacaggacaaccaatgacctcgaccagcgaaacctgtgatagagttggtattatcaccgtcgaaggggacgatttgactgatgactga

SEQ ID NO: 15501 - protein, 141 aa, Muscodor strobelii
  misc_feature: SGI Peptide ID NO. 565136
MSSNTPVTITIDTSVITPAPKGTQTTTSESVVDSSLPKITIHTTRSKKDAKTLTPSGKTTVDPIAEPSATFSVTTGKVTSLKTQELPTSTLLPQTVDVTPADCTPTPEITPAPTGQPMTSTSETCDRVGIITVEGDDLTDD

SEQ ID NO: 15502 - DNA, 2118 bp, Muscodor strobelii
  misc_feature: SGI cDNA ID NO. 565137
  misc_feature: Reduced expression when VOC is produced
  misc_feature: Encodes the peptide sequence at SEQ ID NO 15503
atgggtccctcgaccgtagagggcccgctgcggacgctgcctatggtcggcgtgtaccacggggcgtcctcgtcgagtgccagctacgacactggaatggaacccagcgaccaacacgtagagtcccgcagaccgaccactgccaacccctttcgagccaaccgcagcgctagcacctctctgccatggcgacgccatccgaagctagccctgctcaacggaaacgagctttcccaatcgttcggcgagctggctattgacgaggaggcgaacgatacagtggacgggaatgtcaagggcggcgcactgttgaagaggaaactccgacgtgcgtctctgagtttgatcaggaacatcacaggtcgtgatcgcagaagctcggaaacggccatggacctcgacgactgtcgccctacgaccgcccacgccgcgtggaataagctccgccaggccacgtcgttccgacaccccaagacgtcgcacagcgagcgggttggcttggatacgatccactcgcctcttgagtcgcactttcctcaccgcccgatccccggcaatggctttgcgccgcccatcatcccagagaatacaggcgccgccgccaaagcatcggcggctgctatgcagaacgacttcctggcgttcatgcggcaacatgaccagccctcggaagacttcaatgactacgagagcggcattggcattgcagtgactactgctgactccgagtccgagacattggtagaagatgcgtcttttgtatgcgcagttgattttattacacagctaccccgagagttatctgtccaggtgctagcatatttagatgctgcccagctaggggctgcgagccaagtgtcccggctttggtacacggttattcaagaccaatatatctggcggcaatcattcctcagacaaaagacgcagacatttgcgacggggttgcctattcagccgggaaccggggctggcgtgcctcccatccgccctcaaaatgattggcagcggatatacaaagcacgagaagagcttgaccgtaggtggagcagcggcccacaggcacgggctgtctatctgaacgggcacttggacagtatttactgtctgcagttcgacgaaaataagatcataactggctcacgcgacaagacaatccgtatatgggacatgcgtacgctgcaatgtcgtctcgtaattgggccgcctgaggtcgtgaacgagacctccatcctcttcgacccaaatggcaagcccatacactatgctgcttctcctgacaaccagcgctttaatccatcggtgcctgtcaccgtatcgttcccggtgcaccacaaagcatccatcctctgtttacaatacgacgatgacatccttgtgactggatcttctgactcgagctgcattgtgtacagtgtcaaggcaggctaccgcccagtgcggcgcctccaataccactcggctgccgttcttgatttagccttcgacgacaaacatatcgtcacctgttctaaagacatcacgatcggagtgtgggatcgtgaaacagggacgcttctcaagcagttaaagggccataccggccccgtcaactccgttcagctgcgtgggaactccattgtttcttgctcgggagatttctctgtgagactgtggaacattgatagtgctaagactattcgagagtttaaaggtcatactaaaggcctggcatgcagtcaattttcagaagacggtaagttcattgcctctgctggtagtgataaagtcatacgcatatgggatgcaaacactggcgagtgtcttaaagaaatcccggctcacgaaagccttgttcgaagcttgcatctcgacagtgtcaatggtcgtctaatcagcgggagctatgacaccgacattaaagttttcgacatagagaagggggaagaagtactcaattttcctcgatggcacgcaagctgggtgcttagcgccaagagtgattacaggcggattatcagtactggtcaggaccctaaaattctcatcatggatttcggtgccaatgttccagatatcaacatgctggagagtgctcgaaaatacgaggttgcttgcgaggaagctgggttcatatga

SEQ ID NO: 15503 - protein, 705 aa, Muscodor strobelii
  misc_feature: SGI Peptide ID NO. 565137
  misc_feature (258)..(305): Pfam Id: PF00646 Pfam Desc: F-box domain
  misc_feature (557)..(595): Pfam Id: PF00400 Pfam Desc: WD domain, G-beta repeat
  misc_feature (354)..(390): Pfam Id: PF00400 Pfam Desc: WD domain, G-beta repeat
  misc_feature (517)..(553): Pfam Id: PF00400 Pfam Desc: WD domain, G-beta repeat
  misc_feature (599)..(637): Pfam Id: PF00400 Pfam Desc: WD domain, G-beta repeat
  misc_feature (477)..(513): Pfam Id: PF00400 Pfam Desc: WD domain, G-beta repeat
  misc_feature (360)..(390): Pfam Id: PF00400 Pfam Desc: WD domain, G-beta repeat
  misc_feature (436)..(472): Pfam Id: PF00400 Pfam Desc: WD domain, G-beta repeat
  misc_feature (47)..(705): NCBI GI: 46124475 Blast Desc: FG06615.1 [Gibberella zeae PH-1]
  misc_feature (54)..(705): NCBI GI: 256726361 Blast Desc: NECHADRAFT_100263 [Nectria haematococca mpVI 77-13-4]
  misc_feature (104)..(704): NCBI GI: 171685430 Blast Desc: protein product [Podospora anserina] gi|170942676|emb|CAP68328.1| protein product [Podospora anserina]
  misc_feature (50)..(692): NCBI GI: 116208368 Blast Desc: CHGG_03477 [Chaetomium globosum CBS 148.51] gi|88184074|gb|EAQ91542.1| CHGG_03477 [Chaetomium globosum CBS 148.51]
  misc_feature (125)..(691): NCBI GI: 39975185 Blast Desc: MGG_00261 [Magnaporthe grisea 70-15] gi|145018870|gb|EDK03149.1| MGG_00261 [Magnaporthe grisea 70-15]
  misc_feature (46)..(691): NCBI GI: 85090339 Blast Desc: NCU07521 [Neurospora crassa OR74A] gi|28919726|gb|EAA29133.1| conserved [Neurospora crassa OR74A]
  misc_feature (45)..(692): NCBI GI: 154316157 Blast Desc: BC1G_03664 [Botryotinia fuckeliana B05.10] gi|150846450|gb|EDN21643.1| BC1G_03664 [Botryotinia fuckeliana B05.10]
  misc_feature (130)..(690): NCBI GI: 119491514 Blast Desc: F-box and WD40 domain protein, [Neosartorya fischeri NRRL 181] gi|119411438|gb|EAW21381.1| F-box and WD40 domain protein, [Neosartorya fischeri NRRL 181]
  misc_feature (179)..(690): NCBI GI: 121705846 Blast Desc: F-box and WD40 domain protein, [Aspergillus clavatus NRRL 1] gi|119399332|gb|EAW09760.1| F-box and WD40 domain protein, [Aspergillus clavatus NRRL 1]
  misc_feature (182)..(690): NCBI GI: 67524807 Blast Desc: AN2861.2 [Aspergillus nidulans FGSC A4] gi|40744256|gb|EAA63432.1| AN2861.2 [Aspergillus nidulans FGSC A4] gi|259486203|tpe|CBF83856.1| TPA: F-box and WD40 domain FGSC
  misc_feature: Useful for introducing or modulating the production of volatile compounds
MGPSTVEGPLRTLPMVGVYHGASSSSASYDTGMEPSDQHVESRRPTTANPFRANRSASTSLPWRRHPKLALLNGNELSQSFGELAIDEEANDTVDGNVKGGALLKRKLRRASLSLIRNITGRDRRSSETAMDLDDCRPTTAHAAWNKLRQATSFRHPKTSHSERVGLDTIHSPLESHFPHRPIPGNGFAPPIIPENTGAAAKASAAAMQNDFLAFMRQHDQPSEDFNDYESGIGIAVTTADSESETLVEDASFVCAVDFITQLPRELSVQVLAYLDAAQLGAASQVSRLWYTVIQDQYIWRQSFLRQKTQTFATGLPIQPGTGAGVPPIRPQNDWQRIYKAREELDRRWSSGPQARAVYLNGHLDSIYCLQFDENKIITGSRDKTIRIWDMRTLQCRLVIGPPEVVNETSILFDPNGKPIHYAASPDNQRFNPSVPVTVSFPVHHKASILCLQYDDDILVTGSSDSSCIVYSVKAGYRPVRRLQYHSAAVLDLAFDDKHIVTCSKDITIGVWDRETGTLLKQLKGHTGPVNSVQLRGNSIVSCSGDFSVRLWNIDSAKTIREFKGHTKGLACSQFSEDGKFIASAGSDKVIRIWDANTGECLKEIPAHESLVRSLHLDSVNGRLISGSYDTDIKVFDIEKGEEVLNFPRWHASWVLSAKSDYRRIISTGQDPKILIMDFGANVPDINMLESARKYEVACEEAGFI

SEQ ID NO: 15504 - DNA, 3772 bp, Muscodor strobelii
  misc_feature: SGI EST ID NO. CUFF.36780.0
  misc_feature: Variant of the nucleotide sequence at SEQ ID NO 15502
caaacctgaagtcagcccaaactcatacgtagtagttccaaggagaagacagaaaaagtgggatttggctgcttttctaattattgcatgggattttccatgggcggaaatggggttatcattgagtgtattaaactgtattgcatgtcaccgtgttccccaacgtgcccaactgcttgactggcgagttggtcggcctgaatcttgcgtcctgcgtcttgcgtcgtgcatcttaactgacatctccatccttgccattcaccccgtctacaggacccatgcacccgtactagcagagtggaccaccgtcatgaaacccccgttcccatcgtccatttccgctgcgtcggtctcacccagcccagcatcttgcgccgttgcgctgccgcttgctctctagcaccgtcgtccgtcttcgccccagctgaagcctcgtgccggccgctcctctcctttttctacaccgcgctgcacctctcttacttgtctgactcgagcattccgaaaaagtttgcttaattttcttaatcttagagatgaaaaggaggtgggcacgtcgcgcgggtgccggctgtctaaagcaacaacccaaataaacaacagtgatcacatcaacgactcgcagcgtgccttcacttctacttcctccgtcaactcaaccaacctcacgtgggcatcccaaagctactctcggggcgtgtctgtacacatccatctgcattcctataccttgcgaacgcttcattcctccgtatcaggtaattctctttcattcatttgctcattacaccacggctcgacgagcgtggtaccttgcaagtatcggccaagtatcaacaaagcgctgctggtgttgcttcgacctgcatctcggttccctgtacgagtgcctgcgccggctgctaccgccgctaccctccacgctcgcccgcctcgagtaccactacctgcctaacccgtcttcgtggaaccaccagccaggaaccagcataccagcataccaggccgcccgccgtgctcctctcgtcgccggaagcagtcgccattgcgatgggtccctcgaccgtagagggcccgctgcggacgctgcctatggtcggcgtgtaccacggggcgtcctcgtcgagtgccagctacgacactggaatggaacccagcgaccaacacgtagagtcccgcagaccgaccactgccaacccctttcgagccaaccgcagcgctagcacctctctgccatggcgacgccatccgaagctagccctgctcaacggaaacgagctttcccaatcgttcggcgagctggctattgacgaggaggcgaacgatacagtggacgggaatgtcaagggcggcgcactgttgaagaggaaactccgacgtgcgtctctgagtttgatcaggaacatcacaggtcgtgatcgcagaagctcggaaacggccatggacctcgacgactgtcgccctacgaccgcccacgccgcgtggaataagctccgccaggccacgtcgttccgacaccccaagacgtcgcacagcgagcgggttggcttggatacgatccactcgcctcttgagtcgcactttcctcaccgcccgatccccggcaatggctttgcgccgcccatcatcccagagaatacaggcgccgccgccaaagcatcggcggctgctatgcagaacgacttcctggcgttcatgcggcaacatgaccagccctcggaagacttcaatgactacgagagcggcattggcattgcagtgactactgctgactccgagtccgagacattggtagaagatgcgtcttttgtatgcgcagttgattttattacacagctaccccgagagttatctgtccaggtgctagcatatttagatgctgcccagctaggggctgcgagccaagtgtcccggctttggtacacggttattcaagaccaatatatctggcggcaatcattcctcagacaaaagacgcagacatttgcgacggggttgcctattcagccgggaaccggggctggcgtgcctcccatccgccctcaaaatgattggcagcggatatacaaagcacgagaagagcttgaccgtaggtggagcagcggcccacaggcacgggctgtctatctgaacgggcacttggacagtatttactgtctgcagttcgacgaaaataagatcataactggctcacgcgacaagacaatccgtatatgggacatgcgtacgctgcaatgtcgtctcgtaattgggccgcctgaggtcgtgaacgagacctccatcctcttcgacccaaatggcaagcccatacactatgctgcttctcctgacaaccagcgctttaatccatcggtgcctgtcaccgtatcgttcccggtgcaccacaaagcatccatcctctgtttacaatacgacgatgacatccttgtgactggatcttctgactcgagctgcattgtgtacagtgtcaaggcaggctaccgcccagtgcggcgcctccaataccactcggctgccgttcttgatttagccttcgacgacaaacatatcgtcacctgttctaaagacatcacgatcggagtgtgggatcgtgaaacagggacgcttctcaagcagttaaagggccataccggccccgtcaactccgttcagctgcgtgggaactccattgtttcttgctcgggagatttctctgtgagactgtggaacattgatagtgctaagactattcgagagtttaaaggtcatactaaaggcctggcatgcagtcaattttcagaagacggtaagttcattgcctctgctggtagtgataaagtcatacgcatatgggatgcaaacactggcgagtgtcttaaagaaatcccggctcacgaaagccttgttcgaagcttgcatctcgacagtgtcaatggtcgtctaatcagcgggagctatgacaccgacattaaagttttcgacatagagaagggggaagaagtactcaattttcctcgatggcacgcaagctgggtgcttagcgccaagagtgattacaggcggattatcagtactggtcaggaccctaaaattctcatcatggatttcggtgccaatgttccagatatcaacatgctggagagtgctcgaaaatacgaggttgcttgcgaggaagctgggttcatatgaccatggatcaggcatattccaagcacattaatcattaattcctgaacttgttgggagtagtccacgagacccccaaccagacatcgaccaatgtagccatcactgagcgagagtgttgtcacatcggccacgagtttcctttttacgacgcgcagcctttacatcgaccatacagccctggaactgatttctggttagagaaatgcataggagttcggagcgggtctcatcaattcacatcatctcgccactgcattcataggagtcggctattcgaagggctatgtagcatcttaggagtctagaggactcgcgttcgcattcactttgttcgtagtatttgtccgtcggtctcatgaagcaccgatagcagactttgaggttcgacattgtttgcatttgaagcccctgtcttagaattagagccccctgttttgttttgtctaccgaaattgtagagtagctgtcttgaggacggaatttcgaatcgaatacagcatattagattcgtgtgcactggtagatagggaggaccttagctaaatcaactatgtcaccttccggtgggagtgaatcgatcgtgttcatacacagcttaacttta

SEQ ID NO: 15505 - DNA, 2010 bp, Muscodor strobelii
  misc_feature: SGI cDNA ID NO. 565138
  misc_feature: Elevated expression when VOC is produced
  misc_feature: Encodes the peptide sequence at SEQ ID NO 15506
atggggagttctccagcagcggtatcgccgctccaactggattacgatcatcaaatcggaagacctcctacttcgtacccagctcaattaaacacgtcggcgaccacaactgagggcgttgaagcacagttattgtcgttcatgaatgcacaagaatttgagatgaaccgtgatcttttcttctcggacctggcaagcgaggtatcagagcaaggaaggctggtattgccagataccgcggacttaagcccgtcctaccaggcttcatttcccgagcacagtgtcgctgatcagttagacttgggaagcttgcattctgcggacctggacataccattacagtttcgcgaagatgacaataccagtccgtgggcactaatgaacttacaagacgaagacttcacttcgtttacgctttacaaccccggtacctacattcccgaatcaccatctcactcatcacatggacagacgtccgagaaatcaagtccaaggctgtcttctcccaagcacaaagcgacgaaggatccggacccgataaggaaagtgaagggtggtagagttgggaaggctgctgtggataatttcgttgtccttacaccagattcgatcaaccaaaaatcgggcaaacccaatcccttcgaatgttttgagtcaatgaggagtactcatagggggcgaacgggccctttagccaacaatgtcgcgaagagtgctctcaacattcggagaatgggtgcttgcttctgttgccgaagtcggaaagtgaagtgcgacgaggagcgcccgtgtaaaaactgtaagaaaatatcagcgcaagttccgcaggtcgtctgttggcaattttccgacttcctaccggtcttgttccccgacttcattagaggccatttcaagaaagaggcaatgttgcgcttcattacggacaatgtatctgcattccatgactcctcagccttcctagagccctgccccatcgaaatgtcgtcagggcctcgcttccacagcacgttgactgttcttgcaacccccttcaccccgaaagatgctgggattttgcagcattggcacatgggcggcgtgcatcagttggagctccagtcacgaagtgcattggctatcggtgttgatccgaagaacgcaaatttaagagagatgctcaagcggcgggcacgagaatacgtacagaatcttgtagacgagccacgatatgctgagcaggtgacagattcattgcgaggaactcatcttccgcggcgggttcttacaattattcagagatttgcacagcggtcccagtcgtccatggtcaaagctgtactagacgagtacttgctcaaagagacacaatcgttattcactgctttcggaacatgcctcaagccacggtcaagatccgaatgggcgccttgcctcgcatcgtttctcgttttatgtctacttatggaaagcattgaggctgcggccgatattttcatggtatcagaagcagagatcgctctccgtaggcgccgtcgacgcagcatgagcaacactggcgtagatgagaacgaaggaaatgcgttctccatcgagggtcgcaaacaggcgcttgacgtttgtcgacagatcgataatctcccgttccgacaagtagcatatcgtttccacgccgtctatcagacccaccacgtgcgcgaacctggatttggcaacaacacgagcgtctctagtaacttgtctgcaaacgccagtggcggcagtagtggaaatggaggaggaacggcattcaaccccttgatcgatgccgaactagacgcagatctaagtccagctgctgcagagatggcaatgtcccttcgtgcattgcttgaaaatgattggcatgaactagatttcctggtggcagatccaatcttatctcaggaagcgcatccgtatccccgagatatcacgctggactatacaggtcgcttgctagcacgatttctgttgtcttttacggacgagaagtatcttttcgacatatga

SEQ ID NO: 15506 - protein, 669 aa, Muscodor strobelii
  misc_feature: SGI Peptide ID NO. 565138
  misc_feature (246)..(286): Pfam Id: PF00172 Pfam Desc: Fungal Zn(2)-Cys(6) binuclear cluster domain
  misc_feature (246)..(273): Pfam Id: PF00172 Pfam Desc: Fungal Zn(2)-Cys(6) binuclear cluster domain
  misc_feature (107)..(667): NCBI GI: 256732816 Blast Desc: NECHADRAFT_104215 [Nectria haematococca mpVI 77-13-4]
  misc_feature (4)..(667): NCBI GI: 46124643 Blast Desc: FG06699.1 [Gibberella zeae PH-1]
  misc_feature (195)..(667): NCBI GI: 171686064 Blast Desc: protein product [Podospora anserina] gi|170942993|emb|CAP68646.1| protein product [Podospora anserina]
  misc_feature (196)..(668): NCBI GI: 116207894 Blast Desc: CHGG_03240 [Chaetomium globosum CBS 148.51] gi|88183837|gb|EAQ91305.1| CHGG_03240 [Chaetomium globosum CBS 148.51]
  misc_feature (76)..(667): NCBI GI: 39945384 Blast Desc: MGG_04674 [Magnaporthe grisea 70-15] gi|145021404|gb|EDK05533.1| MGG_04674 [Magnaporthe grisea 70-15]
  misc_feature (181)..(667): NCBI GI: 261358488 Blast Desc: conserved [Verticillium albo-atrum VaMs.102]
  misc_feature (188)..(666): NCBI GI: 164428987 Blast Desc: NCU00282 [Neurospora crassa OR74A] gi|157072365|gb|EAA28517.2| [Neurospora crassa OR74A]
  misc_feature (227)..(441): NCBI GI: 189190974 Blast Desc: conserved [Pyrenophora tritici-repentis Pt-1C-BFP] gi|187973432|gb|EDU40931.1| conserved [Pyrenophora tritici-repentis Pt-1C-BFP]
  misc_feature (227)..(316): NCBI GI: 226289973 Blast Desc: conserved [Paracoccidioides brasiliensis Pb18]
  misc_feature (227)..(316): NCBI GI: 225682565 Blast Desc: conserved [Paracoccidioides brasiliensis Pb03]
  misc_feature: Useful for introducing or modulating the production of volatile compounds
MGSSPAAVSPLQLDYDHQIGRPPTSYPAQLNTSATTTEGVEAQLLSFMNAQEFEMNRDLFFSDLASEVSEQGRLVLPDTADLSPSYQASFPEHSVADQLDLGSLHSADLDIPLQFREDDNTSPWALMNLQDEDFTSFTLYNPGTYIPESPSHSSHGQTSEKSSPRLSSPKHKATKDPDPIRKVKGGRVGKAAVDNFVVLTPDSINQKSGKPNPFECFESMRSTHRGRTGPLANNVAKSALNIRRMGACFCCRSRKVKCDEERPCKNCKKISAQVPQVVCWQFSDFLPVLFPDFIRGHFKKEAMLRFITDNVSAFHDSSAFLEPCPIEMSSGPRFHSTLTVLATPFTPKDAGILQHWHMGGVHQLELQSRSALAIGVDPKNANLREMLKRRAREYVQNLVDEPRYAEQVTDSLRGTHLPRRVLTIIQRFAQRSQSSMVKAVLDEYLLKETQSLFTAFGTCLKPRSRSEWAPCLASFLVLCLLMESIEAAADIFMVSEAEIALRRRRRRSMSNTGVDENEGNAFSIEGRKQALDVCRQIDNLPFRQVAYRFHAVYQTHHVREPGFGNNTSVSSNLSANASGGSSGNGGGTAFNPLIDAELDADLSPAAAEMAMSLRALLENDWHELDFLVADPILSQEAHPYPRDITLDYTGRLLARFLLSFTDEKYLFDI

SEQ ID NO: 15507 - DNA, 2983 bp, Muscodor strobelii
  misc_feature: SGI EST ID NO. CUFF.36786.1
  misc_feature: Variant of the nucleotide sequence at SEQ ID NO 15505
ctcgggtagtgtgtgacccaaatgaacaccgaattaccaaagtagtttggcgccacagttcgctccccgccgtcggtgatccttttcagcttagtctattcgtggcgaggcatcctcaaccacgacttctgtgagtgtgaggcatgacgccgttgaagccagctcgccgctgtgccgcgtcgcccatcctcgtcctagtttctcctacgaataaagaatagacaatgtctcgtagttgttcatgggcttcttatatccgtaaatcactagcatcaagtagtcccaggccgatctactcatgacgacagtgtagtttggcactattaatagccttgggtatcatcgagtgcgacgggggccagactagatacaaacaattgtcatcgagtccttttgcatactcatacgaaactgattacgggcagcgacagacgagacaagtatggcttcggtagcttctgcttcacctataggacaaggcttcacctgtacggagtcgacagaagacacagattcatggcaatgtattgaaacaacaccatcaccagctggcctacttccaagtccagcaaattcgagcttcagtggatggggcgtcgtcggctacacaaatcagatggggagttctccagcagcggtatcgccgctccaactggattacgatcatcaaatcggaagacctcctacttcgtacccagctcaattaaacacgtcggcgaccacaactgagggcgttgaagcacagttattgtcgttcatgaatgcacaagaatttgagatgaaccgtgatcttttcttctcggacctggcaagcgaggtatcagagcaaggaaggctggtattgccagataccgcggacttaagcccgtcctaccaggcttcatttcccgagcacagtgtcgctgatcagttagacttgggaagcttgcattctgcggacctggacataccattacagtttcgcgaagatgacaataccagtccgtgggcactaatgaacttacaagacgaagacttcacttcgtttacgctttacaaccccggtacctacattcccgaatcaccatctcactcatcacatggacagacgtccgagaaatcaagtccaaggctgtcttctcccaagcacaaagcgacgaaggatccggacccgataaggaaagtgaagggtggtagagttgggaaggctgctgtggataatttcgttgtccttacaccagattcgatcaaccaaaaatcgggcaaacccaatcccttcgaatgttttgagtcaatgaggagtactcatagggggcgaacgggccctttagccaacaatgtcgcgaagagtgctctcaacattcggagaatgggtgcttgcttctgttgccgaagtcggaaagtgaagtgcgacgaggagcgcccgtgtaaaaactgtaagaaaatatcagcgcaagttccgcaggtcgtctgttggcaattttccgacttcctaccggtcttgttccccgacttcattagaggccatttcaagaaagaggcaatgttgcgcttcattacggacaatgtatctgcattccatgactcctcagccttcctagagccctgccccatcgaaatgtcgtcagggcctcgcttccacagcacgttgactgttcttgcaacccccttcaccccgaaagatgctgggattttgcagcattggcacatgggcggcgtgcatcagttggagctccagtcacgaagtgcattggctatcggtgttgatccgaagaacgcaaatttaagagagatgctcaagcggcgggcacgagaatacgtacagaatcttgtagacgagccacgatatgctgagcaggtgacagattcattgcgaggaactcatcttccgcggcgggttcttacaattattcagagatttgcacagcggtcccagtcgtccatggtaaagcgagcgctgggtatatatgtcactcattatgtgctcactaaacagctttgtctcactgcagctacactttcgcggttgcatgaacaaccaagtcatatgcagattccaaattatccgtctggctctacgacttcacgtatactcaatcgacaggtcaaagctgtactagacgagtacttgctcaaagagacacaatcgttattcactgctttcggaacatgcctcaagccacggtcaagatccgaatgggcgccttgcctcgcatcgtttctcgttttatgtctacttatggaaagcattgaggctgcggccgatattttcatggtatcagaagcagagatcgctctccgtaggcgccgtcgacgcagcatgagcaacactggcgtagatgagaacgaaggaaatgcgttctccatcgagggtcgcaaacaggcgcttgacgtttgtcgacagatcgataatctcccgttccgacaagtagcatatcgtttccacgccgtctatcagacccaccacgtgcgcgaacctggatttggcaacaacacgagcgtctctagtaacttgtctgcaaacgccagtggcggcagtagtggaaatggaggaggaacggcattcaaccccttgatcgatgccgaactagacgcagatctaagtccagctgctgcagagatggcaatgtcccttcgtgcattgcttgaaaatgattggcatgaactagatttcctggtggcagatccaatcttatctcaggaagcgcatccgtatccccgagatatcacgctggactatacaggtcgcttgctagcacgatttctgttgtcttttacggacgagaagtatcttttcgacatatgaattcaagaacgtccgactcatgtggaacgcgattgctgtacttgaacatgtcctatatagttttgctctctttctttctttggtttgtgatacccgtgtgttagatcgacatttaggtagccatttttagttatgatattacgagcctatagattagtcctaggttggttcatagatatagaatgcattgtctttggg

SEQ ID NO: 15508 - DNA, 678 bp, Muscodor strobelii
  misc_feature: SGI cDNA ID NO. 565139
  misc_feature: Encodes the peptide sequence at SEQ ID NO 15509
atgtcccaggatccctggaaccagcagccgagtatgagaaactccggaatgccgatgtacggtgttgcgacctcgacatcaatgaacacaggcggtcccatggtgccgtttgtgtctatacaacggtccggatctcattataactcgagctctccgtatgagtcttatgcgagctccagttctcaaagctggccagtgcaggatagatattcgccagtcgattccattgatgatatggcgactgtttctgaccatgcactggataatcttatgagcgtctcccctccttcgggtcaaggtagaagccagggaaagggccgcactcaacgcaagccctcaaatcgggatgaattcgacggtccgcaccagttcctttcgaggccaccagccgactatgtcgcgctacaagaacgagaactcccccatctccctaccaatctcctggtccaagagcaagatagcgttctcagcgcggtcaacgaccgactatcgcaatgtgctttcgatttcgtagccaagtatcagttcccgataccgcttactcaagagttatgcggccagttgaacgacctcaagaccgagagtggacagaatgggtttacttgctcaaacgacttgcgacgaaaagacgaattccagcgcgagtcctttataacggacaaatcaaacaatttgtga

SEQ ID NO: 15509 - protein, 225 aa, Muscodor strobelii
  misc_feature: SGI Peptide ID NO. 565139
  misc_feature (43)..(184): NCBI GI: 261358487 Blast Desc: conserved [Verticillium albo-atrum VaMs.102]
  misc_feature (55)..(184): NCBI GI: 256732815 Blast Desc: NECHADRAFT_6087 [Nectria haematococca mpVI 77-13-4]
  misc_feature (53)..(184): NCBI GI: 145614488 Blast Desc: MGG_04675 [Magnaporthe grisea 70-15] gi|145021403|gb|EDK05532.1| MGG_04675 [Magnaporthe grisea 70-15]
  misc_feature (39)..(181): NCBI GI: 154320452 Blast Desc: BC1G_01698 [Botryotinia fuckeliana B05.10] gi|150853387|gb|EDN28579.1| BC1G_01698 [Botryotinia fuckeliana B05.10]
  misc_feature (20)..(181): NCBI GI: 156040681 Blast Desc: SS1G_12357 [Sclerotinia sclerotiorum 1980] gi|154696413|gb|EDN96151.1| SS1G_12357 [Sclerotinia sclerotiorum 1980]
  misc_feature (65)..(184): NCBI GI: 116207898 Blast Desc: CHGG_03242 [Chaetomium globosum CBS 148.51] gi|88183839|gb|EAQ91307.1| CHGG_03242 [Chaetomium globosum CBS 148.51]
  misc_feature (69)..(184): NCBI GI: 171686066 Blast Desc: protein product [Podospora anserina] gi|170942994|emb|CAP68647.1| protein product [Podospora anserina]
  misc_feature (107)..(184): NCBI GI: 164428989 Blast Desc: NCU00283 [Neurospora crassa OR74A] gi|157072366|gb|EAA28518.2| conserved [Neurospora crassa OR74A]
  misc_feature (101)..(180): NCBI GI: 119468330 Blast Desc: NFIA_053030 [Neosartorya fischeri NRRL 181] gi|119406006|gb|EAW15957.1| conserved [Neosartorya fischeri NRRL 181]
  misc_feature (99)..(180): NCBI GI: 121699038 Blast Desc: conserved [Aspergillus clavatus NRRL 1] gi|119396029|gb|EAW06461.1| conserved [Aspergillus clavatus NRRL 1]
MSQDPWNQQPSMRNSGMPMYGVATSTSMNTGGPMVPFVSIQRSGSHYNSSSPYESYASSSSQSWPVQDRYSPVDSIDDMATVSDHALDNLMSVSPPSGQGRSQGKGRTQRKPSNRDEFDGPHQFLSRPPADYVALQERELPHLPTNLLVQEQDSVLSAVNDRLSQCAFDFVAKYQFPIPLTQELCGQLNDLKTESGQNGFTCSNDLRRKDEFQRESFITDKSNNL

SEQ ID NO: 15510 - DNA, 432 bp, Muscodor strobelii
  misc_feature: SGI EST ID NO. CUFF.36768.0
  misc_feature: Variant of the nucleotide sequence at SEQ ID NO 15508
ctcattataactcgagctctccgtatgagtcttatgcgagctccagttctcaaagctggccagtgcaggatagatattcgccagtcgattccattgatgatatggcgactgtttctgaccatgcactggataatcttatgagcgtctcccctccttcgggtcaaggtagaagccagggaaagggccgcactcaacgcaagccctcaaatcgggatgaattcgacggtccgcaccagttcctttcgaggccaccagccgactatgtcgcgctacaagaacgagaactcccccatctccctaccaatctcctggtccaagagcaagatagcgttctcagcgcggtcaacgaccgactatcgcaatgtgctttcgatttcgtagccaagtatcagttcccgataccgcttactcaagatatgcggccagttgaac

SEQ ID NO: 15511 - DNA, 1404 bp, Muscodor strobelii
  misc_feature: SGI cDNA ID NO. 565140
  misc_feature: Encodes the peptide sequence at SEQ ID NO 15512
atggacatgctgcaacgccatcgacagagaagattccatcgacgaagtcggaacggttgtgtgacatgcaaggcaaaacacatacgatgtgatgagctgcgtccactgtgtacattctgcctcaggcatggcggcccttgtcagtactcggctgacaaccagtcaagctccacaagcaaagccgggcgaaacacagtatccacacccggtgaatctcgggagccggccgtcgaccttcacgccatttcagtcgatgccttcattggtacccaatatgagttaccacacaaatcacgatctctgttccatctgttcgcgaatacccgcgtcttatatcgatctcgagtcgagaggaaaaatgattcgttcctggtacatcgtgcgttatcacatcccgggtttctgcacgcttcacttctcttgaccaccttacattgggcttggaacacgggggacgtcgagcagttccgcgtaccctatctctatcacaaacttcaagccatacgatttgtcaatgaacaactacaaagtccagaaactgctgcatctgacgcgactgttgccgtcgtcgcaagcttggctgtgatggagaactcgctggggtcgactgaggctgtatcatcgcacctacaggggcttgcaaagattaaagaactccagacggaagaaaggcgccctgaaaaactcggcctgcttcagcgcatgatactgatggcagcccatagtgtctctagtcgtccggtgtgggacattctgaacataagtcgcactgacgatgttcaccagtccgtgatcattgcactcattcgtgtggctcttcgtccaatatacagtgtgcttacacttagcggcgcggacgatccaggagagccgctatctgagattctggctaggaagacgccacatccaaagacaactgatgttcatgcttccacttcgcatagaacagtagactgcagtcgatcagagttcatggcatgctacttttatctttacattattctacgtgaggaaaccgtggactcgttcattctggaatggttcatggaacaactgcttgtggacgtttgtcggaccgaaactttgatgcagaaaggacagtacagtcagtcgctttggttctggacagtgatgttcggagcatgtgctgcaaacgccgcaagggtcgattcggagaaggaagacacagagatgaaggttttgagagacgcgtatcttgacaagatcagtctggctagccaacttttgaagataaaaaactgggaatcggcgaaatcaacactacgtctgtttgcatgggaagatgacttcgatggcgattcagaggtgcgagcaatatgggaggaagcagtatggcgagacaagtgtaaaacagccaaggatgcagagtctggactttcttga

SEQ ID NO: 15512 - protein, 467 aa, Muscodor strobelii
  misc_feature: SGI Peptide ID NO. 565140
  misc_feature (18)..(56): Pfam Id: PF00172 Pfam Desc: Fungal Zn(2)-Cys(6) binuclear cluster domain
  misc_feature (18)..(50): Pfam Id: PF00172 Pfam Desc: Fungal Zn(2)-Cys(6) binuclear cluster domain
  misc_feature (6)..(454): NCBI GI: 46124645 Blast Desc: FG06700.1 [Gibberella zeae PH-1]
  misc_feature (6)..(451): NCBI GI: 256733276 Blast Desc: [Nectria haematococca mpVI 77-13-4]
  misc_feature (6)..(455): NCBI GI: 261358485 Blast Desc: conserved [Verticillium albo-atrum VaMs.102]
  misc_feature (2)..(219): NCBI GI: 256728323 Blast Desc: NECHADRAFT_87630 [Nectria haematococca mpVI 77-13-4]
  misc_feature (10)..(195): NCBI GI: 255955013 Blast Desc: Pc21g12280 [Penicillium chrysogenum Wisconsin 54-1255] gi|211589970|emb|CAP96125.1| Pc21g12280 [Penicillium chrysogenum Wisconsin 54-1255]
  misc_feature (10)..(195): NCBI GI: 119489161 Blast Desc: C6 zinc finger domain protein [Neosartorya fischeri NRRL 181] gi|119410991|gb|EAW20936.1| C6 zinc finger domain protein [Neosartorya fischeri NRRL 181]
  misc_feature (93)..(216): NCBI GI: 256722656 Blast Desc: NECHADRAFT_87170 [Nectria haematococca mpVI 77-13-4]
  misc_feature (8)..(199): NCBI GI: 70990132 Blast Desc: C6 finger domain protein [Aspergillus fumigatus Af293] gi|66847547|gb|EAL87877.1| C6 finger domain protein, [Aspergillus fumigatus Af293]
  misc_feature (8)..(196): NCBI GI: 159130397 Blast Desc: C6 finger domain protein, [Aspergillus fumigatus A1163]
  misc_feature (10)..(175): NCBI GI: 159124162 Blast Desc: C6 transcription factor, [Aspergillus fumigatus A1163]
MDMLQRHRQRRFHRRSRNGCVTCKAKHIRCDELRPLCTFCLRHGGPCQYSADNQSSSTSKAGRNTVSTPGESREPAVDLHAISVDAFIGTQYELPHKSRSLFHLFANTRVLYRSRVERKNDSFLVHRALSHPGFLHASLLLTTLHWAWNTGDVEQFRVPYLYHKLQAIRFVNEQLQSPETAASDATVAVVASLAVMENSLGSTEAVSSHLQGLAKIKELQTEERRPEKLGLLQRMILMAAHSVSSRPVWDILNISRTDDVHQSVIIALIRVALRPIYSVLTLSGADDPGEPLSEILARKTPHPKTTDVHASTSHRTVDCSRSEFMACYFYLYIILREETVDSFILEWFMEQLLVDVCRTETLMQKGQYSQSLWFWTVMFGACAANAARVDSEKEDTEMKVLRDAYLDKISLASQLLKIKNWESAKSTLRLFAWEDDFDGDSEVRAIWEEAVWRDKCKTAKDAESGLS

SEQ ID NO: 15513 - DNA, 2510 bp, Muscodor strobelii
  misc_feature: SGI EST ID NO. CUFF.36795.0
  misc_feature: Variant of the nucleotide sequence at SEQ ID NO 15511
aaagcattcaactcccacccaatgtctgactgatatattgcaaatgatactatatgccccataccagtacagggggccaggtcgtcgaaaggcgtagcggtcctgctttgcctgtcaaattcatcacgatgccatgagatgcagcgattccttcagcccagtgttttctgaaacgttgctggtcaaaaaagaggatcgcaataaccattgtcattgctagcatgagatcatggataatcgagtgcctagccgcacatttgtcaatcttcctctttgggctaagctatgaccttgataggactgatattctcgctcattaagcatctaagcctccgaggcgactggtaacatcccgtctgccgagctattgcttgctgtgccgcagcaagcgaatttcgtggatacaacaatgatatgagaccccctcctcgctgacgatgcttgaccactcctgagattcgatcctttggattcatagcctattcgtatagctcagcatcgctccagagaagatggacatgctgcaacgccatcgacagagaagattccatcgacgaagtcggaacggttgtgtgacatgcaaggcaaaacacatacgatgtgatgaggtaccatatcaacccctcctaaaatttttgcagtgactgacttttattgtgcaatagctgcgtccactgtggtgagttctggatctttggggtttcttttatacatatatgttcgctgcagactttcgtataatgcaccgatgccatgtgtctcgggtgtggccccgttggtcagctgcaagccatgtaccttgtgccggatacgtcgtataggcggcgtccgtctcaatcccagagccacgcacatacgaagttttcccctccatctggaatttgtgataactaacaaagctgcagtacattctgcctcaggcatggcggcccttgtcagtactcggctgacaaccagtcaagctccacaagcaaagccgggcgaaacacagtatccacacccggtgaatctcgggagccggccgtcgaccttcacgccatttcagtcgatgccttcattggtacccaatatgagttaccacacaaatcacgatctctgttccatctgttcgcgaatacccgcgtcttatatcgatctcgagtcgagaggaaaaatgattcgttcctgtaaggcgcagatttgtaaacaacgaacgtgagtctttgctgatagcacggtatgtctaagggtacatcgtgcgttatcacatcccgggtttctgcacgcttcacttctcttgaccaccttacattgggcttggaacacgggggacgtcgagcagttccgcgtaccctatctctatcacaaacttcaagccatacgatttgtcaatgaacaactacaaagtccagaaactgctgcatctgacgcgactgttgccgtcgtcgcaagcttggctgtgatggagaactcgctggggtcgactgaggctgtatcatcgcacctacaggggcttgcaaagattaaagaactccagacggaagaaaggcgccctgaaaaactcggcctgcttcagcgcatgatactgatggcagcccatagtgtctctagtcgtccggtgtgggacattctgaacataagtcgcactgacgatgttcaccagtccgtgatcattgcactcattcgtgtggctcttcgtccaatatacagtgtgcttacacttagcggcgcggacgatccaggagagccgctatctgagattctggctaggaagacgccacatccaaagacaactgatgttcatgcttccacttcgcatagaacagtagactgcagtcgatcagagttcatggcatgctacttttatctttacattattctacgtgaggaaaccgtggactcgttcattctggaatggttcatggaacaactgcttgtggacgtttgtcggaccgaaactttgatgcagaaaggacagtacagtcagtcgctttggttctggacagtgatgttcggagcatgtgctgcaaacgccgcaagggtcgattcggagaaggaagacacagagatgaaggttttgagagacgcgtatcttgacaagatcagtctggctagccaacttttgaagataaaaaactgggaatcggcgaaatcaacactacgtctgtttgcatgggaagatgacttcgatggcgattcagaggtgcgagcaatatgggaggaagcagtatggcgagacaagtgtaaaacagccaaggatgcagagtctggactttcttgaggctaatgcaagtgagccgacctaagccagtaaaacgtgtaattgtaaatgaagcagactggctatgaacacgcaagatacagtcacttacgacttataatcgtcacttgatgatttgaataaacatgtaataggcttaccatataagcagtagactacatttcggatgcactttgttatgtcgaccatccaacgagattcttgacactcaatttcacatataggggctgaaaacttggtctaagtcatc

SEQ ID NO: 15514 - DNA, 1722 bp, Muscodor strobelii
  misc_feature: SGI cDNA ID NO. 565141
  misc_feature: Encodes the peptide sequence at SEQ ID NO 15515
atggacgacatcacgacaacaaactggatgaattcaccgccccaaggtccaatccaattgcttatccgaggttttctttgtcatccgtttcatgactacagttcatattcccaaggaaacttgctctcagctaccaatggacatttcatatattctcaaacagcacatactgaactcaacggttctgtatgggaccctgccacagaaggctcacaggacttccatggtgacgaggattttcatttttcatatggccaagttacacccagaggacaggaccagaatgaaattcttgatgacatgaccagcaaatggatggtcacagagcaggtgattcctaccgcctctgaacccatgcgacgggtcagttctcgatgctcatctggaagtaacaaacacagaaccatcaaagcgtcgtcacgcaagagccgccccagattaatctccaccgtctcacaaggttcacacatgtctgattttgacctcacgagcacccaggcaatggaaggatacctcctccaggatgatacccagtctgtagcgtcgtctactatgttttacccaacgctgcccatgggtttgccaatggatggactcgcggtggacggaatctcgtattccccatctctcatggcgtcaggcttgtcgcatcagcatattgatcctgctcatatgcagttgaaattcgaccctagcgtcgcaggtaattctcccagtgcctcatggggctcgctcagccctgagtcccgactttcttcacccggcattcccgaggacgcctggtccggatctatacccatggatgcatcaccagcacatactaataactcttctccagtcatggatggaacatcgcctagtcttgatcgtcaaatgggaatgatgaccactgaggacccaaagggactcatgctagcggatgacatgttctctcttcccccttctttcacacgtcgctccagcggagacggtgaatctactgctcgggatcacccactatataagagtgctactcttcacaatgatggtctgttccactgcccgtgggaaggcgatcagaattgcaaccacaagcccgagaaactcaagtgcaactatgacaaattcgttgactctcatctcaagccttatcgctgcaaggctgaggcatgcgagaatgctcgattctcttccaccgcctgcctgctccggcacgaacgtgaggctcatgccatgcatggtcacggtgacaagccctatctctgcacatatgatggatgtgagagagcaatcaccggaaatggatttccccgccagtggaaccttagagatcacatgcgtcgtgtgcataacgacaatggcaactcgcttagctcccaacctgggtcttcccctaccggccatggatcttctgcgcactcggccaagggccgcaagcgtaagaacaaagactctgttgattcaagttcaagtagtcgcaagcaggcggccaagactgctcaagcagctgaggctgccgccgccgctgctcgagctgccgaacagcccttgattgatgagtggtatcaacaccacaatgccttgcagacctatctgcagctttatagcaccccagacgctttttctcatgtccaggatgcgggcgatgcccaagtccacatggagtctatggtaaagatttcgaagaagctgcactcgaagaaagaagcatatcgacgatcctactctcaccattctggctga

SEQ ID NO: 15515 - protein, 573 aa, Muscodor strobelii
  misc_feature: SGI Peptide ID NO. 565141
  misc_feature (41)..(557): NCBI GI: 85086799 Blast Desc: NCU00285 [Neurospora crassa OR74A] gi|28918851|gb|EAA28520.1| [Neurospora crassa OR74A]
  misc_feature (32)..(565): NCBI GI: 171686068 Blast Desc: protein product [Podospora anserina] gi|170942995|emb|CAP68648.1| protein product [Podospora anserina]
  misc_feature (44)..(570): NCBI GI: 261358484 Blast Desc: conserved [Verticillium albo-atrum VaMs.102]
  misc_feature (35)..(561): NCBI GI: 145614486 Blast Desc: MGG_11371 [Magnaporthe grisea 70-15] gi|145021402|gb|EDK05531.1| MGG_11371 [Magnaporthe grisea 70-15]
  misc_feature (41)..(559): NCBI GI: 256733275 Blast Desc: [Nectria haematococca mpVI 77-13-4]
  misc_feature (295)..(568): NCBI GI: 116207902 Blast Desc: CHGG_03244 [Chaetomium globosum CBS 148.51] gi|88183841|gb|EAQ91309.1| CHGG_03244 [Chaetomium globosum CBS 148.51]
  misc_feature (44)..(559): NCBI GI: 46124647 Blast Desc: FG06701.1 [Gibberella zeae PH-1]
  misc_feature (319)..(572): NCBI GI: 154321205 Blast Desc: BC1G_01477 [Botryotinia fuckeliana B05.10] gi|150852015|gb|EDN27207.1| BC1G_01477 [Botryotinia fuckeliana B05.10]
  misc_feature (319)..(569): NCBI GI: 156054392 Blast Desc: SS1G_06044 [Sclerotinia sclerotiorum 1980] gi|154703824|gb|EDO03563.1| SS1G_06044 [Sclerotinia sclerotiorum 1980]
  misc_feature (328)..(563): NCBI GI: 256722698 Blast Desc: [Nectria haematococca mpVI 77-13-4]
MDDITTTNWMNSPPQGPIQLLIRGFLCHPFHDYSSYSQGNLLSATNGHFIYSQTAHTELNGSVWDPATEGSQDFHGDEDFHFSYGQVTPRGQDQNEILDDMTSKWMVTEQVIPTASEPMRRVSSRCSSGSNKHRTIKASSRKSRPRLISTVSQGSHMSDFDLTSTQAMEGYLLQDDTQSVASSTMFYPTLPMGLPMDGLAVDGISYSPSLMASGLSHQHIDPAHMQLKFDPSVAGNSPSASWGSLSPESRLSSPGIPEDAWSGSIPMDASPAHTNNSSPVMDGTSPSLDRQMGMMTTEDPKGLMLADDMFSLPPSFTRRSSGDGESTARDHPLYKSATLHNDGLFHCPWEGDQNCNHKPEKLKCNYDKFVDSHLKPYRCKAEACENARFSSTACLLRHEREAHAMHGHGDKPYLCTYDGCERAITGNGFPRQWNLRDHMRRVHNDNGNSLSSQPGSSPTGHGSSAHSAKGRKRKNKDSVDSSSSSRKQAAKTAQAAEAAAAAARAAEQPLIDEWYQHHNALQTYLQLYSTPDAFSHVQDAGDAQVHMESMVKISKKLHSKKEAYRRSYSHHSG

SEQ ID NO: 15516 - DNA, 2813 bp, Muscodor strobelii
  misc_feature: SGI EST ID NO. CUFF.36820.2
  misc_feature: Variant of the nucleotide sequence at SEQ ID NO 15514
tccaagcccaactcgcctcttctatttctgcccaattatcgccatcatcgtacccgacggacgcctcacagtattgtcgacccaactcgccccattgttcttgctctcatctcataccttcaatacaattactgctacacaacaccaacgggtattactatatccaggctcacacatcgactatccgactagataccattgccctaggagaacaccagtcttgcacagtcgttgagaaccaggctcacgctgaatcatccgggacctgataccaatcagcttgctctgccacaggattccaggaaccggtctgcgttgcacgagattactcaatggccaccatgcttgctacccgttcagacaccatgtctgcgtacagttcactagatatggacgatgtccatacccccgcgagtgactacagttcatattcccaaggaaacttgctctcagctaccaatggacatttcatatattctcaaacagcacatactgaactcaacggttctgtatgggaccctgccacagaaggctcacaggacttccatggtgacgaggattttcatttttcatatggccaagttacacccagaggacaggaccagaatgaaattcttgatgacatgaccagcaaatggatggtcacagagcaggtgattcctaccgcctctgaacccatgcgacgggtcagttctcgatgctcatctggaagtaacaaacacagaaccatcaaagcgtcgtcacgcaagagccgccccagattaatctccaccgtctcacaaggttcacacatgtctgattttgacctcacgagcacccaggcaatggaaggatacctcctccaggatgatacccagtctgtagcgtcgtctactatgttttacccaacgctgcccatgggtttgccaatggatggactcgcggtggacggaatctcgtattccccatctctcatggcgtcaggcttgtcgcatcagcatattgatcctgctcatatgcagttgaaattcgaccctagcgtcgcaggtaattctcccagtgcctcatggggctcgctcagccctgagtcccgactttcttcacccggcattcccgaggacgcctggtccggatctatacccatggatgcatcaccagcacatactaataactcttctccagtcatggatggaacatcgcctagtcttgatcgtcaaatgggaatgatgaccactgaggacccaaagggactcatgctagcggatgacatgttctctcttcccccttctttcacacgtcgctccagcggagacggtgaatctactgctcgggatcacccactatataagagtgctactcttcacaatgatggtctgttccactgcccgtgggaaggcgatcagaattgcaaccacaagcccgagaaactcaagtgcaactatgacaaattcgttgactctcatctcaagccttatcgctgcaaggctgaggcatgcgagaatgctcgattctcttccaccgcctgcctgctccggcacgaacgtgaggctcatgccatgcatggtcacggtgacaagccctatctctgcacatatgatggatgtgagagagcaatcaccggaaatggatttccccgccagtggaaccttagagatcacatgcgtcgtgtgcataacgacaatggcaactcgcttagctcccaacctgggtcttcccctaccggccatggatcttctgcgcactcggccaagggccgcaagcgtaagaacaaagactctgttgattcaagttcaagtagtcgcaagcaggcggccaagactgctcaagcagctgaggctgccgccgccgctgctcgagctgccgaacagcccttgattgatgagtggtatcaacaccacaatgccttgcagacctatctgcagctttatagcaccccagacgctttttctcatgtccaggatgcgggcgatgcccaagtccacatggagtctatggtaaagatttcgaagaagctgcactcgaagaaagaagcatatcgacgatcctactctcaccattctggctgaatgagggccacatgtttttaattctaaggcccctcagcaagtttatttccaactttccagttgacccaaaggccgtggaactcttctggtgaccgatttgaaaatattgtttcgtcgggagtcaaagacgtacttcaaacctttcttgtctaaatcttcatgtctgagataagaggtgatgctatgggccagggttttctgtgtgaaagcaccatgcactcggagcaagctctcctgagtatgagcgcggtggcaaaggaactacagtctatgctgtagatgatctgagatctgagttgggcttgagtccagacgatatcccgatacgttccagactgcgaacaatcaagttgttggctgctcggcttacatctacctagcccaaaggaaataccagcgcctccatggcggctgtgatacggaggatttccccccttctgtggcgtccaggacgcgcgcaaggatggcggatattacacatttgagttgttgttcgatggaaccttggctgaggttgagacgctggcgcggcgttgattgcccgacgctccttcgcatggatcctttttgtctgtctacaggtctgcatgcaaatgcttgttacggtctttttgctatgaatgttctgtttgtaccgttgccttcaaagggcaactgacctaccttgtttatcttatccagttctagttttgaaattacaatctatattatcttcaagatagttgcgtcctacatggccttgtctaatctgtgcacgagtgcttacta

SEQ ID NO: 15517 - DNA, 1401 bp, Muscodor strobelii
  misc_feature: SGI cDNA ID NO. 565142
  misc_feature: Reduced expression when VOC is produced
  misc_feature: Encodes the peptide sequence at SEQ ID NO 15518
atggtctcctccttctaccccggcgagccagaggctcccgttgtcaagacagccattcccggccccaagtccaaggagcatctcgacaagctcaaccatgtcttcgacacccggagcaccaacatgcttgccgactacaccaagagccagggcaactacatcgtagaccccgatggcaacactctcctcgatgtctatgcccagattgcctccatccccatcggctacaacaacccggcgctgaagaaggtcgccgagagccccgagatggtctcggccatcatcaaccgcccagctctcggcaacttcccctcccacgactgggccgatgtcctcgagaccggcatcctcaaggttgctcccccgggcctgaaccaggtcttcactgccatggccggctccgacgccaacgagacggcctacaaggccgccttcatgtggcgccgccagaaggagcgtggcggccccagcgtcgagttcaccgaggccgagatggagtcggccatgaacaaccagagtcccggtgcctcggagctctctatcctgtccttcaagtctgccttccacggccgtcttttcggctctctctccaccacccgctccaagcccatccacaagctcgacatccctgccttcgactggccccaggccactttccccgtcatcaagtaccctctcgaggagcatgtcgaggagaacgccaaggccgaggccgatgcgctcgctgaggtcgagcacttgatccagaactaccatctcccacccgctgctgtcatggtcgagcccatccagtccgagggtggtgacaaccacgcttcccccgccttcttccgtggtctccgcgagatcaccaagaagcatggcgtattgttcatcgtcgacgaggtccagacaggtgtcggtgccacaggcaagttctgggctcacgagcactggaacttgcccagcccgcccgacatggtcaccttcagcaagaaggcccagaccgccggctactacttcggcgatgcctccctgcggcccaacaagccctaccgccagttcaacacctggatgggcgacccggcccgcgctctgctcttccgcgccatcatcgacgaggtccagcgtctcgggctcgtggagcacaccgccaaggtcggagactacctcttcggcaagcttgaggctttggccaagaagtatcccgaccagatccagaacctccgtggcaagggccaaggcacattcatcgccttcgacaatctcaagcgtgacgaattcctcgtcaaggccaagaagttcggtatcaacattggtggcagtggtgccagcgctgtacgcttacggcctatgttgatctttgagcagtctcatgccgacatattgctcgctgctatggagaagattatgtccagctag

SEQ ID NO: 15518 - protein, 466 aa, Muscodor strobelii
  misc_feature: SGI Peptide ID NO. 565142
  misc_feature (45)..(417): Pfam Id: PF00202 Pfam Desc: Aminotransferase class-III
  misc_feature (1)..(466): NCBI GI: 164423131 Blast Desc: 4-aminobutyrate aminotransferase [Neurospora crassa OR74A] gi|157069961|gb|EAA29790.2| 4-aminobutyrate aminotransferase [Neurospora crassa OR74A]
  misc_feature (4)..(463): NCBI GI: 256729872 Blast Desc: [Nectria haematococca mpVI 77-13-4]
  misc_feature (2)..(466): NCBI GI: 116207844 Blast Desc: CHGG_03215 [Chaetomium globosum CBS 148.51] gi|88183812|gb|EAQ91280.1| CHGG_03215 [Chaetomium globosum CBS 148.51]
  misc_feature (4)..(464): NCBI GI: 46122353 Blast Desc: FG05554.1 [Gibberella zeae PH-1]
  misc_feature (8)..(466): NCBI GI: 156051352 Blast Desc: SS1G_07083 [Sclerotinia sclerotiorum 1980] gi|154704861|gb|EDO04600.1| SS1G_07083 [Sclerotinia sclerotiorum 1980]
  misc_feature (5)..(466): NCBI GI: 39952039 Blast Desc: MGG_01662 [Magnaporthe grisea 70-15] gi|145020498|gb|EDK04627.1| MGG_01662 [Magnaporthe grisea 70-15]
  misc_feature (2)..(466): NCBI GI: 171686376 Blast Desc: protein product [Podospora anserina] gi|170943149|emb|CAP68802.1| protein product [Podospora anserina]
  misc_feature (5)..(464): NCBI GI: 121712784 Blast Desc: 4-aminobutyrate transaminase GatA [Aspergillus clavatus NRRL 1] gi|119402156|gb|EAW12577.1| 4-aminobutyrate transaminase GatA [Aspergillus clavatus NRRL 1]
  misc_feature (5)..(464): NCBI GI: 169777225 Blast Desc: [Aspergillus oryzae RIB40] gi|83771815|dbj|BAE61945.1| protein product [Aspergillus oryzae]
  misc_feature (5)..(464): NCBI GI: 115438092 Blast Desc: 4-aminobutyrate aminotransferase [Aspergillus terreus NIH2624] gi|114188792|gb|EAU30492.1| 4-aminobutyrate aminotransferase [Aspergillus terreus NIH2624]
  misc_feature (5)..(464): SWISSPROT Homolog: EC 2.6.1.19 4-aminobutyrate transaminase
  misc_feature: Useful for introducing or modulating the production of volatile compounds
MVSSFYPGEPEAPVVKTAIPGPKSKEHLDKLNHVFDTRSTNMLADYTKSQGNYIVDPDGNTLLDVYAQIASIPIGYNNPALKKVAESPEMVSAIINRPALGNFPSHDWADVLETGILKVAPPGLNQVFTAMAGSDANETAYKAAFMWRRQKERGGPSVEFTEAEMESAMNNQSPGASELSILSFKSAFHGRLFGSLSTTRSKPIHKLDIPAFDWPQATFPVIKYPLEEHVEENAKAEADALAEVEHLIQNYHLPPAAVMVEPIQSEGGDNHASPAFFRGLREITKKHGVLFIVDEVQTGVGATGKFWAHEHWNLPSPPDMVTFSKKAQTAGYYFGDASLRPNKPYRQFNTWMGDPARALLFRAIIDEVQRLGLVEHTAKVGDYLFGKLEALAKKYPDQIQNLRGKGQGTFIAFDNLKRDEFLVKAKKFGINIGGSGASAVRLRPMLIFEQSHADILLAAMEKIMSS

SEQ ID NO: 15519 - DNA, 2516 bp, Muscodor strobelii
  misc_feature: SGI EST ID NO. CUFF.37426.0
  misc_feature: Variant of the nucleotide sequence at SEQ ID NO 15517
gcaacggctacacgcagagcgaatctgcgaaccggcaagaggaggcgggaggttgaagcgctgacgtcgaaacagctagggatatagctaggggcgtggccaatggctggtggcgtagggatcccccgcattaagagacgccccatgctacatcggtgctatctggaggagcgaggatggcggatggataacaacggcgaatggtaggctagtgagctggaaaggatcgggtgctggtcttttggatacattagtgggatggattgaggtctacgacgttagcttgaagtacatgtcataaaaaactgcagcccgcctgcaacttccaaatcccgtcttccctcagtttctccttcccacgaaccaattgcccttagctagctgccactagccggaagacacaatctcctctggccccttccctcgactcgtggccttcgcgtcctcgtcctcacacctgtgaccagctttgtgcctcgtctataagatggcggctctccgtctcggaggcgctctgcgacctctctcctcttccgccgcccgcctaccaacacagtctcgtgccattgctcccacattttgcagaatggtctcctccttctaccccggcgagccagaggctcccgttgtcaagacagccattcccggccccaagtccaaggagcatctcgacaagctcaaccatgtcttcgacacccggagcaccaacatgcttgccgactacaccaagagccagggcaactacatcgtagaccccgatggcaacactctcctcgatgtctatgcccagattgcctccatccccatcggctacaacaacccggcgctgaagaaggtcgccgagagccccgagatggtctcggccatcatcaaccgcccagctctcggcaacttcccctcccacgactgggccgatgtcctcgagaccggcatcctcaaggttgctcccccgggcctgaaccaggtcttcactgccatggccggctccgacgccaacgagacggcctacaaggccgccttcatgtggcgccgccagaaggagcgtggcggccccagcgtcgagttcaccgaggccgagatggagtcggccatgaacaaccagagtcccggtgcctcggagctctctatcctgtccttcaagtctgccttccacggccgtcttttcggctctctctccaccacccgctccaagcccatccacaagctcgacatccctgccttcgactggccccaggccactttccccgtcatcaagtaccctctcgaggagcatgtcgaggagaacgccaaggccgaggccgatgcgctcgctgaggtcgagcacttgatccagaactaccatctcccacccgctgctgtcatggtcgagcccatccagtccgagggtggtgacaaccacgcttcccccgccttcttccgtggtctccgcgagatcaccaagaagcatggcgtattgttcatcgtcgacgaggtccagacaggtgtcggtgccacaggcaagttctgggctcacgagcactggaacttgcccagcccgcccgacatggtcaccttcagcaagaaggcccagaccgccggctactacttcggcgatgcctccctgcggcccaacaagccctaccgccagttcaacacctggatgggcgacccggcccgcgctctgctcttccgcgccatcatcgacgaggtccagcgtctcgggctcgtggagcacaccgccaaggtcggagactacctcttcggcaagcttgaggctttggccaagaagtatcccgaccagatccagaacctccgtggcaagggccaaggcacattcatcgccttcgacaatctcaagcgtgacgaattcctcgtcaaggccaagaagttcggtatcaacattggtggcagtggtgccagcgctgtacgcttacggcctatgttgatctttgagcagtctcatgccgacatattgctcgctgctatggagaagattatgtccagctagggggtaatgcgcattttaatttgattttcaagaggagtttatgagagagttgcatgttggtctgtgatatacctaattgcttgtgcgaaagttttgatttcaggagtagtttgggggccagaattcatggtgatgtggcatttgccgattgttaaatagcatttccaaatgaacaagtttgataatgatatccctcttaaagcgatatcctaaagaatgaaaaagaaactgcttatataagctttcactcagtcaggaatcttatgcctatatatagttccctgtcggtcagctttgctcgcgtattcgctgttattgattacaggttgcgctaccttgtatctactgacttgctacttcgccgcgttggcctgtaatccttattgcacatgtagcttgaaaagagtctcgacatcgagtcgaataaataatcgggcagcgacatatatgtacatacgtacgccctgtcacgtggcaaaccggtatctattcgagcatagaggaagtcaagatctgtagcgtctgttcc

SEQ ID NO: 15520 - DNA, 2724 bp, Muscodor strobelii
  misc_feature: SGI cDNA ID NO. 565143
  misc_feature: Reduced expression when VOC is produced
  misc_feature: Encodes the peptide sequence at SEQ ID NO 15521
atggaggacgacgaccagaagcatgacttggagcgcctaacccaaggcctgacggttgacaccgaggtcgcctcagcagaaaaatcagcctctgttaagaaggagggcgacagtactgcctcatcgcctaacgacagcaaagggtcacgctctcagagtttatcgcccgacgaccgcaaggcgcgcagcgacagtgcctcgactcctgacggtgcccacccacccaagctgtcacgtaaacccacgaagaaggcgacagcgcagccccccgctctttttgccgatttgcccgacgtgactgctgaatcctgcgaacatttccaagtgatacctgattgtctgtatggctccaaggcccttggcgctacagaccacgatgcgctggattgtgactgcaatgaggagtggcacgatggcacaaaccatgcatgcggagaagattcagattgtatcaatcgggcgacgaaagtagagtgtgttgacaaggactgcaattgcggagagggctgccagaaccagcggttccaacgaaggcaatacgcagacgtttcagtcatcaaaaccgagaagaaggggttcggcctccgcgcaaacacgcacctgcaggcacatgagttcattttcgagtacattggtgaagttgtcaacgagccaaccttccgccgacgatttctccagtacgacaaggaaggcatcaagcatttctactttatgtcccttaccaaaaatgagtttgtggacgctaccaagaaagggaacttgggacgcttctgcaatcactcatgcaaccccaattgctatgtggacaagtgggttgtcggcaacaagctgcgcatgggcatattcgcctcacgagttgtgcaaccaggggaggagctggtattcaactacaatgtcgacagatatggctcggatcccatgccctgctactgtggcgaacccaactgcattggtttcattggaggcaagacccaaacagagcgtgctaccaaacttcctgaatcaactattgaagctctcggaattgatgatggagacggctgggatactacggttgcaaagaagccacgcaagaagaagatcagcgaggatgacgaggactacgttaatagcgtggaggcccgcagccttgatgagaaaggagtcaccaaggtcatggcaacactcatgcagtgcaaagagaagtggattgctgtcaaactattacagcgcatccaggactgtgacgacgacagggtccggaaccgggttgttcagatgcacggttatacaattctcaagacggttctaaataccttcaacgaggactataatgtcgttctccagatcttagacattctctacaagtttccccgacttacgaagaacaagattgtcgactcaaagatcgaaacgacagtccaaacactgaccagttcggagcacgagaatgttgccgcagagtcgtcacgattactggatgaatggagtaaattggaggttgcctacagaattcccagaaaaaagctgggccccaatggacagggccaacagtccacgaaacccatcaattcatttgaggagcggcgtggtgctcgccctgaggagcctcccaagacactgacaagcttgcctactaataccccaaagggccctcgaagctctgtccctcaacgcaatccaaattttcaattgcatccaccacggcgcaaccggggtgcaccccccaatctgcctgccggatggttttctgccactgataaccgaggtagcttgtactactacaacaagacaggggtaacaacgtggcaaagaccaacggcgcctgcgccagatgttccagcccaaccccgagggccttccaaagcgcagcagaatatgaaggaactacaagatattatcgaggccgcatcgaaaccgggcgggataagtggcagcttgcctggaagatctgcatcccaaaccccacaaccaaccactacgccaacgcaagaaacaaagaaggataagtggcgttctctccccatcgacaaacagcagaaggtgtacgagaacacacttttcccgctcgttaatggcgttatgaacaaattcaagaacaaacttccgaaggaggagttgaaaaaattcgccaaggagatcagtaaaaagcttgtagcatcagactataagaacaaccgggttgatgatccgactaccatctccgaaaagaaagcaaagaaggtcaaagaccatgttagggaatatttcgagaaggcagtgcaaaagtatcaacaccacgagaagaagaaggcagcagaacatgccaccgggcaagaacaaactacttcacaaacgcaagagatattgaatggtcacgatactcctatggaagagacacccacgaatatggacagccaagatatcgtcatgactgatgatgaagatgccggtgtgaccccagggagtgcagaccttaaaagaaagcgcgaagatgtggttactgagtctcctggcttaacgccgtctcaaactccatccaccaagcgactcaaggagggcgacaacgatgatggctctagccctccgccaccgcctccgccaccaccgccagaggctgatcttatgagccagacacaagaagacgaagagcgacagaggctacgcgaagatgaggctgctctagaacgagagaatgcgctgaacatgctcgaggaccagaagaaccaaattactgctgaggccactactgtaatgagccattga

SEQ ID NO: 15521 - protein, 907 aa, Muscodor strobelii
  misc_feature: SGI Peptide ID NO. 565143
  misc_feature (175)..(304): Pfam Id: PF00856 Pfam Desc: SET domain
  misc_feature (571)..(599): Pfam Id: PF00397 Pfam Desc: WW domain
  misc_feature (54)..(893): NCBI GI: 116207846 Blast Desc: CHGG_03216 [Chaetomium globosum CBS 148.51] gi|121787978|sp|Q2H988.1|SET2_CHAGB RecName: Full=Histone-lysine N-methyltransferase, H3 lysine-36 specific; AltName: Full=SET 2
  misc_feature (21)..(894): NCBI GI: 85086731 Blast Desc: histone H3 lysine 36 (K36) methyltransferase [Neurospora crassa OR74A] gi|74614418|sp|Q7RZU4.1|SET2_NEUCR RecName: Full=Histone-lysine N-methyltransferase, H3 lysine-36 2
  misc_feature (32)..(845): NCBI GI: 171686378 Blast Desc: protein product [Podospora anserina] gi|170943150|emb|CAP68803.1| protein product [Podospora anserina]
  misc_feature (1)..(896): NCBI GI: 256729870 Blast Desc: NECHADRAFT_106311 [Nectria haematococca mpVI 77-13-4]
  misc_feature (30)..(893): NCBI GI: 46122361 Blast Desc: FG05558.1 [Gibberella zeae PH-1] gi|121814338|sp|Q4IB50.1|SET2_GIBZE RecName: Full=Histone-lysine N-methyltransferase, H3 lysine-36 specific; AltName: Full=SET 2
  misc_feature (55)..(887): NCBI GI: 261360204 Blast Desc: histone-lysine N-methyltransferase [Verticillium albo-atrum VaMs.102]
  misc_feature (57)..(758): NCBI GI: 156051364 Blast Desc: SS1G_07089 [Sclerotinia sclerotiorum 1980] gi|154704867|gb|EDO04606.1| SS1G_07089 [Sclerotinia sclerotiorum 1980]
  misc_feature (64)..(846): NCBI GI: 154292496 Blast Desc: BC1G_14887 [Botryotinia fuckeliana B05.10] gi|150846084|gb|EDN21277.1| BC1G_14887 [Botryotinia fuckeliana B05.10]
  misc_feature (28)..(830): NCBI GI: 225679434 Blast Desc: histone-lysine N-methyltransferase [Paracoccidioides brasiliensis Pb03]
  misc_feature (72)..(826): NCBI GI: 238503484 Blast Desc: SET and WW domain protein [Aspergillus flavus NRRL3357] gi|220690446|gb|EED46795.1| SET and WW domain protein [Aspergillus flavus NRRL3357]
  misc_feature (54)..(841): SWISSPROT Homolog: EC 2.1.1.43 Histone-lysine N-methyltransferase
  misc_feature: Useful for introducing or modulating the production of volatile compounds
MEDDDQKHDLERLTQGLTVDTEVASAEKSASVKKEGDSTASSPNDSKGSRSQSLSPDDRKARSDSASTPDGAHPPKLSRKPTKKATAQPPALFADLPDVTAESCEHFQVIPDCLYGSKALGATDHDALDCDCNEEWHDGTNHACGEDSDCINRATKVECVDKDCNCGEGCQNQRFQRRQYADVSVIKTEKKGFGLRANTHLQAHEFIFEYIGEVVNEPTFRRRFLQYDKEGIKHFYFMSLTKNEFVDATKKGNLGRFCNHSCNPNCYVDKWVVGNKLRMGIFASRVVQPGEELVFNYNVDRYGSDPMPCYCGEPNCIGFIGGKTQTERATKLPESTIEALGIDDGDGWDTTVAKKPRKKKISEDDEDYVNSVEARSLDEKGVTKVMATLMQCKEKWIAVKLLQRIQDCDDDRVRNRVVQMHGYTILKTVLNTFNEDYNVVLQILDILYKFPRLTKNKIVDSKIETTVQTLTSSEHENVAAESSRLLDEWSKLEVAYRIPRKKLGPNGQGQQSTKPINSFEERRGARPEEPPKTLTSLPTNTPKGPRSSVPQRNPNFQLHPPRRNRGAPPNLPAGWFSATDNRGSLYYYNKTGVTTWQRPTAPAPDVPAQPRGPSKAQQNMKELQDIIEAASKPGGISGSLPGRSASQTPQPTTTPTQETKKDKWRSLPIDKQQKVYENTLFPLVNGVMNKFKNKLPKEELKKFAKEISKKLVASDYKNNRVDDPTTISEKKAKKVKDHVREYFEKAVQKYQHHEKKKAAEHATGQEQTTSQTQEILNGHDTPMEETPTNMDSQDIVMTDDEDAGVTPGSADLKRKREDVVTESPGLTPSQTPSTKRLKEGDNDDGSSPPPPPPPPPPEADLMSQTQEDEERQRLREDEAALERENALNMLEDQKNQITAEATTVMSH

SEQ ID NO: 15522 - DNA, 4032 bp, Muscodor strobelii
  misc_feature: SGI EST ID NO. CUFF.37494.0
  misc_feature: Variant of the nucleotide sequence at SEQ ID NO 15520
gcgacaacgattgagattgggatcttgtgccgttctgctcattgacgacgatacgcgacgcaccactctctggcagcaaacaacaggccttcccaatcattcaatgcatggatagccctgcctcacacctctgttccctagcaattggcacgttcggcgtccatttgcgctgcgatgtcacaaacttcagccgccagatagccctcgcctttccaacgggcctctgttgtcactagctttagactttgcatctccagaccttcaaatctccagtcgccagcgccctctccttccacctgactctcctccctatcctcttcctcatctctgcgttatccttatcccctgctgccgaccggcaagctcgatgcccctgcaagtgtcttctctgcctctcacgctcttttttctctcccgcgtgaaccctattcccaaaacatcctcacgaggcaatctgtggcaacttgcgccaagccctgttcctctgcatctccaatctagtgactaatctgcacgcgtctcaattctgtcctggtggccctgcggcctccttttcagaccggcaatatggaggacgacgaccagaagcatgacttggagcgcctaacccaaggcctgacggttgacaccgaggtcgcctcagcagaaaaatcagcctctgttaagaaggagggcgacagtactgcctcatcgcctaacgacagcaaagggtcacgctctcagagtttatcgcccgacgaccgcaaggcgcgcagcgacagtgcctcgactcctgacggtgcccacccacccaagctgtcacgtaaacccacgaagaaggcgacagcgcagccccccgctctttttgccgatttgcccgacgtgactgctgaatcctgcgaacatttccaagtgatacctgattgtctgtatggctccaaggcccttggcgctacagaccacgatgcgctggattgtgactgcaatgaggagtggcgtaggtgtcccaatgatactatgaaccgagcgatcagcgcatgctaaccaacaactgcttcatagacgatggcacaaaccatgcatgcggagaagattcagattgtatcaatcgggcgacgaaagtagagtgtgttgacaaggactgcaattgcggagagggctgccagaaccagcggttccaacgaaggcaatacgcagacgtttcagtcatcaaaaccgagaagaaggggttcggcctccgcgcaaacacgcacctgcaggcacatgagttcattttcgagtacattggtgaagttgtcaacgagccaaccttccgccgacgatttctccagtacgacaaggaaggcatcaagcatttctactttatgtcccttaccaaaaatgagtttgtggacgctaccaagaaagggaacttgggacgcttctgcaatcactcatgcaaccccaattgctatgtggacaagtgggttgtcggcaacaagctgcgcatgggcatattcgcctcacgagttgtgcaaccaggggaggagctggtattcaactacaatgtcgacagatatggctcggatcccatgccctgctactgtggcgaacccaactgcattggtttcattggaggcaagacccaaacagagcgtgctaccaaacttcctgaatcaactattgaagctctcggaattgatgatggagacggctgggatactacggttgcaaagaagccacgcaagaagaagatcagcgaggatgacgaggactacgttaatagcgtggaggcccgcagccttgatgagaaaggagtcaccaaggtcatggcaacactcatgcagtgcaaagagaagtggattgctgtcaaactattacagcgcatccaggactgtgacgacgacagggtccggaaccgggttgttcagatgcacggttatacaattctcaagacggttctaaataccttcaacgaggactataatgtcgttctccagatcttagacattctctacaagtttccccgacttacgaagaacaagattgtcgactcaaagatcgaaacgacagtccaaacactgaccagttcggagcacgagaatgttgccgcagagtcgtcacgattactggatgaatggagtaaattggaggttgcctacagaattcccagaaaaaagctgggccccaatggacagggccaacagtccacgaaacccatcaattcatttgaggagcggcgtggtgctcgccctgaggagcctcccaagacactgacaagcttgcctactaataccccaaagggccctcgaagctctgtccctcaacgcaatccaaattttcaattgcatccaccacggcgcaaccggggtgcaccccccaatctgcctgccggatggttttctgccactgataaccgaggtagcttgtactactacaacaagacaggggtaacaacgtggcaaagaccaacggcgcctgcgccagatgttccagcccaaccccgagggccttccaaagcgcagcagaatatgaaggaactacaagatattatcgaggccgcatcgaaaccgggcgggataagtggcagcttgcctggaagatctgcatcccaaaccccacaaccaaccactacgccaacgcaagaaacaaagaaggataagtggcgttctctccccatcgacaaacagcagaaggtgtacgagaacacacttttcccgctcgttaatggcgttatgaacaaattcaagaacaaacttccgaaggaggagttgaaaaaattcgccaaggagatcagtaaaaagcttgtagcatcagactataagaacaaccgggttgatgatccgactaccatctccgaaaagaaagcaaagaaggtcaaagaccatgttagggaatatttcgagaaggcagtgcaaaagtatcaacaccacgagaagaagaaggcagcagaacatgccaccgggcaagaacaaactacttcacaaacgcaagagatattgaatggtcacgatactcctatggaagagacacccacgaatatggacagccaagatatcgtcatgactgatgatgaagatgccggtgtgaccccagggagtgcagaccttaaaagaaagcgcgaagatgtggttactgagtctcctggcttaacgccgtctcaaactccatccaccaagcgactcaaggagggcgacaacgatgatggctctagccctccgccaccgcctccgccaccaccgccagaggctgatcttatgagccagacacaagaagacgaagagcgacagaggctacgcgaagatgaggctgctctagaacgagagaatgcgctgaacatgctcgaggaccagaagaaccaaattactgctgaggccactactgtaatgagccattgatcaagacacaagatggtccaccatctcagtgggccttgaccctatctaccctcaccttttatatctctgatcgtgtcactatctgacactatctgacacaagtgcatgcattttcatggttggacacaaattctcaagagattcccaatcccatatcccttcggcgttcggaggctcacaatgtctaccgtgtgggtttgccacactgaaggccagtacatatctacaaccagagggtgcattatgcacagggcggtacaaaaagcaccatcgtatgccaatttactttatactcgactaatatgacaagcgtatgtgcatttgagatcaggaaagagagaaagggagaggggatggcggcgggagaggactgggcattgtcctcacacgaaagattctcaccagcttcggtagcagactcggcaagcacaagtgctgggtgaggagaggtagagagtgggcgggagcatttgtgtataagtaaatattgtgtgtactgcctcgataggacaatgcgtttgagatacccccatgccgggtgatttgcaatcttgtcttccttgggcgcacatatatgctttgttatgtctataaatataagatcgaggttatacccaatgcttacagtgtgttctttctcagctcgaaatgcatgcgaaatgcgtatgaatccgac

SEQ ID NO: 15523 - DNA, 963 bp, Muscodor strobelii
  misc_feature: SGI cDNA ID NO. 565144
  misc_feature: Encodes the peptide sequence at SEQ ID NO 15524
atggacacaacgttctccgaggacgaaaagcgtttcgtcctaggcgaaatgatcaaagtcagcacaatcgacgtctcgacattagtggacttcatccggcttaacaatgtgaatcccaactggatgtcgatgcagctaccaggtgggcgcaatatgcgcgacacgatcggggcagtcgacaatatgtttcatgctaaattcccgccaccaaatgtgggtgagttcggcaagcgcaaatcgctgaacgacattattgaacatcccccgaagagacacgctaccatggcgcctatggagccttcactacctccagcacgcatcattcagccgcggcctccgcccagaggatttacaccgacggcgcctacgactactcatctacctacgccagtaaccggaaagaagcgtgggcgtccatccaaggccgataaagaagcgcaggcgcaagctcgcgctgtatatgcgcgaacgaccgaatacacgcccatcacacctgctccgcctcctgcagcagttcaaccccagcgtgaatacgcttcctctccgggctacgaaatagcaagtagcgtgaccgatcagaactcgaaaaagcgccccagaccaggcggaatcgacagccccgtgcaaggaaatacatcttttcctgtgattgcatcggcctcgacttcaggcacccctcgagctctcccggagccatcggatccaatggaaagggcgaacacgtctcctccgagtcgtggctctgttccactagacttacgttcgcctccgctggcttcgttgcttcaaccacatgatcaaacacaacaacaatcccatattcttccacgcccgcaatcccattccttgccaattcagccactgccaaaaccacaggtctacgatcctatttttccggatcgagaccggagtcgaagcatgcccgatcacgcgattagagaagctacggccaatcagagttga

SEQ ID NO: 15524 - protein, 320 aa, Muscodor strobelii
  misc_feature: SGI Peptide ID NO. 565144
  misc_feature (1)..(147): NCBI GI: 164428979 Blast Desc: NCU00268 [Neurospora crassa OR74A] gi|157072361|gb|EAA28503.2| NCU00268 [Neurospora crassa OR74A]
  misc_feature (39)..(155): NCBI GI: 39952033 Blast Desc: [Magnaporthe grisea 70-15] gi|145020500|gb|EDK04629.1| [Magnaporthe grisea 70-15]
  misc_feature (1)..(219): NCBI GI: 156051356 Blast Desc: [Sclerotinia sclerotiorum 1980] gi|154704863|gb|EDO04602.1| [Sclerotinia sclerotiorum 1980]
  misc_feature (1)..(257): NCBI GI: 261360201 Blast Desc: conserved [Verticillium albo-atrum VaMs.102]
  misc_feature (1)..(217): NCBI GI: 154292500 Blast Desc: [Botryotinia fuckeliana B05.10] gi|150846086|gb|EDN21279.1| [Botryotinia fuckeliana B05.10]
  misc_feature (1)..(52): NCBI GI: 171686380 Blast Desc: protein product [Podospora anserina] gi|170943151|emb|CAP68804.1| protein product [Podospora anserina]
  misc_feature (5)..(163): NCBI GI: 189195896 Blast Desc: conserved [Pyrenophora tritici-repentis Pt-1C-BFP] gi|187980165|gb|EDU46791.1| conserved [Pyrenophora tritici-repentis Pt-1C-BFP]
  misc_feature (2)..(160): NCBI GI: 119182356 Blast Desc: [Coccidioides immitis RS]
  misc_feature (2)..(204): NCBI GI: 240109248 Blast Desc: CPC735_027530 [Coccidioides posadasii C735 delta SOWgp]
  misc_feature (5)..(204): NCBI GI: 258571700 Blast Desc: [Uncinocarpus reesii 1704] gi|237904923|gb|EEP79324.1| [Uncinocarpus reesii 1704]
MDTTFSEDEKRFVLGEMIKVSTIDVSTLVDFIRLNNVNPNWMSMQLPGGRNMRDTIGAVDNMFHAKFPPPNVGEFGKRKSLNDIIEHPPKRHATMAPMEPSLPPARIIQPRPPPRGFTPTAPTTTHLPTPVTGKKRGRPSKADKEAQAQARAVYARTTEYTPITPAPPPAAVQPQREYASSPGYEIASSVTDQNSKKRPRPGGIDSPVQGNTSFPVIASASTSGTPRALPEPSDPMERANTSPPSRGSVPLDLRSPPLASLLQPHDQTQQQSHILPRPQSHSLPIQPLPKPQVYDPIFPDRDRSRSMPDHAIREATANQS

SEQ ID NO: 15525 - DNA, 3166 bp, Muscodor strobelii
  misc_feature: SGI EST ID NO. CUFF.36811.1
  misc_feature: Variant of the nucleotide sequence at SEQ ID NO 15523
cggacttgcagccttttgtcctatgcttctacgacgctttctcgtgagtggcgtacgcgcagcaaatcactgtgtcttagatcataccagtcggttttagagctgaacccgaaaagactgatcccagaatccggggttgccagaactgtacccttgttgagaggggatgcataaccaaatatgaacccaaccacctccatacgacctctcctctcacattgaaccgagactagtttggtctgtcttgctgttctgctttccaaacttggaactgccagaaggtgtcattgcctcacgataccgacaacctggttcctgtccagggttctgtcgattatatctgtcttctcttaacgaggcgcagatatcctcacacaagcacccatgcctacatacaccagatatatacatcaacttgaccagatcgcgagctagctagtacatatacatgttcagctacatgttcgtctgcctgtgtcattcacatctacgctgtgttggagaacacgggtagttttacagtcatttgttattgcaagggttgtggtgatttctgctcaaaggatctaacctaggcttaagctccaatttctcggcagcactgtcccatcgccctgatcctcgccctgatcccgtccacctttacaattttattgctccaggttagcagctattaccaataaccactactccagcttgggaggccaacaccaagcagagaccaaaatctccctcacctacccagcttgggtattaataacatggtgtcggcgcgctatctatccttgtagacacaccacaaccctgcgggagccaggctgcccgttaaccttgccttgcagctccgtcgctaccattggtaccgtccgtgcctggccttgcgcgaccctctttgcccgctctattgcactcgttctttacccgctgtttgtgctactcgtatggaccagttacaagttgaagagacaccttcgctttgcttacagtctcttctcaccgaagacgcgcgccaataacctaccaggtgtcttgcgtacgtctttttgattcccagcatagctacgtgaccacattcctttgcctgcactgtcttttaaggatatcagcaaaatcgcatattgtgtgttgctaccctcggtctcctttgccctgctcctccgcatggggggctctcctgcgcctccggatagacgaacaggcgcctaggacaacctgatcattgtcactcagcctccttttggtgaagagttgcctcttggaatatcgaatgccacctttaagtattacagatgactcgctcgagaccgtactgccgctgaagaagtccatctctgcttgactcgacgcctttcaactcaagccccgcgagtcccgccagaggagtaaacatggacacaacgttctccgaggacgaaaagcgtttcgtcctaggcgaaatgatcaaagtcagcacaatcgacgtctcgacattagtggacttcatccggcttaacaatgtgaatcccaactggatgtcgatgcagctaccaggtgggcgcaatatgcgcgacacgatcggggcagtcgacaatatgtttcatgctaaattcccgccaccaaatgtgggtgagttcggcaagcgcaaatcgctgaacgacattattgaacatcccccgaagagacacgctaccatggcgcctatggagccttcactacctccagcacgcatcattcagccgcggcctccgcccagaggatttacaccgacggcgcctacgactactcatctacctacgccagtaaccggaaagaagcgtgggcgtccatccaaggccgataaagaagcgcaggcgcaagctcgcgctgtatatgcgcgaacgaccgaatacacgcccatcacacctgctccgcctcctgcagcagttcaaccccagcgtgaatacgcttcctctccgggctacgaaatagcaagtagcgtgaccgatcagaactcgaaaaagcgccccagaccaggcggaatcgacagccccgtgcaaggaaatacatcttttcctgtgattgcatcggcctcgacttcaggcacccctcgagctctcccggagccatcggatccaatggaaagggcgaacacgtctcctccgagtcgtggctctgttccactagacttacgttcgcctccgctggcttcgttgcttcaaccacatgatcaaacacaacaacaatcccatattcttccacgcccgcaatcccattccttgccaattcagccactgccaaaaccacaggtctacgatcctatttttccggatcgagaccggagtcgaagcatgcccgatcacgcgattagagaagctacggccaatcagagttgaaagcaatgccgatttttggtacttaaatggcataactcagaccggtagcctttgataaacagtccagggtatcacgttctatcgagccgtagatggcgcgaaacagctttccgacagtcgcttggtttgttagttgagtttgatttacatactcaatgacggctcatgatgatttcggctgtatcccgacgacataccaacgttgtttactcgacgacttttgcaagactacacgatttcctttgtgataatcacaattcaccagttctgaccatcaggcacgactgtacgatgcgacttgatcatatattttttcacaggcgtctaataaatggacagacagatcggatgtctagagagttcgaacgttgtggcgtacatttgctctcttttcccctggaaatttcattcaaacttaaacgaagataagtaggcagatttcgtgttgccgaaattgtttgtatactaggggctgtaaactggcgttttgaatggtgggcggtggccaaatgcacggtaaatatgattcaagtatctgtgtacgaagtatggatcgtttcaaaaagttgacaggggagtgtttggagtaaacatgtgagggaagagattacaatgcataagatggactgagcttatgttttgcaggctcatgtcaaatctatcttgaggaaattggtccaacactggtggctttgtatcaaatgtgctaagagcgagcatgcaaagttttgatagacatatgataaagagcgtcacagtgaaataccacctaagtggttatccagttacaacactcgaatatatttcgttttccg

SEQ ID NO: 15526 - DNA, 957 bp, Muscodor strobelii
  misc_feature: SGI cDNA ID NO. 565145
  misc_feature: Reduced expression when VOC is produced
  misc_feature: Encodes the peptide sequence at SEQ ID NO 15527
atggggaagaagcgcaagctgggtgctgccactcaccacccgcccgcgaagcgaggcaaacacaccaatgctactcctcgccccaaactaccagcgagtccccaaagaccaaaaaagaaacacaccaaaccaatcccccccaccgaaccgaccatcccctttgctcccgaagacaagattcttatacttggcgacggcgatttgagcttcggtgcatcgctcgtcgggcaccattattgtgccgacgtgactgccaccgtgcttgaaaaggaccccgaggagctgctcgagaaatacccccaagccgcagagaatatcgcaaagatcgaggccgaggatggctgtcgtgtcatgttcggcgtggacgcgactaagatggcacctttcaccaacaaggctcatcggaagaaggacgagagcacccctccctctcaaggtaccggtaatgcgcccagcgcagctggcatcgtcgaccgcatcatcttcaacttcccgcacgttggcggcaagagcacagacgtaaatcgacaagtacgctacaaccaagagctcctggtctcctttttccagcgcgccaacccatcacttgcccccggcggcaccatcattgtcactctctttgagggcgatccgtatactctgtggaacgttcgcgaccttgcaaggcatagtggcttgcaggtcgtgcgaagcttccggtttcaagcctcagcatatccaggctatcaccacgcaaggacgttgggtgtggtgcgaacccgcaacggcgagatcggaggcggatggaaaggcgaggataggcctgccagaagctacattttcatgcgcaaaggtgacgaggcaccgtcaatgcctgcgaatgtgagcaagaagcgcaagacgagagaggcaagcgattcatctgatgatgatgatgaatgtatctggcagctgaatattgatgaagtgtcatgttga

SEQ ID NO: 15527 - protein, 318 aa, Muscodor strobelii
  misc_feature: SGI Peptide ID NO. 565145
  misc_feature (39)..(293): NCBI GI: 85089562 Blast Desc: NCU09008 [Neurospora crassa OR74A] gi|28919310|gb|EAA28770.1| [Neurospora crassa OR74A]
  misc_feature (51)..(306): NCBI GI: 145613411 Blast Desc: MGG_11170 [Magnaporthe grisea 70-15] gi|145020488|gb|EDK04617.1| MGG_11170 [Magnaporthe grisea 70-15]
  misc_feature (20)..(276): NCBI GI: 116207826 Blast Desc: CHGG_03206 [Chaetomium globosum CBS 148.51] gi|88183803|gb|EAQ91271.1| CHGG_03206 [Chaetomium globosum CBS 148.51]
  misc_feature (1)..(305): NCBI GI: 46122363 Blast Desc: FG05559.1 [Gibberella zeae PH-1]
  misc_feature (1)..(292): NCBI GI: 156052122 Blast Desc: SS1G_07469 [Sclerotinia sclerotiorum 1980] gi|154705246|gb|EDO04985.1| SS1G_07469 [Sclerotinia sclerotiorum 1980]
  misc_feature (1)..(279): NCBI GI: 154312898 Blast Desc: BC1G_05150 [Botryotinia fuckeliana B05.10] gi|150849852|gb|EDN25045.1| BC1G_05150 [Botryotinia fuckeliana B05.10]
  misc_feature (14)..(279): NCBI GI: 171686290 Blast Desc: protein product [Podospora anserina] gi|170943106|emb|CAP68759.1| protein product [Podospora anserina]
  misc_feature (50)..(300): NCBI GI: 261360205 Blast Desc: conserved [Verticillium albo-atrum VaMs.102]
  misc_feature (116)..(305): NCBI GI: 256729683 Blast Desc: NECHADRAFT_71056 [Nectria haematococca mpVI 77-13-4]
  misc_feature (2)..(278): NCBI GI: 212536062 Blast Desc: conserved [Penicillium marneffei ATCC 18224] gi|210070586|gb|EEA24676.1| conserved [Penicillium marneffei ATCC 18224]
  misc_feature: Useful for introducing or modulating the production of volatile compounds
MGKKRKLGAATHHPPAKRGKHTNATPRPKLPASPQRPKKKHTKPIPPTEPTIPFAPEDKILILGDGDLSFGASLVGHHYCADVTATVLEKDPEELLEKYPQAAENIAKIEAEDGCRVMFGVDATKMAPFTNKAHRKKDESTPPSQGTGNAPSAAGIVDRIIFNFPHVGGKSTDVNRQVRYNQELLVSFFQRANPSLAPGGTIIVTLFEGDPYTLWNVRDLARHSGLQVVRSFRFQASAYPGYHHARTLGVVRTRNGEIGGGWKGEDRPARSYIFMRKGDEAPSMPANVSKKRKTREASDSSDDDDECIWQLNIDEVSC

SEQ ID NO: 15528 - DNA, 1673 bp, Muscodor strobelii
  misc_feature: SGI EST ID NO. CUFF.36848.1
  misc_feature: Variant of the nucleotide sequence at SEQ ID NO 15526
cctcgatatcgtgtctatcaatcgactatgtccacatagccagcttctcctcctcaacccgaaccatggggaagaagcgcaagctgggtgctgccactcaccacccgcccgcgaagcgaggcaaacacaccaatgctactcctcgccccaaactaccagcgagtccccaaagaccaaaaaagaaacacaccaaaccaatcccccccaccgaaccgaccatcccctttgctcccgaagacaagattcttatacttggcgacggcgatttgagcttcggtgcatcgctcgtcgggcaccattattgtgccgacgtgactgccaccgtgcttgaaaaggaccccgaggagctgctcgagaaatacccccaagccgcagagaatatcgcaaagatcgaggccgaggatggctgtcgtgtcatgttcggcgtggacgcgactaagatggcacctttcaccaacaaggctcatcggaagaaggacgagagcacccctccctctcaaggtaccggtaatgcgcccagcgcagctggcatcgtcgaccgcatcatcttcaacttcccgcacgttggcggcaagagcacagacgtaaatcgacaagtacgctacaaccaagagctcctggtctcctttttccagcgcgccaacccatcacttgcccccggcggcaccatcattgtcactctctttgagggcgatccgtatactctgtggaacgttcgcgaccttgcaaggcatagtggcttgcaggtcgtgcgaagcttccggtttcaagcctcagcatatccaggctatcaccacgcaaggacgttgggtgtggtgcgaacccgcaacggcgagatcggaggcggatggaaaggcgaggataggcctgccagaagctacattttcatgcgcaaaggtgacgaggcaccgtcaatgcctgcgaatgtgagcaagaagcgcaagacgagagaggcaagcgattcatctgatgatgatgatgagtgagtggctcggcgtgccacagatacggactcgcgaaatactctaagctacgtttactcaaatgttcccagcagatgtatctggcagctgaatattgatgaagtgtcatgttgacttagtcgggcctagaacacgtagccacacccacgtcgtgcttgtccttgacgggcttcttcaaacatccgtaccattaacaagtctcgaagtgaagaattcatgaaccaggccactcgccttacgcaggcgtgtgtattgttaggctgagatcgatatcgcatatatcactcaaggttgtccttcttgcaataggatcccacccacgatcctaatacagacgatgaatgagaggagatcctaaccgttgtagatcagtgctttgtctcttctaatccggatcgtccggctcatcttcggaggcatgctgtgacaagccagcgtcttgggttccactcgtattttaaaggtctacttgtctagcaatacgagataaaatgaatagcattgctgaattacagtgattcacgtgatgaactaaatcgtgtatagttttcctattctcattcaagtcggtatttgagcttgattttgaatacttttgaaactatgtatgcgatcatgaatcagaaactagtgtttagtggaaaggattgttagttatgcacataaatgagtgtatcatttgttgcctat

SEQ ID NO: 15529 - DNA, 2970 bp, Muscodor strobelii
  misc_feature: SGI cDNA ID NO. 565146
  misc_feature: Encodes the peptide sequence at SEQ ID NO 15530
atggctcgcaagaacggcgtcccctcaactagaggcggcggcggacccagaggccgtggccgcaataagagattcgaagatacacgaactcaggctgcccatgatcgccaacacatgttacgcgacctattctctgaggtggccagtgctgtgaagcccgctctggaacaccttgccgactccaatatcaaaatcatgagcgacaatccggaggcccacagagaggttcatgagtacgaggaaattcagcgccaacttgaccaaagacgtgatgaagctatgcgccgggcggatcgtgagttcattacccgcactacaatcgctactcgcgaatatcaactcaacacccaagtcaccgagaaaaaattccttgattcttacgattgtacaaccgaggactatttggatgcatctagaaggcgcgcaagtctactagccgaacttcgtaatgaaggtgtcggtattgatatccctgacacaactttcacatacgcgcaaaggcccaatagcgtaattcaagagcagggtgtccatgtcgtctttcgcaacggcgtcaaagtgccttatcctaatctccaggaagagatcaagaacgctgccgctgccaaagctcaaattggcaaggttaaaccatccatcaaacgcaaagctgaagatcagcctgatggtctgccagaccccaagaagtctaccacacgttctggactattgagacaggatgaggaagacgtctctactccgcaaccacgacatattaaaggccttctttctgcagagatcgatccagatatggaaccagagtccaatgctgcatcgccctctccagaatcagatcccaggtttgaggtgggacgaggcaagaaggaccttccagacctacccaatggcgcatccgaacccgatcgatggggtgtaaggacagtcaacagaagaggcccaaaggccaataatcgtttgatcttaccgccgttcatgttcgacgacgaagacattgggttccgtgattccaccaatgactcaactcgtaaagcaacacgcggaacacggggcaggttcctcaatagtgccaattcacgcaatcttcatattgatcgcacgataacgacgtacgactgccttgaacacggagatgatgctttggattccgcacttatcctcaaacatcgcctacaccctaagtatggcctctttctgcccgattcgattaacgagcctgaatcacccaggattcccgtctcaggctcaaatccagttgtagtcatcacgcctgatggctctacccttcatgcatctcgatcagtccgaggctacaatatggacgctgccctgaaacaggatacgaggaaggacaacgtcgactatttgctgaaagctttttgtgatgacgaagagatcgcgcctgaggaaatcgctactgccgagatacttgaacgcaatcggaaacgccaagctctacgccgttcaccttcgatccacgaaactgcagacgaggggtctgcgggcgagcagagtagtatgcaggatgtagatcagaccgaaatcgctcgaggagctatctatgctttgctgaatgctgctgagcatctggaatcggaacgacctgtgcgagcccaatcaagccaaagggcttccagaccttatgatgccgttcgagatgtgtttaccagtacagacccagtgcctccgcctgcattcccaattatggaaattgatacaaagaacctctcctgtctcgcagatatagccgaggcgttttcccagtatgatgaaccacaagttgacccacgtttgagtcaacagtatctcggtcgtggctatggcaaccatcatcctgatcaccaccatcatcatcatcctagttatcatcatgaacaccgagaaaaccgacccgatcgtcaggccgaacctcaaatcggtcaccaatatgagtaccgatccatctatcctcttgaaagccgcgtggaccaacaagcagagcatcgatatgaacccaccgagactcgtcctatgggcgactcaatgatcgatccacgacttcttggtcattcaaatcaggctcctgcccctcagcatttcttacatacaactctaatcgctacgcccgcgctcgcaaatattgcaccagcaccagctcaagcacaggaattatcaccacgaaactcaataagtaagaatcctttcacagcccatactggtaataaaggaagccccgttctccctccgctgcgtccttcgcgacgtgataaggcgatagagcccttgcacccatcggcattgcctcatatacagcaacattcggaatttggtccttctatgagcatgatgcagtcgaatgccggcaatttctacccacctgctccttctcggtcgtaccaccaaggacattcaaccgctgagccgagccatatggctctggcccctcaacaaccaatgccaggttcggttgccgaccctgcgttgtctcagttcccaggtcatctacctccgccaggacaatcataccaacccccatcccccacactatcccaccacgctcagcagctcgcgagccatataccacaggggtcatccgtttctccacctggatctgtcatgggacccaactcacccaccggccatccaggcagtcgccacagagcctccatttcatcagggagtaacggaccaaactcgcggaaataccgcagcatcgcagctgcgcctattcctcacaatcgcccttggccaggaagcaatggcaccgaacttcgtcttgcccattatgatcataaggaggcgatcaaagactattcagccaatgaaccgccgccgcggacgggcccaaccatgattcggggctggaccaatgttaacaatgtttctaagggtaagaagggcttgaaaaaggaagactctgaagagaaagactcgcccagtaatatcacaccctatatcaacaagtggaacccatcagatagaaatatgggatag

SEQ ID NO: 15530 - protein, 989 aa, Muscodor strobelii
  misc_feature: SGI Peptide ID NO. 565146
  misc_feature (18)..(956): NCBI GI: 85091710 Blast Desc: NCU09007 [Neurospora crassa OR74A] gi|28920431|gb|EAA29799.1| [Neurospora crassa OR74A]
  misc_feature (2)..(955): NCBI GI: 116207828 Blast Desc: CHGG_03207 [Chaetomium globosum CBS 148.51] gi|88183804|gb|EAQ91272.1| CHGG_03207 [Chaetomium globosum CBS 148.51]
  misc_feature (175)..(958): NCBI GI: 171686286 Blast Desc: protein product [Podospora anserina] gi|170943104|emb|CAP68757.1| protein product [Podospora anserina]
  misc_feature (28)..(485): NCBI GI: 145613413 Blast Desc: MGG_01672 [Magnaporthe grisea 70-15] gi|145020489|gb|EDK04618.1| MGG_01672 [Magnaporthe grisea 70-15]
  misc_feature (23)..(582): NCBI GI: 46122365 Blast Desc: FG05560.1 [Gibberella zeae PH-1]
  misc_feature (23)..(591): NCBI GI: 256729869 Blast Desc: NECHADRAFT_46547 [Nectria haematococca mpVI 77-13-4]
  misc_feature (158)..(584): NCBI GI: 261360206 Blast Desc: [Verticillium albo-atrum VaMs.102]
  misc_feature (668)..(969): NCBI GI: 145613413 Blast Desc: MGG_01672 [Magnaporthe grisea 70-15] gi|145020489|gb|EDK04618.1| MGG_01672 [Magnaporthe grisea 70-15]
  misc_feature (762)..(955): NCBI GI: 256729869 Blast Desc: NECHADRAFT_46547 [Nectria haematococca mpVI 77-13-4]
  misc_feature (15)..(127): NCBI GI: 171686288 Blast Desc: protein product [Podospora anserina] gi|170943105|emb|CAP68758.1| protein product [Podospora anserina]
MARKNGVPSTRGGGGPRGRGRNKRFEDTRTQAAHDRQHMLRDLFSEVASAVKPALEHLADSNIKIMSDNPEAHREVHEYEEIQRQLDQRRDEAMRRADREFITRTTIATREYQLNTQVTEKKFLDSYDCTTEDYLDASRRRASLLAELRNEGVGIDIPDTTFTYAQRPNSVIQEQGVHVVFRNGVKVPYPNLQEEIKNAAAAKAQIGKVKPSIKRKAEDQPDGLPDPKKSTTRSGLLRQDEEDVSTPQPRHIKGLLSAEIDPDMEPESNAASPSPESDPRFEVGRGKKDLPDLPNGASEPDRWGVRTVNRRGPKANNRLILPPFMFDDEDIGFRDSTNDSTRKATRGTRGRFLNSANSRNLHIDRTITTYDCLEHGDDALDSALILKHRLHPKYGLFLPDSINEPESPRIPVSGSNPVVVITPDGSTLHASRSVRGYNMDAALKQDTRKDNVDYLLKAFCDDEEIAPEEIATAEILERNRKRQALRRSPSIHETADEGSAGEQSSMQDVDQTEIARGAIYALLNAAEHLESERPVRAQSSQRASRPYDAVRDVFTSTDPVPPPAFPIMEIDTKNLSCLADIAEAFSQYDEPQVDPRLSQQYLGRGYGNHHPDHHHHHHPSYHHEHRENRPDRQAEPQIGHQYEYRSIYPLESRVDQQAEHRYEPTETRPMGDSMIDPRLLGHSNQAPAPQHFLHTTLIATPALANIAPAPAQAQELSPRNSISKNPFTAHTGNKGSPVLPPLRPSRRDKAIEPLHPSALPHIQQHSEFGPSMSMMQSNAGNFYPPAPSRSYHQGHSTAEPSHMALAPQQPMPGSVADPALSQFPGHLPPPGQSYQPPSPTLSHHAQQLASHIPQGSSVSPPGSVMGPNSPTGHPGSRHRASISSGSNGPNSRKYRSIAAAPIPHNRPWPGSNGTELRLAHYDHKEAIKDYSANEPPPRTGPTMIRGWTNVNNVSKGKKGLKKEDSEEKDSPSNITPYINKWNPSDRNMG

SEQ ID NO: 15531 - DNA, 4439 bp, Muscodor strobelii
  misc_feature: SGI EST ID NO. CUFF.36817.0
  misc_feature: Variant of the nucleotide sequence at SEQ ID NO 15529
tgaaaatcccatggcgatatctcatccgtcccttttgtaagagcaggatagattcagtccacgtcgacggtgtcttcggctttctgctattgttttgtgcccgtttctgcttccttatgttaatagcgcactggtgctgcaatcctagtcagtgcattcattgcccagcgccataacacactttttccgagtcttcatctcgcaccttctcacttttcttctcccaacacaaccacttccaaccaacaacacctgtgcacactcgcacttcaattctttaacttgaatcctctcttttctttaccttcgccgtaccaggaaaagtttgataatactcattcggcctcgccctatcaatttcacgctcacaagcaaccctgcgcgtgtacctgtaacacacttctttcacttcgcaccttcagttacgccctaccatcaatctactcccccatttctcttacaaccctcaatatatgcaggccctcgtggcataatttcgaaaacatgaacagttttcaaatcgctggttctccagcacccagccctgcaagaggcagaggcagaggtaggggtggcatgcgaggcaggggcggtatcgccagaaagatggctcgcaagaacggcgtcccctcaactagaggcggcggcggacccagaggccgtggccgcaataagagattcgaagatacacgaactcaggctgcccatgatcgccaacacatgttacgcgacctattctctgaggtggccagtgctgtgaagcccgctctggaacaccttgccgactccaatatcaaaatcatgagcgacaatccggaggcccacagagaggttcatgagtacgaggaaattcagcgccaacttgaccaaagacgtgatgaagctatgcgccgggcggatcgtgagttcattacccgcactacaatcgctactcgcgaatatcaactcaacacccaagtcaccgagaaaaaattccttgattcttacgattgtacaaccgaggactatttggatgcatctagaaggcgcgcaagtctactagccgaacttcgtaatgaaggtgtcggtattgatatccctgacacaactttcacatacgcgcaaaggcccaatagcgtaattcaagagcagggtgtccatgtcgtctttcgcaacggcgtcaaagtgccttatcctaatctccaggaagagatcaagaacgctgccgctgccaaagctcaaattggcaaggttaaaccatccatcaaacgcaaagctgaagatcagcctgatggtctgccagaccccaagaagtctaccacacgttctggactattgagacaggatgaggaagacgtctctactccgcaaccacgacatattaaaggccttctttctgcagagatcgatccagatatggaaccagagtccaatgctgcatcgccctctccagaatcagatcccaggtttgaggtgggacgaggcaagaaggaccttccagacctacccaatggcgcatccgaacccgatcgatggggtgtaaggacagtcaacagaagaggcccaaaggccaataatcgtttgatcttaccgccgttcatgttcgacgacgaagacattgggttccgtgattccaccaatgactcaactcgtaaagcaacacgcggaacacggggcaggttcctcaatagtgccaattcacgcaatcttcatattgatcgcacgataacgacgtacgactgccttgaacacggagatgatgctttggattccgcacttatcctcaaacatcgcctacaccctaagtatggcctctttctgcccgattcgattaacgagcctgaatcacccaggattcccgtctcaggctcaaatccagttgtagtcatcacgcctgatggctctacccttcatgcatctcgatcagtccgaggctacaatatggacgctgccctgaaacaggatacgaggaaggacaacgtcgactatttgctgaaagctttttgtgatgacgaagagatcgcgcctgaggaaatcgctactgccgagatacttgaacgcaatcggaaacgccaagctctacgccgttcaccttcgatccacgaaactgcagacgaggggtctgcgggcgagcagagtagtatgcaggatgtagatcagaccgaaatcgctcgaggagctatctatgctttgctgaatgctgctgagcatctggaatcggaacgacctgtgcgagcccaatcaagccaaagggcttccagaccttatgatgccgttcgagatgtgtttaccagtacagacccagtgcctccgcctgcattcccaattatggaaattgatacaaagaacctctcctgtctcgcagatatagccgaggcgttttcccagtatgatgaaccacaagttgacccacgtttgagtcaacagtatctcggtcgtggctatggcaaccatcatcctgatcaccaccatcatcatcatcctagttatcatcatgaacaccgagaaaaccgacccgatcgtcaggccgaacctcaaatcggtcaccaatatgagtaccgatccatctatcctcttgaaagccgcgtggaccaacaagcagagcatcgatatgaacccaccgagactcgtcctatgggcgactcaatgatcgatccacgacttcttggtcattcaaatcaggctcctgcccctcagcatttcttacatacaactctaatcgctacgcccgcgctcgcaaatattgcaccagcaccagctcaagcacaggaattatcaccacgaaactcaataagtaagaatcctttcacagcccatactggtaataaaggaagccccgttctccctccgctgcgtccttcgcgacgtgataaggcgatagagcccttgcacccatcggcattgcctcatatacagcaacattcggaatttggtccttctatgagcatgatgcagtcgaatgccggcaatttctacccacctgctccttctcggtcgtaccaccaaggacattcaaccgctgagccgagccatatggctctggcccctcaacaaccaatgccaggttcggttgccgaccctgcgttgtctcagttcccaggtcatctacctccgccaggacaatcataccaacccccatcccccacactatcccaccacgctcagcagctcgcgagccatataccacaggggtcatccgtttctccacctggatctgtcatgggacccaactcacccaccggccatccaggcagtcgccacagagcctccatttcatcagggagtaacggaccaaactcgcggaaataccgcagcatcgcagctgcgcctattcctcacaatcgcccttggccaggaagcaatggcaccgaacttcgtcttgcccattatgatcataaggaggcgatcaaagactattcagccaatgaaccgccgccgcggacgggcccaaccatgattcggggctggaccaatgttaacaatgtttctaagggtaagaagggcttgaaaaaggaagactctgaagagaaagactcgcccagtaatatcacaccctatatcaacaagtggaacccatcagatagaaatatgggatagtcacaccatattgcacttttctacgacatctacgaccttggaagcttctcttcctagctgcaccacaagactttcgctgtatcttgtcacatgatgcccctccgattgcgattttgatatttgactatataagtcgatgaatacctctttattagcgcttggaagcgtgcaaaggttcttgcccggtgtcgaccggaggctttatgatataccaggaaatagacattgcattttatggggagttgatgtcataaaatcatacataatacaccatcaccatcgccaagagagaaacgaacaacgtcgaactggttgccagttccaacatcagtggaatagatagcagcgtcggtactgcaatcatcagtcattatgtctcttttgcctagttcgacaacatatgatctctcactctaagttgcttcaatcctgagctcaaggtactctccgtcactgcaaagcgagacaattgatatcaagctgggagccggttccaacgtcatagtcagaccgagaatgcggatagtggtattggtcctactgtcaatcgccattctgttttttagcccagtttgtcagcctcgcatgactagatggttgcgctcaaatacgaaggaattgttcagactaccttgtaagatggtagataaattagctcctatggcactactgtctttcgaccatgagtggaaaagatgatatatatgttcaacagtatcacacccactgcacgtactgtacatcaccagctatatacgacaggagggtcgaaggcacatgcatttcgaaaatcaaggaataaaacactatgagtcaaagataaatatatatatggggtaaatgattcattgaactttccgcca

SEQ ID NO: 15532 - DNA, 1461 bp, Muscodor strobelii
  misc_feature: SGI cDNA ID NO. 565147
  misc_feature: Encodes the peptide sequence at SEQ ID NO 15533
atggaaacagatgcctctgcaggtgaccagcaagatcaacctcatgttcaaccacagatgtcggccccttcagtaactggcgccaacgacatcgcccaagcgggtgtaacaccgttcaacccgactgtgccatcacttgagcagttcgatagttcagcactcttgagcgagagcggccctttcaactcggtagatcaggtcagcaatggagaccagtcgatgctcttgcccagcatgatggtatcctcagttccaaatgccgtcggctccaacctcccacagggaatgaatggccaagctatgagcgcagatgagatcgctctctacgatcgtcagattcggctctggggcatgcaggcgcaacaaaagatacaagccgccaatgtccttctcataacaatgcgggcactcggaaacgagattgccaagaatctcgttctagctggaattggttctctgacaattctcgatgatcagatcgtgacacctgcggacttaggcgcgcaattcttccttacggaagataacgtcgggcaaaatcgggcggaagcagccgctggtcagatccagaaactgaacccacgcgtcaagatccttcctgccaacaccaccgtaccaatggtcccggatttttacgagggctttgatattgttattgctactgacttggatgcaaacgcgctgaatctcatcaacacggcaacgcgacttagaaatcgacaattctatgcggctggtgtgcacggtctctacggatacatattctgtgacctcatcgagcatgagtacgtcttaaaacgagacaagggaaacaaacttaccactattggtcccgagtctcgttttcgcagcgtcgtcgaagcaagcacgcaaaaggagggcaacaaggccgtcgaatctgtgaagaaaagggacctgtactcgacttgggaccttgcacgagacagcaaactgcccgaagaatacaacaagtcaaagcgccgtctcaaggccgtcacaccagctctcacatgtctgcgagccctctggtctttccaggcagctcatggtcgaggaccaggcaacagcagacaagacctcgaaactttcacaaaacttgccacggaaaaccaccaggccctttccctgcccactgagactttgcgctcggacttccttcgtagcttcctacagaacatcggcagcgagattgcgcctgtcacggcgattctcggcggacagctggcacaagatgtcatcaacgtgcttggacagagccaacagccgattcagaacaccgtcatcttcgatggcgagaggatggaggctaatcagtatcctcttcaccccccagatggccttggtcggcaactattccagtctattgctcctgttgaccctacggtgttcaatcagatggacccttcacagttcaatctcgccgatcccgcgtctgctctgatgccaccacccaatctgtaa

SEQ ID NO: 15533 - protein, 486 aa, Muscodor strobelii
  misc_feature: SGI Peptide ID NO. 565147
  misc_feature (125)..(258): Pfam Id: PF00899 Pfam Desc: ThiF family
  misc_feature (136)..(258): Pfam Id: PF00899 Pfam Desc: ThiF family
  misc_feature (96)..(457): NCBI GI: 261360207 Blast Desc: DNA damage tolerance protein rad31 [Verticillium albo-atrum VaMs.102]
  misc_feature (74)..(452): NCBI GI: 256729682 Blast Desc: NECHADRAFT_46968 [Nectria haematococca mpVI 77-13-4]
  misc_feature (101)..(486): NCBI GI: 39952053 Blast Desc: MGG_01669 [Magnaporthe grisea 70-15] gi|145020492|gb|EDK04621.1| MGG_01669 [Magnaporthe grisea 70-15]
  misc_feature (6)..(452): NCBI GI: 46122367 Blast Desc: FG05561.1 [Gibberella zeae PH-1]
  misc_feature (96)..(436): NCBI GI: 154312896 Blast Desc: BC1G_05149 [Botryotinia fuckeliana B05.10] gi|150849851|gb|EDN25044.1| BC1G_05149 [Botryotinia fuckeliana B05.10]
  misc_feature (74)..(436): NCBI GI: 156052124 Blast Desc: SS1G_07470 [Sclerotinia sclerotiorum 1980] gi|154705247|gb|EDO04986.1| SS1G_07470 [Sclerotinia sclerotiorum 1980]
  misc_feature (103)..(452): NCBI GI: 85091708 Blast Desc: NCU09006 [Neurospora crassa OR74A] gi|28920430|gb|EAA29798.1| NCU09006 [Neurospora crassa OR74A]
  misc_feature (93)..(452): NCBI GI: 171686358 Blast Desc: protein product [Podospora anserina] gi|170943140|emb|CAP68793.1| protein product [Podospora anserina]
  misc_feature (98)..(458): NCBI GI: 116207830 Blast Desc: CHGG_03208 [Chaetomium globosum CBS 148.51] gi|88183805|gb|EAQ91273.1| CHGG_03208 [Chaetomium globosum CBS 148.51]
  misc_feature (103)..(445): NCBI GI: 189190464 Blast Desc: NEDD8-activating enzyme E1 regulatory subunit [Pyrenophora tritici-repentis Pt-1C-BFP] gi|187973177|gb|EDU40676.1| NEDD8-activating enzyme E1 regulatory
METDASAGDQQDQPHVQPQMSAPSVTGANDIAQAGVTPFNPTVPSLEQFDSSALLSESGPFNSVDQVSNGDQSMLLPSMMVSSVPNAVGSNLPQGMNGQAMSADEIALYDRQIRLWGMQAQQKIQAANVLLITMRALGNEIAKNLVLAGIGSLTILDDQIVTPADLGAQFFLTEDNVGQNRAEAAAGQIQKLNPRVKILPANTTVPMVPDFYEGFDIVIATDLDANALNLINTATRLRNRQFYAAGVHGLYGYIFCDLIEHEYVLKRDKGNKLTTIGPESRFRSVVEASTQKEGNKAVESVKKRDLYSTWDLARDSKLPEEYNKSKRRLKAVTPALTCLRALWSFQAAHGRGPGNSRQDLETFTKLATENHQALSLPTETLRSDFLRSFLQNIGSEIAPVTAILGGQLAQDVINVLGQSQQPIQNTVIFDGERMEANQYPLHPPDGLGRQLFQSIAPVDPTVFNQMDPSQFNLADPASALMPPPNL

SEQ ID NO: 15534 - DNA, 2002 bp, Muscodor strobelii
  misc_feature: SGI EST ID NO. CUFF.36824.0
  misc_feature: Variant of the nucleotide sequence at SEQ ID NO 15532
ctggtattaccttaggtcgctacccaaaacagatagaggtttgctctaaagctacagcctcactcattccgcgagtgacaacttctcatcttgccaacatcaacaacacttaaactcgacgtccctagtgactggccattcaccgacatctcattcgtaattacattatctattatctacctctcatcctgctgcgactgtgaccagagcggagccgttacacttgccccttctcaactaaactcgtggtagcatggtcctcacaaacgggttaacaccaccagcctcatagttgtcgaacttcgatcgcgacgttccctccagtctagatacctggatctatgcaattctggtaactcacaacattcaacatcttcgctatggaaacagatgcctctgcaggtgaccagcaagatcaacctcatgttcaaccacagatgtcggccccttcagtaactggcgccaacgacatcgcccaagcgggtgtaacaccgttcaacccgactgtgccatcacttgagcagttcgatagttcagcactcttgagcgagagcggccctttcaactcggtagatcaggtcagcaatggagaccagtcgatgctcttgcccagcatgatggtatcctcagttccaaatgccgtcggctccaacctcccacagggaatgaatggccaagctatgagcgcagatgagatcgctctctacgatcgtcagattcggctctggggcatgcaggcgcaacaaaagatacaagccgccaatgtccttctcataacaatgcgggcactcggaaacgagattgccaagaatctcgttctagctggaattggttctctgacaattctcgatgatcagatcgtgacacctgcggacttaggcgcgcaattcttccttacggaagataacgtcgggcaaaatcgggcggaagcagccgctggtcagatccagaaactgaacccacgcgtcaagatccttcctgccaacaccaccgtaccaatggtcccggatttttacgagggctttgatattgttattgctactgacttggatgcaaacgcgctgaatctcatcaacacggcaacgcgacttagaaatcgacaattctatgcggctggtgtgcacggtctctacggatacatattctgtgacctcatcgagcatgagtacgtcttaaaacgagacaagggaaacaaacttaccactattggtcccgagtctcgttttcgcagcgtcgtcgaagcaagcacgcaaaaggagggcaacaaggccgtcgaatctgtgaagaaaagggacctgtactcgacttgggaccttgcacgagacagcaaactgcccgaagaatacaacaagtcaaagcgccgtctcaaggccgtcacaccagctctcacatgtctgcgagccctctggtctttccaggcagctcatggtcgaggaccaggcaacagcagacaagacctcgaaactttcacaaaacttgccacggaaaaccaccaggccctttccctgcccactgagactttgcgctcggacttccttcgtagcttcctacagaacatcggcagcgagattgcgcctgtcacggcgattctcggcggacagctggcacaagatgtcatcaacgtgcttggacagagccaacagccgattcagaacaccgtcatcttcgatggcgagaggatggaggctaatcagtatcctcttcaccccccagatggccttggtcggcaactattccagtctattgctcctgttgaccctacggtgttcaatcagatggacccttcacagttcaatctcgccgatcccgcgtctgctctgatgccaccacccaatctgtaaaataccaatccttgtctagagggcacctacttcgtcgctctctttgccctctactgtgttgatagatacgtgcatctgatggctgggttcgagaaaattggcggaggcaaaactgtacagtagataacagtcaataaagcacgcgctgaacatatcccatg

SEQ ID NO: 15535 - DNA, 1731 bp, Muscodor strobelii
  misc_feature: SGI cDNA ID NO. 565148
  misc_feature: Encodes the peptide sequence at SEQ ID NO 15536
atgtccggcaatcgctccgacagttcctcgttaccagacatctatcgcactgccgatggaatcatccagtccatcctagacaacaacgctacgcctgccgagattagcccctcgggcgagttgctgcgtgctatagagcgcttccattcgctccgccctccatctactgccccgtcaagcagtccgagacgagaattgattagaaaccaccttcatcgctggaccgcccgcaacgcagcccgaaccaccatgtccgatgagaacctaggcatagagcagcgttctaattctagaaactcccgctcctccaatactcccgctccgactctcccgtctctccgcactctacataaccgccatcttcctccaatcaatgggccagttcccgtggcccgaacacatcaaacagaccgagcctcgggcagatctcatgacatggatccttggggagccggcgaggatgccattgattcgtgggatcgtgatttcaacgcagaagagagtcgcgatacccacgacgtgcgacggttcgggctcacgcctatcgggcattctcggtctcctttgaacgattctgcgtcagatcgtcctgaaatagacttactcagctttgctcataccccaccacatcacttgacggatctcttctctccaggctcacaggaacccgaagagagccggcggaaacggcgcaaagtagactcagacagactctgtccacattttcagggctttaactacgggaagtttggtcaagttgagccaggacaactgcgaatggagctggtcagttgtgatggcggtatttacttggataacaaaaccctcagttcaacctcatatgctgccgagaacatcctaaagaacgacaagagtgtgtactgtactgaggattcgaggtgcaatattgtgttgagacaccaaggtgctacagttttcactttgaaagaattaactatcaaagctccaaaatgtaactttgattctcctcacagagtccaggcaggcatggtattcgtgtcgatgacctacgatcatctcttgaaccgaacagcacagtatcaaattcaatatgcaccacccagaagctcatctcgatctttggaacgcgaggcacacccggtggtgtctataagacacaacgaagatggcactacaatgacaaccggccaagttcgagcgagaagattgtataacatcggtatggacgacgaggataatgaagtgggaatcgcgcaaattccttctgaattcaacacttcccaacctcatttccaggtcaccaatgagcgtagtgatgacgaggaagatggaacgaatgatgtcagagggggacgtacaaatcacaaccacatctcggagagtgatagtagtgacgacactcttaacgattactccatgggtcctgcaacccatcgactgcggcggaggcgccgccgaaccaatgtcgcaaacgttgccctgtcggaggcggcagaggcagctcaattcgccacacaggaggctgtacgagctgtcggaggtgagctcatgaagccttgcgctcgatttcatattgaacacaacaagagcaaatgcactatacaattcgaccctccagtttcaggtcgattcatcttgttaaagatgtggaatccacgccgacacgcgaacgagaacattgacattcaagcggtgatcgcgaaaggctacgccgggccacggttctgcccttcggtcgagcttcgatga

SEQ ID NO: 15536 - protein, 576 aa, Muscodor strobelii
  misc_feature: SGI Peptide ID NO. 565148
  misc_feature (16)..(575): NCBI GI: 145613417 Blast Desc: MGG_01670 [Magnaporthe grisea 70-15] gi|145020491|gb|EDK04620.1| MGG_01670 [Magnaporthe grisea 70-15]
  misc_feature (209)..(576): NCBI GI: 261360208 Blast Desc: conserved [Verticillium albo-atrum VaMs.102]
  misc_feature (2)..(575): NCBI GI: 156052126 Blast Desc: SS1G_07471 [Sclerotinia sclerotiorum 1980] gi|154705248|gb|EDO04987.1| SS1G_07471 [Sclerotinia sclerotiorum 1980]
  misc_feature (223)..(576): NCBI GI: 256729868 Blast Desc: NECHADRAFT_95505 [Nectria haematococca mpVI 77-13-4]
  misc_feature (211)..(576): NCBI GI: 46122369 Blast Desc: FG05562.1 [Gibberella zeae PH-1]
  misc_feature (227)..(575): NCBI GI: 154312892 Blast Desc: BC1G_05147 [Botryotinia fuckeliana B05.10] gi|150849849|gb|EDN25042.1| BC1G_05147 [Botryotinia fuckeliana B05.10]
  misc_feature (195)..(575): NCBI GI: 171686360 Blast Desc: protein product [Podospora anserina] gi|170943141|emb|CAP68794.1| protein product [Podospora anserina]
  misc_feature (227)..(575): NCBI GI: 116207832 Blast Desc: CHGG_03209 [Chaetomium globosum CBS 148.51] gi|88183806|gb|EAQ91274.1| CHGG_03209 [Chaetomium globosum CBS 148.51]
  misc_feature (206)..(576): NCBI GI: 164423135 Blast Desc: NCU09005 [Neurospora crassa OR74A] gi|157069962|gb|EAA29797.2| [Neurospora crassa OR74A]
  misc_feature (217)..(576): NCBI GI: 242793772 Blast Desc: conserved [Talaromyces stipitatus ATCC 10500] gi|218718823|gb|EED18243.1| conserved [Talaromyces stipitatus ATCC 10500]
MSGNRSDSSSLPDIYRTADGIIQSILDNNATPAEISPSGELLRAIERFHSLRPPSTAPSSSPRRELIRNHLHRWTARNAARTTMSDENLGIEQRSNSRNSRSSNTPAPTLPSLRTLHNRHLPPINGPVPVARTHQTDRASGRSHDMDPWGAGEDAIDSWDRDFNAEESRDTHDVRRFGLTPIGHSRSPLNDSASDRPEIDLLSFAHTPPHHLTDLFSPGSQEPEESRRKRRKVDSDRLCPHFQGFNYGKFGQVEPGQLRMELVSCDGGIYLDNKTLSSTSYAAENILKNDKSVYCTEDSRCNIVLRHQGATVFTLKELTIKAPKCNFDSPHRVQAGMVFVSMTYDHLLNRTAQYQIQYAPPRSSSRSLEREAHPVVSIRHNEDGTTMTTGQVRARRLYNIGMDDEDNEVGIAQIPSEFNTSQPHFQVTNERSDDEEDGTNDVRGGRTNHNHISESDSSDDTLNDYSMGPATHRLRRRRRRTNVANVALSEAAEAAQFATQEAVRAVGGELMKPCARFHIEHNKSKCTIQFDPPVSGRFILLKMWNPRRHANENIDIQAVIAKGYAGPRFCPSVELR

SEQ ID NO: 15537 - DNA, 2808 bp, Muscodor strobelii
  misc_feature: SGI EST ID NO. CUFF.36869.0
  misc_feature: Variant of the nucleotide sequence at SEQ ID NO 15535
ctccttcccaaagattcatcatgacttccgtgagcaccgttctatgagctgttcttctaccactgcgtgtgccttggtcctcacgagggaaattcatattatgggctgtaagtgcctgcagaagagctaaataacgggagcgggtccatcgcatcggacagtcggcagcacgaacccctccccaggttttaatgcccaccttattcttcaccttgcagtccgttgttccaggtacgagggcagacagcaggaccggtaggataggcagcattgagtaggtacagatacttcctgcgtctgtcccatactaagcctcatctcattccagtcctgatatttaacctcacctcctcgctccggcctcgtcacaagcaagtaaaccccattcgaaacccatcccttcctcaagaacattgattgacctttgctcactctacccacttactcaccctcctcacatctaccattgtctacacacgtgcatgaacatccaacttctgtacatgacacaccttgcccatctgcccatctatatacagctgtacgcggaagccctagtgaacagggcaagcagctttaacacagtccttgtcaactgcgcaatcttttgccgtcatccgcttctccatgtccggcaatcgctccgacagttcctcgttaccagacatctatcgcactgccgatggaatcatccagtccatcctagacaacaacgctacgcctgccgagattagcccctcgggcgagttgctgcgtgctatagagcgcttccattcgctccgccctccatctactgccccgtcaagcagtccgagacgagaattgattagaaaccaccttcatcgctggaccgcccgcaacgcagcccgaaccaccatgtccgatgagaacctaggcatagagcagcgttctaattctagaaactcccgctcctccaatactcccgctccgactctcccgtctctccgcactctacataaccgccatcttcctccaatcaatgggccagttcccgtggcccgaacacatcaaacagaccgagcctcgggcagatctcatgacatggatccttggggagccggcgaggatgccattgattcgtgggatcgtgatttcaacgcagaagagagtcgcgatacccacgacgtgcgacggttcgggctcacgcctatcgggcattctcggtctcctttgaacgattctgcgtcagatcgtcctgaaatagacttactcagctttgctcataccccaccacatcacttgacggatctcttctctccaggctcacaggaacccgaagagagccggcggaaacggcgcaaagtagactcagacagactctgtccacattttcagggctttaactacgggaagtttggtcaagttgagccaggacaactgcgaatggagctggtcagttgtgatggcggtatttacttggataacaaaaccctcagttcaacctcatatgctgccgagaacatcctaaagaacgacaagagtgtgtactgtactgaggattcgaggtgcaatattgtgttgagacaccaaggtgctacagttttcactttgaaagaattaactatcaaagctccaaaatgtaactttgattctccagtccaggcaggcatggtattcgtgtcgatgacctacgatcatctcttgaaccgaacagcacagtatcaaattcaatatgcaccacccagaagctcatctcgatctttggaacgcgaggcacacccggtggtgtctataagacacaacgaagatggcactacaatgacaaccggccaagttcgagcgagaagattgtataacatcggtatggacgacgaggataatgaagtgggaatcgcgcaaattccttctgaattcaacacttcccaacctcatttccaggtcaccaatgagcgtagtgatgacgaggaagatggaacgaatgatgtcagagggggacgtacaaatcacaaccacatctcggagagtgatagtagtgacgacactcttaacgattactccatgggtcctgcaacccatcgactgcggcggaggcgccgccgaaccaatgtcgcaaacgttgccctgtcggaggcggcagaggcagctcaattcgccacacaggaggctgtacgagctgtcggaggtgagctcatgaagccttgcgctcgatttcatattgaacacaacaagagcaaatgcactatacaattcgaccctccagtttcaggtcgattcatcttgttaaagatgtggaatccacgccgacacgcgaacgagaacattgacattcaagcggtgatcgcgaaaggctacgccgggccacggttctgcccttcggtcgagcttcgatgatgctattgctctgatctactgagttcctgggttgacggttcaaatggagtgcgatgacggatggtcatactaatatatgggtttgggaagtcatattacagcgccagcaacacatgtaaaccttgagacttcaagctcggatgggtcgcactctctactgactgccacaagacgtgtgtaaaaaaaaaggtcgatatgggaagcaattgctgtcacagtagtgtggaaagctttgtagactaccttgtctgagatgcgtattcggatcgaaggccgtgggcgagcattatttgcggcagtgtcggtgattgttaaagaagaggacgcggacaacatgcgaaaagctgagatgatcctcggaatgataagagaatagtgagaatcgagacagagtgacatattgctcgtgcgtatgaataggtacggacgcatttgtcttgtgatatgctcttcttt

SEQ ID NO: 15538 - DNA, 741 bp, Muscodor strobelii
  misc_feature: SGI cDNA ID NO. 565149
  misc_feature: Elevated expression when VOC is produced
  misc_feature: Encodes the peptide sequence at SEQ ID NO 15539
atggccgttcgcgcccagttcgagaattctaacgaagtcggtgttttcgcgacgctcacaaactcctacgctctgactgctattggcgccagcgaaaatttctacagtgttttcgaagcagagttacaagatgtcatccctatttgccgtaccacaatcgcaggaacccgcatcatcggccgactgacagctggaaaccgcaaaggtctattagtgcccaccaccacaacagatcaggagctgcagcatcttcgtaactccttacccgacgagatccggatccagcgaatcgaggagcggttatcagcactgggcaacgttatcgttacaaacgaccacatcgcgctggtccatcccgacctggaacgagaaacagaggagatcattgcagacgtgctcggtgttgaggttttccgccagaccgtcgcagacaacgtactcgtgggtagctacatgtccttgagcaataggggcggtctcgttcaccccaagaccagtattcaggatcaagatgagttatcgtcattgctacaagtaccgctcgtcgctggtagtgtaaatcgtggcagcaacgtagtgggtgcgggcatggtcgtcaacgattggatggccgtcacgggtcttgatactactgcgaccgaactgagcgtcattgagagtgtattccggctgggcgagggtgcagctccaggaaacatcaataccaatctcaagagtacgatggtcgagtcgttctactaa

SEQ ID NO: 15539 - protein, 246 aa, Muscodor strobelii
  misc_feature: SGI Peptide ID NO. 565149
  misc_feature (3)..(204): Pfam Id: PF01912 Pfam Desc: eIF-6 family
  misc_feature (1)..(246): NCBI GI: 145613415 Blast Desc: conserved [Magnaporthe grisea 70-15] gi|145020490|gb|EDK04619.1| conserved [Magnaporthe grisea 70-15]
  misc_feature (1)..(246): NCBI GI: 85091704 Blast Desc: eukaryotic translation initiation factor 6 [Neurospora crassa OR74A] gi|28920428|gb|EAA29796.1| eukaryotic translation initiation factor 6 [Neurospora crassa OR74A]
  misc_feature (1)..(246): NCBI GI: 46122101 Blast Desc: FG05428.1 [Gibberella zeae PH-1]
  misc_feature (1)..(246): NCBI GI: 116207834 Blast Desc: eukaryotic translation initiation factor 6 [Chaetomium globosum CBS 148.51] gi|88183807|gb|EAQ91275.1| eukaryotic translation initiation factor 6 [Chaetomium globosum CBS 148.51]
  misc_feature (1)..(246): NCBI GI: 171686362 Blast Desc: protein product [Podospora anserina] gi|170943142|emb|CAP68795.1| protein product [Podospora anserina]
  misc_feature (1)..(246): NCBI GI: 256729934 Blast Desc: [Nectria haematococca mpVI 77-13-4]
  misc_feature (1)..(246): NCBI GI: 156051318 Blast Desc: conserved [Sclerotinia sclerotiorum 1980] gi|154704844|gb|EDO04583.1| conserved [Sclerotinia sclerotiorum 1980]
  misc_feature (1)..(246): NCBI GI: 189195052 Blast Desc: eukaryotic translation initiation factor 6 [Pyrenophora tritici-repentis Pt-1C-BFP] gi|187979743|gb|EDU46369.1| eukaryotic translation initiation 6
  misc_feature (1)..(246): NCBI GI: 169597123 Blast Desc: SNOG_01343 [Phaeosphaeria nodorum SN15] gi|111069872|gb|EAT90992.1| SNOG_01343 [Phaeosphaeria nodorum SN15]
  misc_feature (1)..(246): NCBI GI: 258571706 Blast Desc: translation initiation factor eIF-6 [Uncinocarpus reesii 1704] gi|237904926|gb|EEP79327.1| translation initiation factor eIF-6 [Uncinocarpus reesii 1704]
  misc_feature: Useful for introducing or modulating the production of volatile compounds
MAVRAQFENSNEVGVFATLTNSYALTAIGASENFYSVFEAELQDVIPICRTTIAGTRIIGRLTAGNRKGLLVPTTTTDQELQHLRNSLPDEIRIQRIEERLSALGNVIVTNDHIALVHPDLERETEEIIADVLGVEVFRQTVADNVLVGSYMSLSNRGGLVHPKTSIQDQDELSSLLQVPLVAGSVNRGSNVVGAGMVVNDWMAVTGLDTTATELSVIESVFRLGEGAAPGNINTNLKSTMVESFY

SEQ ID NO: 15540 - DNA, 1335 bp, Muscodor strobelii
  misc_feature: SGI EST ID NO. CUFF.36829.0
  misc_feature: Variant of the nucleotide sequence at SEQ ID NO 15538
gtggaagttctctttagtttctgtagtcgcacttgattaattgaatacctaaggtgctgcacctgccgtcccagaaaggtctttagaagtcgcaagcgtcgagcaacttctccgtccacataacgtgaaccatcccaccttaagtataccaagcaaactctgtgcaagccaaccagcagacataaagctactttatattcttcgtcaacgcttccaccattctactcacatcagcacccgagaatcagatccccgacagcatcatggccgttcgcgcccagttcgagaattctaacgaagtcggtgttttcgcgacgctcacaaactcctacgctctgactgctattggcgccagcgaaaatttctacagtgttttcgaagcagagttacaagatgtcatccctatttgccgtaccacaatcgcaggaacccgcatcatcggccgactgacagctggaaaccgcaaaggtctattagtgcccaccaccacaacagatcaggagctgcagcatcttcgtaactccttacccgacgagatccggatccagcgaatcgaggagcggttatcagcactgggcaacgttatcgttacaaacgaccacatcgcgctggtccatcccgacctggaacgagaaacagaggagatcattgcagacgtgctcggtgttgaggttttccgccagaccgtcgcagacaacgtactcgtgggtagctacatgtccttgagcaataggggcggtctcgttcaccccaagaccagtattcaggatcaagatgagttatcgtcattgctacaagtaccgctcgtcgctggtagtgtaaatcgtggcagcaacgtagtgggtgcgggcatggtcgtcaacgattggatggccgtcacgggtcttgatactactgcgaccgaactgagcgtcattgagagtgtattccggctgggcgagggtgcagctccaggaaacatcaataccaatctcaagagtacgatggtcgagtcgttctactaagcatcagactaggcttttagagaggcttcatcaagcattcagtgctctccattcacgatgtgtttcagacctgtgaccgtgacgagatcaattaatagttcagtgttcggttaggagacgatctctaaaataaccaagcctttcgaaaaggtcaacatacttgtataagttgggacatacggattaaacggcattacttggcttctcatcttgtgtggtactgaagagacatcctacaacgctgagatgactaagatacaatttgaacgtatggagcaaatatagctggatgtcatgtagtgccgttcttcatgaagaccgcctatcacct

SEQ ID NO: 15541 - DNA, 1404 bp, Muscodor strobelii
  misc_feature: SGI cDNA ID NO. 565150
  misc_feature: Encodes the peptide sequence at SEQ ID NO 15542
atgctaaagggtgtaccaccgtcacctttggggctggcaccaccaatagagaccgaccgtattgagggaacatatctaagacagactggagcagatgtgaagacacctgtatacgaatcatttgagacagcatcaccagcatcaccaagtcgcccgccccgggactaccgaacacagatttctccggattattcgcaacacaggcgacagctttcaaccccgaatctcaaagacaaacgtaccagcggcatcgtcctctcaccaacacgtgcgcatgtcaggcatcaatctcaagatatggcgctaacaggtgacgggcgtgaaagatcctcgccgtcgcgatcaccaacccgatctcctgggcaatatgatggcagtggttggggatcaggatcacccagctccttcggcggatcgcgcggcacaacgcccgtaacgacgacgcccaagaacacgacacaaactcggcttggcttcctggcttcctctatgtcggcatttacgtctcgcatgtcttcacaaccacaaacaccagttcgaatcggcgacaatctatacgatctagatgtcgaggcagcactgttctccacgtcgccatcggaccgcgatgccttctcgcctgccgcatacaaaaacttgcaaaccaacgcggtcggcctactacgaaaaatgcagtcggcctatcgtgagcggacaaacgtgctccaggaggtccaagccgaacgcgaggcgcagaaggaagaagtagaggagacagagcttcggatgcagcactataagaatcagctcgagaaaatggcagctagagcctcggagcaagagaaagcaatgcaacagcttgttgctgaattgcagtctgaaaagcgcgctcgccgtgaggaacgggcaagagctgagaaattcttgcgtttggacgaagccagcgaagatttgggcgtggaagaaaaggagaagcggaatagatggagagagagtcacggtactgtcaagtccgacacgagtatggacaccgatggtgagagcgccgagagcgagagcatcttctcgaggtgtcgaagtcccacggctatgaccatcgccacggagaatgaaatgatagacacaaggccgccgtctgcgatggatatgcacgccgcgaaacaaactacgccgagaccgaaggcggcgccacagttcaccacacttcagcgcttagtcaaaggcatctcgcctgcgaaaggagaaggcggggatgagttaggatcgaataggtgtcggaactgtcaagggatggatacgcgtgtagcgtgggatacggtgagcttactacgtgatgagaacacggtgctcaagtctcgtgtcgcttctcttgagattgctgtcgaaggggctttggatgtcgtaaatggcgtaggagcgttatga

SEQ ID NO: 15542 - protein, 467 aa, Muscodor strobelii
  misc_feature: SGI Peptide ID NO. 565150
  misc_feature (147)..(465): NCBI GI: 85091702 Blast Desc: NCU09003 [Neurospora crassa OR74A] gi|28920427|gb|EAA29795.1| [Neurospora crassa OR74A]
  misc_feature (62)..(465): NCBI GI: 145613419 Blast Desc: MGG_01668 [Magnaporthe grisea 70-15] gi|145020493|gb|EDK04622.1| MGG_01668 [Magnaporthe grisea 70-15]
  misc_feature (48)..(464): NCBI GI: 156051062 Blast Desc: SS1G_06938 [Sclerotinia sclerotiorum 1980] gi|154704716|gb|EDO04455.1| SS1G_06938 [Sclerotinia sclerotiorum 1980]
  misc_feature (67)..(465): NCBI GI: 171686364 Blast Desc: protein product [Podospora anserina] gi|170943143|emb|CAP68796.1| protein product [Podospora anserina]
  misc_feature (183)..(465): NCBI GI: 116207836 Blast Desc: CHGG_03211 [Chaetomium globosum CBS 148.51] gi|88183808|gb|EAQ91276.1| CHGG_03211 [Chaetomium globosum CBS 148.51]
  misc_feature (94)..(465): NCBI GI: 46122371 Blast Desc: FG05563.1 [Gibberella zeae PH-1]
  misc_feature (87)..(464): NCBI GI: 256729867 Blast Desc: NECHADRAFT_95504 [Nectria haematococca mpVI 77-13-4]
  misc_feature (48)..(464): NCBI GI: 154295271 Blast Desc: BC1G_13449 [Botryotinia fuckeliana B05.10] gi|150844176|gb|EDN19369.1| BC1G_13449 [Botryotinia fuckeliana B05.10]
  misc_feature (139)..(463): NCBI GI: 240109054 Blast Desc: CPC735_025590 [Coccidioides posadasii C735 delta SOWgp]
  misc_feature (139)..(463): NCBI GI: 119181785 Blast Desc: CIMG_05972 [Coccidioides immitis RS]
MLKGVPPSPLGLAPPIETDRIEGTYLRQTGADVKTPVYESFETASPASPSRPPRDYRTQISPDYSQHRRQLSTPNLKDKRTSGIVLSPTRAHVRHQSQDMALTGDGRERSSPSRSPTRSPGQYDGSGWGSGSPSSFGGSRGTTPVTTTPKNTTQTRLGFLASSMSAFTSRMSSQPQTPVRIGDNLYDLDVEAALFSTSPSDRDAFSPAAYKNLQTNAVGLLRKMQSAYRERTNVLQEVQAEREAQKEEVEETELRMQHYKNQLEKMAARASEQEKAMQQLVAELQSEKRARREERARAEKFLRLDEASEDLGVEEKEKRNRWRESHGTVKSDTSMDTDGESAESESIFSRCRSPTAMTIATENEMIDTRPPSAMDMHAAKQTTPRPKAAPQFTTLQRLVKGISPAKGEGGDELGSNRCRNCQGMDTRVAWDTVSLLRDENTVLKSRVASLEIAVEGALDVVNGVGAL

SEQ ID NO: 15543 - DNA, 1852 bp, Muscodor strobelii
  misc_feature: SGI EST ID NO. CUFF.36841.0
  misc_feature: Variant of the nucleotide sequence at SEQ ID NO 15541
tagtctgtcgctcaaggcgtcacacaaagatctttcgagtcctctcgcgtgtcactcttattctctgtatttttattctaaatctgtctcagccgctctgtccgcctgccgtttgtccaaccttattactccataatactggatccgcatgaattctgattacaaggagctgcttgtacttgttacgaaacaactagtttaaaagaacgacccctgatcgaacaaccctgaataggaatctgccttctggtttacttcccagtgcgccagaccaatatcacgcaatgctaaagggtgtaccaccgtcacctttggggctggcaccaccaatagagaccgaccgtattgagggaacatatctaagacagactggagcagatgtgaagacacctgtatacgaatcatttgagacagcatcaccagcatcaccaagtcgcccgccccgggactaccgaacacagatttctccggattattcgcaacacaggcgacagctttcaaccccgaatctcaaagacaaacgtaccagcggcatcgtcctctcaccaacacgtgcgcatgtcaggcatcaatctcaagatatggcgctaacaggtgacgggcgtgaaagatcctcgccgtcgcgatcaccaacccgatctcctgggcaatatgatggcagtggttggggatcaggatcacccagctccttcggcggatcgcgcggcacaacgcccgtaacgacgacgcccaagaacacgacacaaactcggcttggcttcctggcttcctctatgtcggcatttacgtctcgcatgtcttcacaaccacaaacaccagttcgaatcggcgacaatctatacgatctagatgtcgaggcagcactgttctccacgtcgccatcggaccgcgatgccttctcgcctgccgcatacaaaaacttgcaaaccaacgcggtcggcctactacgaaaaatgcagtcggcctatcgtgagcggacaaacgtgctccaggaggtccaagccgaacgcgaggcgcagaaggaagaagtagaggagacagagcttcggatgcagcactataagaatcagctcgagaaaatggcagctagagcctcggagcaagagaaagcaatgcaacagcttgttgctgaattgcagtctgaaaagcgcgctcgccgtgaggaacgggcaagagctgagaaattcttgcgtttggacgaagccagcgaagatttgggcgtggaagaaaaggagaagcggaatagatggagagagagtcacggtactgtcaagtccgacacgagtatggacaccgatggtgagagcgccgagagcgagagcatcttctcgaggtgtcgaagtcccacggctatgaccatcgccacggagaatgaaatgatagacacaaggccgccgtctgcgatggatatgcacgccgcgaaacaaactacgccgagaccgaaggcggcgccacagttcaccacacttcagcgcttagtcaaaggcatctcgcctgcgaaaggagaaggcggggatgagttaggatcgaataggtgtcggaactgtcaagggatggatacgcgtgtagcgtgggatacggtgagcttactacgtgatgagaacacggtgctcaagtctcgtgtcgcttctcttgagattgctgtcgaaggggctttggatgtcgtaaatggcgtaggagcgttatgagaggatatgacgcattagaggtttaaactgttgaatggctagaccgaatcgacgacgaaatagatatcgttgcaagacaagctatcgagagggttggattatccacattactcatgagatacagatcgattaacttatagcaattgcatttgacttaaaaaagg

SEQ ID NO: 15544 - DNA, 273 bp, Muscodor strobelii
  misc_feature: SGI cDNA ID NO. 565151
  misc_feature: Reduced expression when VOC is produced
  misc_feature: Encodes the peptide sequence at SEQ ID NO 15545
atgtattccacaatcatacgccgggccgcctacaaccccaagcccaacatcaccggcttcgaccccaagaagttcgcccaggctgctggccagccacgctacgacccctgggagagagctgaggcctggcgatacactggcacattctcgcgatggaaccgatttaagggcgcattccctggcctcggcatagccaccgttgcctttgccatatatctcggctacgagcagctgacagctaaagacgagcaccacggtgacggccatcattga

SEQ ID NO: 15545 - protein, 90 aa, Muscodor strobelii
  misc_feature: SGI Peptide ID NO. 565151
  misc_feature (35)..(89): Pfam Id: PF08122 Pfam Desc: NADH-ubiquinone oxidoreductase B12 subunit family
  misc_feature (10)..(90): NCBI GI: 39952049 Blast Desc: MGG_01667 [Magnaporthe grisea 70-15] gi|145020494|gb|EDK04623.1| MGG_01667 [Magnaporthe grisea 70-15]
  misc_feature (1)..(89): NCBI GI: 261360193 Blast Desc: conserved [Verticillium albo-atrum VaMs.102]
  misc_feature (1)..(90): NCBI GI: 171686370 Blast Desc: protein product [Podospora anserina] gi|170943146|emb|CAP68799.1| protein product [Podospora anserina]
  misc_feature (1)..(76): NCBI GI: 46122373 Blast Desc: FG05564.1 [Gibberella zeae PH-1]
  misc_feature (1)..(90): NCBI GI: 154316135 Blast Desc: BC1G_03652 [Botryotinia fuckeliana B05.10] gi|150846439|gb|EDN21632.1| BC1G_03652 [Botryotinia fuckeliana B05.10]
  misc_feature (15)..(90): NCBI GI: 119182126 Blast Desc: CIMG_06110 [Coccidioides immitis RS] gi|240109166|gb|EER27335.1| NADH-ubiquinone oxidoreductase B12 subunit family protein [Coccidioides posadasii C735 delta SOWgp]
  misc_feature (14)..(90): NCBI GI: 156037494 Blast Desc: SS1G_12460 [Sclerotinia sclerotiorum 1980] gi|154697869|gb|EDN97607.1| SS1G_12460 [Sclerotinia sclerotiorum 1980]
  misc_feature (16)..(90): NCBI GI: 225562032 Blast Desc: conserved [Ajellomyces capsulatus G186AR] gi|240275641|gb|EER39155.1| NADH-ubiquinone oxidoreductase B12 subunit [Ajellomyces capsulatus H143]
  misc_feature (16)..(90): NCBI GI: 261197720 Blast Desc: conserved [Ajellomyces dermatitidis SLH14081] gi|239595225|gb|EEQ77806.1| conserved [Ajellomyces dermatitidis SLH14081] gi|239607642|gb|EEQ84629.1| conserved [Ajellomyces
  misc_feature (1)..(88): NCBI GI: 85091700 Blast Desc: NADH:ubiquinone oxidoreductase 10.6kD subunit [Neurospora crassa OR74A] gi|28920426|gb|EAA29794.1| NADH:ubiquinone oxidoreductase 10.6kD subunit [Neurospora crassa
  misc_feature: Useful for introducing or modulating the production of volatile compounds
MYSTIIRRAAYNPKPNITGFDPKKFAQAAGQPRYDPWERAEAWRYTGTFSRWNRFKGAFPGLGIATVAFAIYLGYEQLTAKDEHHGDGHH

SEQ ID NO: 15546 - DNA, 863 bp, Muscodor strobelii
  misc_feature: SGI EST ID NO. CUFF.36845.0
  misc_feature: Variant of the nucleotide sequence at SEQ ID NO 15544
cgaaggaccaattgacccccgaagcacttactggtcaattgaagctctgtggaacgacgaggagtgtagcctcaagctctaaagtcacaacacgaatctcccctctcctccttcctcacaggtcacgtcgctcaccatgtattccacaatcatacgccgggccgcctacaaccccaagcccaacatcaccggcttcgaccccaagaagttcgcccaggctgctggccagccacgctacgacccctgggagagagctgaggcctggcgatacactggcacattctcgcgatggaaccgatttaagggcgcattccctggcctcggcatagccaccgttgcctttgccatatatctcggctacgagcagctgacagctaaagacgagcaccacggtgacggccatcattgatagtgacatggacaaacggggctgggcaaacatgaggatgagacaaagcaacgcatgcaccctatcttgatagaagctcggcatggaagagacgaacggaaaaagaaaggcatcatataaaggggccagctaactactgtatataccttgtacaactgctacaaactcacgccagtcaagaaacctccatctgactggcttttaccaactactccatccccatggatgctttctctttgtcctggaccctcttctctagaagagagagggtggcaagtggaggattagaagaaatgctaaatggtctgctgatagatgaacttccaattttacccgtacatgtcagagaagaggcagacatatggacgtgatgctcagaacccaacatcctcaaaatttggttagcgaatgaatcgagacgactactaaataaccgaataatcctatgttcagg

SEQ ID NO: 15547 - DNA, 1476 bp, Muscodor strobelii
  misc_feature: SGI cDNA ID NO. 565152
  misc_feature: Encodes the peptide sequence at SEQ ID NO 15548
atgggtccccaacgctacggcggcggcccaccggccatgacgccctaccagcactttccccagcaacaccccgccacctcacacgcctcacatcaacccgcctctctcgcaaatgcaccctatctgacctcccagctgagtccctttgcagcaaatggtctgggcttggggaacggcatgggcgtgggtggcagctttggagtcgctgaccagacgggcttcgccagccaggccgctagaaccggcttccagcatggcgctcagctacagcagcagcagcagcaacaacaccaccctcaccaacagtcccacaacataccaggggagcgaggtgcgagagggaccggcgctggcaagaacaagatacgcgaggtctggaaacacaacttcgacgaagagatggccctcctcatggagctggccgaggactacccctacattgctatggacaccgagttccctgggattgtcggtcgccccatgggcaatttccgtggcaagagtgattatcactaccaatgccttcgtgtcaatgtcgacatgctcaaggtcatccagattggcatcagcatcttcaacgagaagggcgagacacctgccgatcggtcacacaaccagcctgtagagagtggctccggccccaggcgaaacatcccgttcgcttggcagttcaacttcaagtttgccctcaaggaggatatgtacaatcaggcatccatcgagtccctacagacggccggcatcgacttcagcttgctcgagcgcgatggcatcgacccccacaagtttgcctcccttttcatcgtctctggctttgtgtgctttgacaacataaaatggctgtcattccacggcggctatgactttggctatctgactaagctactgtcggataccaaactggcaaacgatgaaagtgaattcgacaaggtcatgaagaagtggttccctgtgacgtacgatgtcaagcacctgatgaaatatgccgtcaagctccacaacagcggcatgatgacacccactgaccctgcctcgacagagatcctccagaagttcgagcagaagtctggactggagagcatagcggaagccctcaagattaagcgtcatggagtggcccatcaagctggctctgacagtctgcttactggcaaggtattcttccagctgcgcgagaggatatacaacggcgaaatatcggatgaccacataggcaagatctgggggctgggttttagtggtatggaagtgcccattttgtcacagcagcagtcagcacacgttgacagcacgcctggcgggacaaatggtactactaatggcggccctaccacgccttctactgcctctgtgggcttagcaagcacgcctgctgcacaatctcacaataccaacgggttgggcacggggccgatgactcctggaggtggcggtggcgtgtttggtcagtttcacttccctcctaatgcgagatag

SEQ ID NO: 15548 - protein, 491 aa, Muscodor strobelii
  misc_feature: SGI Peptide ID NO. 565152
  misc_feature (123)..(389): Pfam Id: PF04857 Pfam Desc: CAF1 family ribonuclease
  misc_feature (6)..(463): NCBI GI: 46122375 Blast Desc: FG05565.1 [Gibberella zeae PH-1]
  misc_feature (119)..(474): NCBI GI: 85091698 Blast Desc: CCR4-NOT transcription complex subunit 7 [Neurospora crassa OR74A] gi|28920425|gb|EAA29793.1| CCR4-NOT transcription complex subunit 7 [Neurospora crassa OR74A]
  misc_feature (5)..(467): NCBI GI: 171686368 Blast Desc: protein product [Podospora anserina] gi|170943145|emb|CAP68798.1| protein product [Podospora anserina]
  misc_feature (3)..(470): NCBI GI: 39952047 Blast Desc: MGG_01666 [Magnaporthe grisea 70-15] gi|145020495|gb|EDK04624.1| MGG_01666 [Magnaporthe grisea 70-15]
  misc_feature (4)..(486): NCBI GI: 154316133 Blast Desc: BC1G_03651 [Botryotinia fuckeliana B05.10] gi|150846438|gb|EDN21631.1| BC1G_03651 [Botryotinia fuckeliana B05.10]
  misc_feature (4)..(486): NCBI GI: 156037492 Blast Desc: SS1G_12459 [Sclerotinia sclerotiorum 1980] gi|154697868|gb|EDN97606.1| SS1G_12459 [Sclerotinia sclerotiorum 1980]
  misc_feature (23)..(474): NCBI GI: 226278269 Blast Desc: CCR4-NOT transcription complex subunit 8 [Paracoccidioides brasiliensis Pb01]
  misc_feature (26)..(486): NCBI GI: 67901282 Blast Desc: AN7628.2 [Aspergillus nidulans FGSC A4] gi|40742624|gb|EAA61814.1| AN7628.2 [Aspergillus nidulans FGSC A4]
  misc_feature (44)..(474): NCBI GI: 239607643 Blast Desc: CCR4-NOT core complex subunit Caf1 [Ajellomyces dermatitidis ER-3]
  misc_feature (44)..(485): NCBI GI: 169777411 Blast Desc: [Aspergillus oryzae RIB40] gi|238494540|ref|XP_002378506.1| CCR4-NOT core complex subunit Caf1, [Aspergillus flavus NRRL3357] gi|83771908|dbj|BAE62038.1|
  misc_feature (111)..(414): SWISSPROT Homolog: EC 3.1.13.4 Poly(A)-specific ribonuclease
MGPQRYGGGPPAMTPYQHFPQQHPATSHASHQPASLANAPYLTSQLSPFAANGLGLGNGMGVGGSFGVADQTGFASQAARTGFQHGAQLQQQQQQQHHPHQQSHNIPGERGARGTGAGKNKIREVWKHNFDEEMALLMELAEDYPYIAMDTEFPGIVGRPMGNFRGKSDYHYQCLRVNVDMLKVIQIGISIFNEKGETPADRSHNQPVESGSGPRRNIPFAWQFNFKFALKEDMYNQASIESLQTAGIDFSLLERDGIDPHKFASLFIVSGFVCFDNIKWLSFHGGYDFGYLTKLLSDTKLANDESEFDKVMKKWFPVTYDVKHLMKYAVKLHNSGMMTPTDPASTEILQKFEQKSGLESIAEALKIKRHGVAHQAGSDSLLTGKVFFQLRERIYNGEISDDHIGKIWGLGFSGMEVPILSQQQSAHVDSTPGGTNGTTNGGPTTPSTASVGLASTPAAQSHNTNGLGTGPMTPGGGGGVFGQFHFPPNAR

SEQ ID NO: 15549 - DNA, 3096 bp, Muscodor strobelii
  misc_feature: SGI EST ID NO. CUFF.36851.0
  misc_feature: Variant of the nucleotide sequence at SEQ ID NO 15547
acagtgcagaccacgaccatgcatccaggctcgccaggtactgtatcagtgcagtttggttgcacaagtacttgtagcataccccatcatccaacgcagaactgccattgcgtgaactcaactcacgcagctcaatcgcgactgcaccacctcccgtcccgccaagcacagtcacctctccgacctgcacccattccgtctgaaggcgacacatcctacagcactgccgaactacacacgatacaactaccagcgaccagccaatctatttatcccggacctcttgttgttgatgttgctgccagcagacatatccatctccaccatcgacatcttcacgcccaacatcacaacaccaccgcaccaccgagcgaacatcatcgttggcaccgttgaccctctgcacaacaccgagcacatacgcctcaacgatctgcctacacacatctcaaggccatcccgacatcagtattgacagacagtgatctaggcgcagcagcgcagagcgtatctatcctgccctgcacctagagggcatccctcgacgcccacggcagtcgccgactgtgctcacagctgcccatgccaccgccgtcacccaatctctccgctcctccaccctcccgtatcaaacacaggatacacacaagacacatcacacgcattgctctggggtccatcagctcttcgcactggcatccgcaatgggtccccaacgctacggcggcggcccaccggccatgacgccctaccagcactttccccagcaacaccccgccacctcacacgcctcacatcaacccgcctctctcgcaaatgcaccctatctgacctcccagctgagtccctttgcagcaaatggtctgggcttggggaacggcatgggcgtgggtggcagctttggagtcgctgaccagacgggcttcgccagccaggccgctagaaccggcttccagcatggcgctcagctacagcagcagcagcagcaacaacaccaccctcaccaacagtcccacaacataccaggggagcgaggtgcgagagggaccggcgctggcaagaacaagatacgcgaggtctggaaacacaacttcgacgaagagatggccctcctcatggagctggccgaggactacccctacattgctatggacaccgagttccctgggattgtcggtcgccccatgggcaatttccgtggcaagagtgattatcactaccaatgccttcgtgtcaatgtcgacatgctcaaggtcatccagattggcatcagcatcttcaacgagaagggcgagacacctgccgatcggtcacacaaccagcctgtagagagtggctccggccccaggcgaaacatcccgttcgcttggcagttcaacttcaagtttgccctcaaggaggatatgtacaatcaggcatccatcgagtccctacagacggccggcatcgacttcagcttgctcgagcgcgatggcatcgacccccacaagtttgcctcccttttcatcgtctctggctttgtgtgctttgacaacataaaatggctgtcattccacggcggctatgactttggctatctgactaagctactgtcggataccaaactggcaaacgatgaaagtgaattcgacaaggtcatgaagaagtggttccctgtgacgtacgatgtcaagcacctgatgaaatatgccgtcaagctccacaacagcggcatgatgacacccactgaccctgcctcgacagagatcctccagaagttcgagcagaagtctggactggagagcatagcggaagccctcaagattaagcgtcatggagtggcccatcaagctggctctgacagtctgcttactggcaaggtattcttccagctgcgcgagaggatatacaacggcgaaatatcggatgaccacataggcaagatctgggggctgggttttagtggtatggaagtgcccattttgtcacagcagcagtcagcacacgttgacagcacgcctggcgggacaaatggtactactaatggcggccctaccacgccttctactgcctctgtgggcttagcaagcacgcctgctgcacaatctcacaataccaacgggttgggcacggggccgatgactcctggaggtggcggtggcgtgtttggtcagtttcacttccctcctaatgcgagatagaatccgttagagggaagtgttgccagccggcctcgttcttctgtcgcgcgcagacggagacgaggtcaacagcacatgcgccatttatctgaacctcagggaaacaatgctccaacgtcttcatggcctaatacccccaccgccaatcgtcatgtacctagcttccatgccccagcagctgccctgccaaatcctctgcatttgaacacacagggaagacagggatcgtttgcaggctcagagacatctcagcacagctttcaaccttgttatcccccatggaacgcgtatggtcataatggtgcattgtgatctgttctcacattcactagccagggatttggtttcgtagcgccttgtgaagtgctcgctcggtcttcacgagtcttgctcgtttcgcccgacaacatgttggtcgatatttatctgcggcttctttttcaaagtgcaatatcaagagttacggaacccctcaaattccgacgtgaaatggagttcgttcacattgcatcctttgagtcgtctggttgtctttcgcaaggcgtcaatctttcggtctacagttacgttgttacctcattcttcatctggtcgtctcggacaatgatcattggtcaaaaaggggtggatggacaggtggcgttgacgtgtgctttctctctctttaattcatggtacataatggttcggtgttggctggttcttgagcctggtgcgaaattttgatgtcggtcttgatcaccgacaactatgtagttctaacttatcatgaagggtggatggcttgcacgcgggtggcgcgctgtgtattgaagggctccggtggttctacgtctaggggtctgaaatataatgtctccccaagcgtcttgattttagctgtcctgatgtgctttttcgctgcctgttgtgctga

SEQ ID NO: 15550 - DNA, 1242 bp, Muscodor strobelii
  misc_feature: SGI cDNA ID NO. 565153
  misc_feature: Encodes the peptide sequence at SEQ ID NO 15551
atgggggaccacgagagtgccaagctcgaccatgccaaccatctcctactggaccaaaccctcctccaactccctgtcgagcttctacacaagaacctgagatctgcgcgattcgaggtcaagaaagacgaaagcttcgtgaaagacacactcaagaagaccgcctccgacagcgtcaacggcagcgtctcgcaggaagatgtcctcaagaccctcgaccagatgatcacgcgcatgcgtggtgtcaagcggaagctcacggccttttcagatgaggagatcaaactgcatcagcacgaagccgcgagggttggccatctgaatgacctgttcggcatgtatagcgtcgacgatgtgaagtacgagcattggagcagggctcgacttgatcgcctactggtcgactatctactacgccagggctacgtcgacagcgccagagctctcgctaagcagcggcatatcgaactccttgtcgatgttgacacttttgaacagatggaccgcatcaggcggtgtttgctcaatggtagtgtgtcagaggccttggcttggtgtactgcaggagacacaaagaaagagctgcgtaagatggatagtaaccttgagtttatgctgaggtatcaacagtatatcgagattgtgcgacagcgtgggcatactaagcccgatgaggccttgatacacgctaggaagtatctgtttccatatcgagacacataccacgaagaagtcctccaggcttgtggtcttctcggtatgtctccggatagtgctgaccttatcccggcctataagaagctctacgcaccagcgaggtgggagatgctggctaatctcttcacgaccacacacaacacgttactgggcttaacacccatcccactcttacatgtagctctctcttcagggctctcagcgttgaagacaccggcctgtcattccaaacatccgaattctgcagcggcaccctcgcatcacacgagtctatcactcgccacgagcgtgtgccctatctgcagcacagagctcaacgagctcgcacgcaacgttcctcatgctctgcacagtaagagtcatgttgagccagatctcttacttctacccaacaaccgtgcctatggcaaagcccggctcgaggagtacgcgaagaaagctggtctcctcgagggccaagtgaaggaccttcggactggcgaggtgtatagcatggatcgcctgaagaaggtctatatcacttag

SEQ ID NO: 15551 - protein, 413 aa, Muscodor strobelii
  misc_feature: SGI Peptide ID NO. 565153
  misc_feature (1)..(413): NCBI GI: 256729680 Blast Desc: NECHADRAFT_62787 [Nectria haematococca mpVI 77-13-4]
  misc_feature (1)..(411): NCBI GI: 85091696 Blast Desc: NCU09000 [Neurospora crassa OR74A] gi|74615211|sp|Q7S2X0.1|FYV10_NEUCR RecName: Full=Protein fyv-10 gi|28920424|gb|EAA29792.1| conserved [Neurospora crassa OR74A]
  misc_feature (1)..(413): NCBI GI: 150383347 Blast Desc: NCU09000 [Neurospora crassa OR74A] gi|74615211|sp|Q7S2X0.1|FYV10_NEUCR RecName: Full=Protein fyv-10 gi|28920424|gb|EAA29792.1| conserved [Neurospora crassa OR74A]
  misc_feature (1)..(413): NCBI GI: 156052082 Blast Desc: SS1G_07449 [Sclerotinia sclerotiorum 1980] gi|154705226|gb|EDO04965.1| SS1G_07449 [Sclerotinia sclerotiorum 1980]
  misc_feature (13)..(413): NCBI GI: 145613421 Blast Desc: MGG_01665 [Magnaporthe grisea 70-15] gi|145020496|gb|EDK04625.1| MGG_01665 [Magnaporthe grisea 70-15]
  misc_feature (1)..(413): NCBI GI: 171686372 Blast Desc: protein product [Podospora anserina] gi|170943147|emb|CAP68800.1| protein product [Podospora anserina]
  misc_feature (1)..(413): NCBI GI: 116207840 Blast Desc: CHGG_03213 [Chaetomium globosum CBS 148.51] gi|121787982|sp|Q2H991.1|FYV10_CHAGB RecName: Full=Protein FYV10 gi|88183810|gb|EAQ91278.1| CHGG_03213 [Chaetomium globosum CBS
  misc_feature (1)..(413): NCBI GI: 46122377 Blast Desc: FG05566.1 [Gibberella zeae PH-1]
  misc_feature (1)..(386): NCBI GI: 154309804 Blast Desc: BC1G_07372 [Botryotinia fuckeliana B05.10] gi|150851833|gb|EDN27026.1| BC1G_07372 [Botryotinia fuckeliana B05.10]
  misc_feature (6)..(413): NCBI GI: 225685064 Blast Desc: negative regulation of gluconeogenesis [Paracoccidioides brasiliensis Pb03]
MGDHESAKLDHANHLLLDQTLLQLPVELLHKNLRSARFEVKKDESFVKDTLKKTASDSVNGSVSQEDVLKTLDQMITRMRGVKRKLTAFSDEEIKLHQHEAARVGHLNDLFGMYSVDDVKYEHWSRARLDRLLVDYLLRQGYVDSARALAKQRHIELLVDVDTFEQMDRIRRCLLNGSVSEALAWCTAGDTKKELRKMDSNLEFMLRYQQYIEIVRQRGHTKPDEALIHARKYLFPYRDTYHEEVLQACGLLGMSPDSADLIPAYKKLYAPARWEMLANLFTTTHNTLLGLTPIPLLHVALSSGLSALKTPACHSKHPNSAAAPSHHTSLSLATSVCPICSTELNELARNVPHALHSKSHVEPDLLLLPNNRAYGKARLEEYAKKAGLLEGQVKDLRTGEVYSMDRLKKVYIT

SEQ ID NO: 15552 - DNA, 1952 bp, Muscodor strobelii
  misc_feature: SGI EST ID NO. CUFF.36882.1
  misc_feature: Variant of the nucleotide sequence at SEQ ID NO 15550
gtcgtcggcatggtaccttatgtcgccgactcgccgcttcccacggcggcatgtaatccctgccgatcccctacagcacccgcacatccactaatgatctaatgatacccgagacaactggccgtcatcgcaattccaacatcatcgtcaacgtcaacccatcacgacaaccgctctagtccgagctgcaacaaacatgggggaccacgagagtgccaagctcgaccatgccaaccatctcctactggaccaaaccctcctccaactccctgtcgagcttctacacaagaacctgagatctgcgcgattcgaggtcaagaaagacgaaagcttcgtgaaagacacactcaagaagaccgcctccgacagcgtcaacggcagcgtctcgcaggaagatgtcctcaagaccctcgaccagatgatcacgcgcatgcgtggtgtcaagcggaagctcacggccttttcagatgaggagatcaaactgcatcagcacgaagccgcgagggttggccatctgaatgacctgttcggcatgtatagcgtcgacgatgtgaagtacgagcattggagcagggctcgacttgatcgcctactggtcgactatctactacgccagggctacgtcgacagcgccagagctctcgctaagcagcggcatatcgaactccttgtcgatgttgacacttttgaacagatggaccgcatcaggcggtgtttgctcaatggtagtgtgtcagaggccttggcttggtgtactgcaggagacacaaagaaagagctgcgtaagatggatagtaaccttgagtttatgctgaggtatcaacagtatatcgagattgtgcgacagcgtgggcatactaagcccgatgaggccttgatacacgctaggaagtatctgtttccatatcgagacacataccacgaagaagtcctccaggcttgtggtcttctcggtatgtctccggatagtgctgaccttatcccggcctataagaagctctacgcaccagcgaggtgggagatgctggctaatctcttcacgaccacacacaacacgttactgggcttaacacccatcccactcttacatgtagctctctcttcagggctctcagcgttgaagacaccggcctgtcattccaaacatccgaattctgcagcggcaccctcgcatcacacgagtctatcactcgccacgagcgtgtgccctatctgcagcacagagctcaacgagctcgcacgcaacgttcctcatgctctgcacagtaagagtcatgttgagccagatctcttacttctacccaacaaccgtgcctatggcaaagcccggctcgaggagtacgcgaagaaagctggtctcctcgagggccaagtgaaggaccttcggactggcgaggtgtatagcatggatcgcctgaagaaggtctatatcacttagtgaccaatttgctaagctatcatcccatcaggacaacaaaaggagggatttgactggaatatgaattgcacctaatgcattagttgttttctgaaaatatcatcagcctagcatcagaatcgtccgcgatcgcctgcgggaagagtacgagaatatgagagaagaaaggacattgtattactacaacatggtaacaaccgcattatcgacattagctaagagatagcagatgggtatgggcatgaaagcgtggcgttaggcttgggtctatggggctgattaaattgtttcatttcgagtgtatcgatggatttcgaccaagtcgcatcatttgcttttaagtgtgtgtagattcatcgaatggaatcgattatcgatccacccatgctccgattgataagaatgacctgtgaatatagcagttgctagaagagcaaacttcaagtacaaataacattcggcgggcggggggtattgtggtaacaagatctggacattcttgtctcactacgag

SEQ ID NO: 15553 - DNA, 1020 bp, Muscodor strobelii
  misc_feature: SGI cDNA ID NO. 565154
  misc_feature: Encodes the peptide sequence at SEQ ID NO 15554
atggagaccaacggcttcactgcggagtcgctgctcgaccctcttacgcacgtcaatcagatcaatcgtgagcaactcaccgccatggccgaatcagctatggccgatcatcaacacgagtacagcacatcagctccgtccagccccacccagaagaggaagcgtggcggccctgattcttcaccagactcacgacgttcaaagcgcaacatgtcatcgtcgggcatgtcgagcgcccagaaccctccatctgccgcctatgtcgagggcgccgtagaggcggctcgacaggctgcccaagccgctgaggctgcaacccatgcggatctcgttgcccttcagcaggccacagctgagcgtcatgaggcagcagatcttgccagtgcatcaagtactgctgctgctgcactcaactccatctacccgcacatacacatccctcagacaacggaggcagagttcgccgcccaggccagtgctgaagcagaccatcacggccaccacgagtcgccctacaatcacagtgatatgctacagccacatgggctctctgaagcttctccgaatgatgtcccacatcatattcagaacggtgtgaggtccgctcaccaatcttaccctgcgccgtcttcttcaaatctcccaaagcctactgtgggttctgaggagtggcacaaactgcgaaaggacaaccacaagaatgtggagcgtcgccgacgcgagactatcaacgagggcatcaatgagctggccaagatcgtgcctggctgtgagaagaacaagggctccatcctgtcccgtgctgtcacctttatccagcagctgaaggacaacgaggctactaacatcgagaagtggcagctggagaaacttctcactgagcaggctctccaggaactcagcagatctaatgacaaactgaagcaggagtgtgagagagcctaccgagaagcacaggcctggaagaacttggctcagagcgcaggtctggagcttccgcgatcccccagcgagtcatga

SEQ ID NO: 15554 - protein, 339 aa, Muscodor strobelii
  misc_feature: SGI Peptide ID NO. 565154
  misc_feature (228)..(276): Pfam Id: PF00010 Pfam Desc: Helix-loop-helix DNA-binding domain
  misc_feature (47)..(334): NCBI GI: 46122379 Blast Desc: FG05567.1 [Gibberella zeae PH-1]
  misc_feature (29)..(334): NCBI GI: 256729865 Blast Desc: [Nectria haematococca mpVI 77-13-4]
  misc_feature (38)..(334): NCBI GI: 85091694 Blast Desc: NCU08999 [Neurospora crassa OR74A] gi|28920423|gb|EAA29791.1| conserved [Neurospora crassa OR74A]
  misc_feature (29)..(335): NCBI GI: 171686374 Blast Desc: protein product [Podospora anserina] gi|170943148|emb|CAP68801.1| protein product [Podospora anserina]
  misc_feature (29)..(330): NCBI GI: 145613423 Blast Desc: MGG_01663 [Magnaporthe grisea 70-15] gi|145020497|gb|EDK04626.1| MGG_01663 [Magnaporthe grisea 70-15]
  misc_feature (45)..(339): NCBI GI: 116207842 Blast Desc: CHGG_03214 [Chaetomium globosum CBS 148.51] gi|88183811|gb|EAQ91279.1| CHGG_03214 [Chaetomium globosum CBS 148.51]
  misc_feature (47)..(330): NCBI GI: 156052086 Blast Desc: SS1G_07451 [Sclerotinia sclerotiorum 1980] gi|154705228|gb|EDO04967.1| SS1G_07451 [Sclerotinia sclerotiorum 1980]
  misc_feature (47)..(330): NCBI GI: 154309810 Blast Desc: BC1G_07375 [Botryotinia fuckeliana B05.10] gi|150851836|gb|EDN27029.1| BC1G_07375 [Botryotinia fuckeliana B05.10]
  misc_feature (123)..(333): NCBI GI: 169596881 Blast Desc: SNOG_01210 [Phaeosphaeria nodorum SN15] gi|111069739|gb|EAT90859.1| SNOG_01210 [Phaeosphaeria nodorum SN15]
  misc_feature (108)..(330): NCBI GI: 189195192 Blast Desc: PTRG_03601 [Pyrenophora tritici-repentis Pt-1C-BFP] gi|187979813|gb|EDU46439.1| PTRG_03601 [Pyrenophora tritici-repentis Pt-1C-BFP]
METNGFTAESLLDPLTHVNQINREQLTAMAESAMADHQHEYSTSAPSSPTQKRKRGGPDSSPDSRRSKRNMSSSGMSSAQNPPSAAYVEGAVEAARQAAQAAEAATHADLVALQQATAERHEAADLASASSTAAAALNSIYPHIHIPQTTEAEFAAQASAEADHHGHHESPYNHSDMLQPHGLSEASPNDVPHHIQNGVRSAHQSYPAPSSSNLPKPTVGSEEWHKLRKDNHKNVERRRRETINEGINELAKIVPGCEKNKGSILSRAVTFIQQLKDNEATNIEKWQLEKLLTEQALQELSRSNDKLKQECERAYREAQAWKNLAQSAGLELPRSPSES

SEQ ID NO: 15555 - DNA, 2653 bp, Muscodor strobelii
  misc_feature: SGI EST ID NO. CUFF.36884.0
  misc_feature: Variant of the nucleotide sequence at SEQ ID NO 15553
ctggattcttgactttctgcgaaataaagcatcctctcagacacaagagggaccatcgaccacggcgactccaagaaacacattcggattttgacaaactttccggtgtggttttaccgttttccttttactgatcttcaccatcctggaccgtgtcattccccatattgagcgcgcaatccgctcgagctagacacgaggcacgtgaattggaagtcatctgacccagcgacaagatcaagaggtaggccacctccatttcattatttctgtcaccttttgcacttccgctccctcctatcgccgccatcatttctatatatacacatcaagcctactcagacctataagcctgagaccgcacagaaaagacttttcattgcattggaaccagttgctcggtcgcatcgaatgtcatcgtgcacttgaagggaattgcatgcacctcgagttcgaggcaaaggcccagacatgcttctgtcctatgtgaagcatgtcagtgtcgatgataaattcaggacaagtccaatgcatgcaatactaccgtgaccatagctttcatgtctctctgtctttcattgcgtccaaatcgctcacacaacccaaatatttttctgatctagaataaggggcactggcgcccctccatcgccgcgtctccccacgtggacattcaatccaaatgaccaactctgcacactattctttcaatatataaatctcgagtgcatcctgacaatcgatatgatcttatcaacgtgccatcttctaaatgaacgtttcaacactaacatgcataggtgtttttcacagtccatctgacttctgagtctatttgtttgagactcatactagtgggagtgtgttacaacaggtacagccagacggctaccgccctgcctggattgagccagcatggagaccaacggcttcactgcggagtcgctgctcgaccctcttacgcacgtcaatcagatcaatcgtgagcaactcaccgccatggccgaatcagctatggccgatcatcaacacgagtacagcacatcagctccgtccagccccacccagaagaggaagcgtggcggccctgattcttcaccagactcacgacgttcaaagcgcaacatgtcatcgtcgggcatgtcgagcgcccagaaccctccatctgccgcctatgtcgagggcgccgtagaggcggctcgacaggctgcccaagccgctgaggctgcaacccatgcggatctcgttgcccttcagcaggccacagctgagcgtcatgaggcagcagatcttgccagtgcatcaagtactgctgctgctgcactcaactccatctacccgcacatacacatccctcagacaacggaggcagagttcgccgcccaggccagtgctgaagcagaccatcacggccaccacgagtcgccctacaatcacagtgatatgctacagccacatgggctctctgaagcttctccgaatgatgtcccacatcatattcagaacggtgtgaggtccgctcaccaatcttaccctgcgccgtcttcttcaaatctcccaaagcctactgtgggttctgaggagtggcacaaactgcgaaaggacaaccacaagaatgtggagcgtcgccgacgcgagactatcaacgagggcatcaatgagctggccaagatcgtgcctggctgtgagaagaacaagggctccatcctgtcccgtgctgtcacctttatccagcagctgaaggacaacgaggctactaacatcgagaagtggcagctggagaaacttctcactgagcaggctctccaggaactcagcagatctaatgacaaactgaagcaggagtgtgagagagcctaccgagaagcacaggcctggaagaacttggctcagagcgcaggtctggagcttccgcgatcccccagcgagtcatgatcattgcgcaggccattctgagagtataagagcgacttatatacaacaagcagtgtaaatggatctgagctgcgcgcttagagatctgcaaatcacagaggaacaaactgactatgaggtggatttacgcgtcttcagaagcaaattcatcagggaagaggcgaggaataccgtttcgtatcatccttctcacgggagcacatggtagaggtcatacggcaaggtatgatcagacacgcatgctcgagatccatcatcagagttgatttcgtgggcctcaggtgcaaggtatacgatgttgtcacgatagaagaagcctggcagataggctgagagtggcttcgggctttaggcgttatggactgctttgtcccaagtgctgggacgggaggatcggaagagggctcagcctggacatgggtgatactcatgtcttgagttcacatatattatacccatgcatttcatgtctacatttgtagctgctgggggacgataccattgtgtaattgtagcgcccccgaatgaataaaaattaaaatccaaatgaaagtttacaagtgagccgaggaagaaatgacagcatataaagagcatatttggccatgaatagccttaatctttgtggcaagacagtcaagacatcctttggaagcggcagcacgtgagatttgctgaggttgttgttctgagtacattgtcccacgttagatagctc

SEQ ID NO: 15556 - DNA, 1302 bp, Muscodor strobelii
  misc_feature: SGI cDNA ID NO. 565155
  misc_feature: Reduced expression when VOC is produced
  misc_feature: Encodes the peptide sequence at SEQ ID NO 15557
atggctctcatcaacgtgcgccgcgacgtcaccgacgccttctatcgttataagatggaaagaatccagaccaagatcgaaggcaaaggcaacggcatcaagacggtcgtcgtcaacctgagcagcgtcgctgcctccctcgcccgccccccgggatatgtcatcaagtacttcggtttcgagctcggtgctcagaccaacattgaccctcccgatgaccgctggatcatcaacggcgcccacgacgcccccaagctgcaggagtatctcgatgggttcatcaacaagttcgttctctgcaagaaatgcaagaaccccgagaccgacgtcgtcatcaaggatggccacattattctcgactgcaaagcctgtggtcagcgcaccgatgtcgaccttcgcctcaagctcagcggcttcatcttgaagaaccagcccaagaagggcggcaagaaggacaaggccgagcgcaaggcggcccgcaaggctaagcagcaggcccagcaaaacggcggcaaagaacatggcagtggcagtggtggagagaattccgagaatggctccaacgacaacgaggagaatgaggagaacggcgccggtagtgatgacgagttcacccgcaagatcactgctgcagccgagattatcgacgctcccactgaggtcaaggatgaagagtgggctgtcgacatgtccgagaaggctgtcaaggctcgtcagaaccagctccccgaccaattccgtcagaagctctctctcggaggtggcggcgatgacgaggacgaagatggcgaaggcggtggcaacaccgtctacgatgccctcggtgactggattcaggaggaagccgaaaagactggtagcattaacaaggtcgatgatattcaagtttatgttaaggccaaggagcttggtatcgaagccaagcacaggaccgtgctcgttctcgtacagactctgttcgacgagaacatcatcacgcagattcccaagcgcgccgccatgctcaagcaaatggtcacctcggagcgccacgaaaaggctctgcttggcggtgtcgagcgactcttgtcggccctcagcaaggagcaccctgaccttatgagcagtgacaagattgtcaagattcttcaccagctgtatgacaaggatctcgtcagcgaggaagttgtgaccaagtggggtagcaaggccagcaagaagtatgtcgaccttccaacctcgaagaagattcgccgcgccgccgagccgttcatcaagtggcttgaggaagccgaggaggatgagtcttccgaagaggagtaa

SEQ ID NO: 15557 - protein, 433 aa, Muscodor strobelii
  misc_feature: SGI Peptide ID NO. 565155
  misc_feature (1)..(129): Pfam Id: PF01873 Pfam Desc: Domain found in IF2B/IF5
  misc_feature (342)..(432): Pfam Id: PF02020 Pfam Desc: eIF4-gamma/eIF5/eIF2-epsilon
  misc_feature (1)..(421): NCBI GI: 46122095 Blast Desc: FG05425.1 [Gibberella zeae PH-1]
  misc_feature (1)..(421): NCBI GI: 39953837 Blast Desc: MGG_08866 [Magnaporthe grisea 70-15] gi|145021195|gb|EDK05324.1| MGG_08866 [Magnaporthe grisea 70-15]
  misc_feature (2)..(421): NCBI GI: 171686014 Blast Desc: protein product [Podospora anserina] gi|170942968|emb|CAP68621.1| protein product [Podospora anserina]
  misc_feature (1)..(424): NCBI GI: 261358288 Blast Desc: eukaryotic translation initiation factor 5 [Verticillium albo-atrum VaMs.102]
  misc_feature (1)..(424): NCBI GI: 119480741 Blast Desc: eukaryotic translation initiation factor 5, [Neosartorya fischeri NRRL 181] gi|119408553|gb|EAW18502.1| eukaryotic translation initiation factor 5, [Neosartorya fischeri
  misc_feature (1)..(424): NCBI GI: 71001104 Blast Desc: eukaryotic translation initiation factor 5 [Aspergillus fumigatus Af293] gi|66852871|gb|EAL93195.1| eukaryotic translation initiation factor 5, [Aspergillus Af293]
  misc_feature (1)..(424): NCBI GI: 159129318 Blast Desc: eukaryotic translation initiation factor 5, [Aspergillus fumigatus A1163]
  misc_feature (1)..(424): NCBI GI: 145246576 Blast Desc: An12g04670 [Aspergillus niger] gi|134080255|emb|CAK97158.1| protein product [Aspergillus niger]
  misc_feature (1)..(424): NCBI GI: 115443386 Blast Desc: ATEG_09878 [Aspergillus terreus NIH2624] gi|114188369|gb|EAU30069.1| ATEG_09878 [Aspergillus terreus NIH2624]
  misc_feature (1)..(424): NCBI GI: 169783828 Blast Desc: [Aspergillus oryzae RIB40] gi|238493653|ref|XP_002378063.1| eukaryotic translation initiation factor 5, [Aspergillus flavus NRRL3357] protein factor
  misc_feature: Useful for introducing or modulating the production of volatile compounds
MALINVRRDVTDAFYRYKMERIQTKIEGKGNGIKTVVVNLSSVAASLARPPGYVIKYFGFELGAQTNIDPPDDRWIINGAHDAPKLQEYLDGFINKFVLCKKCKNPETDVVIKDGHIILDCKACGQRTDVDLRLKLSGFILKNQPKKGGKKDKAERKAARKAKQQAQQNGGKEHGSGSGGENSENGSNDNEENEENGAGSDDEFTRKITAAAEIIDAPTEVKDEEWAVDMSEKAVKARQNQLPDQFRQKLSLGGGGDDEDEDGEGGGNTVYDALGDWIQEEAEKTGSINKVDDIQVYVKAKELGIEAKHRTVLVLVQTLFDENIITQIPKRAAMLKQMVTSERHEKALLGGVERLLSALSKEHPDLMSSDKIVKILHQLYDKDLVSEEVVTKWGSKASKKYVDLPTSKKIRRAAEPFIKWLEEAEEDESSEEE

SEQ ID NO: 15558 - DNA, 3099 bp, Muscodor strobelii
  misc_feature: SGI EST ID NO. CUFF.36887.0
  misc_feature: Variant of the nucleotide sequence at SEQ ID NO 15556
gatgtcttaaatcatgaccatgccttaaggagacgtatcttagggagggagcccttggtttcgagggcggacccctcactcatatggccggaatccagtgtgctgtcctccacactagctcgaaacccataatccacatgagacattacgatatactatacgtaaagagaaaacaggcgtcaccttttgtgacaaagaaatggagtgaatcattagacacaaggtgattgtagccctggaagcgtcagaggtgcgtgcgggaggcaaagaagcctcaggtacatgtagtcagctcccattggccagaaagtggagacttgacggatttatcggatggttccagcacagtaatgacctgtaggctgcagccacagcgactgtgcacgctaaggttgcggagggagccagtcgagcagtctcggccagtgaaggcctttgattgcctggatcgccttagagaaaatgagaacgccaggcccgtgggcagatcaaaaagggccaaggctccaccgtcccgcaatgcccaactttctttccaatttgcaccgtcccctcccacaaccacgtctcccaaaaccgtcttcttttcccagcaatccattttgcaagcccccaggcccgtaacctgcgatactcatcggatacacgctcctatctgcgctgcccgcctctatttctaatcggcgtactgccttgtctcgtctgcccgcaaacgctgcacacgctttgatcaggcggcaatctgccaccatcgcctctgccgcatcctccgcccgtcagaccacgtcgtcttcagaccagtcctcatcatcgtgcagtggcgacgattcggtcctctgcatctcgaccgctctctgcatctctgcagcccctcgtatctcttacagactcccacataacagggtctcaggaacagcatttgtttatgtatcagcacgacaagaccgctgtgtctagacaccttccccctctcacgcggcagtcatttcgcataccgctgcagccctgtagccccaatatcagttcagtcggctgaacctagcagcgatagcatcgcccagagttaatgccttcctacgccagcaactgtctcccagtcacccctatgtcaaccgtcaggactcctttgaacgtctaacctcgtgtggccccctcccgcccctccaccatcgctcgcctccagatcctccagatcagtgcgaatgacgacctagtctctcctcgtgccaatagtcacgcaacctctcacgctcccatcaccacctcagcattgccaatagcgcccgtttaccccctgctgcccctccaacaccgtcatcatggctctcatcaacgtgcgccgcgacgtcaccgacgccttctatcgttataagatggaaagaatccagaccaagatcgaaggcaaaggcaacggcatcaagacggtcgtcgtcaacctgagcagcgtcgctgcctccctcgcccgccccccgggatatgtcatcaagtacttcggtttcgagctcggtgctcagaccaacattgaccctcccgatgaccgctggatcatcaacggcgcccacgacgcccccaagctgcaggagtatctcgatgggttcatcaacaagttcgttctctgcaagaaatgcaagaaccccgagaccgacgtcgtcatcaaggatggccacattattctcgactgcaaagcctgtggtcagcgcaccgatgtcgaccttcgcctcaagctcagcggcttcatcttgaagaaccagcccaagaagggcggcaagaaggacaaggccgagcgcaaggcggcccgcaaggctaagcagcaggcccagcaaaacggcggcaaagaacatggcagtggcagtggtggagagaattccgagaatggctccaacgacaacgaggagaatgaggagaacggcgccggtagtgatgacgagttcacccgcaagatcactgctgcagccgagattatcgacgctcccactgaggtcaaggatgaagagtgggctgtcgacatgtccgagaaggctgtcaaggctcgtcagaaccagctccccgaccaattccgtcagaagctctctctcggaggtggcggcgatgacgaggacgaagatggcgaaggcggtggcaacaccgtctacgatgccctcggtgactggattcaggaggaagccgaaaagactggtagcattaacaaggtcgatgatattcaagtttatgttaaggccaaggagcttggtatcgaagccaagcacaggaccgtgctcgttctcgtacagactctgttcgacgagaacatcatcacgcagattcccaagcgcgccgccatgctcaagcaaatggtcacctcggagcgccacgaaaaggctctgcttggcggtgtcgagcgactcttgtcggccctcagcaaggagcaccctgaccttatgagcagtgacaagattgtcaagattcttcaccagctgtatgacaaggatctcgtcagcgaggaagttgtgaccaagtggggtagcaaggccagcaagaagtatgtcgaccttccaacctcgaagaagattcgccgcgccgccgagccgttcatcaagtggcttgaggaagccgaggaggatgagtcttccgaagaggagtaagcagccaatcctcgctttgcagatttggctccaaggctggattatcagatatgggaaatatgcctttcgcaatgtccacatttgtctcagtgggcgctctcgtttggttcgtctatgggaattcccaacttctcttcacttcgtattcggaaaacgtaaagaaaagcacacatttgtttgttgacttgttgttttccacccacccgaccttaagatctggctttcctgtggtcgacggtaccctcagcgcatgtcaattcattgtctacggttctggggtcgtggtttattgctgtagtcttagataggaaaatcatcacttcgctttcaccgatactatgcttaaggggttagatgatgcgtgattatctttgcggtgcaacttcgtaattcggattatcgtggtgttctatttggatttacgaggagcaattcgttggaaatatcgtgaaacatgatttgtcgagagactagctag

SEQ ID NO: 15559 - DNA, 2544 bp, Muscodor strobelii
  misc_feature: SGI cDNA ID NO. 565156
  misc_feature: Encodes the peptide sequence at SEQ ID NO 15560
atgccgcctcattccatgtgcgagtggatgctgggccagaatcttctgccccagccaaaagggggctgcgcgcttcgacatgttgtctccctcgaggtcctcacagatgatgagtcaggctctgacgtctacagcatttctatgcctagacgcaaaccgacttcaacccccgcccccgcctctgctcccgccaagcaggttcggttcaacggcgctcccgtgactaagccagcattgaagccacccaagccagtcttcgttgattccgagacggaagaaaccactgacgtgggcgaagcagtaagtgatgacgaaggatcaccagtcgaggcgcctgatccaacatgtccttgcaccaaatgtattgaggggcgaaggaggctgaaacgaggacagcaggctaagacaagtggtgccatctcgtctggtgatgagactgaagaggagattgcagcttccatccatgcaaagcatctggctaagaaggatgcaaaaaacgccaacaagaaggccgtcatcaaaaacaataacaccaagaagccggagaagaagctcaagcccaagcagaaggaggaaaccgagtctgacgtggccgagtctgaggttgccgaaacttctgacgagcccgctaccaccgacgaggagaccgaagaaacggatggcagcacaaaggccaaggcagctaagaatggcaaaaatggcaagaacggcaaacagagcaataagattaagaacgcaggaaaggtgaaaactaacgccaaggaaaataaggcgaagcaaaagaacaagaagcagccagacggcaagaaagcgggaaagaaaagtccgaagagggatgagtcgtccgcttcagaaactgagacagaatatgaagccgattcggagtccgaagaggaacaaaagcctgccaaatatgtcaaggctcagaaagagaacaagccaaagaagaagaagaaggtcagatttgcgccccattcctccgcggccgacgtacgacagaccaattttctcatgcagccgcacgcctccattatgcaagtcgagcatgctgtcgaagttcctaatgatccacgacctaacgccttctacgataatggcagcggcacaattcgtgtctttcatggaccggcttatggcaacccctctggtgtgctgtaccctaagcaagtctataatatcaagaacacaccggtgggcgtaccgcatcccacgcagaatccatggtacaatggttttgctcctgctggtggaccgcttagccctcaaaatgtgcctccttatgttccagaccgcggaccaccaccacctggtattgatcccattcactggaataatccatggttcgcagggtatggcatgacaggaggaagggaaccggcgccggcaccggcaacaccaactcgagcggaagcagcgaagcccaacggccataggaaactgcctgacatcacttcaccaacgccgtctcaaccgagacgcaaggaccgggacgcaggctgggattcgaatatggttcctatcccatctgttgaagttacggcaccagatggatctccagctatgagatcggatcgatcaaatcggtctgcaggctcgaatagaggaaacacgcagggcgttcaggacgccagcaggagttccaagaagagctcgggcaaacgagatcccgcatccaaggccgttcacaatctcggcagagtactccaggagttggcacttaaggaagaggaggacctcagtcgacggagccagcgctggagtgatcgcagcagcagcaaggagccgagcccgcagcctggatggggaagcaacaatcagaacaacatcaataataatgataataacaacggcggagattggaacaacaatacaaccaacattaccggcaacactaatgactgggcggcaaataacaataatgcggacgcgaatacgggtggtgacagttcgtgggataatacggccgcgccaaatagcaacgagaatacttggggcggggatggcaatgcaaataacgatgcctttgctggtaataatgcgggatggggtggctcttacaacaatggtggcagtaataccagcaaccacggtaatgatgggaataatgatacttggaattcccccgccgacaacaacgcagatacgaacaacgatacatgggacaacactggcgataataacaatagtggatggggtaacgaggaaggagcctcgtcacccaagcaatcacctatcccggggacttggaacagtcctgtcgctagtcctgtcatctcaagcgcctcaaacggtagccgcaaagtgccgtcacacacaagtggtgataacgtagtcggcgaggcatcatctgtgaatagcaaaggcagcagtaaaggcaaagccaagtattcaggcgacgactggggagacgcgaccgtggcacaggatacagggggatactgggacacagcagaaggtcaggcggctgaggaccgaagcacgcggatcaaggccggaagagccaaggaagccgaacaacaaaacggtagctcttcgtggtggtga

SEQ ID NO: 15560 - protein, 847 aa, Muscodor strobelii
  misc_feature: SGI Peptide ID NO. 565156
  misc_feature (1)..(413): NCBI GI: 39953966 Blast Desc: MGG_08881 [Magnaporthe grisea 70-15] gi|145021178|gb|EDK05307.1| MGG_08881 [Magnaporthe grisea 70-15]
  misc_feature (331)..(412): NCBI GI: 46122407 Blast Desc: FG05581.1 [Gibberella zeae PH-1]
  misc_feature (181)..(403): NCBI GI: 156048232 Blast Desc: [Sclerotinia sclerotiorum 1980] gi|154693244|gb|EDN92982.1| [Sclerotinia sclerotiorum 1980]
  misc_feature (3)..(146): NCBI GI: 256729857 Blast Desc: NECHADRAFT_83732 [Nectria haematococca mpVI 77-13-4]
  misc_feature (335)..(387): NCBI GI: 116207344 Blast Desc: [Chaetomium globosum CBS 148.51] gi|88183562|gb|EAQ91030.1| [Chaetomium globosum CBS 148.51]
MPPHSMCEWMLGQNLLPQPKGGCALRHVVSLEVLTDDESGSDVYSISMPRRKPTSTPAPASAPAKQVRFNGAPVTKPALKPPKPVFVDSETEETTDVGEAVSDDEGSPVEAPDPTCPCTKCIEGRRRLKRGQQAKTSGAISSGDETEEEIAASIHAKHLAKKDAKNANKKAVIKNNNTKKPEKKLKPKQKEETESDVAESEVAETSDEPATTDEETEETDGSTKAKAAKNGKNGKNGKQSNKIKNAGKVKTNAKENKAKQKNKKQPDGKKAGKKSPKRDESSASETETEYEADSESEEEQKPAKYVKAQKENKPKKKKKVRFAPHSSAADVRQTNFLMQPHASIMQVEHAVEVPNDPRPNAFYDNGSGTIRVFHGPAYGNPSGVLYPKQVYNIKNTPVGVPHPTQNPWYNGFAPAGGPLSPQNVPPYVPDRGPPPPGIDPIHWNNPWFAGYGMTGGREPAPAPATPTRAEAAKPNGHRKLPDITSPTPSQPRRKDRDAGWDSNMVPIPSVEVTAPDGSPAMRSDRSNRSAGSNRGNTQGVQDASRSSKKSSGKRDPASKAVHNLGRVLQELALKEEEDLSRRSQRWSDRSSSKEPSPQPGWGSNNQNNINNNDNNNGGDWNNNTTNITGNTNDWAANNNNADANTGGDSSWDNTAAPNSNENTWGGDGNANNDAFAGNNAGWGGSYNNGGSNTSNHGNDGNNDTWNSPADNNADTNNDTWDNTGDNNNSGWGNEEGASSPKQSPIPGTWNSPVASPVISSASNGSRKVPSHTSGDNVVGEASSVNSKGSSKGKAKYSGDDWGDATVAQDTGGYWDTAEGQAAEDRSTRIKAGRAKEAEQQNGSSSWW

SEQ ID NO: 15561 - DNA, 1910 bp, Muscodor strobelii
  misc_feature: SGI EST ID NO. CUFF.36866.0
  misc_feature: Variant of the nucleotide sequence at SEQ ID NO 15559
ggacacaaacacccatcttgctgccatcttcattcctgcagttctttcacactgctgagagtctgcaccatcgcgttgacctgctccagcggccacacacaagcacatcccatccattgccatctcaccagaaggcgcccactacttctcaacgcaaccgattgaattctaccgccttctcctaccatccctcttcctcaccttcattcacacgtctcccttcctcgctagcactcctacccggcagaactggtgctcttgcctttccctataaaggcgtgcatcagcacacatcttattcacctctcaacatcacaaactccgacagactgctgcgttcatattagcctcgtatctccaatgccgacatcatgccgcctcattccatgtgcgagtggatgctgggccagaatcttctgccccagccaaaagggggctgcgcgcttcgacatgttgtctccctcgaggtcctcacagatgatgagtcaggctctgacgtctacagcatttctatgcctagacgcaaaccgacttcaacccccgcccccgcctctgctcccgccaagcaggttcggttcaacggcgctcccgtgactaagccagcattgaagccacccaagccagtcttcgttgattccgagacggaagaaaccactgacgtgggcgaagcagtaagtgatgacgaaggatcaccagtcgaggcgcctgatccaacatgtccttgcaccaaatgtattgaggggcgaaggaggctgaaacgaggacagcaggctaagacaagtggtgccatctcgtctggtgatgagactgaagaggagattgcagcttccatccatgcaaagcatctggctaagaaggatgcaaaaaacgccaacaagaaggccgtcatcaaaaacaataacaccaagaagccggagaagaagctcaagcccaagcagaaggaggaaaccgagtctgacgtggccgagtctgaggttgccgaaacttctgacgagcccgctaccaccgacgaggagaccgaagaaacggatggcagcacaaaggccaaggcagctaagaatggcaaaaatggcaagaacggcaaacagagcaataagattaagaacgcaggaaaggtgaaaactaacgccaaggaaaataaggcgaagcaaaagaacaagaagcagccagacggcaagaaagcgggaaagaaaagtccgaagagggatgagtcgtccgcttcagaaactgagacagaatatgaagccgattcggagtccgaagaggaacaaaagcctgccaaatatgtcaaggctcagaaagagaacaagccaaagaagaagaagaaggtcagatttgcgccccattcctccgcggccgacgtacgacagaccaattttctcatgcagccgcacgcctccattatgcaagtcgagcatgctgtcgaagttcctaatgatccacgacctaacgccttctacgataatggcagcggcacaattcgtgtctttcatggaccggcttatggcaacccctctggtgtgctgtaccctaagcaagtctataatatcaagaacacaccggtgggcgtaccgcatcccacgcagaatccatggtacaatggttttgctcctgctggtggaccgcttagccctcaaaatgtgcctccttatgttccagaccgcggaccaccaccacctggtattgatcccattcactggaataatccatggttcgcagggtatggcatgacaggaggaagggaaccggcgccggcaccggcaacaccaactcgagcggaagcagcgaagcccaacggccataggaaactgcctgacatcacttcaccaacgccgtctcaaccgagacgcaaggaccgggacgcaggctgggattcgaatatggttcctatcccatctgttgaagttacg

SEQ ID NO: 15562 - DNA, 2352 bp, Muscodor strobelii
  misc_feature: SGI cDNA ID NO. 565157
  misc_feature: Encodes the peptide sequence at SEQ ID NO 15563
atgatattcaaacggaaacgagccgcttccacctgcaattccgctggccgcgttaccgcccacttcctcctgtccttcctcgccctgtccgcatcaccagccgccgcctctctgtccagtccggacccattttacgacacctcacccgttatccctccattacttcccgaacctccgcaggctgcagaacatgcctttacccttcgccacattctccatcatggcacctaccgccatcccggtctccatcgaaagcgcgacgtgcgggcatccgaggcccaggtctggcttgccgccgaagacggacatcctgccgaatccctcggcgcacccctgaaagcgaagagccgccccaacaagatcgagcgtctggtcgacagacggccggccaccgtcgatcccttggttgccgaggctcgccagcgaggctatgtcctcgcaagctctgcttccgcctggactgtcgatgaggtccctacacccgacgtcaccgacaaggagacggttctcaccatggctttgatagcagcaaatgcttatgtcgcaacgccggacctgccagactgggatgaagtaggcgaccctttcaaccggagtgctgactttggttgggaatacgacggtcttcgaggccatgtgtggggagacgagaccaactcgaccatcgtcattgggctcaagggcacttcgcccgccgttttcgacggcgaggggacgaccacaaacgacaaagagaatgacaatctctttttcagttgctgctgcgcacaacagggccagtggacgtggcaccaggtttgtgactgcgccacgagcacctacagctgcaacaacacgtgcgtgcgcaaggctttgcgcgaggagaaccgctactaccaagctgccagagagctttactccaatgtgaccgagctctatccagattccaatatctgggtggccggtcactctctaggtggcgccgtgagctccttcataggactcacatacggtgtccctgtagtgactttcgaagctgtcccggaggccctggccgctggacgtctaggtctcccggccccgccacatgctgatccagcctaccctcaaagccgcgaatacacgggcgcgtaccattttggtcatactgccgatccaatttatatcggcacgtgcaatggtgccactgcctcttgctcttttgcgggatacgctcttgagacggcatgtcatactggctatgagtgtacatacgatacagtcgccgatcacggttggcgcgtgggcattggaactcacaagatccgatcagttattaacgacgtgatcagaaagtacgatgatgttccagagtgcaagttcactccagaatgcagggattgcgcatcatggaagatgtatgaaagcaacagcacggacggtcataccacaaccaccacctccgtgacctccaaaacccgcacccgaacagcgacgtgtgaaactccgggatggtggggttgcaacgatccaaccacgacaacagataaaagagccaagcgaattgatatgcttttcatcggcttgacgggatcgatagccacaggcaaatcgacagtttcttctattctatcttcgcctccatatgctttacccatcattgacgccgatgtcctggcgcggcaagtggtggagcctggcaccaacggctacaaagcgatcataaagcacttcgggtctaccactcccgaccttctggtctctgtttccgaatccatgcccgagaatgggccggacggtaaaggcaggccgttgaacagaccagcactgggaaggcgtgtgtttggtattagcgatgagcgcaagaaagaccgcgctgttttgaatggcatcgtacatccagcggtgcgcaaaagaacctatcaggccatcctatggtactatctaacggggcattgggccgtggtccttgatgttcctttactgttcgagagtggatgggatagactatcaggtgttgtcatggttgttgcggtccaggatccaaaggtccagatgaagaggttgatggatcgcgatgcacacctgaccgccgaggatgcggagaaccgggtacagagtcagacggatgtgagactaaaggcgagacgatgtgaggccaggggcaagggaagaggtgtagtggtatggaatgatgggaccagagaagagctgcaagccaacatcgacaactgtctgaaagaaatcaaacagagcagtccgtcttggtggaatactctgtgcttcgtttgccctccgatagcacttgtggcaggcgcatggacgtactggcagaacattgggattaatcgcaaatggcaggagcaagagctgaaggaaaaggccaaactttga

SEQ ID NO: 15563 - protein, 783 aa, Muscodor strobelii
  misc_feature: SGI Peptide ID NO. 565157
  misc_feature (511)..(723): Pfam Id: PF01121 Pfam Desc: Dephospho-CoA kinase
  misc_feature (511)..(694): Pfam Id: PF01121 Pfam Desc: Dephospho-CoA kinase
  misc_feature (1)..(496): NCBI GI: 171686898 Blast Desc: protein product [Podospora anserina] gi|170943410|emb|CAP69063.1| protein product [Podospora anserina]
  misc_feature (51)..(461): NCBI GI: 116191939 Blast Desc: CHGG_05687 [Chaetomium globosum CBS 148.51] gi|121786562|sp|Q2H6M8.1|ATG15_CHAGB RecName: Full= lipase atg15; AltName: Full=Autophagy-related protein 15 CHGG_05687 [Chaetomium
  misc_feature (12)..(496): NCBI GI: 46111275 Blast Desc: FG02519.1 [Gibberella zeae PH-1]
  misc_feature (4)..(459): NCBI GI: 164425053 Blast Desc: NCU06436 [Neurospora crassa OR74A] gi|166989540|sp|Q7RYY1.2|ATG15_NEUCR RecName: Full= lipase atg-15; AltName: Full=Autophagy-related protein 15 conserved
  misc_feature (5)..(504): NCBI GI: 156064451 Blast Desc: SS1G_00233 [Sclerotinia sclerotiorum 1980] gi|154691095|gb|EDN90833.1| SS1G_00233 [Sclerotinia sclerotiorum 1980]
  misc_feature (23)..(497): NCBI GI: 261192412 Blast Desc: autophagy related lipase [Ajellomyces dermatitidis SLH14081] gi|239589488|gb|EEQ72131.1| autophagy related lipase [Ajellomyces dermatitidis SLH14081] gi|239615204|gb|EEQ92191.1|
  misc_feature (23)..(497): NCBI GI: 226279686 Blast Desc: autophagy-related protein 15 [Paracoccidioides brasiliensis Pb01]
  misc_feature (23)..(498): NCBI GI: 226289565 Blast Desc: autophagy-related protein 15 [Paracoccidioides brasiliensis Pb18]
  misc_feature (48)..(496): NCBI GI: 166989541 Blast Desc: autophagy-related protein 15 [Paracoccidioides brasiliensis Pb18]
  misc_feature (7)..(496): NCBI GI: 169598538 Blast Desc: SNOG_02073 [Phaeosphaeria nodorum SN15] gi|121926026|sp|Q0V1P1.1|AT151_PHANO RecName: Full= lipase ATG15-1; AltName: Full=Autophagy-related protein 15 SNOG_02073
  misc_feature (64)..(461): SWISSPROT Homolog: EC 3.1.1.3 Triacylglycerol lipase
MIFKRKRAASTCNSAGRVTAHFLLSFLALSASPAAASLSSPDPFYDTSPVIPPLLPEPPQAAEHAFTLRHILHHGTYRHPGLHRKRDVRASEAQVWLAAEDGHPAESLGAPLKAKSRPNKIERLVDRRPATVDPLVAEARQRGYVLASSASAWTVDEVPTPDVTDKETVLTMALIAANAYVATPDLPDWDEVGDPFNRSADFGWEYDGLRGHVWGDETNSTIVIGLKGTSPAVFDGEGTTTNDKENDNLFFSCCCAQQGQWTWHQVCDCATSTYSCNNTCVRKALREENRYYQAARELYSNVTELYPDSNIWVAGHSLGGAVSSFIGLTYGVPVVTFEAVPEALAAGRLGLPAPPHADPAYPQSREYTGAYHFGHTADPIYIGTCNGATASCSFAGYALETACHTGYECTYDTVADHGWRVGIGTHKIRSVINDVIRKYDDVPECKFTPECRDCASWKMYESNSTDGHTTTTTSVTSKTRTRTATCETPGWWGCNDPTTTTDKRAKRIDMLFIGLTGSIATGKSTVSSILSSPPYALPIIDADVLARQVVEPGTNGYKAIIKHFGSTTPDLLVSVSESMPENGPDGKGRPLNRPALGRRVFGISDERKKDRAVLNGIVHPAVRKRTYQAILWYYLTGHWAVVLDVPLLFESGWDRLSGVVMVVAVQDPKVQMKRLMDRDAHLTAEDAENRVQSQTDVRLKARRCEARGKGRGVVVWNDGTREELQANIDNCLKEIKQSSPSWWNTLCFVCPPIALVAGAWTYWQNIGINRKWQEQELKEKAKL

SEQ ID NO: 15564 - DNA, 2383 bp, Muscodor strobelii
  misc_feature: SGI EST ID NO. CUFF.36946.0
  misc_feature: Variant of the nucleotide sequence at SEQ ID NO 15562
gttgtcttatctgaagacttatctgggtgcctacctggatctccatgggccccagcagcccgagtacctgtcccaattagcgttgctgggccggagcaaagtaccagccctgcccccagaacggccgagggcggcagtgtgttactacaagtcgtcatccaacagttcatcacgaggcaaccatccaaacatcttcaatcaacaagcctacatccctccatttgtacattacacggcgaactgactgcttcttttgcataatcgatactttatctcccctcctctacctctcacctaccatttctttagggcggatgcaagcatgatattcaaacggaaacgagccgcttccacctgcaattccgctggccgcgttaccgcccacttcctcctgtccttcctcgccctgtccgcatcaccagccgccgcctctctgtccagtccggacccattttacgacacctcacccgttatccctccattacttcccgaacctccgcaggctgcagaacatgcctttacccttcgccacattctccatcatggcacctaccgccatcccggtctccatcgaaagcgcgacgtgcgggcatccgaggcccaggtctggcttgccgccgaagacggacatcctgccgaatccctcggcgcacccctgaaagcgaagagccgccccaacaagatcgagcgtctggtcgacagacggccggccaccgtcgatcccttggttgccgaggctcgccagcgaggctatgtcctcgcaagctctgcttccgcctggactgtcgatgaggtccctacacccgacgtcaccgacaaggagacggttctcaccatggctttgatagcagcaaatgcttatgtcgcaacgccggacctgccagactgggatgaagtaggcgaccctttcaaccggagtgctgactttggttgggaatacgacggtcttcgaggccatgtgtggggagacgagaccaactcgaccatcgtcattgggctcaagggcacttcgcccgccgttttcgacggcgaggggacgaccacaaacgacaaagagaatgacaatctctttttcagttgctgctgcgcacaacagggccagtggacgtggcaccaggtttgtgactgcgccacgagcacctacagctgcaacaacacgtgcgtgcgcaaggctttgcgcgaggagaaccgctactaccaagctgccagagagctttactccaatgtgaccgagctctatccagattccaatatctgggtggccggtcactctctaggtggcgccgtgagctccttcataggactcacatacggtgtccctgtagtgactttcgaagctgtcccggaggccctggccgctggacgtctaggtctcccggccccgccacatgctgatccagcctaccctcaaagccgcgaatacacgggcgcgtaccattttggtcatactgccgatccaatttatatcggcacgtgcaatggtgccactgcctcttgctcttttgcgggatacgctcttgagacggcatgtcatactggctatgagtgtacatacgatacagtcgccgatcacggttggcgcgtgggcattggaactcacaagatccgatcagttattaacgacgtgatcagaaagtacgatgatgttccagagtgcaagttcactccagaatgcagggattgcgcatcatggaagatgtatgaaagcaacagcacggacggtcataccacaaccaccacctccgtgacctccaaaacccgcacccgaacagcgacgtgtgaaactccgggatggtggggttgcaacgatccaaccacgacaacagatgtgcctacatctacatcatccgaaactacgtctacgtctacgtcaacatcgacgtgcaagactccgggatggtttggttgcaaagacaagactactagcttttcattcacttcgacctcctctattgcaacttctacaagcacatcctgtctgacaccaggatggtggggatgcagagattcgggagcaacaactactactgcccaccctatcacaacgccacctactattcccacagctacaagtgcttccagtgtgccaccagagccgacaaactctacgaagaagcactgtattcacagaaattggtttggtacatgcaaagaatgggcaaaggatgacaaatttttggaggcaaatgatgagatatagcattattatggagtcttaaggttgtacatacgttgaattgattgccttctacatactacggtgttatctaagtatggcaaatgagtgaactaaccatatcgatcaatgaataagctcagcgtatattgttatgatgattgcccgattagtcctatagactcaattcagaatggtcttacgaca

SEQ ID NO: 15565 - DNA, 2106 bp, Muscodor strobelii
  misc_feature: SGI cDNA ID NO. 565158
  misc_feature: Reduced expression when VOC is produced
  misc_feature: Encodes the peptide sequence at SEQ ID NO 15566
atgcccacgtcctccgcaaccaaggggtctgaccctaaacctgaagcagtcaagactcccacttctttgaaaaggctgtcaaaggccgatgtcgtagtaactcaggacaatctacctctcgaccaagaacatgcccccgatgccttcgaatccgaacccgtggaggacgagcttgaggcaccccgagcctccgtcgatatggacatgatacccattgagctagtcagtatgacagacaatttcatcgatagcttgtccgccaaagtccatcccacacctccgaatatcgataatctatccagcatgtttcaaagcttctatctcacagctgctcagcacatccaagtccatatcgctgctctcgctacacgtcagacccgcgaggcttcacaaaacgcccagctctcctctcgaccttctgctgcgagcttgttgcgcgcaaaggccgtatctataggtagcaaagacaagggcaagccaactcaagtaaaagattctgaccaacagatgctcaccgccgaggaactagccgatagaaagcgagccaggagagcacttgaactaaaaagaatactactagaggaagccgttgagcgacgactctgtgagggtatctatgatcgaatataccgtcataaatccacccacgatgaagcacaggacgataaattacgttcaaagacagccgcccttgcccttgtcggtattggaccagctgatcttggcgtcgatctgggagagctggacgatgatgacccagaagcagtggcgaagaagaaccaagagataaaggattatctcgaacaggcgcggaaagatctcatcacgatgagcgagaagagataccccctgggcaagctcaattatttaaaagcggctcataagagcatcgtcgatacgctatctcatttccatccatcgtcctctgcagacgagatcatgcccatgctcatcttcactctcattacaatgccacccgaaaaactgaacgtcattagcgattcaaacttcgtccagcgatttcgatgggaagataaaatcgagggggaagctgcctactgcctaacaaatttggaggctgctataaccttcttacagaccgtcgacctagcaagtctacgagctgatgaggcggctcaggtgccatccaaggccgttacacccatgtcagaaacgttccctcctgcgttcacctccgtatcagagtccagtgcagtggctgcagccacggaaactacgacgggagcgaaacaagcaccagcagctgcgaatcttcgagctgcgcttcagcgtcgtaggcttagtgatctgatccagtcaccagctcttgccattggcacagctagcgattcgttcttcaacactgctgatcagggtatcaagaccatcggaagcagtctgaatgaaagttacagattccttcttggaaagctgcgggatagctctgccgatggaagggagcttgtcgtgccgcgtaccctggacgatgctcgcaaactggtaggcacaccgccgcctgatgacgatgtctctatcgaggccttgatgagagatactgatgagagcggtcgcccactgttggtcaaggacgacagggttctgtctctggtgggtggcaaacgaggggctcgagatcacagcacagatagcaaccgcagtgggcgaagcgttagtggcgcgaaaaaggctgtgttcacttcagaagacagcaaggatgtctcgcccaacaaccagggccctctctcgacgagctcgaacccggcgctagttgagtcgatgcgcaatcttggcagttcatttaatcccataagccggctctcgaacatgagcatccgtggattcggtcgcgccgtcacaaatccaccaacgccaatccccaaggacccggccagtaaaccattagagggtggcgacttagcaacggctttcccggacattgcagcttctttaccacccaaggatgtgaaaaagatcgatcctccgaagaagcgctttatggagcttcaaagtccatctgatctcaaactaggcgaggttctagacctgctacgagattatcggagactggcaaatgcgttgaaagaaatggatgcgttcaaggagtaa

SEQ ID NO: 15566 - protein, 701 aa, Muscodor strobelii
  misc_feature: SGI Peptide ID NO. 565158
  misc_feature (267)..(370): Pfam Id: PF02204 Pfam Desc: Vacuolar sorting protein 9 (VPS9) domain
  misc_feature (2)..(701): NCBI GI: 39977147 Blast Desc: MGG_06476 [Magnaporthe grisea 70-15] gi|145016104|gb|EDK00594.1| MGG_06476 [Magnaporthe grisea 70-15]
  misc_feature (41)..(700): NCBI GI: 46125801 Blast Desc: FG07278.1 [Gibberella zeae PH-1]
  misc_feature (45)..(700): NCBI GI: 256733223 Blast Desc: [Nectria haematococca mpVI 77-13-4]
  misc_feature (41)..(693): NCBI GI: 85084527 Blast Desc: NCU06435 [Neurospora crassa OR74A] gi|28918416|gb|EAA28090.1| conserved [Neurospora crassa OR74A]
  misc_feature (43)..(701): NCBI GI: 116191935 Blast Desc: CHGG_05685 [Chaetomium globosum CBS 148.51] gi|88181598|gb|EAQ89066.1| CHGG_05685 [Chaetomium globosum CBS 148.51]
  misc_feature (47)..(698): NCBI GI: 156064447 Blast Desc: SS1G_00231 [Sclerotinia sclerotiorum 1980] gi|154691093|gb|EDN90831.1| SS1G_00231 [Sclerotinia sclerotiorum 1980]
  misc_feature (32)..(698): NCBI GI: 154323157 Blast Desc: BC1G_00921 [Botryotinia fuckeliana B05.10] gi|150848255|gb|EDN23448.1| BC1G_00921 [Botryotinia fuckeliana B05.10]
  misc_feature (40)..(701): NCBI GI: 171686900 Blast Desc: protein product [Podospora anserina] gi|170943411|emb|CAP69064.1| protein product [Podospora anserina]
  misc_feature (46)..(699): NCBI GI: 261354288 Blast Desc: conserved [Verticillium albo-atrum VaMs.102]
  misc_feature (41)..(693): NCBI GI: 238493181 Blast Desc: VPS9 domain protein, [Aspergillus flavus NRRL3357] gi|220696321|gb|EED52663.1| VPS9 domain protein, [Aspergillus flavus NRRL3357]
  misc_feature: Useful for introducing or modulating the production of volatile compounds
MPTSSATKGSDPKPEAVKTPTSLKRLSKADVVVTQDNLPLDQEHAPDAFESEPVEDELEAPRASVDMDMIPIELVSMTDNFIDSLSAKVHPTPPNIDNLSSMFQSFYLTAAQHIQVHIAALATRQTREASQNAQLSSRPSAASLLRAKAVSIGSKDKGKPTQVKDSDQQMLTAEELADRKRARRALELKRILLEEAVERRLCEGIYDRIYRHKSTHDEAQDDKLRSKTAALALVGIGPADLGVDLGELDDDDPEAVAKKNQEIKDYLEQARKDLITMSEKRYPLGKLNYLKAAHKSIVDTLSHFHPSSSADEIMPMLIFTLITMPPEKLNVISDSNFVQRFRWEDKIEGEAAYCLTNLEAAITFLQTVDLASLRADEAAQVPSKAVTPMSETFPPAFTSVSESSAVAAATETTTGAKQAPAAANLRAALQRRRLSDLIQSPALAIGTASDSFFNTADQGIKTIGSSLNESYRFLLGKLRDSSADGRELVVPRTLDDARKLVGTPPPDDDVSIEALMRDTDESGRPLLVKDDRVLSLVGGKRGARDHSTDSNRSGRSVSGAKKAVFTSEDSKDVSPNNQGPLSTSSNPALVESMRNLGSSFNPISRLSNMSIRGFGRAVTNPPTPIPKDPASKPLEGGDLATAFPDIAASLPPKDVKKIDPPKKRFMELQSPSDLKLGEVLDLLRDYRRLANALKEMDAFKE

SEQ ID NO: 15567 - DNA, 4755 bp, Muscodor strobelii
  misc_feature: SGI EST ID NO. CUFF.36973.1
  misc_feature: Variant of the nucleotide sequence at SEQ ID NO 15565
gcgagacaagagcctgaacaccaagcgagtcctggaccacttcatcttgttattaacgaacaagctgcatcactcgacgtctgatcatgcccacgtcctccgcaaccaaggggtctgaccctaaacctgaagcagtcaagactcccacttctttgaaaaggctgtcaaaggccgatgtcgtagtaactcaggacaatctacctctcgaccaagaacatgcccccgatgccttcgaatccgaacccgtggaggacgagcttgaggcaccccgagcctccgtcgatatggacatgatacccattgagctagtcagtatgacagacaatttcatcgatagcttgtccgccaaagtccatcccacacctccgaatatcgataatctatccagcatgtttcaaagcttctatctcacagctgctcagcacatccaagtccatatcgctgctctcgctacacgtcagacccgcgaggcttcacaaaacgcccagctctcctctcgaccttctgctgcgagcttgttgcgcgcaaaggccgtatctataggtagcaaagacaagggcaagccaactcaagtaaaagattctgaccaacagatgctcaccgccgaggaactagccgatagaaagcgagccaggagagcacttgaactaaaaagaatactactagaggaagccgttgagcgacgactctgtgagggtatctatgatcgaatataccgtcataaatccacccacgatgaagcacaggacgataaattacgttcaaagacagccgcccttgcccttgtcggtattggaccagctgatcttggcgtcgatctgggagagctggacgatgatgacccagaagcagtggcgaagaagaaccaagagataaaggattatctcgaacaggcgcggaaagatctcatcacgatgagcgagaagagataccccctgggcaagctcaattatttaaaagcggctcataagagcatcgtcgatacgctatctcatttccatccatcgtcctctgcagacgagatcatgcccatgctcatcttcactctcattacaatgccacccgaaaaactgaacgtcattagcgattcaaacttcgtccagcgatttcgatgggaagataaaatcgagggggaagctgcctactgcctaacaaatttggaggctgctataaccttcttacagaccgtcgacctagcaagtctacgagctgatgaggcggctcaggtgccatccaaggccgttacacccatgtcagaaacgttccctcctgcgttcacctccgtatcagagtccagtgcagtggctgcagccacggaaactacgacgggagcgaaacaagcaccagcagctgcgaatcttcgagctgcgcttcagcgtcgtaggcttagtgatctgatccagtcaccagctcttgccattggcacagctagcgattcgttcttcaacactgctgatcagggtatcaagaccatcggaagcagtctgaatgaaagttacagattccttcttggaaagctgcgggatagctctgccgatggaagggagcttgtcgtgccgcgtaccctggacgatgctcgcaaactggtaggcacaccgccgcctgatgacgatgtctctatcgaggccttgatgagagatactgatgagagcggtcgcccactgttggtcaaggacgacagggttctgtctctggtgggtggcaaacgaggggctcgagatcacagcacagatagcaaccgcagtgggcgaagcgttagtggcgcgaaaaaggctgtgttcacttcagaagacagcaaggatgtctcgcccaacaaccagggccctctctcgacgagctcgaacccggcgctagttgagtcgatgcgcaatcttggcagttcatttaatcccataagccggctctcgaacatgagcatccgtggattcggtcgcgccgtcacaaatccaccaacgccaatccccaaggacccggccagtaaaccattagagggtggcgacttagcaacggctttcccggacattgcagcttctttaccacccaaggatgtgaaaaagatcgatcctccgaagaagcgctttatggagcttcaaagtccatctgatctcaaactaggcgaggttctagacctgctacgagattatcggagactggcaaatgcgttgaaagaaatggatgcgttcaaggagtaatgtaaacaacggacggcctatgtgggcgctcgaaactgttgctttggtaatagagaacttgcagagttgtttggaagtagatggttgggaacggaaacacggatatagaacttgggaaggctttgcatgatacaggagtttggtgaacgacttgttttgaattgacgaatgattctcagcgttgggtctaattgagaaaatattgctttcgattagcgatagtcttgggggagacggtggatagactaaccataaagatatggtttgcatttctccattgttgatatctcacagaggatattgcattgtattccatcgtgaactattatcagcttcagtctctgagtggacaaattcgacattcatgacatattttgatacaaagattctgattaatctggtctttggggtggtgctcacttcctaatcttgagtgaccttcgacgtgcgtcccgtatttctgtctatattgttttccgcccctttttattttctgataaaaagtaatcatagtgcacaactactaatcatgacgtaccagaagaacagagttgctgatttcagattgtcttggtgggctttgacggctcagtcttctagtgctggacaaagtcaactctgattcttggatgtgatccatgtccatacagcttgagaaatgccgcgaagagtcccagagctgatgagaatgaatatacacagtacacattatctacatagccattcttgcgtctatcgaatacacgcttttccaaacgttgaaactgacgctggcgtcgtcctatatatacttgtacgggttcataattcctttctatatcaattgtcagcaaatgagggatgtaaacggttcttgtgataagaattggggtcctaccggatcgtatagctttttgatctgcttcatcaaatcaaccatagtctcgtttctgctatagccaatgtacttcttcttggctatcccaagaccgtgctcggcactgatactgccatttaccttacccacccactcatacacaaatggctctaggatttcctctacccgcttgtcgtatctccgtacagcgacatttagatggagattactgtcgcccatgtggccgtaacctaccacctctaccacaggaaagtcgtccgtctcacccttcaaaccagcctcttctattctcaccctcgtatcatcgacaagcctgtacagatcctttaggggaattgaaacatcgtacttgtacacgcctccccagtggcctaagcattccggaatgctctctcgctggctccacaatgccttagtctgagtttcatcctgtgacaggacaccatcagcgatgatctccttggacatgacgtcttccaggaattgctcgagtttcgcggcgtcgtgctcggcgttggatccgctcgtctcgatgagacagtagaacgggtgctcgtcctccagaggccgcttattttcgcgcactttatgcacgaggtgttgactgtacgagtccatgagctcgaaagcagaaagaatctcggacagttgagccttggcctctcggaaagcgagctgtatcttctcgaacgattcagcacccagaaatgccacattgacagctttggaacgctgcgggcattggatcgatattgcagtgatcatgccaattgtaccttcgccaccgatgaaaagctgcttgagatcatatccagtgttattcttgcgcagcctgctaaggtcatcaacgatcgtgccgtccggtaatacagcctcaatccccaggacactgccgtgtaagcttccgtagcggaggagacggagaccgccggcattggtcgcgacgttgccaccgatttgacacgaacccttggcaccgagatctagcgggaataaatagcctttctcggtaagaaactggtcggcgacttctaatacaacaccagcgtcggcgacaagtacaccgctaacttcgtcgaaaaaccggatttggttcatgcggctagtgttgaggacaatttcgtcgaagactggcacagagccaccgacaagaccagtgtttccaccctggggcacgacggccagcatattgtcattgcagtacctcaagatcttgctgacctcttcagtagacccaggcttgaggaccagcttgcagtgaccacggtattttctcatccaatcgccattgtacggctccatgtcctcggcggagacttcggctgtaacaccatcaattatggcggagtccttgccaaggagatcgcggaagtatgccacatgttcgctggtgagctgcgcaaatcgaggatcacgcttgatctcggggtacgtatcggtggtaaacttggcgctgcgcgaaacggattgccgcaaacgtcgcacaggtgtactcgagatgctccgggaagcagacgtgcttggtctcggaacgcagacagacttcagaagcgcaggcgccgctacgcgccgggcgataggggcgacttttgttctgcaagccatctgggaggaagcctggttgacgcagagacgctggagggaaaaaagtaaaagtgccctgcacattcgcagagcttatgggcg

SEQ ID NO: 15568 - DNA, 1701 bp, Muscodor strobelii
  misc_feature: SGI cDNA ID NO. 565159
  misc_feature: Reduced expression when VOC is produced
  misc_feature: Encodes the peptide sequence at SEQ ID NO 15569
atgtgcagggcacttttacttttttccctccagcgtctctgcgtcaaccaggcttcctcccagatggcttgcagaacaaaagtcgcccctatcgcccggcgcgtagcggcgcctgcgcttctgaagtctgtctgcgttccgagaccaagcacgtctgcttcccggagcatctcgagtacacctgtgcgacgtttgcggcaatccgtttcgcgcagcgccaagtttaccaccgatacgtaccccgagatcaagcgtgatcctcgatttgcgcagctcaccagcgaacatgtggcatacttccgcgatctccttggcaaggactccgccataattgatggtgttacagccgaagtctccgccgaggacatggagccgtacaatggcgattggatgagaaaataccgtggtcactgcaagctggtcctcaagcctgggtctactgaagaggtcagcaagatcttgaggtactgcaatgacaatatgctggccgtcgtgccccagggtggaaacactggtcttgtcggtggctctgtgccagtcttcgacgaaattgtcctcaacactagccgcatgaaccaaatccggtttttcgacgaagttagcggtgtacttgtcgccgacgctggtgttgtattagaagtcgccgaccagtttcttaccgagaaaggctatttattcccgctagatctcggtgccaagggttcgtgtcaaatcggtggcaacgtcgcgaccaatgccggcggtctccgtctcctccgctacggaagcttacacggcagtgtcctggggattgaggctgtattaccggacggcacgatcgttgatgaccttagcaggctgcgcaagaataacactggatatgatctcaagcagcttttcatcggtggcgaaggtacaattggcatgatcactgcaatatcgatccaatgcccgcagcgttccaaagctgtcaatgtggcatttctgggtgctgaatcgttcgagaagatacagctcgctttccgagaggccaaggctcaactgtccgagattctttctgctttcgagctcatggactcgtacagtcaacacctcgtgcataaagtgcgcgaaaataagcggcctctggaggacgagcacccgttctactgtctcatcgagacgagcggatccaacgccgagcacgacgccgcgaaactcgagcaattcctggaagacgtcatgtccaaggagatcatcgctgatggtgtcctgtcacaggatgaaactcagactaaggcattgtggagccagcgagagagcattccggaatgcttaggccactggggaggcgtgtacaagtacgatgtttcaattcccctaaaggatctgtacaggcttgtcgatgatacgagggtgagaatagaagaggctggtttgaagggtgagacggacgactttcctgtggtagaggtggtaggttacggccacatgggcgacagtaatctccatctaaatgtcgctgtacggagatacgacaagcgggtagaggaaatcctagagccatttgtgtatgagtgggtgggtaaggtaaatggcagtatcagtgccgagcacggtcttgggatagccaagaagaagtacattggctatagcagaaacgagactatggttgatttgatgaagcagatcaaaaagctatacgatccgaaaggaattatgaacccgtacaagtatatatag

SEQ ID NO: 15569 - protein, 566 aa, Muscodor strobelii
  misc_feature: SGI Peptide ID NO. 565159
  misc_feature (313)..(565): Pfam Id: PF02913 Pfam Desc: FAD linked oxidases, C-terminal domain
  misc_feature (138)..(277): Pfam Id: PF01565 Pfam Desc: FAD binding domain
  misc_feature (22)..(566): NCBI GI: 116192003 Blast Desc: conserved [Chaetomium globosum CBS 148.51] gi|88181632|gb|EAQ89100.1| conserved [Chaetomium globosum CBS 148.51]
  misc_feature (22)..(566): NCBI GI: 85084552 Blast Desc: D-lactate dehydrogenase 2, mitochondrial precursor [Neurospora crassa OR74A] gi|28918422|gb|EAA28096.1| D-lactate dehydrogenase 2, mitochondrial precursor [Neurospora crassa
  misc_feature (48)..(566): NCBI GI: 156050231 Blast Desc: SS1G_07702 [Sclerotinia sclerotiorum 1980] gi|154692103|gb|EDN91841.1| SS1G_07702 [Sclerotinia sclerotiorum 1980]
  misc_feature (28)..(566): NCBI GI: 154317796 Blast Desc: BC1G_02881 [Botryotinia fuckeliana B05.10] gi|150843539|gb|EDN18732.1| BC1G_02881 [Botryotinia fuckeliana B05.10]
  misc_feature (22)..(556): NCBI GI: 145608664 Blast Desc: MGG_12830 [Magnaporthe grisea 70-15] gi|145016107|gb|EDK00597.1| MGG_12830 [Magnaporthe grisea 70-15]
  misc_feature (22)..(558): NCBI GI: 171686842 Blast Desc: protein product [Podospora anserina] gi|170943382|emb|CAP69035.1| protein product [Podospora anserina]
  misc_feature (23)..(566): NCBI GI: 255955513 Blast Desc: Pc21g14970 [Penicillium chrysogenum Wisconsin 54-1255] gi|211590220|emb|CAP96394.1| Pc21g14970 [Penicillium chrysogenum Wisconsin 54-1255]
  misc_feature (46)..(566): NCBI GI: 169615923 Blast Desc: SNOG_11128 [Phaeosphaeria nodorum SN15] gi|111060507|gb|EAT81627.1| SNOG_11128 [Phaeosphaeria nodorum SN15]
  misc_feature (32)..(566): NCBI GI: 212534968 Blast Desc: actin interacting protein 2 [Penicillium marneffei ATCC 18224] gi|210070039|gb|EEA24129.1| actin interacting protein 2 [Penicillium marneffei ATCC 18224]
  misc_feature (23)..(566): NCBI GI: 115437406 Blast Desc: D-lactate dehydrogenase 2, mitochondrial precursor [Aspergillus terreus NIH2624] gi|114188617|gb|EAU30317.1| D-lactate dehydrogenase 2, mitochondrial precursor [Aspergillus
  misc_feature (75)..(566): SWISSPROT Homolog: EC 1.1.2.4 D-lactate dehydrogenase (cytochrome)
  misc_feature: Useful for introducing or modulating the production of volatile compounds
MCRALLLFSLQRLCVNQASSQMACRTKVAPIARRVAAPALLKSVCVPRPSTSASRSISSTPVRRLRQSVSRSAKFTTDTYPEIKRDPRFAQLTSEHVAYFRDLLGKDSAIIDGVTAEVSAEDMEPYNGDWMRKYRGHCKLVLKPGSTEEVSKILRYCNDNMLAVVPQGGNTGLVGGSVPVFDEIVLNTSRMNQIRFFDEVSGVLVADAGVVLEVADQFLTEKGYLFPLDLGAKGSCQIGGNVATNAGGLRLLRYGSLHGSVLGIEAVLPDGTIVDDLSRLRKNNTGYDLKQLFIGGEGTIGMITAISIQCPQRSKAVNVAFLGAESFEKIQLAFREAKAQLSEILSAFELMDSYSQHLVHKVRENKRPLEDEHPFYCLIETSGSNAEHDAAKLEQFLEDVMSKEIIADGVLSQDETQTKALWSQRESIPECLGHWGGVYKYDVSIPLKDLYRLVDDTRVRIEEAGLKGETDDFPVVEVVGYGHMGDSNLHLNVAVRRYDKRVEEILEPFVYEWVGKVNGSISAEHGLGIAKKKYIGYSRNETMVDLMKQIKKLYDPKGIMNPYKYI

SEQ ID NO: 15570 - DNA, 5340 bp, Muscodor strobelii
  misc_feature: SGI EST ID NO. CUFF.36974.0
  misc_feature: Variant of the nucleotide sequence at SEQ ID NO 15568
cgagatcgcccataagctctgcgaatgtgcagggcacttttacttttttccctccagcgtctctgcgtcaaccaggcttcctcccagatggcttgcagaacaaaagtcgcccctatcgcccggcgcgtagcggcgcctgcgcttctgaagtctgtctgcgttccgagaccaagcacgtctgcttcccggagcatctcgagtacacctgtgcgacgtttgcggcaatccgtttcgcgcagcgccaagtttaccaccgatacgtaccccgagatcaagcgtgatcctcgatttgcgcagctcaccagcgaacatgtggcatacttccgcgatctccttggcaaggactccgccataattgatggtgttacagccgaagtctccgccgaggacatggagccgtacaatggcgattggatgagaaaataccgtggtcactgcaagctggtcctcaagcctgggtctactgaagaggtcagcaagatcttgaggtactgcaatgacaatatgctggccgtcgtgccccagggtggaaacactggtcttgtcggtggctctgtgccagtcttcgacgaaattgtcctcaacactagccgcatgaaccaaatccggtttttcgacgaagttagcggtgtacttgtcgccgacgctggtgttgtattagaagtcgccgaccagtttcttaccgagaaaggctatttattcccgctagatctcggtgccaagggttcgtgtcaaatcggtggcaacgtcgcgaccaatgccggcggtctccgtctcctccgctacggaagcttacacggcagtgtcctggggattgaggctgtattaccggacggcacgatcgttgatgaccttagcaggctgcgcaagaataacactggatatgatctcaagcagcttttcatcggtggcgaaggtacaattggcatgatcactgcaatatcgatccaatgcccgcagcgttccaaagctgtcaatgtggcatttctgggtgctgaatcgttcgagaagatacagctcgctttccgagaggccaaggctcaactgtccgagattctttctgctttcgagctcatggactcgtacagtcaacacctcgtgcataaagtgcgcgaaaataagcggcctctggaggacgagcacccgttctactgtctcatcgagacgagcggatccaacgccgagcacgacgccgcgaaactcgagcaattcctggaagacgtcatgtccaaggagatcatcgctgatggtgtcctgtcacaggatgaaactcagactaaggcattgtggagccagcgagagagcattccggaatgcttaggccactggggaggcgtgtacaagtacgatgtttcaattcccctaaaggatctgtacaggcttgtcgatgatacgagggtgagaatagaagaggctggtttgaagggtgagacggacgactttcctgtggtagaggtggtaggttacggccacatgggcgacagtaatctccatctaaatgtcgctgtacggagatacgacaagcgggtagaggaaatcctagagccatttgtgtatgagtgggtgggtaaggtaaatggcagtatcagtgccgagcacggtcttgggatagccaagaagaagtacattggctatagcagaaacgagactatggttgatttgatgaagcagatcaaaaagctatacgatccgaaaggaattatgaacccgtacaagtatatataggacgacgccagcgtcagtttcaacgtttggaaaagcgtgtattcgatagacgcaagaatggctatgtagataatgtgtactgtgtatattcattctcatcagctctgggactcttcgcggcatttctcaagctgtatggacatggatcacatccaagaatcagagttgactttgtccagcactagaagactgagccgtcaaagcccaccaagacaatctgaaatcagcaactctgttcttctggtacgtcatgattagtagttgtgcactatgattactttttatcagaaaataaaaaggggcggaaaacaatatagacagaaatacgggacgcacgtcgaaggtcactcaagattaggaagtgagcaccaccccaaagaccagattaatcagaatctttgtatcaaaatatgtcatgaatgtcgaatttgtccactcagagactgaagctgataatagttcacgatggaatacaatgcaatatcctctgtgagatatcaacaatggagaaatgcaaaccatatctttatggttagtctatccaccgtctcccccaagactatcgctaatcgaaagcaatattttctcaattagacccaacgctgagaatcattcgtcaattcaaaacaagtcgttcaccaaactcctgtatcatgcaaagccttcccaagttctatatccgtgtttccgttcccaaccatctacttccaaacaactctgcaagttctctattaccaaagcaacagtttcgagcgcccacataggccgtccgttgtttacattactccttgaacgcatccatttctttcaacgcatttgccagtctccgataatctcgtagcaggtctagaacctcgcctagtttgagatcagatggactttgaagctccataaagcgcttcttcggaggatcgatctttttcacatccttgggtggtaaagaagctgcaatgtccgggaaagcctgtcggaacattagataaaattctccgctctccgagatagatcaagaagagcactcaccgttgctaagtcgccaccctctaatggtttactggccgggtccttggggattggcgttggtggatttgtgacggcgcgaccgaatccacggatgctcatgttcgagagccggcttatgggattaaatgaactgccaagattgcgcatcgactcaactagcgccgggttcgagctcgtcgagagagggccctggttgttgggcgagacatccttgctgtcttctgaagtgaacacagcctttttcgcgccactaacgcttcgcccactgcggttgctatctgtgctgtgatctcgagcccctcgtttgccacccaccagagacagaaccctgtcgtccttgaccaacagtgggcgaccgctctcatcagtatctctcatcaaggcctcgatagagacatcgtcatcaggcggcggtgtgcctaccagtttgcgagcatcgtccagggtacgcggcacgacaagctcccttccatcggcagagctatcccgcagctttccaagaaggaatctgtaactttcattcagactgcttccgatggtcttgataccctgatcagcagtgttgaagaacgaatcgctagctgtgccaatggcaagagctggtgactggatcagatcactaagcctacgacgctgaagcgcagctcgaagattcgcagctgctggtgcttgtttcgctcccgtcgtagtttccgtggctgcagccactgcactggactctgatacggaggtgaacgcaggagggaacgtttctgacatgggtgtaacggccttggatggcacctgagccgcctcatcagctcgtagacttgctaggtcgacggtctgtaagaaggttatagcagcctccaaatttgttaggcagtaggcagcttccccctcgattttatcttcccatcgaaatcgctggacgaagtttgaatcgctaatgacgttcagtttttcgggtggcattgtaatgagagtgaagatgagcatgggcatgatctcgtctgcagaggacgatggatggaaatgagatagcgtatcgacgatgctcttatgagccgcttttaaataattgagcttgcccagggggtatctcttctcgctcatcgtgatgagatctttccgcgcctgttcgagataatcctttatctcttggttcttcttcgccactgcttctgggtcatcatcgtccagctctcccagatcgacgccaagatcagctggtccaataccgacaagggcaagggcggctgtctttgaacgtaatttatcgtcctgtgcttcatcgtgggtggatttatgacggtatattcgatcatagataccctcacagagtcgtcgctcaacggcttcctctagtagtattctttttagttcaagtgctctcctggctcgctttctatcggctagttcctcggcggtgagcatctgttggtcagaatcttttacttgagttggcttgcccttgtctttgctacctatagatacggcctttgcgcgcaacaagctcgcagcagaaggtcgagaggagagctgggcgttttgtgaagcctcgcgggtctgacgtgtagcgagagcagcgatatggacttggatgtgctgagcagctgtgagatagaagctttgaaacatgctggatagattatcgatattcggaggtgtgggatggactttggcggacaagctatcgatgaaactaaaggatccattgtgtcagctggtgcgtcaccgaaggaagcttgcggcagtgacctacttgtctgtcatactgactagctcaatgggtatcatgtccatatcgacggaggctcggggtgcctcaagctcgtcctccacgggttcggattcgaaggcatcgggggcatgttcttggtcgagaggtagattgtcctgagttactacgacatcggcctttgacagccttttcaaagaagtgggagtcttgactgcttcaggtttagggtcagaccccttggttgcggaggacgtgggcatgatcagacgtcgagtgatgctgggagagatgaccattagtgctcaattaaggcagtcgaggtatgcttcaaaacgtgatacgaagagaacagtcaggacacaaacagagtacgattgaaacaacaatcagatagatgcaaggtgcgacagtagctctacttgggccagacaccgtcgtggcgtttacacgtagcctttcacgctcgtctaggaggggggttcaaaaacacagagcagaggacttggtatcatgcaaccagtgttatcattgcagctactatggatgtcatattcgatctctctctcgagtaagtcggaattaagagagaaatcaagattaaatattggagagacagcggtggtaagtatggggactgcttaccagcttgttcgttaataacaagatgaagtggtccaggactcgcttggtgttcaggctcttgtctcgcatcctgaagctgtaacctgcacgcgggacaaggagctcaaggtggaagcagccgtcgcgtgttgcgttgacatatgcagctacctgattttgtgcctatactgcagtaattacataagtcaaacccatattcagctgggctcaatggcagtggatgttta

SEQ ID NO: 15571 - DNA, 2670 bp, Muscodor strobelii
  misc_feature: SGI cDNA ID NO. 565160
  misc_feature: Encodes the peptide sequence at SEQ ID NO 15572
atggatccactgtatttgccgtccgaggcgccggcagatggccgggaggggcagagttggcagaataggggtctgggtgggagcttggacgctatccgcaaccagtcaattggcagaagtggtagctacgagtcgcctcgccaaccaattgcaacagcagctacacagcaaaacaggttccaactcgagccgtttccatccgtattgcagcccgacgacgcccctggcgctcttaccccaacaacgctcgacttaacgtcaacgccttcgtcaaccgctaggaacagcatctgctatgcgtctacagttgcatccgagtctgtgtcagggtcaacacgcaacacttctcccgtctccacagcatcctcgcctttccagctgccctgtagctccaactccgacttacaccccgccttaaattgcagcccgcaggctcatcacagcaacgtaaacaacgccaacaacgacagcaaacaccgctcatctcaacccaatcatccgtcctcgtccccgcgatctcgcagaactaggagtgccgttacgaatcgatcgcatcccgaattgcatgctgcacgaacccagagatcggcgactcttcccacttccaatccctccaccaaggattccctgggcgagcccaaacccaacaggtcctcccagaggcgctccctctgctccaacgcatctaccgattccatcgagcgcccgggggcgaatctcaccaagatggacgacaaatggatcatcgtccagcagaagaccttcactaaatggctcaatgtcaagatcgaaccaagaggtgtgcaagtcaaagacttggtcaccgatctgagcgatggcattcttctcatacatttgctcgagtgcctgtcgaacgagtcattaggtcgctacgctgcaaaaccaaagttacgcgttcaaaggtttgaaaatgccaatatagctctcaatttcgtgaagtcccggggcattgccatgatcaacatcggcgccgaggacatcgtcgatggcaaccgtaaaattatccttggtctcatatggacccttattttgcgattcaccatcagcgacatcaacgctgagggcatgacggccaaagaaggtctcttgttatggtgtcagcgcaagaccgcgtgctacgaagaggttgaggttcgtgacttcagcactagctggaatgatgggctagccttctgcgccttgctcgacatccatcgcccagacctcattgactacgatgccctggataaaagtgatcaccgtggcaatatgcagttagcattcgacattgctcacaaagagatcggtatccctgctctcttggatgtcgaagatgtgtgcgacgtgaccagacccgacgagaaaagtttgatgacatacattgcctactggttccatgccttttcgcaaatggaaaaggtcgaaaatgctggacggcgggttgaaaagtttgtcaataacatgcagggtgcgtgggaaatgcagagcgcctatgagaggagaatggcagcattgctgaaacaaattcgcgagcaaatcgacagctggaaagatgccacattcgagggcacgtatgttgatgccaagagacaagctggcgacttcgcatctcataaaagaggcaagaagagagattgggttgcggagaagagtgaactggcgactctcctcggaaatatcaagacgaaactgggcacatatcgcttgagagcttacgagccgcccccggagctctctttgcaggcaatggacactgaatgggcgaacttaacaaagtcagaaatgatgcgtgggcagcttataaatgagactatcagagatatcaaaaacgcactgcgcaggtccttcgccgataaagccaacgattttgctttggcgctcaataccatgcaagtagccatttcaggtctagaaggcgaagtggaagaccaactcctccatgtgcgaaaactgagtgacaatctgccacctttggacgcctatctggagaaaatcgccgctgttgacgccaaatgccaggaggcgaacatcgaagagaatgatttcactacatacacgtatgatgaactatcttacgagctcggtcttgtcaaatcttccactcaaaagaagctgtctttcttggagaatcagatggtggccagaaatatgacaaatctgacacctattcaactcgaggaatttgaatctgtcttccgacactttgaccgcgatgatacgaattcattatccgagctcgaattctctgctgcacttgcttcactaggccttgtatttactgaggatgagatgcatgaagagttcgtcgaaacgtcacatggtcgtgatagagtcaccttcgaacagttcattggtttcatggtggatgcgaccgaggatcaaaatacggccgagcaggtgttccagtcattccgtgaggttgctgacgggaagccgtacgtcaccgaaatggatctacgtcactcacttgtgcccgacgaggtcatcgatcagttatgcaaactggtcccgcctcacaaggggcccgatatggctgaagatcgcggcgttcctcagtatgactacatcagtttcatggagaagctgattggcaccgatactcctacaccgctgcaagacatcaccaatggtcgaagcagccctacgaagaagtccaatggtgtttattaa

SEQ ID NO: 15572 - protein, 889 aa, Muscodor strobelii
  misc_feature: SGI Peptide ID NO. 565160
  misc_feature (364)..(469): Pfam Id: PF00307 Pfam Desc: Calponin homology (CH) domain
  misc_feature (250)..(354): Pfam Id: PF00307 Pfam Desc: Calponin homology (CH) domain
  misc_feature (793)..(864): Pfam Id: PF08726 Pfam Desc: Ca2+ insensitive EF hand
  misc_feature (168)..(889): NCBI GI: 171686902 Blast Desc: protein product [Podospora anserina] gi|170943412|emb|CAP69065.1| protein product [Podospora anserina]
  misc_feature (165)..(863): NCBI GI: 85084500 Blast Desc: NCU06429 [Neurospora crassa OR74A] gi|28918410|gb|EAA28084.1| NCU06429 [Neurospora crassa OR74A]
  misc_feature (186)..(888): NCBI GI: 46125813 Blast Desc: FG07284.1 [Gibberella zeae PH-1]
  misc_feature (173)..(887): NCBI GI: 154323103 Blast Desc: BC1G_00894 [Botryotinia fuckeliana B05.10] gi|150848228|gb|EDN23421.1| BC1G_00894 [Botryotinia fuckeliana B05.10]
  misc_feature (246)..(887): NCBI GI: 116191933 Blast Desc: conserved [Chaetomium globosum CBS 148.51] gi|88181597|gb|EAQ89065.1| conserved [Chaetomium globosum CBS 148.51]
  misc_feature (254)..(876): NCBI GI: 256732772 Blast Desc: [Nectria haematococca mpVI 77-13-4]
  misc_feature (171)..(883): NCBI GI: 145608660 Blast Desc: MGG_06475 [Magnaporthe grisea 70-15] gi|145016105|gb|EDK00595.1| MGG_06475 [Magnaporthe grisea 70-15]
  misc_feature (173)..(813): NCBI GI: 156064517 Blast Desc: SS1G_00266 [Sclerotinia sclerotiorum 1980] gi|154691128|gb|EDN90866.1| SS1G_00266 [Sclerotinia sclerotiorum 1980]
  misc_feature (233)..(869): NCBI GI: 225683342 Blast Desc: bullous pemphigoid antigen 1 [Paracoccidioides brasiliensis Pb03]
  misc_feature (236)..(863): NCBI GI: 225558207 Blast Desc: alpha-actinin [Ajellomyces capsulatus G186AR]
MDPLYLPSEAPADGREGQSWQNRGLGGSLDAIRNQSIGRSGSYESPRQPIATAATQQNRFQLEPFPSVLQPDDAPGALTPTTLDLTSTPSSTARNSICYASTVASESVSGSTRNTSPVSTASSPFQLPCSSNSDLHPALNCSPQAHHSNVNNANNDSKHRSSQPNHPSSSPRSRRTRSAVTNRSHPELHAARTQRSATLPTSNPSTKDSLGEPKPNRSSQRRSLCSNASTDSIERPGANLTKMDDKWIIVQQKTFTKWLNVKIEPRGVQVKDLVTDLSDGILLIHLLECLSNESLGRYAAKPKLRVQRFENANIALNFVKSRGIAMINIGAEDIVDGNRKIILGLIWTLILRFTISDINAEGMTAKEGLLLWCQRKTACYEEVEVRDFSTSWNDGLAFCALLDIHRPDLIDYDALDKSDHRGNMQLAFDIAHKEIGIPALLDVEDVCDVTRPDEKSLMTYIAYWFHAFSQMEKVENAGRRVEKFVNNMQGAWEMQSAYERRMAALLKQIREQIDSWKDATFEGTYVDAKRQAGDFASHKRGKKRDWVAEKSELATLLGNIKTKLGTYRLRAYEPPPELSLQAMDTEWANLTKSEMMRGQLINETIRDIKNALRRSFADKANDFALALNTMQVAISGLEGEVEDQLLHVRKLSDNLPPLDAYLEKIAAVDAKCQEANIEENDFTTYTYDELSYELGLVKSSTQKKLSFLENQMVARNMTNLTPIQLEEFESVFRHFDRDDTNSLSELEFSAALASLGLVFTEDEMHEEFVETSHGRDRVTFEQFIGFMVDATEDQNTAEQVFQSFREVADGKPYVTEMDLRHSLVPDEVIDQLCKLVPPHKGPDMAEDRGVPQYDYISFMEKLIGTDTPTPLQDITNGRSSPTKKSNGVY

SEQ ID NO: 15573 - DNA, 4730 bp, Muscodor strobelii
  misc_feature: SGI EST ID NO. CUFF.36926.0
  misc_feature: Variant of the nucleotide sequence at SEQ ID NO 15571
ccgggatggatccactgtatttgccgtccgaggcgccggcagatggccgggaggggcagagttggcagaataggggtctgggtgggagcttggacgctatccgcaaccagtcaattggcagaagtggtagctacgagtcgcctcgccaaccaattgcaacagcagctacacagcaaaacaggttccaactcgagccgtttccatccgtattgcagcccgacgacgcccctggcgctcttaccccaacaacgctcgacttaacgtcaacgccttcgtcaaccgctaggaacagcatctgctatgcgtctacagttgcatccgagtctgtgtcagggtcaacacgcaacacttctcccgtctccacagcatcctcgcctttccagctgccctgtagctccaactccgacttacaccccgccttaaattgcagcccgcaggctcatcacagcaacgtaaacaacgccaacaacgacagcaaacaccgctcatctcaacccaatcatccgtcctcgtccccgcgatctcgcagaactaggagtgccgttacgaatcgatcgcatcccgaattgcatgctgcacgaacccagagatcggcgactcttcccacttccaatccctccaccaaggattccctgggcgagcccaaacccaacaggtcctcccagaggcgctccctctgctccaacgcatctaccgattccatcgagcgcccgggggcgaatctcaccaagatggacgacaaatggatcatcgtccagcagaagaccttcactaaatggctcaatgtcaagatcgaaccaagaggtgtgcaagtcaaagacttggtcaccgatctgagcgatggcattcttctcatacatttgctcgagtgcctgtcgaacgagtcattaggtcgctacgctgcaaaaccaaagttacgcgttcaaaggtttgaaaatgccaatatagctctcaatttcgtgaagtcccggggcattgccatgatcaacatcggcgccgaggacatcgtcgatggcaaccgtaaaattatccttggtctcatatggacccttattttgcgattcaccatcagcgacatcaacgctgagggcatgacggccaaagaaggtctcttgttatggtgtcagcgcaagaccgcgtgctacgaagaggttgaggttcgtgacttcagcactagctggaatgatgggctagccttctgcgccttgctcgacatccatcgcccagacctcattgactacgatgccctggataaaagtgatcaccgtggcaatatgcagttagcattcgacattgctcacaaagagatcggtatccctgctctcttggatgtcgaagatgtgtgcgacgtgaccagacccgacgagaaaagtttgatgacatacattgcctactggttccatgccttttcgcaaatggaaaaggtcgaaaatgctggacggcgggttgaaaagtttgtcaataacatgcagggtgcgtgggaaatgcagagcgcctatgagaggagaatggcagcattgctgaaacaaattcgcgagcaaatcgacagctggaaagatgccacattcgagggcacgtatgttgatgccaagagacaagctggcgacttcgcatctcataaaagaggcaagaagagagattgggttgcggagaagagtgaactggcgactctcctcggaaatatcaagacgaaactgggcacatatcgcttgagagcttacgagccgcccccggagctctctttgcaggcaatggacactgaatgggcgaacttaacaaagtcagaaatgatgcgtgggcagcttataaatgagactatcagagatatcaaaaacgcactgcgcaggtccttcgccgataaagccaacgattttgctttggcgctcaataccatgcaagtagccatttcaggtctagaaggcgaagtggaagaccaactcctccatgtgcgaaaactgagtgacaatctgccacctttggacgcctatctggagaaaatcgccgctgttgacgccaaatgccaggaggcgaacatcgaagagaatgatttcactacatacacgtatgatgaactatcttacgagctcggtcttgtcaaatcttccactcaaaagaagctgtctttcttggagaatcagatggtggccagaaatatgacaaatctgacacctattcaactcgaggaatttgaatctgtcttccgacactttgaccgcgatgatacgaattcattatccgagctcgaattctctgctgcacttgcttcactaggccttgtatttactgaggatgagatgcatgaagagttcgtcgaaacgtcacatggtcgtgatagagtcaccttcgaacagttcattggtttcatggtggatgcgaccgaggatcaaaatacggccgagcaggtgttccagtcattccgtgaggttgctgacgggaagccgtacgtcaccgaaatggatctacgtcactcacttgtgcccgacgaggtcatcgatcagttatgcaaactggtcccgcctcacaaggggcccgatatggctgaagatcgcggcgttcctcagtatgactacatcagtttcatggagaagctgattggcaccgatactcctacaccgctgcaagacatcaccaatggtcgaagcagccctacgaagaagtccaatggtgtttattaaagtcatcattagaggccagcgcaggcggcgtccattatcatctgccttacttcgtctcgctttctcatcaacataccattcacttaagacgattccactctccccagcatctatacccaaattagagcactatacctaccacccactgaatatgatacgcaagagtgtcaggcagttcgtcagaaactcaactagatttaataatcatgatcagatctcatgtgcgccgggctggtccgccgaaagacacattgtcacctttcatttcctgtcactaattcactggacagcacgggggcagaggctgtcatttaccttacctcgacataatttctctatcctggcttcttcgcaaacggtagcactgcattgacacggcgctttttcttcctttgttccttattccccttttgcatgggtcggggacaaaacgggcaggttgggtggaaagcgacgtgatgagcttgaggcttgaacatatttccagagacgatatactttgaattgtaaagtctagatatactttaagctatccgtgccaacacttcgtgacaataccaaatgttgctgagccaacgtcccatggtaaattgacgcaaatgaacaatatcacaaatcgcaaggtctatgctgtattcaattagacgaacaaccacctaagcatcacaggtcatgcaattgtcgaatgcttatgtaggcgcctaggcgccttctctacctcttgtcttaaggcccgcgtccggatacaacttgcctaacggaatgggctgcgttaaaacgtgaccttaaatatgctgatcatgggtaataaatatgccgttccgtaccagtccgcaactgatctcatcacgatgggcccttttcaaccctctacgcctgcttacgggttcatcacggcaacatagcactgctcgtcaaaagacaccgtttgtacgcatacagctatcattcgctgtcatctcacccaccagttgttcaggtatccgaggaatccataaaaatgaagccaggactccaatactcccactctggtgcttgcttgtcaacccacagcatgccttcaccaaggagatcttcgagcacggtctgagatcgcgcccgcgtccaccgtaagttgtccatcagcatcgagatacttacgtagcctagcacctgcgcagcttcaagaacagcgctttggtctgtgttaagttctttcggaacagagcgtacgtatgactttttgccaactgtgataacggagtagcttgagcccagtggcttcaaggtgcccacagcacggagtacgtcgtctctgaagtactgttagctgcttcgactctaaacggccccaagttcgccagcattttaggtcgtgaagtaaggaattatcaaaaatgctagaggaaaacaacatactctgtaacttcagatgcttccaccgccgctactgctattattgtttgacgatgctaaggggtccacgccgatagctgcacacatgcgggcgaattgcgcgcgaaaggatgggttggatcggatgtcacgggcgtgtgtttgggcgaactgttgtaataaggatcggaagacggagagttgtgtctcgagggcttgagcattgttggtccttagagagctgccatgagaggcaaattgagctgatgtgaggcgtgagcggtcgaaggccgccagaccaactcccttccgggacatggtggcttcaaactggggataggcacacttgtggctttggatttgtgagtgtttcgacgaaggatatgtgtgaatggatctgatatttctgggcggtttagaattcctaaaggtctcttggccttgtatgttgagggtccagcaccagaggacctctcttaagtaatgaagacatgcgactccttataccatagatgcgcagaggatattctctatctttcttcgttgttaagtttgtgtagagcaatatagcataatcttcattcgatcttgtccagctccttaactgtttgtttgatcaaagcgacccttatgcgattgttaactacaattgataggagattgatacatggacggtgtcaa

SEQ ID NO: 15574 - DNA, 771 bp, Muscodor strobelii
  misc_feature: SGI cDNA ID NO. 565161
  misc_feature: Encodes the peptide sequence at SEQ ID NO 15575
atgtcccggaagggagttggtctggcggccttcgaccgctcacgcctcacatcagctcaatttgcctctcatggcagctctctaaggaccaacaatgctcaagccctcgagacacaactctccgtcttccgatccttattacaacagttcgcccaaacacacgcccgtgacatccgatccaacccatcctttcgcgcgcaattcgcccgcatgtgtgcagctatcggcgtggaccccttagcatcgtcaaacaataatagcagtagcggcggtggaagcatctggtctcagctgttaggccgtagtgtcaacgatttttactttgagctggccgttcgtgttgttgaggtctgcggtgccacgcgtgaggagaacggtggtctcattggtgtgaaagagctgagggacaggctcatgagggggcgtatggaaggcgcacctgaagttacagaagacgacgtactccgtgctgtgggcaccttgaagccactgggctcaagctactccgttatcacagttggcaaaaagtcatacgtacgctctgttccgaaagaacttaacacagaccaaagcgctgttcttgaagctgcgcaggtgctaggctacgtaagtatctcgatgctgatggacaacttacggtggacgcgggcgcgatctcagaccgtgctcgaagatctccttggtgaaggcatgctgtgggttgacaagcaagcaccagagtgggagtattggagtcctggcttcatttttatggattcctcggatacctga

SEQ ID NO: 15575 - protein, 256 aa, Muscodor strobelii
  misc_feature: SGI Peptide ID NO. 565161
  misc_feature (6)..(235): Pfam Id: PF04157 Pfam Desc: EAP30/Vps36 family
  misc_feature (1)..(250): NCBI GI: 156064159 Blast Desc: SS1G_00087 [Sclerotinia sclerotiorum 1980] gi|154690949|gb|EDN90687.1| SS1G_00087 [Sclerotinia sclerotiorum 1980]
  misc_feature (1)..(250): NCBI GI: 116191647 Blast Desc: conserved [Chaetomium globosum CBS 148.51] gi|88181454|gb|EAQ88922.1| conserved [Chaetomium globosum CBS 148.51]
  misc_feature (4)..(250): NCBI GI: 85109821 Blast Desc: NCU07843 [Neurospora crassa OR74A] gi|28924756|gb|EAA33868.1| NCU07843 [Neurospora crassa OR74A]
  misc_feature (1)..(250): NCBI GI: 261358088 Blast Desc: vacuolar-sorting protein SNF8 [Verticillium albo-atrum VaMs.102]
  misc_feature (1)..(250): NCBI GI: 145601969 Blast Desc: MGG_05291 [Magnaporthe grisea 70-15] gi|145010425|gb|EDJ95081.1| MGG_05291 [Magnaporthe grisea 70-15]
  misc_feature (1)..(249): NCBI GI: 256726145 Blast Desc: [Nectria haematococca mpVI 77-13-4]
  misc_feature (1)..(249): NCBI GI: 46116556 Blast Desc: FG04120.1 [Gibberella zeae PH-1]
  misc_feature (1)..(250): NCBI GI: 171687138 Blast Desc: protein product [Podospora anserina] gi|170943530|emb|CAP69183.1| protein product [Podospora anserina]
  misc_feature (2)..(256): NCBI GI: 145248784 Blast Desc: An14g01020 [Aspergillus niger] gi|134081400|emb|CAK41901.1| protein product [Aspergillus niger]
  misc_feature (1)..(253): NCBI GI: 255935997 Blast Desc: Pc13g05910 [Penicillium chrysogenum Wisconsin 54-1255] gi|211583645|emb|CAP91660.1| Pc13g05910 [Penicillium chrysogenum Wisconsin 54-1255]
MSRKGVGLAAFDRSRLTSAQFASHGSSLRTNNAQALETQLSVFRSLLQQFAQTHARDIRSNPSFRAQFARMCAAIGVDPLASSNNNSSSGGGSIWSQLLGRSVNDFYFELAVRVVEVCGATREENGGLIGVKELRDRLMRGRMEGAPEVTEDDVLRAVGTLKPLGSSYSVITVGKKSYVRSVPKELNTDQSAVLEAAQVLGYVSISMLMDNLRWTRARSQTVLEDLLGEGMLWVDKQAPEWEYWSPGFIFMDSSDT

SEQ ID NO: 15576 - DNA, 2950 bp, Muscodor strobelii
  misc_feature: SGI EST ID NO. CUFF.36927.2
  misc_feature: Variant of the nucleotide sequence at SEQ ID NO 15574
cgtccatgtatcaatctcctatcaattgtagttaacaatcgcataagggtcgctttgatcaaacaaacagttaaggagctggacaagatcgaatgaagattatgctatattgctctacacaaacttaacaacgaagaaagatagagaatatcctctgcgcatctatggtataaggagtcgcatgtcttcattacttaagagaggtcctctggtgctggaccctcaacatacaaggccaagagacctttaggaattctaaaccgcccagaaatatcagatccattcacacatatccttcgtcgaaacactcacaaatccaaagccacaagtgtgcctatccccagtttgaagccaccatgtcccggaagggagttggtctggcggccttcgaccgctcacgcctcacatcagctcaatttgcctctcatggcagctctctaaggaccaacaatgctcaagccctcgagacacaactctccgtcttccgatccttattacaacagttcgcccaaacacacgcccgtgacatccgatccaacccatcctttcgcgcgcaattcgcccgcatgtgtgcagctatcggcgtggaccccttagcatcgtcaaacaataatagcagtagcggcggtggaagcatctggtctcagctgttaggccgtagtgtcaacgatttttactttgagctggccgttcgtgttgttgaggtctgcggtgccacgcgtgaggagaacggtggtctcattggtgtgaaagagctgagggacaggctcatgagggggcgtatggaaggcgcacctgaagttacagaagacgacgtactccgtgctgtgggcaccttgaagccactgggctcaagctactccgttatcacagttggcaaaaagtcatacgtacgctctgttccgaaagaacttaacacagaccaaagcgctgttcttgaagctgcgcaggtgctaggctacgtaagtatctcgatgctgatggacaacttacggtggacgcgggcgcgatctcagaccgtgctcgaagatctccttggtgaaggcatgctgtgggttgacaagcaagcaccagagtgggagtattggagtcctggcttcatttttatggattcctcggatacctgaacaactggtgggtgagatgacagcgaatgatagctgtatgcgtacaaacggtgtcttttgacgagcagtgctatgttgccgtgatgaacccgtaagcaggcgtagagggttgaaaagggcccatcgtgatgagatcagttgcggactggtacggaacggcatatttattacccatgatcagcatatttaaggtcacgttttaacgcagcccattccgttaggcaagttgtatccggacgcgggccttaagacaagaggtagagaaggcgcctaggcgcctacataagcattcgacaattgcatgacctgtgatgcttaggtggttgttcgtctaattgaatacagcatagaccttgcgatttgtgatattgttcatttgcgtcaatttaccatgggacgttggctcagcaacatttggtattgtcacgaagtgttggcacggatagcttaaagtatatctagactttacaattcaaagtatatcgtctctggaaatatgttcaagcctcaagctcatcacgtcgctttccacccaacctgcccgttttgtccccgacccatgcaaaaggggaataaggaacaaaggaagaaaaagcgccgtgtcaatgcagtgctaccgtttgcgaagaagccaggatagagaaattatgtcgaggtaaggtaaatgacagcctctgcccccgtgctgtccagtgaattagtgacaggaaatgaaaggtgacaatgtgtctttcggcggaccagcccggcgcacatgagatctgatcatgattattaaatctagttgagtttctgacgaactgcctgacactcttgcgtatcatattcagtgggtggtaggtatagtgctctaatttgggtatagatgctggggagagtggaatcgtcttaagtgaatggtatgttgatgagaaagcgagacgaagtaaggcagatgataatggacgccgcctgcgctggcctctaatgatgactttaataaacaccattggacttcttcgtagggctgcttcgaccattggtgatgtcttgcagcggtgtaggagtatcggtgccaatcagcttctccatgaaactgatgtagtcatactgaggaacgccgcgatcttcagccatatcgggccccttgtgaggcgggaccagtttgcataactgatcgatgacctcgtcgggcacaagtgagtgacgtagatccatttcggtgacgtacggcttcccgtcagcaacctcacggaatgactggaacacctgctcggccgtattttgatcctcggtcgcatccaccatgaaaccaatgaactgttcgaaggtgactctatcacgaccatgtgacgtttcgacgaactcttcatgcatctcatcctcagtaaatacaaggcctagtgaagcaagtgcagcagagaattcgagctcggataatgaattcgtatcatcgcggtcaaagtgtcggaagacagattcaaattcctcgagttgaataggtgtcagatttgtcatatttctggccaccatctgattctccaagaaagacagcttcttttgagtggaagatttgacaagaccgagctcgtaagatagttcatcatacgtgtatgtagtgaaatcattctcttcgatgttcgcctcctggcatttggcgtcaacagcggcgattttctccagataggcgtccaaaggtggcagattgtcactcagttttcgcacatggaggagttggtcttccacttcgccttctagacctgaaatggctacttgcatggtattgagcgccaaagcaaaatcgttggctttatcggcgaaggacctgcgcagtgcgtttttga

SEQ ID NO: 15577 - DNA, 429 bp, Muscodor strobelii
  misc_feature: SGI cDNA ID NO. 565162
  misc_feature: Reduced expression when VOC is produced
  misc_feature: Encodes the peptide sequence at SEQ ID NO 15578
atggctccgcagtcagttcagtgcttcggcaagaagaagagcgccaccgccgtggctgcttgccagtctggctccggtctcatcaaggtcaacggaaagcccctcagcctggttgagcccccagttctccgattcaaggtctacgagcccctcctcgtcatcggcctcgacaagttcgccaacgtcgacatccgtgttcgcgtaaccggtggtggtcagactagtcagatctacgccatccgccaagccattgccaaggccctgatcgcctactaccagaagttcgtcgatgagcacagcaagaacatgctcaagcaggcccttgtccagtacgaccgtaccctcctcgtcgccgacaaccgtcggtgcgagcccaagaaattcggcggtccgggtgctcgtgcccgcttccagaagtcttaccgttaa

SEQ ID NO: 15578 - protein, 142 aa, Muscodor strobelii
  misc_feature: SGI Peptide ID NO. 565162
  misc_feature (10)..(142): Pfam Id: PF00380 Pfam Desc: Ribosomal protein S9/S16
  misc_feature (1)..(142): NCBI GI: 169610235 Blast Desc: SNOG_08214 [Phaeosphaeria nodorum SN15] gi|160702015|gb|EAT84490.2| SNOG_08214 [Phaeosphaeria nodorum SN15]
  misc_feature (4)..(142): NCBI GI: 256726152 Blast Desc: [Nectria haematococca mpVI 77-13-4]
  misc_feature (2)..(142): NCBI GI: 46116588 Blast Desc: FG04136.1 [Gibberella zeae PH-1]
  misc_feature (1)..(142): NCBI GI: 189204698 Blast Desc: 40S ribosomal protein S16 [Pyrenophora tritici-repentis Pt-1C-BFP] gi|187985783|gb|EDU51271.1| 40S ribosomal protein S16 [Pyrenophora tritici-repentis Pt-1C-BFP]
  misc_feature (4)..(142): NCBI GI: 154312368 Blast Desc: 40S ribosomal protein S16 [Botryotinia fuckeliana B05.10] gi|150850180|gb|EDN25373.1| 40S ribosomal protein S16 [Botryotinia fuckeliana B05.10]
  misc_feature (2)..(142): NCBI GI: 261358089 Blast Desc: 40S ribosomal protein S16 [Verticillium albo-atrum VaMs.102]
  misc_feature (2)..(142): NCBI GI: 156064161 Blast Desc: 40S ribosomal protein S16 [Sclerotinia sclerotiorum 1980] gi|154690950|gb|EDN90688.1| 40S ribosomal protein S16 [Sclerotinia sclerotiorum 1980]
  misc_feature (5)..(142): NCBI GI: 119188597 Blast Desc: 40S ribosomal protein S16 [Coccidioides immitis RS] gi|240111549|gb|EER29702.1| 40S ribosomal protein S16, [Coccidioides posadasii C735 delta SOWgp]
  misc_feature (5)..(142): NCBI GI: 258575791 Blast Desc: 40S ribosomal protein S16 [Uncinocarpus reesii 1704] gi|237902343|gb|EEP76744.1| 40S ribosomal protein S16 [Uncinocarpus reesii 1704]
  misc_feature (4)..(142): NCBI GI: 261192360 Blast Desc: 30S ribosomal protein S9 [Ajellomyces dermatitidis SLH14081] gi|239589462|gb|EEQ72105.1| 30S ribosomal protein S9 [Ajellomyces dermatitidis SLH14081] gi|239615176|gb|EEQ92163.1|
  misc_feature: Useful for introducing or modulating the production of volatile compounds
MAPQSVQCFGKKKSATAVAACQSGSGLIKVNGKPLSLVEPPVLRFKVYEPLLVIGLDKFANVDIRVRVTGGGQTSQIYAIRQAIAKALIAYYQKFVDEHSKNMLKQALVQYDRTLLVADNRRCEPKKFGGPGARARFQKSYR

SEQ ID NO: 15579 - DNA, 1136 bp, Muscodor strobelii
  misc_feature: SGI EST ID NO. CUFF.37058.1
  misc_feature: Variant of the nucleotide sequence at SEQ ID NO 15577
cggaaaaagagccccacgcacaaatcgcccacaacaccaacgaaaattcgtgtgaacgacgcaacgccccgacccaacatttcgaccaacctcttgttccgctcctcgactccctcaacacaccacacacagcacatcgtcaacatggctccgcagtcagttcagtgcttcggcaagaagaagagcgccaccgccgtggctgcttgccagtctggctccggtctcatcaaggtcaacggaaagcccctcagcctggttgagcccccagttctccgattcaaggtctacgagcccctcctcgtcatcggcctcgacaagttcgccaacgtcgacatccgtgttcgcgtaaccggtggtggtcagactagtcagatctacgccatccgccaagccattgccaaggccctgatcgcctactaccagaagttcgtcgatgagcacagcaagaacatgctcaagcaggcccttgtccagtacgaccgtaccctcctcgtcgccgacaaccgtcggtgcgagcccaagaaattcggcggtccgggtgctcgtgcccgcttccagaagtcttaccgttaaacagctattgcggtggctttgttgggggcgagaagggcttacgagaaggatgggaagagcgaatcgtttggacgtacaagaagagcgcacgcgcacgatggatcgagccacccgatgcgaaacgatttcgcctctcttgtatccctggttcagcgtttgagctccgggtgtttacgaagatcggatcagggagttacaaaagggaatactcggcaaggctatttgtcccagggtctttttcctatcatgattgcatttgcatgacagggcagctctgtctggttgtaaagggaaataggcgaatgaaacaaacacaaattctgaacaaaaactcgagtctcagtctcctggtgaaaaagctcttgccgcacgctttgggtcggtaaactatgtgatattactctgggaattgacacagagggcagctctgccaacgacgtggagaggtggaaattgactaaatcccgtgcatctcgtggagccatttgagtatcgctaacttgaattacgagatcaaagggatctattcgtttagtcaaccacccgggacatctcacgtagag

SEQ ID NO: 15580 - DNA, 1356 bp, Muscodor strobelii
  misc_feature: SGI cDNA ID NO. 565163
  misc_feature: Encodes the peptide sequence at SEQ ID NO 15581
atgcagcataccacgtctgacccgcctctccttagcactggcgacgtcttgatacttgatgacttgcctgcaaattctactattggctatgatgccacatctttgaactcagcagagccgttccctggctttcgcgaaatacctcctggtccacatctgatatgggtttcacagtctgagtcaacgtcttcgagaagtggttactggatctacacttctcaaaaagagcgtggtcagccaggcagtgtttggtatgttgctaacctccggtatatggcaaaggtaataaaattgactaacacgacatctttcctgctactagatgtaaagcaatggcagaagttcaatgaagtcctcggtgatcctgcgagtcaagcagaagaacggttccaaaaggagaaactagaccacatgttcgaaagtcttgttccctgcgagaagatccgagatgccaccacggcggcttcaccgaggtccgcgttatctcaagctgacgaggaatcctcgactccactgacaaaggaggatatttggttccggctgacgtttggcatcaacccgggggtactgaaccgaatcacaggcgaggaaaaaacggcatggtctgtgcatacaacagatactgtatcaggcgagacacatctacttgaggagactcgaatctacgcaacgaacactcatcagttcagattcatcttttctatggacgctcatctcgtcaatcctcaggccaaggggccggagctaacacggcaagcacttgaccctacaggatggatcattgataagctgaacactgcagatgagcactatcaccccgaggatctcgttggcgagttccagtttgcattcatcaccggcatgcatcttggtaacttctcttgtcttgagcaatggtggtttctagcttcccgcctcgtctttcggtcgtatgatcttgctgtcatcaaaccacagctggcacgccaactcatacaaacatttcacgctcaattattatacaatgatagctacttagatggggatgtctttgagatgatgcccgagcattcactcaaaatgcggaaagtcctcactacgtacaaagcgcatctagatgagaagctgcttgcacttggcgataagtgctcgcctgatcagcacgcagtcggtgtggcattttcatcgctcgaatcttggctttggcgcctgggatgggatcttcgtggagactatgtaagatctgggactgtgatgctcgaggatggtgagatggtgcaggctgaactttcggattttgaggaagaggatgaacgtggcgagtttgcgccaaccattgtcgagttcgagaatggaagggagactggtctgttttag

SEQ ID NO: 15581 - protein, 451 aa, Muscodor strobelii
  misc_feature: SGI Peptide ID NO. 565163
  misc_feature (11)..(450): NCBI GI: 256726151 Blast Desc: NECHADRAFT_43274 [Nectria haematococca mpVI 77-13-4]
  misc_feature (11)..(450): NCBI GI: 46116586 Blast Desc: FG04135.1 [Gibberella zeae PH-1]
  misc_feature (10)..(433): NCBI GI: 156064167 Blast Desc: SS1G_00091 [Sclerotinia sclerotiorum 1980] gi|154690953|gb|EDN90691.1| SS1G_00091 [Sclerotinia sclerotiorum 1980]
  misc_feature (10)..(451): NCBI GI: 39939904 Blast Desc: MGG_05288 [Magnaporthe grisea 70-15] gi|145010427|gb|EDJ95083.1| MGG_05288 [Magnaporthe grisea 70-15]
  misc_feature (104)..(432): NCBI GI: 154312362 Blast Desc: BC1G_06214 [Botryotinia fuckeliana B05.10] gi|150850177|gb|EDN25370.1| BC1G_06214 [Botryotinia fuckeliana B05.10]
  misc_feature (34)..(450): NCBI GI: 85109823 Blast Desc: NCU07844 [Neurospora crassa OR74A] gi|28924757|gb|EAA33869.1| [Neurospora crassa OR74A]
  misc_feature (8)..(402): NCBI GI: 116191649 Blast Desc: CHGG_05542 [Chaetomium globosum CBS 148.51] gi|88181455|gb|EAQ88923.1| CHGG_05542 [Chaetomium globosum CBS 148.51]
  misc_feature (16)..(443): NCBI GI: 119188599 Blast Desc: CIMG_04347 [Coccidioides immitis RS]
  misc_feature (16)..(443): NCBI GI: 240111548 Blast Desc: AAR2 family protein [Coccidioides posadasii C735 delta SOWgp]
  misc_feature (9)..(445): NCBI GI: 242787229 Blast Desc: AAR2 family protein [Talaromyces stipitatus ATCC 10500] gi|218721109|gb|EED20528.1| AAR2 family protein [Talaromyces stipitatus ATCC 10500]
MQHTTSDPPLLSTGDVLILDDLPANSTIGYDATSLNSAEPFPGFREIPPGPHLIWVSQSESTSSRSGYWIYTSQKERGQPGSVWYVANLRYMAKVIKLTNTTSFLLLDVKQWQKFNEVLGDPASQAEERFQKEKLDHMFESLVPCEKIRDATTAASPRSALSQADEESSTPLTKEDIWFRLTFGINPGVLNRITGEEKTAWSVHTTDTVSGETHLLEETRIYATNTHQFRFIFSMDAHLVNPQAKGPELTRQALDPTGWIIDKLNTADEHYHPEDLVGEFQFAFITGMHLGNFSCLEQWWFLASRLVFRSYDLAVIKPQLARQLIQTFHAQLLYNDSYLDGDVFEMMPEHSLKMRKVLTTYKAHLDEKLLALGDKCSPDQHAVGVAFSSLESWLWRLGWDLRGDYVRSGTVMLEDGEMVQAELSDFEEEDERGEFAPTIVEFENGRETGLF

SEQ ID NO: 15582 - DNA, 1294 bp, Muscodor strobelii
  misc_feature: SGI EST ID NO. CUFF.36891.0
  misc_feature: Variant of the nucleotide sequence at SEQ ID NO 15580
aacacgacatctttcctgctactagatgtaaagcaatggcagaagttcaatgaagtcctcggtgatcctgcgagtcaagcagaagaacggttccaaaaggagaaactagaccacatgttcgaaagtcttgttccctgcgagaagatccgagatgccaccacggcggcttcaccgaggtccgcgttatctcaagctgacgaggaatcctcgactccactgacaaaggaggatatttggttccggctgacgtttggcatcaacccgggggtactgaaccgaatcacaggcgaggaaaaaacggcatggtctgtgcatacaacagatactgtatcaggcgagacacatctacttgaggagactcgaatctacgcaacgaacactcatcagttcagattcatcttttctatggacgctcatctcgtcaatcctcaggccaaggggccggagctaacacggcaagcacttgaccctacaggatggatcattgataagctgaacactgcagatgagcactatcaccccgaggatctcgttggcgagttccagtttgcattcatcaccggcatgcatcttggtaacttctcttgtcttgagcaatggtggtttctagcttcccgcctcgtctttcggtcgtatgatcttgctgtcatcaaaccacagctggcacgccaactcatacaaacatttcacgctcaattattatacaatgatagctacttagatggggatgtctttgagatgatgcccgagcattcactcaaaatgcggaaagtcctcactacgtacaaagcgcatctagatgagaagctgcttgcacttggcgataagtgctcgcctgatcagcacgcagtcggtgtggcattttcatcgctcgaatcttggctttggcgcctgggatgggatcttcgtggagactatgtaagatctgggactgtgatgctcgaggatggtgagatggtgcaggctgaactttcggattttgaggaagaggatgaacgtggcgagtttgcgccaaccattgtcgagttcgagaatggaagggagactggtctgttttagaaggtctgaacatcttaatcgaacggctgttgcttggtcgtcttaaggcggaatacgctggtttatttgaactctttccactcccaacggacgcaagtactatcacgagctaattagacaaattgcaaaagacgaaactgtatcgtcttttagataacaatcggggcgaattgttgcacttgtctcttatatatgaggtaaagattactagctcatcgcttatcatcgcataata

SEQ ID NO: 15583 - DNA, 1170 bp, Muscodor strobelii
  misc_feature: SGI cDNA ID NO. 565164
  misc_feature: Reduced expression when VOC is produced
  misc_feature: Encodes the peptide sequence at SEQ ID NO 15584
atggaacggggtgtccaccacgattatcagcagtcaggtttgccttcgccctatccaaacatatccgacgacaaccagtctgaaccgtcctctgcagatcacgcgtctgctgcccaatacccgagcaaccaggagtcccgtcctgccagttactctgcctctggaaccccaacgtcagaatacggcgcatacccgcaatccgcgaggtcaaccagttctttcccagaacacagtcttcgtcactatcatcccgcgagcagccacaacggtagcagcggaggtatggcgcagcaaacatcaacaagtccgtcaatgcctatgcaagatggacgcaaccatcaaccccagcaactcaagtctgacagcgatgtgccaatagatccgtccatcgcggcacccagcccgacatatcctcacggccaatacgcgccttacgggccgcctccacctcaagacatgtcgcataactatcctcaaagcacagcaagcttgtacaatcaacctcgaccagactggggcaactacgcacatccaggcagtcagatgccgcacccccattcggtaccttacggccattcacctgcttctgccgctcccccgggccgtccaacacagtatgctcctcaacaggtctacagttttgtcccgattccaggcgcacagcaacataaacggccgcgacgccggtatgaagagattgaacgaatgtacaagtgtggatggaacggctgcgagaaagcgtacggcacgctgaaccacctgaacgcccatgttactatgcaaagtcatggacagaagcgaacacctgaagaattcaaagaaattcgcaaggaatggaaggctcgcaagaaggaggaagatcaacagcgcaagcaggccgaggaggagagtcggcagcgccacgcggcagcagcagccgctcagaaccccggtcctgaccaggcaagcgaagcaggagtacctcctgcatacgcccccagggcagttcagctacctcccatcgcatacagcggacaatacccaccttcttcaggtccagtcgcacagcagccgccaatggctggcgaatacaacggcggcggcggccacatgtacgcgagcaattaccaaccagcctctccttatgcccaccaaggccagccgccgatgtatggtcagcaaagagagtag

SEQ ID NO: 15584 - protein, 389 aa, Muscodor strobelii
  misc_feature: SGI Peptide ID NO. 565164
  misc_feature (1)..(387): NCBI GI: 2367591 Blast Desc: transcriptional regulator [Magnaporthe grisea]
  misc_feature (1)..(376): NCBI GI: 256725745 Blast Desc: NECHADRAFT_94491 [Nectria haematococca mpVI 77-13-4]
  misc_feature (1)..(376): NCBI GI: 46116584 Blast Desc: FG04134.1 [Gibberella zeae PH-1]
  misc_feature (1)..(323): NCBI GI: 261358094 Blast Desc: transcriptional regulator [Verticillium albo-atrum VaMs.102]
  misc_feature (1)..(387): NCBI GI: 115381184 Blast Desc: transcription factor Con7p [Magnaporthe grisea]
  misc_feature (23)..(387): NCBI GI: 145601973 Blast Desc: conserved [Magnaporthe grisea 70-15] gi|145010428|gb|EDJ95084.1| conserved [Magnaporthe grisea 70-15]
  misc_feature (1)..(380): NCBI GI: 116191651 Blast Desc: CHGG_05543 [Chaetomium globosum CBS 148.51] gi|88181456|gb|EAQ88924.1| CHGG_05543 [Chaetomium globosum CBS 148.51]
  misc_feature (1)..(342): NCBI GI: 156064145 Blast Desc: SS1G_00080 [Sclerotinia sclerotiorum 1980] gi|154690942|gb|EDN90680.1| SS1G_00080 [Sclerotinia sclerotiorum 1980]
  misc_feature (1)..(335): NCBI GI: 154298978 Blast Desc: BC1G_11736 [Botryotinia fuckeliana B05.10] gi|150857641|gb|EDN32833.1| BC1G_11736 [Botryotinia fuckeliana B05.10]
  misc_feature (8)..(304): NCBI GI: 189205180 Blast Desc: transcriptional regulator [Pyrenophora tritici-repentis Pt-1C-BFP] gi|187986024|gb|EDU51512.1| transcriptional regulator [Pyrenophora tritici-repentis
  misc_feature: Useful for introducing or modulating the production of volatile compounds
MERGVHHDYQQSGLPSPYPNISDDNQSEPSSADHASAAQYPSNQESRPASYSASGTPTSEYGAYPQSARSTSSFPEHSLRHYHPASSHNGSSGGMAQQTSTSPSMPMQDGRNHQPQQLKSDSDVPIDPSIAAPSPTYPHGQYAPYGPPPPQDMSHNYPQSTASLYNQPRPDWGNYAHPGSQMPHPHSVPYGHSPASAAPPGRPTQYAPQQVYSFVPIPGAQQHKRPRRRYEEIERMYKCGWNGCEKAYGTLNHLNAHVTMQSHGQKRTPEEFKEIRKEWKARKKEEDQQRKQAEEESRQRHAAAAAAQNPGPDQASEAGVPPAYAPRAVQLPPIAYSGQYPPSSGPVAQQPPMAGEYNGGGGHMYASNYQPASPYAHQGQPPMYGQQRE

SEQ ID NO: 15585 - DNA, 3857 bp, Muscodor strobelii
  misc_feature: SGI EST ID NO. CUFF.37008.2
  misc_feature: Variant of the nucleotide sequence at SEQ ID NO 15583
cggcgagctcgtcttcgtccctctttcctccctcctcttcttgtaaaagaaaatagagcaaacacaactttgcacgaatacttcaacagcctcatccgacggcgccctgagagctcgagtatttctacatttcctgtgccttcaattggcacatggtatcaacaatcttcgcgcctcactattgcgtttcccatcttgcattagaaaacaatcgcgttcgcccgcctactcggcactagctcagctcactaacttcactaagcccaaactaaaccccttcaaagcacctctcaccattcacccacctcaattcacctcatctacctttggcggtacaggtacagcacgctaccaccggccggtcactaaagcgctggtctgatcttggcaattgcaccagtcggaatcattgataatctggcagcacttgttcttgccggactcagaggcgcgcatctggacagactggggccgcaattaaaagaatcaaacacacgctgccaagcccagcttgccctggtcgcctggtcgctcgggtctccgccgccgataaggaacttgcacgcaccagtccctgttctcacaagtacctagcagtgcctcggtgccccaggtacctaccaaatctccaagccgcacaccgcacgctcgggtcttggtgcctgcccgtgttgctattccctgccagcgccataaaacagcaacagagtcgcgttgtgtacatatactcagacctgcgacacaattttgagcaagatacatacacccagggcatataagttcgttgggaaaacacgaataaaaacgtgccaaaaaggttctgcttgtcgcactcacgaggaaaattacgaatagacagtaatattggcgtccaagagaaaaccaattgctgtgtctccagcccatcctcgccatccttcctcctcgtcgccaatcccagcccctgatatttgacctagcgcctcaccctagtcaactttgggcatcgccaactttcacgacatactctctccccatttttcatcttagcgccatcaagagtcttgacaaggagaaacccactagtctccccaccctctgctgcaaccacactgcacctgaacgactgcgtctactagtagtcccaccgctcgtcgtgctcgttattttccagtacgacttcggtacgagaccagatcataacaaaatcactagtggtatatgtaccttactgcgtggttgtgggtaccttgtgggcttgcattgcgcagatatctcttggtctgagctgtgagcacgatacatgtgctttcatcatcgtgtcgcccaagaaacacgtattttcgtcgccacactcactggaaatttcagtgctgctattgctgtctcgagtcaccgagatttttaagattcactcacgtgttatttcgagctgggtgagcgggatattgctctatataagggacatatcctctagtggaaattggacacgaacagcagtatcggctagtcgtgatttataaaccgcaaaggaggatctcatccttgtccagcccttcttgatcgactcgggggtaccacttcttttcgggtctttattcttcaacacgattcgcactcagctggctgtatagctgtggactcttaggtggatctagtacacgacgctattcactcgaccaagagaatttggtgcgaggatctacgctactggcacgatcactcttccgtcagaggatagactgccgcagactaaataacgccaacgcagccgcaaccttgtgtgttggcgcacaaacttcaaacttaacccttctctctttttcggtaccaccatttattcggtccaaggcgccgtctttcaccagtctgtacaccaagctgatcggaagctaatcacgacggccggtcccttttcccatcgttctggtcggcgtagtatgctcctggcgcaaacatcgtgcatcacgcgttccttatagtcacacatcgcgccaacatcaccaccaccaccaacgatcaagtccgagtccagaagtgaccctcggcaagtaagcatttgcgacagccctatggaacggggtgtccaccacgattatcagcagtcagatcacgcgtctgctgcccaatacccgagcaaccaggagtcccgtcctgccagttactctgcctctggaaccccaacgtcagaatacggcgcatacccgcaatccgcgaggtcaaccagttctttcccagaacacagtcttcgtcactatcatcccgcgagcagccacaacggtagcagcggaggtatggcgcagcaaacatcaacaaatccgtccatcgcggcacccagcccgacatatcctcacggccaatacgcgccttacgggccgcctccacctcaagacatgtcgcataactatcctcaaagcacagcaagcttgtacaatcaacctcgaccagactggggcaactacgcacatccaggcagtcagatgccgcacccccattcggtaccttacggccattcacctgcttctgccgctcccccgggccgtccaacacaggtaggtaattttgcgctattgtgaatgatttgtgttcgtaacataaatcacacgcattgatacttcaaagggcttgctcctagggtgagatgtcacctgttagggttcaggtggaagagtaatgccattcttcgatgtcatacatatgcatcctttgtagtcctctgcgatcgtgttggcctttctcttatacttcaatacgtgaaatagctgatgatattaacagtatgctcctcaacaggtctacagttttgtcccgattccaggcgcacagcaacataaacggccgcgacgccggtatgaagagattgaacgaatgtacaagtgtggatggaacggctgcgagaaagcgtacggcacgctgaaccacctgaacgcccatgttactatgcaaagtcatggacagaagcgaacacctgaagaattcaaagaaattcgcaaggaatggaaggctcgcaagaaggaggaagatcaacagcgcaagcaggccgaggaggagagtcggcagcgccacgcggcagcagcagccgctcagaaccccggtcctgaccaggcaagcgaagcaggagtacctcctgcatacgcccccagggcagttcagctacctcccatcgcatacagcggacaatacccaccttcttcaggtccagtcgcacagcagccgccaatggctggcgaatacaacggcggcggcggccacatgtacgcgagcaattaccaaccagcctctccttatgcccaccaaggccagccgccgatgtatggtcagcaaagagagtagtataattagcgagcgccaccggctgcgcttcctagtggaaatagaaatctggtttgtctttggaaacctgatcactgacgaatcaagtattgccgattcggtctatactctggtctccccgaaacctgcagattgggctctatctatcgttttatgcatatccagagtcaggaatagctgccactgccactcctcttttccaagctcatcgtcgctagttagagatcgtcctcgagcgagcgcggtttgtattgagatcgggaatcaatcagatatattggggagcatggtcggaaaagaaaagatgcatggctagatacagataatcgtgggtgacacgatcagaatacgttcaaagaggttacgttgcaatgactacaatatcgtcattgcgtttgtggggctcagtccaataacatagaatggacgggcgatcggagggtcaataggtgttgttgtggatgactcctaaccaacaagattcttcccgggcaaccaagatagttggtaaaccacattatatgtaataaaacaatgtctaccaa

SEQ ID NO: 15586 - DNA, 1110 bp, Muscodor strobelii
  misc_feature: SGI cDNA ID NO. 565165
  misc_feature: Encodes the peptide sequence at SEQ ID NO 15587
atggaacggggtgtccaccacgattatcagcagtcagatcacgcgtctgctgcccaatacccgagcaaccaggagtcccgtcctgccagttactctgcctctggaaccccaacgtcagaatacggcgcatacccgcaatccgcgaggtcaaccagttctttcccagaacacagtcttcgtcactatcatcccgcgagcagccacaacggtagcagcggaggtatggcgcagcaaacatcaacaagtccgtcaatgcctatgcaagatggacgcaaccatcaaccccagcaactcaagtctgacagcgatgtgccaatagatccgtccatcgcggcacccagcccgacatatcctcacggccaatacgcgccttacgggccgcctccacctcaagacatgtcgcataactatcctcaaagcacagcaagcttgtacaatcaacctcgaccagactggggcaactacgcacatccaggcagtcagatgccgcacccccattcggtaccttacggccattcacctgcttctgccgctcccccgggccgtccaacacagtatgctcctcaacaggtctacagttttgtcccgattccaggcgcacagcaacataaacggccgcgacgccggtatgaagagattgaacgaatgtacaagtgtggatggaacggctgcgagaaagcgtacggcacgctgaaccacctgaacgcccatgttactatgcaaagtcatggacagaagcgaacacctgaagaattcaaagaaattcgcaaggaatggaaggctcgcaagaaggaggaagatcaacagcgcaagcaggccgaggaggagagtcggcagcgccacgcggcagcagcagccgctcagaaccccggtcctgaccaggcaagcgaagcaggagtacctcctgcatacgcccccagggcagttcagctacctcccatcgcatacagcggacaatacccaccttcttcaggtccagtcgcacagcagccgccaatggctggcgaatacaacggcggcggcggccacatgtacgcgagcaattaccaaccagcctctccttatgcccaccaaggccagccgccgatgtatggtcagcaaagagagtag

SEQ ID NO: 15587 - protein, 369 aa, Muscodor strobelii
  misc_feature: SGI Peptide ID NO. 565165
  misc_feature (13)..(367): NCBI GI: 2367591 Blast Desc: transcriptional regulator [Magnaporthe grisea]
  misc_feature (12)..(356): NCBI GI: 256725745 Blast Desc: NECHADRAFT_94491 [Nectria haematococca mpVI 77-13-4]
  misc_feature (11)..(356): NCBI GI: 46116584 Blast Desc: FG04134.1 [Gibberella zeae PH-1]
  misc_feature (12)..(303): NCBI GI: 261358094 Blast Desc: transcriptional regulator [Verticillium albo-atrum VaMs.102]
  misc_feature (1)..(367): NCBI GI: 145601973 Blast Desc: conserved [Magnaporthe grisea 70-15] gi|145010428|gb|EDJ95084.1| conserved [Magnaporthe grisea 70-15]
  misc_feature (13)..(367): NCBI GI: 115381184 Blast Desc: transcription factor Con7p [Magnaporthe grisea]
  misc_feature (15)..(360): NCBI GI: 116191651 Blast Desc: CHGG_05543 [Chaetomium globosum CBS 148.51] gi|88181456|gb|EAQ88924.1| CHGG_05543 [Chaetomium globosum CBS 148.51]
  misc_feature (12)..(322): NCBI GI: 156064145 Blast Desc: SS1G_00080 [Sclerotinia sclerotiorum 1980] gi|154690942|gb|EDN90680.1| SS1G_00080 [Sclerotinia sclerotiorum 1980]
  misc_feature (12)..(315): NCBI GI: 154298978 Blast Desc: BC1G_11736 [Botryotinia fuckeliana B05.10] gi|150857641|gb|EDN32833.1| BC1G_11736 [Botryotinia fuckeliana B05.10]
  misc_feature (17)..(355): NCBI GI: 154271073 Blast Desc: conserved [Ajellomyces capsulatus NAm1] gi|150409613|gb|EDN05057.1| conserved [Ajellomyces capsulatus NAm1]
MERGVHHDYQQSDHASAAQYPSNQESRPASYSASGTPTSEYGAYPQSARSTSSFPEHSLRHYHPASSHNGSSGGMAQQTSTSPSMPMQDGRNHQPQQLKSDSDVPIDPSIAAPSPTYPHGQYAPYGPPPPQDMSHNYPQSTASLYNQPRPDWGNYAHPGSQMPHPHSVPYGHSPASAAPPGRPTQYAPQQVYSFVPIPGAQQHKRPRRRYEEIERMYKCGWNGCEKAYGTLNHLNAHVTMQSHGQKRTPEEFKEIRKEWKARKKEEDQQRKQAEEESRQRHAAAAAAQNPGPDQASEAGVPPAYAPRAVQLPPIAYSGQYPPSSGPVAQQPPMAGEYNGGGGHMYASNYQPASPYAHQGQPPMYGQQRE

SEQ ID NO: 15588 - DNA, 3857 bp, Muscodor strobelii; identical to SEQ ID NO: 15585
  misc_feature: SGI EST ID NO. CUFF.37008.2
  misc_feature: Variant of the nucleotide sequence at SEQ ID NO 15586

SEQ ID NO: 15589 - DNA, 1035 bp, Muscodor strobelii
  misc_feature: SGI cDNA ID NO. 565166
  misc_feature: Reduced expression when VOC is produced
  misc_feature: Encodes the peptide sequence at SEQ ID NO 15590
atggaacggggtgtccaccacgattatcagcagtcagatcacgcgtctgctgcccaatacccgagcaaccaggagtcccgtcctgccagttactctgcctctggaaccccaacgtcagaatacggcgcatacccgcaatccgcgaggtcaaccagttctttcccagaacacagtcttcgtcactatcatcccgcgagcagccacaacggtagcagcggaggtatggcgcagcaaacatcaacaaatccgtccatcgcggcacccagcccgacatatcctcacggccaatacgcgccttacgggccgcctccacctcaagacatgtcgcataactatcctcaaagcacagcaagcttgtacaatcaacctcgaccagactggggcaactacgcacatccaggcagtcagatgccgcacccccattcggtaccttacggccattcacctgcttctgccgctcccccgggccgtccaacacagtatgctcctcaacaggtctacagttttgtcccgattccaggcgcacagcaacataaacggccgcgacgccggtatgaagagattgaacgaatgtacaagtgtggatggaacggctgcgagaaagcgtacggcacgctgaaccacctgaacgcccatgttactatgcaaagtcatggacagaagcgaacacctgaagaattcaaagaaattcgcaaggaatggaaggctcgcaagaaggaggaagatcaacagcgcaagcaggccgaggaggagagtcggcagcgccacgcggcagcagcagccgctcagaaccccggtcctgaccaggcaagcgaagcaggagtacctcctgcatacgcccccagggcagttcagctacctcccatcgcatacagcggacaatacccaccttcttcaggtccagtcgcacagcagccgccaatggctggcgaatacaacggcggcggcggccacatgtacgcgagcaattaccaaccagcctctccttatgcccaccaaggccagccgccgatgtatggtcagcaaagagagtag

SEQ ID NO: 15590 - protein, 344 aa, Muscodor strobelii
  misc_feature: SGI Peptide ID NO. 565166
  misc_feature (1)..(342): NCBI GI: 145601973 Blast Desc: conserved [Magnaporthe grisea 70-15] gi|145010428|gb|EDJ95084.1| conserved [Magnaporthe grisea 70-15]
  misc_feature (13)..(342): NCBI GI: 115381184 Blast Desc: transcription factor Con7p [Magnaporthe grisea]
  misc_feature (13)..(342): NCBI GI: 2367591 Blast Desc: transcriptional regulator [Magnaporthe grisea]
  misc_feature (11)..(331): NCBI GI: 46116584 Blast Desc: FG04134.1 [Gibberella zeae PH-1]
  misc_feature (12)..(331): NCBI GI: 256725745 Blast Desc: NECHADRAFT_94491 [Nectria haematococca mpVI 77-13-4]
  misc_feature (12)..(278): NCBI GI: 261358094 Blast Desc: transcriptional regulator [Verticillium albo-atrum VaMs.102]
  misc_feature (15)..(335): NCBI GI: 116191651 Blast Desc: CHGG_05543 [Chaetomium globosum CBS 148.51] gi|88181456|gb|EAQ88924.1| CHGG_05543 [Chaetomium globosum CBS 148.51]
  misc_feature (12)..(297): NCBI GI: 156064145 Blast Desc: SS1G_00080 [Sclerotinia sclerotiorum 1980] gi|154690942|gb|EDN90680.1| SS1G_00080 [Sclerotinia sclerotiorum 1980]
  misc_feature (34)..(314): NCBI GI: 85109827 Blast Desc: NCU07846 [Neurospora crassa OR74A] gi|28924759|gb|EAA33871.1| [Neurospora crassa OR74A]
  misc_feature (15)..(229): NCBI GI: 171687134 Blast Desc: protein product [Podospora anserina] gi|170943528|emb|CAP69181.1| protein product [Podospora anserina]
  misc_feature: Useful for introducing or modulating the production of volatile compounds
MERGVHHDYQQSDHASAAQYPSNQESRPASYSASGTPTSEYGAYPQSARSTSSFPEHSLRHYHPASSHNGSSGGMAQQTSTNPSIAAPSPTYPHGQYAPYGPPPPQDMSHNYPQSTASLYNQPRPDWGNYAHPGSQMPHPHSVPYGHSPASAAPPGRPTQYAPQQVYSFVPIPGAQQHKRPRRRYEEIERMYKCGWNGCEKAYGTLNHLNAHVTMQSHGQKRTPEEFKEIRKEWKARKKEEDQQRKQAEEESRQRHAAAAAAQNPGPDQASEAGVPPAYAPRAVQLPPIAYSGQYPPSSGPVAQQPPMAGEYNGGGGHMYASNYQPASPYAHQGQPPMYGQQRE

SEQ ID NO: 15591 - DNA, 3857 bp, Muscodor strobelii; identical to SEQ ID NO: 15585
  misc_feature: SGI EST ID NO. CUFF.37008.2
  misc_feature: Variant of the nucleotide sequence at SEQ ID NO 15589

SEQ ID NO: 15592 - DNA, 1095 bp, Muscodor strobelii
  misc_feature: SGI cDNA ID NO. 565167
  misc_feature: Reduced expression when VOC is produced
  misc_feature: Encodes the peptide sequence at SEQ ID NO 15593
atggaacggggtgtccaccacgattatcagcagtcagatcacgcgtctgctgcccaatacccgagcaaccaggagtcccgtcctgccagttactctgcctctggaaccccaacgtcagaatacggcgcatacccgcaatccgcgaggtcaaccagttctttcccagaacacagtcttcgtcactatcatcccgcgagcagccacaacggtagcagcggaggtatggcgcagcaaacatcaacaagtccgtcaatgcctatgcaagatggacgcaaccatcaaccccagcaactcaagtctgacagcgatgtgccaatagatccgtccatcgcggcacccagcccgacatatcctcacggccaatacgcgccttacgggccgcctccacctcaagacatgtcgcataactatcctcaaagcacagcaagcttgtacaatcaacctcgaccagactggggcaactacgcacatccaggcagtcagatgccgcacccccattcggtaccttacggccattcacctgcttctgccgctcccccgggccgtccaacacaggtctacagttttgtcccgattccaggcgcacagcaacataaacggccgcgacgccggtatgaagagattgaacgaatgtacaagtgtggatggaacggctgcgagaaagcgtacggcacgctgaaccacctgaacgcccatgttactatgcaaagtcatggacagaagcgaacacctgaagaattcaaagaaattcgcaaggaatggaaggctcgcaagaaggaggaagatcaacagcgcaagcaggccgaggaggagagtcggcagcgccacgcggcagcagcagccgctcagaaccccggtcctgaccaggcaagcgaagcaggagtacctcctgcatacgcccccagggcagttcagctacctcccatcgcatacagcggacaatacccaccttcttcaggtccagtcgcacagcagccgccaatggctggcgaatacaacggcggcggcggccacatgtacgcgagcaattaccaaccagcctctccttatgcccaccaaggccagccgccgatgtatggtcagcaaagagagtag

SEQ ID NO: 15593 - protein, 364 aa, Muscodor strobelii
  misc_feature: SGI Peptide ID NO. 565167
  misc_feature (13)..(362): NCBI GI: 2367591 Blast Desc: transcriptional regulator [Magnaporthe grisea]
  misc_feature (11)..(351): NCBI GI: 46116584 Blast Desc: FG04134.1 [Gibberella zeae PH-1]
  misc_feature (12)..(351): NCBI GI: 256725745 Blast Desc: NECHADRAFT_94491 [Nectria haematococca mpVI 77-13-4]
  misc_feature (12)..(298): NCBI GI: 261358094 Blast Desc: transcriptional regulator [Verticillium albo-atrum VaMs.102]
  misc_feature (1)..(362): NCBI GI: 145601973 Blast Desc: conserved [Magnaporthe grisea 70-15] gi|145010428|gb|EDJ95084.1| conserved [Magnaporthe grisea 70-15]
  misc_feature (13)..(362): NCBI GI: 115381184 Blast Desc: transcription factor Con7p [Magnaporthe grisea]
  misc_feature (15)..(355): NCBI GI: 116191651 Blast Desc: CHGG_05543 [Chaetomium globosum CBS 148.51] gi|88181456|gb|EAQ88924.1| CHGG_05543 [Chaetomium globosum CBS 148.51]
  misc_feature (12)..(317): NCBI GI: 156064145 Blast Desc: SS1G_00080 [Sclerotinia sclerotiorum 1980] gi|154690942|gb|EDN90680.1| SS1G_00080 [Sclerotinia sclerotiorum 1980]
  misc_feature (12)..(310): NCBI GI: 154298978 Blast Desc: BC1G_11736 [Botryotinia fuckeliana B05.10] gi|150857641|gb|EDN32833.1| BC1G_11736 [Botryotinia fuckeliana B05.10]
  misc_feature (12)..(279): NCBI GI: 189205180 Blast Desc: transcriptional regulator [Pyrenophora tritici-repentis Pt-1C-BFP] gi|187986024|gb|EDU51512.1| transcriptional regulator [Pyrenophora tritici-repentis
  misc_feature: Useful for introducing or modulating the production of volatile compounds
MERGVHHDYQQSDHASAAQYPSNQESRPASYSASGTPTSEYGAYPQSARSTSSFPEHSLRHYHPASSHNGSSGGMAQQTSTSPSMPMQDGRNHQPQQLKSDSDVPIDPSIAAPSPTYPHGQYAPYGPPPPQDMSHNYPQSTASLYNQPRPDWGNYAHPGSQMPHPHSVPYGHSPASAAPPGRPTQVYSFVPIPGAQQHKRPRRRYEEIERMYKCGWNGCEKAYGTLNHLNAHVTMQSHGQKRTPEEFKEIRKEWKARKKEEDQQRKQAEEESRQRHAAAAAAQNPGPDQASEAGVPPAYAPRAVQLPPIAYSGQYPPSSGPVAQQPPMAGEYNGGGGHMYASNYQPASPYAHQGQPPMYGQQRE

SEQ ID NO: 15594 - DNA, 3857 bp, Muscodor strobelii; identical to SEQ ID NO: 15585
  misc_feature: SGI EST ID NO. CUFF.37008.2
  misc_feature: Variant of the nucleotide sequence at SEQ ID NO 15592

SEQ ID NO: 15595 - DNA, 597 bp, Muscodor strobelii
  misc_feature: SGI cDNA ID NO. 565168
  misc_feature: Encodes the peptide sequence at SEQ ID NO 15596
atgaaagtagcaacatcgtttgcgattctagtgggcgtcgcccaggcggctcctcactatacgtttccgcatcttaccggaacagcagactggtccagcgtacgacagacctcgcaggtcaaagcaggagggcagatttcttgggatgttgctccgaatatctatcacccaggtgccctttcggcctatatggcgaaggcaccaagtggtcaaaccgctgcatcttgggacggcacgggagcagtttggttcaaggtcttccaggatttacccacggccagcggcgggcaatacacttggccgtctaatggcaagtcctcggtgagcttcaccgtgccacagtgtctggccgacggagattatctatttcgaatcgagcatgtcgcactgcacagtgctagctcagctggtggtgcccagttttacatatcatgcgctcaaataactgtaaccggcggctcgggttccaagagtccttccaatctcgtttcatttccaggtgcttacaaggctactgaccctgggctcttgatcaacatctacaacaacggcggaaaggcgtatcagcccgccgggccggctgtatttacttgttaa

SEQ ID NO: 15596 - protein, 198 aa, Muscodor strobelii
  misc_feature: SGI Peptide ID NO. 565168
  misc_feature (110)..(181): Pfam Id: PF03443 Pfam Desc: Glycosyl hydrolase family 61
  misc_feature (1)..(198): NCBI GI: 39946514 Blast Desc: MGG_08254 [Magnaporthe grisea 70-15] gi|145020107|gb|EDK04335.1| MGG_08254 [Magnaporthe grisea 70-15]
  misc_feature (18)..(198): NCBI GI: 171680024 Blast Desc: protein product [Podospora anserina] gi|170939638|emb|CAP64865.1| protein product [Podospora anserina]
  misc_feature (19)..(198): NCBI GI: 116203843 Blast Desc: CHGG_09805 [Chaetomium globosum CBS 148.51] gi|88175933|gb|EAQ83401.1| CHGG_09805 [Chaetomium globosum CBS 148.51]
  misc_feature (3)..(198): NCBI GI: 116200239 Blast Desc: CHGG_08275 [Chaetomium globosum CBS 148.51] gi|88179554|gb|EAQ87022.1| CHGG_08275 [Chaetomium globosum CBS 148.51]
  misc_feature (19)..(197): NCBI GI: 169596264 Blast Desc: SNOG_00889 [Phaeosphaeria nodorum SN15] gi|111071264|gb|EAT92384.1| SNOG_00889 [Phaeosphaeria nodorum SN15]
  misc_feature (6)..(197): NCBI GI: 189202962 Blast Desc: fungal cellulose binding domain containing protein [Pyrenophora tritici-repentis Pt-1C-BFP] gi|187984916|gb|EDU50404.1| fungal cellulose binding domain
  misc_feature (6)..(198): NCBI GI: 171683736 Blast Desc: protein product [Podospora anserina] gi|170941828|emb|CAP67481.1| protein product [Podospora anserina]
  misc_feature (36)..(198): NCBI GI: 85092580 Blast Desc: NCU02344 [Neurospora crassa OR74A] gi|28920895|gb|EAA30230.1| conserved [Neurospora crassa OR74A] gi|40804596|emb|CAF05857.1| related to cellulose binding protein
  misc_feature (19)..(198): NCBI GI: 262118540 Blast Desc: NCU02344 [Neurospora crassa OR74A] gi|28920895|gb|EAA30230.1| conserved [Neurospora crassa OR74A] gi|40804596|emb|CAF05857.1| related to cellulose binding protein
  misc_feature (7)..(198): NCBI GI: 261358752 Blast Desc: conserved [Verticillium albo-atrum VaMs.102]
  misc_feature (20)..(181): SWISSPROT Homolog: EC 3.2.1.4 Cellulase
MKVATSFAILVGVAQAAPHYTFPHLTGTADWSSVRQTSQVKAGGQISWDVAPNIYHPGALSAYMAKAPSGQTAASWDGTGAVWFKVFQDLPTASGGQYTWPSNGKSSVSFTVPQCLADGDYLFRIEHVALHSASSAGGAQFYISCAQITVTGGSGSKSPSNLVSFPGAYKATDPGLLINIYNNGGKAYQPAGPAVFTC

SEQ ID NO: 15597 - DNA, 1312 bp, Muscodor strobelii
  misc_feature: SGI EST ID NO. CUFF.36949.0
  misc_feature: Variant of the nucleotide sequence at SEQ ID NO 15595
ggtttccacagtggtcccgtgactgacgttacgagcgatgcaattcgatgctaccaacgtgctgcgggcggagcacctaacggtacttatgaaatcccctcgtttctcgctttccacttcttcttacacgtaaagctttcgcttttgagaaatatgtgctaacttatatgtgtcgtaacctcgcaggtcaaagcaggagggcagatttcttgggatgttgctccgaatatctatcacccaggtgccctttcggcctatatggcgaaggcaccaagtggtcaaaccgctgcatcttgggacggcacgggagcagtttggttcaaggtcttccaggatttacccacggccagcggcgggcaatacacttggccgtctaatggcaagtcctcggtgagcttcaccgtgccacagtgtctggccgacggagattatctatttcgaatcgagcatgtcgcactgcacagtgctagctcagctggtggtgcccagttttacatatcatgcgctcaaataactgtaaccggcggctcgggttccaagagtccttccaatctcgtttcatttccaggtgcttacaaggctactgaccctgggctcttgatcaacatctacaacaacggcggaaaggcgtatcagcccgccgggccggctgtatttacttgttaagacgaggagtcgactttgtcgtctggcgatggaaagaaatggtgttaagcatcaaaactctgaaagatgttgtgcacgacgttcttaatacagaatgcatattcgtcaatgtgatttgactaccttcagagttctttaatcagattgttatatcgtcgttgcccaacaccaataatccgtaggtcgtgtcgtggcatattgagaagtcgttggctagagcctggcccgagcctagcgcgaccataggcaaagaatgttgttgtagtgatgttttgttagtcacctggagcatcgccgatctaaactatataactttaactgtatctaaacaacagcccttactgtataagtacctactgcatgcgagatgagggtcggatgccgactcatttcgtacgcatttcgagttaagaaataagaccttatagaccataggcaaagaaatagtacagtctctctatcttgatgttaataacaatctcgcacgaagtagaggacatctgattctgggtcaggcaattacctcatcattgtttgctaacataactagtagtatatggtaaattggcaagccttgaaaatattattcgaacaaccatctgctcatcaagtggagccatgtttataagcgttgatgaagtaccgc

SEQ ID NO: 15598 - DNA, 1656 bp, Muscodor strobelii
  misc_feature: SGI cDNA ID NO. 565169
  misc_feature: Reduced expression when VOC is produced
  misc_feature: Encodes the peptide sequence at SEQ ID NO 15599
atgtcttacggcggtggtggttacggaggctcccgtggcggaggcggcggctatggcaacgatggtggctatcgctctggcggccgccacgataatggctatggcaacggacattccaacggatacggcggcggtggtggcggtggctatggaagtggcggctacggtggtggcagctatggcggaggaggtggtggtgaccgcatgagcaatctaggtgctggtctcaccaagcagaactgggacctcagcactttgcccaagttcgagaagtccttctacaaagaggatgatgccgtagcccgtcgccctgccagcgaggtcgatcgcttccgacgcgaccaccaggtgactgttgctggtcatgatgtacccaagcccgtcgagactttcgacgaggctggtttcccccgatacgtcatggacgaagtcaaggcccaaggattccctgcccccactgctatccaatctcaaggctggcccatggctctttccggccgtgatgtcgtgggaattgcggagactggctctggaaagacacttacttattgtcttcccgccattgtccacatcaatgcgcagcctctgctggcacctggtgatggtcctattgttttggtcttggctcctacgcgagagttggctgtacagatccaacaggagatcaccaagttcggcaagtcctccaggattcgcaacacctgtgtctatggtggtgtgccgcgtggtccccagattcgcgatcttcagaagggagtcgaggtttgcattgccactcctggacgcttgatcgatatgctcgagggtggcaagaccaaccttcgccgagtcacctatcttgtcctcgacgaggctgatcgtatgcttgacatgggtttcgaaccccagatccgcaagattatcagccagattcgacctgaccgtcagactctcatgtggtctgcgacatggcccaaggaggttcgagctctagcctctgagtttcaaacggactttattcaagtcaacattggttccatggacctctctgctaaccatcgtatcacccaaattgtcgaggtagtgaacgagggcgagaagcgtgagcgcatgatcaagcatctcgagaagatcatggacaacaaagagaacaaatgtttactgtttgtcggcacaaaacgtgtagcagatgacattactaggtttttgcgtcaggacggctggcctgcactgtcaattcatggtgacaaacaacagaatgagcgtgattgggtccttgatcagttcaagactaacaagagccccatcatggtcgcaaccgacgtggcctcgcgtggtattgatgtgcgcaacatcacgcacgtaatcaactatgattatcccaacaattcggaagattatattcaccgcattggccgtaccggtcgtgccggtgccaagggtaccgcgatcaccttcttcactactgacaactcgaagcaggcacgtgatttagtcaatgttctacaagaggccaaacaaaatattgacccacgactggctgagatggttcgatatggtggtggtggtggtggccgatacggcggtcgcggatatggtggtcggggtggtcatcgtggtggcggcggcggcggtggtggtgcaaactccatgcccctcggtaaccgacgatggtga

SEQ ID NO: 15599 - protein, 551 aa, Muscodor strobelii
  misc_feature: SGI Peptide ID NO. 565169
  misc_feature (153)..(324): Pfam Id: PF00270 Pfam Desc: DEAD/DEAH box helicase
  misc_feature (395)..(471): Pfam Id: PF00271 Pfam Desc: Helicase conserved C-terminal domain
  misc_feature (67)..(551): NCBI GI: 212543663 Blast Desc: RNA helicase (Dbp), [Penicillium marneffei ATCC 18224] gi|210066893|gb|EEA20986.1| RNA helicase (Dbp), [Penicillium marneffei ATCC 18224]
  misc_feature (2)..(551): NCBI GI: 91206537 Blast Desc: RNA helicase (Dbp), [Penicillium marneffei ATCC 18224] gi|210066893|gb|EEA20986.1| RNA helicase (Dbp), [Penicillium marneffei ATCC 18224]
  misc_feature (67)..(551): NCBI GI: 121715524 Blast Desc: RNA helicase (Dbp), [Aspergillus clavatus NRRL 1] gi|134034064|sp|A1C6C4.1|DBP2_ASPCL RecName: Full=ATP-dependent RNA helicase dbp2 gi|119403528|gb|EAW13945.1| RNA helicase (Dbp),
  misc_feature (67)..(551): NCBI GI: 154271069 Blast Desc: HCAG_08709 [Ajellomyces capsulatus NAm1] gi|160380608|sp|A6RGE3.1|DBP2_AJECN RecName: Full=ATP-dependent RNA helicase DBP2 gi|150409611|gb|EDN05055.1| HCAG_08709 NAm1]
  misc_feature (67)..(551): NCBI GI: 261188002 Blast Desc: ATP-dependent RNA helicase DBP2 [Ajellomyces dermatitidis SLH14081] gi|239593429|gb|EEQ76010.1| ATP-dependent RNA helicase DBP2 [Ajellomyces dermatitidis SLH14081]
  misc_feature (67)..(551): NCBI GI: 239615016 Blast Desc: ATP-dependent RNA helicase DBP2 [Ajellomyces dermatitidis ER-3]
  misc_feature (67)..(509): NCBI GI: 160380700 Blast Desc: ATP-dependent RNA helicase DBP2 [Ajellomyces dermatitidis ER-3]
  misc_feature (67)..(551): NCBI GI: 225555683 Blast Desc: ATP-dependent RNA helicase DBP2 [Ajellomyces capsulatus G186AR]
  misc_feature (2)..(551): NCBI GI: 71001454 Blast Desc: RNA helicase (Dbp) [Aspergillus fumigatus Af293] gi|66853046|gb|EAL93370.1| RNA helicase (Dbp), [Aspergillus fumigatus Af293] gi|159129480|gb|EDP54594.1| RNA helicase (Dbp),
  misc_feature (1)..(551): NCBI GI: 119178046 Blast Desc: conserved [Coccidioides immitis RS] gi|118575172|sp|Q1DP69.1|DBP2_COCIM RecName: Full=ATP-dependent RNA helicase DBP2
  misc_feature: Useful for introducing or modulating the production of volatile compounds
MSYGGGGYGGSRGGGGGYGNDGGYRSGGRHDNGYGNGHSNGYGGGGGGGYGSGGYGGGSYGGGGGGDRMSNLGAGLTKQNWDLSTLPKFEKSFYKEDDAVARRPASEVDRFRRDHQVTVAGHDVPKPVETFDEAGFPRYVMDEVKAQGFPAPTAIQSQGWPMALSGRDVVGIAETGSGKTLTYCLPAIVHINAQPLLAPGDGPIVLVLAPTRELAVQIQQEITKFGKSSRIRNTCVYGGVPRGPQIRDLQKGVEVCIATPGRLIDMLEGGKTNLRRVTYLVLDEADRMLDMGFEPQIRKIISQIRPDRQTLMWSATWPKEVRALASEFQTDFIQVNIGSMDLSANHRITQIVEVVNEGEKRERMIKHLEKIMDNKENKCLLFVGTKRVADDITRFLRQDGWPALSIHGDKQQNERDWVLDQFKTNKSPIMVATDVASRGIDVRNITHVINYDYPNNSEDYIHRIGRTGRAGAKGTAITFFTTDNSKQARDLVNVLQEAKQNIDPRLAEMVRYGGGGGGRYGGRGYGGRGGHRGGGGGGGGANSMPLGNRRW

SEQ ID NO: 15600 - DNA, 2459 bp, Muscodor strobelii
  misc_feature: SGI EST ID NO. CUFF.37211.1
  misc_feature: Variant of the nucleotide sequence at SEQ ID NO 15598
cctccctcgactgcctcttcatctctgttcatcacaaccaacgtcgagtgcgaatcctgcatctcaccgttccatcgcactcacatccatcccgctcatttctgcagattgcgctctgcactacacgtgtctccagcacatcttgtttctctgctgacccccagcgccattcgcgcccacgacttcatctctacagcccgctcctgcaacaccattaaccccagcagactcttgcccatccccgaatacagcagcatcaccatgtcttacggcggtggtggttacggaggctcccgtggcggaggcggcggctatggcaacgatggtggctatcgctctggcggccgccacgataatggctatggcaacggacattccaacggatacggcggcggtggtggcggtggctatggaagtggcggctacggtggtggcagctatggcggaggaggtggtggtgaccgcatgagcaatctaggtgctggtctcaccaagcagaactgggacctcagcactttgcccaagttcgagaagtccttctacaaagaggatgatgccgtagcccgtcgccctgccagcgaggtcgatcgcttccgacgcgaccaccaggtgactgttgctggtcatgatgtacccaagcccgtcgagactttcgacgaggctggtttcccccgatacgtcatggacgaagtcaaggcccaaggattccctgcccccactgctatccaatctcaaggctggcccatggctctttccggccgtgatgtcgtgggaattgcggagactggctctggaaagacacttacttattgtcttcccgccattgtccacatcaatgcgcagcctctgctggcacctggtgatggtcctattgttttggtcttggctcctacgcgagagttggctgtacagatccaacaggagatcaccaagttcggcaagtcctccaggattcgcaacacctgtgtctatggtggtgtgccgcgtggtccccagattcgcgatcttcagaagggagtcgaggtttgcattgccactcctggacgcttgatcgatatgctcgagggtggcaagaccaaccttcgccgagtcacctatcttgtcctcgacgaggctgatcgtatgcttgacatgggtttcgaaccccagatccgcaagattatcagccagattcgacctgaccgtcagactctcatgtggtctgcgacatggcccaaggaggttcgagctctagcctctgagtttcaaacggactttattcaagtcaacattggttccatggacctctctgctaaccatcgtatcacccaaattgtcgaggtagtgaacgagggcgagaagcgtgagcgcatgatcaagcatctcgagaagatcatggacaacaaagagaacaaatgtttactgtttgtcggcacaaaacgtgtagcagatgacattactaggtttttgcgtcaggacggctggcctgcactgtcaattcatggtgacaaacaacagaatgagcgtgattgggtccttgatcagttcaagactaacaagagccccatcatggtcgcaaccgacgtggcctcgcgtggtattgatgtgcgcaacatcacgcacgtaatcaactatgattatcccaacaattcggaagattatattcaccgcattggccgtaccggtcgtgccggtgccaagggtaccgcgatcaccttcttcactactgacaactcgaagcaggcacgtgatttagtcaatgttctacaagaggccaaacaaaatattgacccacgactggctgagatggttcgatatggtggtggtggtggtggccgatacggcggtcgcggatatggtggtcggggtggtcatcgtggtggcggcggcggcggtggtggtgcaaactccatgcccctcggtaaccgacgatggtgatcgctcctcacaacagttccgtgcataatcgttcacatttcatctgtggtgaccaaggaacgcatacacatttttctttgcacaaaagcaccatacggcgttgtctagaggatttggttgattagacacagtaatatcggcttcccatcacgcgtgcaacttagcagtaagaactgtacgcaacgcacgcagctttaattcatgataggggtctgaaccgagagattgctcaaaaagcaggcaacagagcatcataaatctggtgaggtgcagcacaacagtcgtgtcactggaagcatctcacgaattcagtcacaaggccttgataacttagaatgtcgattcggtcgtgggttaccttgctgacacattttctagattggggttccagtcagattgactttgcaaaatggcatatgttaaatagattcttttgtccactacgcatacactccttatgaggcatgtcggacagtctaagtagcatgaaaagcttgatagtaatgagtttcatgaaaatagtacacttattggacaaggga

SEQ ID NO: 15601 - DNA, 1536 bp, Muscodor strobelii
  misc_feature: SGI cDNA ID NO. 565170
  misc_feature: Encodes the peptide sequence at SEQ ID NO 15602
atgacagacagaacaatactcgtaattgccgggagcgactcgtccggcggtgcaggtctcgaggcggaccaaaaggttattgcagctcatgggtgttatgccatgactgcaacaactgcattgacagcccagaacaccctaggagtcgatggaatccattatgtacctcctgcattcacaaggcagcagattgacaccgtctttcgggacattcgaccaagtgtcatcaagaccggaatgcttggatccgtcgaaactattcgaatgctttcagacgccttccaagatcatcacgtcgacaaactgaaacttgtgatggacccagtgatggtggcgaccacaggcgcaaacctgctaccctctgaagctattgatgacttacgtactttgttactaccgaagacgttcatcctcacgccaaatatcccagaggcaatactattgctcaaaaatgcggaagcggaagcactcaagattgaaacaatcaatgatctcaaggtcatagccagaagacttcttgcgcttagcccgagatgggtgcttctcaaaggcggtcatgcgccattcaacaaggatggtactattgctacatcgctcgaggagaaacatatcgttgctgatgtgcttgtgggagataatggcgatacgagggtcatcgagacaccatttgtcgaatctcaaaatacgcacggcacaggctgttcccttgcctcagctatcgccgccaatttgtcgaaaggcttgggctgtgttgaggctgtgagtgctgcgtgtagatatgttgaagcgggtattcgtacagcaacaggattggggaatggatgcggaccaatcaatcatttccactcgacgtatatgctacctttcgcgccgggtcgttttgtggagtggctactcgctcggccggatgtcgcgccggtatggcaacgtttcgtctatcacccctttgtaatggcgatgggtagtggtcagttgcctcttgaatctttcaaacagtatctcatacaagactacctctatctcgtacactttgctcgcgcaaatgcacttgcatcgtacaaggcgaaaaatatcgaagatatcgctgcgggagcgaagatcgtcaaccatatacataccgagatggccctacatatcaactactgcgagagcttcggaatttcgaaagaggaaatcgaagccacggaagaacaccaagcatgtactgcatacacccgctatgttttagatattggccagtctgaagattggcttggactgcaagtctctcttgcgccatgcctgctcggatacggggccgtcgccaaacagctgcacggagacccgaagactaaaatggatggcaacacgtattggccttggattctgaactacgtcgctgatgattatgtgcaagctgtaaagacggggaacgaactcatggaaaagaatgcagtgctccagtctccttctagaattgaggaacttgttaaggtgttcatacatgctacgaagatggagattgggttttgggagatgtttccatatacaaattag

SEQ ID NO: 15602 - protein, 511 aa, Muscodor strobelii
  misc_feature: SGI Peptide ID NO. 565170
  misc_feature (13)..(279): Pfam Id: PF08543 Pfam Desc: Phosphomethylpyrimidine kinase
  misc_feature (301)..(510): Pfam Id: PF03070 Pfam Desc: TENA/THI-4/PQQC family
  misc_feature (103)..(259): Pfam Id: PF00294 Pfam Desc: pfkB family carbohydrate kinase
  misc_feature (1)..(508): NCBI GI: 46116572 Blast Desc: FG04128.1 [Gibberella zeae PH-1]
  misc_feature (1)..(502): NCBI GI: 145601981 Blast Desc: MGG_12895 [Magnaporthe grisea 70-15] gi|145010432|gb|EDJ95088.1| MGG_12895 [Magnaporthe grisea 70-15]
  misc_feature (1)..(508): NCBI GI: 256725741 Blast Desc: [Nectria haematococca mpVI 77-13-4]
  misc_feature (1)..(499): NCBI GI: 171687130 Blast Desc: protein product [Podospora anserina] gi|170943526|emb|CAP69179.1| protein product [Podospora anserina]
  misc_feature (1)..(506): NCBI GI: 255950464 Blast Desc: Pc22g21020 [Penicillium chrysogenum Wisconsin 54-1255] gi|211593016|emb|CAP99390.1| Pc22g21020 [Penicillium chrysogenum Wisconsin 54-1255]
  misc_feature (6)..(506): NCBI GI: 212543671 Blast Desc: thiamin biosynthesis protein (Thi-4), [Penicillium marneffei ATCC 18224] gi|210066897|gb|EEA20990.1| thiamin biosynthesis protein (Thi-4), [Penicillium marneffei ATCC 18224]
  misc_feature (1)..(506): NCBI GI: 259479897 Blast Desc: TPA: thiamin biosynthesis protein (Thi-4), (AFU_orthologue; AFUA_2G10740) [Aspergillus nidulans FGSC A4]
  misc_feature (6)..(506): NCBI GI: 242787375 Blast Desc: thiamin biosynthesis protein (Thi-4), [Talaromyces stipitatus ATCC 10500] gi|218721141|gb|EED20560.1| thiamin biosynthesis protein (Thi-4), [Talaromyces stipitatus ATCC 10500]
  misc_feature (1)..(506): NCBI GI: 119481043 Blast Desc: thiamin biosynthesis protein (Thi-4), [Neosartorya fischeri NRRL 181] gi|119408704|gb|EAW18653.1| thiamin biosynthesis protein (Thi-4), [Neosartorya fischeri NRRL 181]
  misc_feature (1)..(506): NCBI GI: 240276503 Blast Desc: phosphomethylpyrimidine kinase THI20 [Ajellomyces capsulatus H143]
  misc_feature (7)..(509): SWISSPROT Homolog: EC 2.7.4.7 Phosphomethylpyrimidine kinase
MTDRTILVIAGSDSSGGAGLEADQKVIAAHGCYAMTATTALTAQNTLGVDGIHYVPPAFTRQQIDTVFRDIRPSVIKTGMLGSVETIRMLSDAFQDHHVDKLKLVMDPVMVATTGANLLPSEAIDDLRTLLLPKTFILTPNIPEAILLLKNAEAEALKIETINDLKVIARRLLALSPRWVLLKGGHAPFNKDGTIATSLEEKHIVADVLVGDNGDTRVIETPFVESQNTHGTGCSLASAIAANLSKGLGCVEAVSAACRYVEAGIRTATGLGNGCGPINHFHSTYMLPFAPGRFVEWLLARPDVAPVWQRFVYHPFVMAMGSGQLPLESFKQYLIQDYLYLVHFARANALASYKAKNIEDIAAGAKIVNHIHTEMALHINYCESFGISKEEIEATEEHQACTAYTRYVLDIGQSEDWLGLQVSLAPCLLGYGAVAKQLHGDPKTKMDGNTYWPWILNYVADDYVQAVKTGNELMEKNAVLQSPSRIEELVKVFIHATKMEIGFWEMFPYTN

SEQ ID NO: 15603 - DNA, 2022 bp, Muscodor strobelii
  misc_feature: SGI EST ID NO. CUFF.36955.0
  misc_feature: Variant of the nucleotide sequence at SEQ ID NO 15601
tggcagctcacatttatggtaatgttgtgagaccgcactattagtcacaaaggtgacgttatagtagagatccattcgaaccccacttcattttgcgattccggtctatcggccacaactcgtcactgaccaaagcccctgactgggaaaaccagtagccccctaaagaaacatgatacaattgctctcattccttttggtagcagattgacaagatgacagacagaacaatactcgtaattgccgggagcgactcgtccggcggtgcaggtctcgaggcggaccaaaaggttattgcagctcatgggtgttatgccatgactgcaacaactgcattgacagcccagaacaccctaggagtcgatggaatccattatgtacctcctgcattcacaaggcagcagattgacaccgtctttcgggacattcgaccaagtgtcatcaagaccggaatgcttggatccgtcgaaactattcgaatgctttcagacgccttccaagatcatcacgtcgacaaactgaaacttgtgatggacccagtgatggtggcgaccacaggcgcaaacctgctaccctctgaagctattgatgacttacgtactttgttactaccgaagacgttcatcctcacgccaaatatcccagaggcaatactattgctcaaaaatgcggaagcggaagcactcaagattgaaacaatcaatgatctcaaggtcatagccagaagacttcttgcgcttagcccgagatgggtgcttctcaaaggcggtcatgcgccattcaacaaggatggtactattgctacatcgctcgaggagaaacatatcgttgctgatgtgcttgtgggagataatggcgatacgagggtcatcgagacaccatttgtcgaatctcaaaatacgcacggcacaggctgttcccttgcctcagctatcgccgccaatttgtcgaaaggcttgggctgtgttgaggctgtgagtgctgcgtgtagatatgttgaagcgggtattcgtacagcaacaggattggggaatggatgcggaccaatcaatcatttccactcgacgtatatgctacctttcgcgccgggtcgttttgtggagtggctactcgctcggccggatgtcgcgccggtatggcaacgtttcgtctatcacccctttgtaatggcgatgggtagtggtcagttgcctcttgaatctttcaaacagtatctcatacaagactacctctatctcgtacactttgctcgcgcaaatgcacttgcatcgtacaaggcgaaaaatatcgaagatatcgctgcgggagcgaagatcgtcaaccatatacataccgagatggccctacatatcaactactgcgagagcttcggaatttcgaaagaggaaatcgaagccacggaagaacaccaagcatgtactgcatacacccgctatgttttagatattggccagtctgaagattggcttggactgcaagtctctcttgcgccatgcctgctcggatacggggccgtcgccaaacagctgcacggagacccgaagactaaaatggatggcaacacgtattggccttggattctgaactacgtcgctgatgattatgtgcaagctgtaaagacggggaacgaactcatggaaaagaatgcagtgctccagtctccttctagaattgaggaacttgttaaggtgttcatacatgctacgaagatggagattgggttttgggagatgtttccatatacaaattagaggaaattgcttctggcacgtgttgtaaaactgcagacatcaaaagcggcctcttacttcggagctctcatggcacctgtcatcatctaaacactacatttgtcccgaatgctatgacgcgatatcgagaggatataaacgggctgaaaattgtaagaactttgacgactgcgaggggaaatagaacaacataaggcttggaaagacgattcgacttcaaataaacagtgataaaccaaatgaagacataataggtatgtcaactcggtac

SEQ ID NO: 15604 - DNA, 8772 bp, Muscodor strobelii
  misc_feature: SGI cDNA ID NO. 565171
  misc_feature: Encodes the peptide sequence at SEQ ID NO 15605
atggcgctcctcaacccgtcctttgtcttcggcatcttcgtcatcctctacctctcatccttcgtcgtcttcgccgtcctgcgcatcgtcaccggcatatccatccagcggatcggctacttctcgctgcggcgtctggcctacacgcccaaggacggcatcaagctcgagatccgcggtctcggcctcaacctgcaccgccccaccttctcccagcccacctggctcagcatcgtcgtgagcgagctcgccgtcaccgtcgacatcaaagccctcgaccgtaacaaggccgccactacgcgccctggccatggcgaccaaccggacggccgcagcagtgacgctgccagcactggcggcaacaagactgcgccgggcaaaccgcttccggggcgcgcagctctcgaggctgctcgaagcgcaacatgggagcagctgacaaagatgaaagaccgtctgaagaagctccaccggaatgttcgttggctgcgcctagtcgatgtcgttgcgaccgactcgactgtccacgtcgtggacgtcggcaaaatgcaagttgggggtttcactattgctttggacacccgacaccgtctcgtcgaccgcgcacgcttcttctttcagtccaaggctgagaagcgacgccagaagcaacccgccgagtggattgttactttgaagagcatactcttcacggccgcgagcagcgaatccatcgaggtgctcgacagtgcgactcttaccgtccacggtttcttgtacgacaacatggacgggcttcgagacgcagccattgccttgaagttcggtcgggtgcacatcccctatgacgatgtccagatatgcttaagacgctttgagaggatgcgcaggcaccaaatgacgaccatgcacaagccagccgagtctatagatattcccgtggacgatatcatgcaggagatggagaagcctgggagcactgataccgctttgatgcaagccgtgtccgactccagggattttgtcagctccatcctgcgaggcatcaaagaggttcaatttgctgtgagttttgtcagtatcacgaagagagtgaaaacggtgcggtcgggtggctcgacactgctgctgaacgcccatatgaaagaagtgggagtcgatctgcaccggctcgatcccaaatcgccggctcatcgtatgtatttcccacccgatgccatcgcgcacgaggctctggcagctgcgctgtctatcgccgttggcctggaggacggccatgggaaaccggaaaggatagtttacatacccatggctaccaccactgtgaagacaacattgccatccaagactgtagagttatcagagattacgagtgccgaggagaagaacaccaatatcctattcgccaactccgtcgttacctctccttctgttgacctagacccgaaacatcttcccattctgctcgccctcctgcaacgtagacccagatcgcccaaagcgcgcgctcagcagagacacatgatcatttctcgacttcttcccaaggccaacatcaaattctccatgcacgaacctgttctcagaattgcattgccaccggtgcgtaagacggacgatccagacgactttgacctcatcatctcctctatatcttctatctcgcttgacctcgagtcgtttcattctgctgtagaagatttgcattactcactggcttcgtcgatgcgggtgcaaacgcaccatctgtactaccagactacccaaggggatcgatttgatctcatcgacactgaatcgttcgatttaaaagtgcagctatctgcggcgcctgatgttcacgtcattgccacggggcatctacaaacatttgccatccgaatgactcggcctgaaatcaccaagggtttgcgtcaaatcattcgccagctcaagcccaaggtagaacccgacaagcgagtggcttcatcgatctctcgaccgcaaaacatcctacgagctctacctcagtggtttctgcatttcactgttcaagttgaggacttcagtgcagagatcacaggcatcgatgatgattttcccgggatgacccggggcgtggtccttcaagtagattcgtggtcagctgagtaccgtgctcaacggattgatcgtgctcgacagcggccgatgtctagacggcgagctgctagccgctccttcgtcccagatccggaattgctaactaccatgtcatcaccctcatcacctcgcaagaaatcacagaatgagggagatggtcggagggttgcggtgcatgtcaaagggctggaggccttcatcgtcgaggcccctgagaagtgggaagtagagccattcattcacatgccccgtttcgaggtagccttgtcgacacacagcgattcgcacagcccaattctacatgtccagtctcatcttcgcactttacatgtccaatactccctcttccgccactattcagttggtgttgctgtgatggttctgcgaagagcatttactagtgattcccgccgcccaagtcaagccgacgcacaatctcccccaacatcccccattttgctgtcgcctgggtcgcctcggatgaacaggtcagatatgtggcccaagagttcgagagaactcgtaaccgtcgattgcaaggctgggttaattcagatcaaggcagatatgccggcagatcccccgctgatgttgcatgtatataacatggaggcgggacgacatcgatggtcacctcctttctttacttcgagattgatccgtttgtatgccggcgctcctagaatgccaggagtatgggctagagtcgccagcatcaagaatattcgccttgatctccgagagtctcggagaaaactgtccagcggtgcgtttctagatgaaaaactcttcgatgtggtagcggaagccatgcgacttgccgttccccacgagctgatcatcaacaaaatatcggataattttatcaacgtaatcaaagcgagccagcagctccaccatcgtttcaagacaggaacaaacgagtacattctagagaaatctcctgaaaaaccaaagattgtccccaaagtctcgctcaggactcgcaatctgatgtttgagcttgaagacggcgcctttgagtggaaactaggcatgatctaccgagcaggtcgcgtagagcaacagcaacgtattgctcgcgaagaggccttccgtgtcaaagtcaaaaaaatccaagaagaggagatgaaaagagagtcaaatcgctttcgcaatcgctcaaggatggccagaggtcgagacgtcaatatggattcgcgagggcgtagtcggagtgaagatcctctggcgcaaatgaaccgagacgagaggtttcgcagccaagctccacgcggtcgtaaccctagatacgacccagatggtgtacgtgatatgacaggcaacgcctacatcacgattcaagaagcaagaatgcgattgtatgagcataacgggcagagctggaaaaaacgaatcgatcgtcactaccttaaagcgcgaaatgggatgcaagagctgcgcggcctcttctgggggccagaaagccttcctaacgatctcgaagatatggagagaattcttgaggttcctctgaggccctctctgatgggcgcaactattcatgaactacatgtcgtgattgacaagccgtccttcccactacacaaattgcctgacttccttcatcaggtcggcaaagggatgccaaaggacatgcaatactcccttctcatcccaatgaatatccacatcaacatgggcgaagcaaagattaatctccgggattatcccctgcctttgctccacgtcccggcactgaaaactggccagtcatctaaactcccatcgctgtctctcaaaacagattttgtcattgcggaggagtatcgcggtagcgaatcatcccggagaatacgcgttcaaattacgccgcccaacatcatcgagcctggggttcctaatgggagttttgcgattgacgtgcgccgtacgatcggtcccgtcaaatcgtattcagatatgcatgtcgatctaaacacagctaatccgactcgcattacctggggtccctcataccagccagccatacaagatatgatgatggtcatcgagtcgttcacaaaacctcagttagatccctcggaacgagtcgggttttgggataagataagacttaatttccattcaagagttcgtgttacctggaaaggagacggcgacgttcatcttgctctcaagggctccagagatccttatgcagtcattggaaatggtgctggatttgtaatgtgctggcgaaacaatgtcaagtggaatattcacaccgaggacgatcctaagaggtttatgactgtggacagtggcgaatatgtccttgcagtccccgactttagccaccaagctcgagaagacgcacggaaccttgacgagaacgacagcattattagcgagaacagccacaagtcaggcgtcgcattcaaaaaggtcgttatgaagctctcaggcaatgttcaatggatggctggccttgtttttgaacaggctatcgataatggcaagcgcaacttcaacttcaagcctcattatgatgtcattctgaaggctccaatgcatgccaaggcgcaagaggatagtgcgccctacgatgccttccgcggatttaggagccaacatatacatctttccattgcagtccgagcacctatcgatcgtgactggacctcgtctcagctgcaaggcccgactaggagctataatactgttcacttaaccccaagattcttcacccatttctatgcttggtggtctctgtttggtggccctatgtccctgcccattcgtcagggttcactttggcctgggagagagaagaatagtaagaagtttgggagacatttgggtaccataaagtacagtcttctcttagcgccacttttcttgagtcacatatacaaacacaaagatgcggaggactactctgagaatgatgtctcggccactggtatcaaagtcagatttgattcttttatgctcgatatccatcagcgtagagaggaattcaatacgcgagatgtgggcagcaaacttggcaagagcaatggcaggactaccggaatgaaaatacacgccgcccagcttgacctcgtgtctgcggatgtgcgtgctgtctctgctagtatcagggggaccacaacagaagcagtgaaaaagaattcactcctcgggctattttcccagcaagacaccgacgatacccttgatctctcgcatttcaccattccggatcgtgattatagttggatcgatatggatgattttgtcgagctcgactggattctcccatctgaagctaatccagacacaaagatcctgccactagcttacgctcctcgtgtcacttactttcgtcagacagacattgggggcaccattgacggtgacccagatcgcacaagtcccttcggcaacgagcccacgcatctatgcatcatgagtcaagatgatgaccctaggagggttcaatcacagctaattcaggctcgactagatcagctcgaaactcagattgtggataatattcgaaacgtcgacgatgctcagctgcgactagctcgagacgaaaccaaggatcccaacgtcagagctgaatacgaaagcttacataaacatacaggcgttctacgggacaagaaagcatttatggaatccatgctgcggcaaatggcccacaagacggcgaccagtgaccacaatgaaacatcaagcgacagtcccgggccacgtcaggactctgagacgtctatacataccggagaaggagcagtcaaggtaccgatcggagcagattttgcaagtgaattcaagaacagatttgttgttcataacatgcagctcaagtggaacaatctattacgaaacattattcttcgatacagccatcaagtcagtcaacgccgcggttttgtttactatttgtccagaccagcagtcaagttcatactcgacattgttgaagagcaagcgaaagcgaaacaaggcacaaagacaaaagcccccagggatgatagcaacgcttcgagggcaaccaagcaaaacggccagcaggatgacatcgagcatcgcatcaaacagattctccaggacggtaggaaatatgtcaatgccgatgagcctgactctacagaaggaactgtcaacgcgaatatggaagatattacgagcgggattgcagaggatttcgctccgcaaagcagctaccatgttcggctcattgcacctcaaatccaacttcaaagtgacaagaataagaagcatgttatcttggttgcggctaagggcatggaactcaaggtagttgaggtcatggagaaagccagattgtcggatcccgtcagtggactggttcaacgacgatttttgcttcgtatggacagcgcacagttctttgtgacacatcagaaatggttctcgggtcgattcctctcgatgtactccggaaataggtacggagcaccgtcaggttcgtcttggccgccgtgggtgcctatggaagtgatgttcgatttccaatcagatcccttcggcttcaaacgcattgttcagaagacctcggcaatgttaagatatgacaagttcaacacgcttcgattgaagtataatgacgaagtcaacaatgtcgaaggagacaccatttccccagacaatacagaaagccggatggacaatctctgggtagagttcccacaagccagagcgctttgtaactcgtctcagtactacgctatgtacgtcatagtgctcgatttgcttatgtacagcgagcccttggagaagacaagaagcgaacgactagaaaaaatcatgttggcttcagacttcagcgatctccgaggaactcctgagatggtcacgaaacttcaagaacgcattcgtagtcttgaagaaatcaaaactcgattccagattcactctaaacacttagacaggaagggctgggaagaccgtcttgttctggaaagggatcttgcggccaacgaagacgaactgtttttcgtcatgaaagcgatcacatcgtctcagaggaagtacgacagttctctccaaagcaacgctctcttgaaatggacaatatctgcaagagaaatcgtgtggcatctcattcgggataacaacgaagctctcgtcgaattacaattgaagaacgttgagtacgatcgaacagacaattcggacgggtcgcacatcaatctgatgcaggttggaacggtccttggcttaaatctcatgagagacgcaatctacccagccatggtggctccccatctcgaggatgagaaaggccatgttaccgacttgaacgaaaaacaaatggtgcgagtatactggcgcatgctggaggctattgccggcatacccgtcatggaccattttgaggtgaatctattcccgatgaaaatccaattagagcacgaggtcgggaagaagttattcgagtatatctttcccggcatggaagaagatcaatctaacggctctcgatcccacgaattgtcgacgcggaggcttatggactttagcgagggagaagaagcacccgcagaagagagaatcactacgccggacaatgagtcaccatttgcaacacgagctggctcattagagcttcgccttcgtcccacgctcactcttgattcacgaactcctcacgatgagggatatcccaagtcgaaggccgtcagcgtatactctggcgaaggaggccacggtttccgactttttgggtccaagcccgtgagtaagaaaccatcgtatgagtcacttcgatctagcaatacaccacgaccaggtgttttgggacgcgcttcgacgacggcgtcttcaagtagtgacattaaaagaggaacgcgatttgcactgcctcgcaagagcggcggtgcagatgagccatctgatgatttatccaagatgattacgcgtgcttcgaattatatgacttttgcttacgtcaaaatgccatctgtagtcctttgcctcagctacaaaggcaaaggcgaacgtaacatcgaggacgttcatgatttcgtcttcaggctacctactattgaataccgtaacaaaacatggtctaatctcgacttagctgtgaacttgaaaaatcatgtcatcaaggcgctaatctctcatacgggggctatcatcagcaacaagatgaagcggcatcgaccgaccaccgctcagcaaagcaagcttcgcgaactagctacgagcagcgtcctccttgcaacaccatccttgtccaatacagcagaaaacagtgacgattcgtccagtctatatggtaccagtccagtagattattcccgctctcctccgaggagtatcagggattcgcagtcaagcagatctataccgcagcgttcgaatagccaaagctcttccatcgcatcgtcgcggtcgtataaccgcaacggcagtaattctcgcaatggacacaatccaccgggctctagggtcgcaccattagagcgcccaatgaccggcctgggcattgatatggctcggccaaaatcaagcagcagcagtagtcttctataccctaggcggcctggcacaagtggtagcagcatagttgaatctcaagcagatcgacaaaaatctggcggaggtggcttcttcaggggcaaattcaacgcactgaccaaccgtcgcaaagatcgagacgaaagtgttgaaactctcgaggatgactag

SEQ ID NO: 15605 - protein, 2923 aa, Muscodor strobelii
  misc_feature: SGI Peptide ID NO. 565171
  misc_feature (1)..(2838): NCBI GI: 116207544 Blast Desc: CHGG_03065 [Chaetomium globosum CBS 148.51] gi|88183662|gb|EAQ91130.1| CHGG_03065 [Chaetomium globosum CBS 148.51]
  misc_feature (1)..(2916): NCBI GI: 39939956 Blast Desc: MGG_05262 [Magnaporthe grisea 70-15] gi|145010456|gb|EDJ95112.1| MGG_05262 [Magnaporthe grisea 70-15]
  misc_feature (1)..(2756): NCBI GI: 171685936 Blast Desc: protein product [Podospora anserina] gi|170942929|emb|CAP68582.1| protein product [Podospora anserina]
  misc_feature (1)..(2806): NCBI GI: 85081746 Blast Desc: NCU00459 [Neurospora crassa OR74A] gi|28917855|gb|EAA27542.1| conserved [Neurospora crassa OR74A]
  misc_feature (1)..(2847): NCBI GI: 256726171 Blast Desc: [Nectria haematococca mpVI 77-13-4]
  misc_feature (1)..(2810): NCBI GI: 46111391 Blast Desc: FG02577.1 [Gibberella zeae PH-1]
  misc_feature (25)..(2779): NCBI GI: 169614736 Blast Desc: SNOG_10514 [Phaeosphaeria nodorum SN15] gi|160702808|gb|EAT81908.2| SNOG_10514 [Phaeosphaeria nodorum SN15]
  misc_feature (1)..(2837): NCBI GI: 239607469 Blast Desc: conserved [Ajellomyces dermatitidis ER-3]
  misc_feature (20)..(2858): NCBI GI: 189207585 Blast Desc: conserved [Pyrenophora tritici-repentis Pt-1C-BFP] gi|187976219|gb|EDU42845.1| conserved [Pyrenophora tritici-repentis Pt-1C-BFP]
  misc_feature (1)..(2888): NCBI GI: 159130033 Blast Desc: conserved [Aspergillus fumigatus A1163]
MALLNPSFVFGIFVILYLSSFVVFAVLRIVTGISIQRIGYFSLRRLAYTPKDGIKLEIRGLGLNLHRPTFSQPTWLSIVVSELAVTVDIKALDRNKAATTRPGHGDQPDGRSSDAASTGGNKTAPGKPLPGRAALEAARSATWEQLTKMKDRLKKLHRNVRWLRLVDVVATDSTVHVVDVGKMQVGGFTIALDTRHRLVDRARFFFQSKAEKRRQKQPAEWIVTLKSILFTAASSESIEVLDSATLTVHGFLYDNMDGLRDAAIALKFGRVHIPYDDVQICLRRFERMRRHQMTTMHKPAESIDIPVDDIMQEMEKPGSTDTALMQAVSDSRDFVSSILRGIKEVQFAVSFVSITKRVKTVRSGGSTLLLNAHMKEVGVDLHRLDPKSPAHRMYFPPDAIAHEALAAALSIAVGLEDGHGKPERIVYIPMATTTVKTTLPSKTVELSEITSAEEKNTNILFANSVVTSPSVDLDPKHLPILLALLQRRPRSPKARAQQRHMIISRLLPKANIKFSMHEPVLRIALPPVRKTDDPDDFDLIISSISSISLDLESFHSAVEDLHYSLASSMRVQTHHLYYQTTQGDRFDLIDTESFDLKVQLSAAPDVHVIATGHLQTFAIRMTRPEITKGLRQIIRQLKPKVEPDKRVASSISRPQNILRALPQWFLHFTVQVEDFSAEITGIDDDFPGMTRGVVLQVDSWSAEYRAQRIDRARQRPMSRRRAASRSFVPDPELLTTMSSPSSPRKKSQNEGDGRRVAVHVKGLEAFIVEAPEKWEVEPFIHMPRFEVALSTHSDSHSPILHVQSHLRTLHVQYSLFRHYSVGVAVMVLRRAFTSDSRRPSQADAQSPPTSPILLSPGSPRMNRSDMWPKSSRELVTVDCKAGLIQIKADMPADPPLMLHVYNMEAGRHRWSPPFFTSRLIRLYAGAPRMPGVWARVASIKNIRLDLRESRRKLSSGAFLDEKLFDVVAEAMRLAVPHELIINKISDNFINVIKASQQLHHRFKTGTNEYILEKSPEKPKIVPKVSLRTRNLMFELEDGAFEWKLGMIYRAGRVEQQQRIAREEAFRVKVKKIQEEEMKRESNRFRNRSRMARGRDVNMDSRGRSRSEDPLAQMNRDERFRSQAPRGRNPRYDPDGVRDMTGNAYITIQEARMRLYEHNGQSWKKRIDRHYLKARNGMQELRGLFWGPESLPNDLEDMERILEVPLRPSLMGATIHELHVVIDKPSFPLHKLPDFLHQVGKGMPKDMQYSLLIPMNIHINMGEAKINLRDYPLPLLHVPALKTGQSSKLPSLSLKTDFVIAEEYRGSESSRRIRVQITPPNIIEPGVPNGSFAIDVRRTIGPVKSYSDMHVDLNTANPTRITWGPSYQPAIQDMMMVIESFTKPQLDPSERVGFWDKIRLNFHSRVRVTWKGDGDVHLALKGSRDPYAVIGNGAGFVMCWRNNVKWNIHTEDDPKRFMTVDSGEYVLAVPDFSHQAREDARNLDENDSIISENSHKSGVAFKKVVMKLSGNVQWMAGLVFEQAIDNGKRNFNFKPHYDVILKAPMHAKAQEDSAPYDAFRGFRSQHIHLSIAVRAPIDRDWTSSQLQGPTRSYNTVHLTPRFFTHFYAWWSLFGGPMSLPIRQGSLWPGREKNSKKFGRHLGTIKYSLLLAPLFLSHIYKHKDAEDYSENDVSATGIKVRFDSFMLDIHQRREEFNTRDVGSKLGKSNGRTTGMKIHAAQLDLVSADVRAVSASIRGTTTEAVKKNSLLGLFSQQDTDDTLDLSHFTIPDRDYSWIDMDDFVELDWILPSEANPDTKILPLAYAPRVTYFRQTDIGGTIDGDPDRTSPFGNEPTHLCIMSQDDDPRRVQSQLIQARLDQLETQIVDNIRNVDDAQLRLARDETKDPNVRAEYESLHKHTGVLRDKKAFMESMLRQMAHKTATSDHNETSSDSPGPRQDSETSIHTGEGAVKVPIGADFASEFKNRFVVHNMQLKWNNLLRNIILRYSHQVSQRRGFVYYLSRPAVKFILDIVEEQAKAKQGTKTKAPRDDSNASRATKQNGQQDDIEHRIKQILQDGRKYVNADEPDSTEGTVNANMEDITSGIAEDFAPQSSYHVRLIAPQIQLQSDKNKKHVILVAAKGMELKVVEVMEKARLSDPVSGLVQRRFLLRMDSAQFFVTHQKWFSGRFLSMYSGNRYGAPSGSSWPPWVPMEVMFDFQSDPFGFKRIVQKTSAMLRYDKFNTLRLKYNDEVNNVEGDTISPDNTESRMDNLWVEFPQARALCNSSQYYAMYVIVLDLLMYSEPLEKTRSERLEKIMLASDFSDLRGTPEMVTKLQERIRSLEEIKTRFQIHSKHLDRKGWEDRLVLERDLAANEDELFFVMKAITSSQRKYDSSLQSNALLKWTISAREIVWHLIRDNNEALVELQLKNVEYDRTDNSDGSHINLMQVGTVLGLNLMRDAIYPAMVAPHLEDEKGHVTDLNEKQMVRVYWRMLEAIAGIPVMDHFEVNLFPMKIQLEHEVGKKLFEYIFPGMEEDQSNGSRSHELSTRRLMDFSEGEEAPAEERITTPDNESPFATRAGSLELRLRPTLTLDSRTPHDEGYPKSKAVSVYSGEGGHGFRLFGSKPVSKKPSYESLRSSNTPRPGVLGRASTTASSSSDIKRGTRFALPRKSGGADEPSDDLSKMITRASNYMTFAYVKMPSVVLCLSYKGKGERNIEDVHDFVFRLPTIEYRNKTWSNLDLAVNLKNHVIKALISHTGAIISNKMKRHRPTTAQQSKLRELATSSVLLATPSLSNTAENSDDSSSLYGTSPVDYSRSPPRSIRDSQSSRSIPQRSNSQSSSIASSRSYNRNGSNSRNGHNPPGSRVAPLERPMTGLGIDMARPKSSSSSSLLYPRRPGTSGSSIVESQADRQKSGGGGFFRGKFNALTNRRKDRDESVETLEDD

SEQ ID NO: 15606 - DNA, 9709 bp, Muscodor strobelii
  misc_feature: SGI EST ID NO. CUFF.36958.0
  misc_feature: Variant of the nucleotide sequence at SEQ ID NO 15604
gttcacccaagtgcgcctctagccttgtgcgctacaccctactaccttgtcatgatctgctgctctactcaagctagattccacgatctcccaaatgcccacctctgattgtacctctgactcccttggaacgtgataagtcttggctccagtgacgggacggatacagagcgagccagcgagattataggcagtcggctgccattgtggagggaacaaggcgggtgtgtgcgcctcaatcgcgacattcttttttgtctacctgcagctacagtcggccgagatggattctggcgacgtcttgcatgtctgaatgatgctagcaccgctggctcgcaacaccaccaccgcccctgcctgaggcgccctcgccctcgccatggcgctcctcaacccgtcctttgtcttcggcatcttcgtcatcctctacctctcatccttcgtcgtcttcgccgtcctgcgcatcgtcaccggcatatccatccagcggatcggctacttctcgctgcggcgtctggcctacacgcccaaggacggcatcaagctcgagatccgcggtctcggcctcaacctgcaccgccccaccttctcccagcccacctggctcagcatcgtcgtgagcgagctcgccgtcaccgtcgacatcaaagccctcgaccgtaacaaggccgccactacgcgccctggccatggcgaccaaccggacggccgcagcagtgacgctgccagcactggcggcaacaagactgcgccgggcaaaccgcttccggggcgcgcagctctcgaggctgctcgaagcgcaacatgggagcagctgacaaagatgaaagaccgtctgaagaagctccaccggaatgttcgttggctgcgcctagtcgatgtcgttgcgaccgactcgactgtccacgtcgtggacgtcggcaaaatgcaagttgggggtttcactattgctttggacacccgacaccgtctcgtcgaccgcgcacgcttcttctttcagtccaaggctgagaagcgacgccagaagcaacccgccgagtggattgttactttgaagagcatactcttcacggccgcgagcagcgaatccatcgaggtgctcgacagtgcgactcttaccgtccacggtttcttgtacgacaacatggacgggcttcgagacgcagccattgccttgaagttcggtcgggtgcacatcccctatgacgatgtccagatatgcttaagacgctttgagaggatgcgcaggcaccaaatgacgaccatgcacaagccagccgagtctatagatattcccgtggacgatatcatgcaggagatggagaagcctgggagcactgataccgctttgatgcaagccgtgtccgactccagggattttgtcagctccatcctgcgaggcatcaaagaggttcaatttgctgtgagttttgtcagtatcacgaagagagtgaaaacggtgcggtcgggtggctcgacactgctgctgaacgcccatatgaaagaagtgggagtcgatctgcaccggctcgatcccaaatcgccggctcatcgtatgtatttcccacccgatgccatcgcgcacgaggctctggcagctgcgctgtctatcgccgttggcctggaggacggccatgggaaaccggaaaggatagtttacatacccatggctaccaccactgtgaagacaacattgccatccaagactgtagagttatcagagattacgagtgccgaggagaagaacaccaatatcctattcgccaactccgtcgttacctctccttctgttgacctagacccgaaacatcttcccattctgctcgccctcctgcaacgtagacccagatcgcccaaagcgcgcgctcagcagagacacatgatcatttctcgacttcttcccaaggccaacatcaaattctccatgcacgaacctgttctcagaattgcattgccaccggtgcgtaagacggacgatccagacgactttgacctcatcatctcctctatatcttctatctcgcttgacctcgagtcgtttcattctgctgtagaagatttgcattactcactggcttcgtcgatgcgggtgcaaacgcaccatctgtactaccagactacccaaggggatcgatttgatctcatcgacactgaatcgttcgatttaaaagtgcagctatctgcggcgcctgatgttcacgtcattgccacggggcatctacaaacatttgccatccgaatgactcggcctgaaatcaccaagggtttgcgtcaaatcattcgccagctcaagcccaaggtagaacccgacaagcgagtggcttcatcgatctctcgaccgcaaaacatcctacgagctctacctcagtggtttctgcatttcactgttcaagttgaggacttcagtgcagagatcacaggcatcgatgatgattttcccgggatgacccggggcgtggtccttcaagtagattcgtggtcagctgagtaccgtgctcaacggattgatcgtgctcgacagcggccgatgtctagacggcgagctgctagccgctccttcgtcccagatccggaattgctaactaccatgtcatcaccctcatcacctcgcaagaaatcacagaatgagggagatggtcggagggttgcggtgcatgtcaaagggctggaggccttcatcgtcgaggcccctgagaagtgggaagtagagccattcattcacatgccccgtttcgaggtagccttgtcgacacacagcgattcgcacagcccaattctacatgtccagtctcatcttcgcactttacatgtccaatactccctcttccgccactattcagttggtgttgctgtgatggttctgcgaagagcatttactagtgattcccgccgcccaagtcaagccgacgcacaatctcccccaacatcccccattttgctgtcgcctgggtcgcctcggatgaacaggtcagatatgtggcccaagagttcgagagaactcgtaaccgtcgattgcaaggctgggttaattcagatcaaggcagatatgccggcagatcccccgctgatgttgcatgtatataacatggaggcgggacgacatcgatggtcacctcctttctttacttcgagattgatccgtttgtatgccggcgctcctagaatgccaggagtatgggctagagtcgccagcatcaagaatattcgccttgatctccgagagtctcggagaaaactgtccagcggtgcgtttctagatgaaaaactcttcgatgtggtagcggaagccatgcgacttgccgttccccacgagctgatcatcaacaaaatatcggataattttatcaacgtaatcaaagcgagccagcagctccaccatcgtttcaagacaggaacaaacgagtacattctagagaaatctcctgaaaaaccaaagattgtccccaaagtctcgctcaggactcgcaatctgatgtttgagcttgaagacggcgcctttgagtggaaactaggcatgatctaccgagcaggtcgcgtagagcaacagcaacgtattgctcgcgaagaggccttccgtgtcaaagtcaaaaaaatccaagaagaggagatgaaaagagagtcaaatcgctttcgcaatcgctcaaggatggccagaggtcgagacgtcaatatggattcgcgagggcgtagtcggagtgaagatcctctggcgcaaatgaaccgagacgagaggtttcgcagccaagctccacgcggtcgtaaccctagatacgacccagatggtgtacgtgatatgacaggcaacgcctacatcacgattcaagaagcaagaatgcgattgtatgagcataacgggcagagctggaaaaaacgaatcgatcgtcactaccttaaagcgcgaaatgggatgcaagagctgcgcggcctcttctgggggccagaaagccttcctaacgatctcgaagatatggagagaattcttgaggttcctctgaggccctctctgatgggcgcaactattcatgaactacatgtcgtgattgacaagccgtccttcccactacacaaattgcctgacttccttcatcaggtcggcaaagggatgccaaaggacatgcaatactcccttctcatcccaatgaatatccacatcaacatgggcgaagcaaagattaatctccgggattatcccctgcctttgctccacgtcccggcactgaaaactggccagtcatctaaactcccatcgctgtctctcaaaacagattttgtcattgcggaggagtatcgcggtagcgaatcatcccggagaatacgcgttcaaattacgccgcccaacatcatcgagcctggggttcctaatgggagttttgcgattgacgtgcgccgtacgatcggtcccgtcaaatcgtattcagatatgcatgtcgatctaaacacagctaatccgactcgcattacctggggtccctcataccagccagccatacaagatatgatgatggtcatcgagtcgttcacaaaacctcagttagatccctcggaacgagtcgggttttgggataagataagacttaatttccattcaagagttcgtgttacctggaaaggagacggcgacgttcatcttgctctcaagggctccagagatccttatgcagtcattggaaatggtgctggatttgtaatgtgctggcgaaacaatgtcaagtggaatattcacaccgaggacgatcctaagaggtttatgactgtggacagtggcgaatatgtccttgcagtccccgactttagccaccaagctcgagaagacgcacggaaccttgacgagaacgacagcattattagcgagaacagccacaagtcaggcgtcgcattcaaaaaggtcgttatgaagctctcaggcaatgttcaatggatggctggccttgtttttgaacaggctatcgataatggcaagcgcaacttcaacttcaagcctcattatgatgtcattctgaaggctccaatgcatgccaaggcgcaagaggatagtgcgccctacgatgccttccgcggatttaggagccaacatatacatctttccattgcagtccgagcacctatcgatcgtgactggacctcgtctcagctgcaaggcccgactaggagctataatactgttcacttaaccccaagattcttcacccatttctatgcttggtggtctctgtttggtggccctatgtccctgcccattcgtcagggttcactttggcctgggagagagaagaatagtaagaagtttgggagacatttgggtaccataaagtacagtcttctcttagcgccacttttcttgagtcacatatacaaacacaaagatgcggaggactactctgagaatgatgtctcggccactggtatcaaagtcagatttgattcttttatgctcgatatccatcagcgtagagaggaattcaatacgcgagatgtgggcagcaaacttggcaagagcaatggcaggactaccggaatgaaaatacacgccgcccagcttgacctcgtgtctgcggatgtgcgtgctgtctctgctagtatcagggggaccacaacagaagcagtgaaaaagaattcactcctcgggctattttcccagcaagacaccgacgatacccttgatctctcgcatttcaccattccggatcgtgattatagttggatcgatatggatgattttgtcgagctcgactggattctcccatctgaagctaatccagacacaaagatcctgccactagcttacgctcctcgtgtcacttactttcgtcagacagacattgggggcaccattgacggtgacccagatcgcacaagtcccttcggcaacgagcccacgcatctatgcatcatgagtcaagatgatgaccctaggagggttcaatcacagctaattcaggctcgactagatcagctcgaaactcagattgtggataatattcgaaacgtcgacgatgctcagctgcgactagctcgagacgaaaccaaggatcccaacgtcagagctgaatacgaaagcttacataaacatacaggcgttctacgggacaagaaagcatttatggaatccatgctgcggcaaatggcccacaagacggcgaccagtgaccacaatgaaacatcaagcgacagtcccgggccacgtcaggactctgagacgtctatacataccggagaaggagcagtcaaggtaccgatcggagcagattttgcaagtgaattcaagaacagatttgttgttcataacatgcagctcaagtggaacaatctattacgaaacattattcttcgatacagccatcaagtcagtcaacgccgcggttttgtttactatttgtccagaccagcagtcaagttcatactcgacattgttgaagagcaagcgaaagcgaaacaaggcacaaagacaaaagcccccagggatgatagcaacgcttcgagggcaaccaagcaaaacggccagcaggatgacatcgagcatcgcatcaaacagattctccaggacggtaggaaatatgtcaatgccgatgagcctgactctacagaaggaactgtcaacgcgaatatggaagatattacgagcgggattgcagaggatttcgctccgcaaagcagctaccatgttcggctcattgcacctcaaatccaacttcaaagtgacaagaataagaagcatgttatcttggttgcggctaagggcatggaactcaaggtagttgaggtcatggagaaagccagattgtcggatcccgtcagtggactggttcaacgacgatttttgcttcgtatggacagcgcacagttctttgtgacacatcagaaatggttctcgggtcgattcctctcgatgtactccggaaataggtacggagcaccgtcaggttcgtcttggccgccgtgggtgcctatggaagtgatgttcgatttccaatcagatcccttcggcttcaaacgcattgttcagaagacctcggcaatgttaagatatgacaagttcaacacgcttcgattgaagtataatgacgaagtcaacaatgtcgaaggagacaccatttccccagacaatacagaaagccggatggacaatctctgggtagagttcccacaagccagagcgctttgtaactcgtctcagtactacgctatgtacgtcatagtgctcgatttgcttatgtacagcgagcccttggagaagacaagaagcgaacgactagaaaaaatcatgttggcttcagacttcagcgatctccgaggaactcctgagatggtcacgaaacttcaagaacgcattcgtagtcttgaagaaatcaaaactcgattccagattcactctaaacacttagacaggaagggctgggaagaccgtcttgttctggaaagggatcttgcggccaacgaagacgaactgtttttcgtcatgaaagcgatcacatcgtctcagaggaagtacgacagttctctccaaagcaacgctctcttgaaatggacaatatctgcaagagaaatcgtgtggcatctcattcgggataacaacgaagctctcgtcgaattacaattgaagaacgttgagtacgatcgaacagacaattcggacgggtcgcacatcaatctgatgcaggttggaacggtccttggcttaaatctcatgagagacgcaatctacccagccatggtggctccccatctcgaggatgagaaaggccatgttaccgacttgaacgaaaaacaaatggtgcgagtatactggcgcatgctggaggctattgccggcatacccgtcatggaccattttgaggtgaatctattcccgatgaaaatccaattagagcacgaggtcgggaagaagttattcgagtatatctttcccggcatggaagaagatcaatctaacggctctcgatcccacgaattgtcgacgcggaggcttatggactttagcgagggagaagaagcacccgcagaagagagaatcactacgccggacaatgagtcaccatttgcaacacgagctggctcattagagcttcgccttcgtcccacgctcactcttgattcacgaactcctcacgatgagggatatcccaagtcgaaggccgtcagcgtatactctggcgaaggaggccacggtttccgactttttgggtccaagcccgtgagtaagaaaccatcgtatgagtcacttcgatctagcaatacaccacgaccaggtgttttgggacgcgcttcgacgacggcgtcttcaagtagtgacattaaaagaggaacgcgatttgcactgcctcgcaagagcggcggtgcagatgagccatctgatgatttatccaagatgattacgcgtgcttcgaattatatgacttttgcttacgtcaaaatgccatctgtagtcctttgcctcagctacaaaggcaaaggcgaacgtaacatcgaggacgttcatgatttcgtcttcaggctacctactattgaataccgtaacaaaacatggtctaatctcgacttagctgtgaacttgaaaaatcatgtcatcaaggcgctaatctctcatacgggggctatcatcagcaacaagatgaagcggcatcgaccgaccaccgctcagcaaagcaagcttcgcgaactagctacgagcagcgtcctccttgcaacaccatccttgtccaatacagcagaaaacagtgacgattcgtccagtctatatggtaccagtccagtagattattcccgctctcctccgaggagtatcagggattcgcagtcaagcagatctataccgcagcgttcgaatagccaaagctcttccatcgcatcgtcgcggtcgtataaccgcaacggcagtaattctcgcaatggacacaatccaccgggctctagggtcgcaccattagagcgcccaatgaccggcctgggcattgatatggctcggccaaaatcaagcagcagcagtagtcttctataccctaggcggcctggcacaagtggtagcagcatagttgaatctcaagcagatcgacaaaaatctggcggaggtggcttcttcaggggcaaattcaacgcactgaccaaccgtcgcaaagatcgagacgaaagtgttgaaactctcgaggatgactagacctcgaggctaagtttccaaccagttgttattattcccttatgttactagtcattgttataatagtcatcggtcgcacatttcggtacagccatcctttggcgtatatatacaggtagacagcatgatcagcaaggcaaagggcgggtaaggtgtatgaggtcacatgtgcattttagccacagtcgttgttttttctttgctgaatgccaccgtccccaacattgcatgactgtttttcgctgtgcaagtgagtatagccatgaagcacatagcaaatgaaggcgttagtgagagaaataggtagcaaaactaagatggccatcgctaccatcctagatatatataagtgcataagttcatgttttaaaacattataattgttcatggaatattaattcagaattatcacttgcggtaacatttcacagaatttgatgtttgctgaatatgagaggatgcttgttatggtagttcctacaaagcgagaaattttgcgctctcgcctctacaacctctctgtatctacacagccaaatatagaagtctcctcccatt

SEQ ID NO: 15607 - DNA, 3444 bp, Muscodor strobelii
  misc_feature: SGI cDNA ID NO. 565172
  misc_feature: Encodes the peptide sequence at SEQ ID NO 15608
atggatgattttgtcgagctcgactggattctcccatctgaagctaatccagacacaaagatcctgccactagcttacgctcctcgtgtcacttactttcgtcagacagacattgggggcaccattgacggtgacccagatcgcacaagtcccttcggcaacgagcccacgcatctatgcatcatgagtcaagatgatgaccctaggagggttcaatcacagctaattcaggctcgactagatcagctcgaaactcagattgtggataatattcgaaacgtcgacgatgctcagctgcgactagctcgagacgaaaccaaggatcccaacgtcagagctgaatacgaaagcttacataaacatacaggcgttctacgggacaagaaagcatttatggaatccatgctgcggcaaatggcccacaagacggcgaccagtgaccacaatgaaacatcaagcgacagtcccgggccacgtcaggactctgagacgtctatacataccggagaaggagcagtcaaggtaccgatcggagcagattttgcaagtgaattcaagaacagatttgttgttcataacatgcagctcaagtggaacaatctattacgaaacattattcttcgatacagccatcaagtcagtcaacgccgcggttttgtttactatttgtccagaccagcagtcaagttcatactcgacattgttgaagagcaagcgaaagcgaaacaaggcacaaagacaaaagcccccagggatgatagcaacgcttcgagggcaaccaagcaaaacggccagcaggatgacatcgagcatcgcatcaaacagattctccaggacggtaggaaatatgtcaatgccgatgagcctgactctacagaaggaactgtcaacgcgaatatggaagatattacgagcgggattgcagaggatttcgctccgcaaagcagctaccatgttcggctcattgcacctcaaatccaacttcaaagtgacaagaataagaagcatgttatcttggttgcggctaagggcatggaactcaaggtagttgaggtcatggagaaagccagattgtcggatcccgtcagtggactggttcaacgacgatttttgcttcgtatggacagcgcacagttctttgtgacacatcagaaatggttctcgggtcgattcctctcgatgtactccggaaataggtacggagcaccgtcaggttcgtcttggccgccgtgggtgcctatggaagtgatgttcgatttccaatcagatcccttcggcttcaaacgcattgttcagaagacctcggcaatgttaagatatgacaagttcaacacgcttcgattgaagtataatgacgaagtcaacaatgtcgaaggagacaccatttccccagacaatacagaaagccggatggacaatctctgggtagagttcccacaagccagagcgctttgtaactcgtctcagtactacgctatgtacgtcatagtgctcgatttgcttatgtacagcgagcccttggagaagacaagaagcgaacgactagaaaaaatcatgttggcttcagacttcagcgatctccgaggaactcctgagatggtcacgaaacttcaagaacgcattcgtagtcttgaagaaatcaaaactcgattccagattcactctaaacacttagacaggaagggctgggaagaccgtcttgttctggaaagggatcttgcggccaacgaagacgaactgtttttcgtcatgaaagcgatcacatcgtctcagaggaagtacgacagttctctccaaagcaacgctctcttgaaatggacaatatctgcaagagaaatcgtgtggcatctcattcgggataacaacgaagctctcgtcgaattacaattgaagaacgttgagtacgatcgaacagacaattcggacgggtcgcacatcaatctgatgcaggttggaacggtccttggcttaaatctcatgagagacgcaatctacccagccatggtggctccccatctcgaggatgagaaaggccatgttaccgacttgaacgaaaaacaaatggtgcgagtatactggcgcatgctggaggctattgccggcatacccgtcatggaccattttgaggtgaatctattcccgatgaaaatccaattagagcacgaggtcgggaagaagttattcgagtatatctttcccggcatggaagaagatcaatctaacggctctcgatcccacgaattgtcgacgcggaggcttatggactttagcgagggagaagaagcacccgcagaagagagaatcactacgccggacaatgagtcaccatttgcaacacgagctggctcattagagcttcgccttcgtcccacgctcactcttgattcacgaactcctcacgatgagggatatcccaagtcgaaggccgtcagcgtatactctggcgaaggaggccacggtttccgactttttgggtccaagcccgtgagtaagaaaccatcgtatgagtcacttcgatctagcaatacaccacgaccaggtgttttgggacgcgcttcgacgacggcgtcttcaagtagtgacattaaaagaggaacgcgatttgcactgcctcgcaagagcggcggtgcagatgagccatctgatgatttatccaagatgattacgcgtgcttcgaattatatgacttttgcttacgtcaaaatgccatctgtagtcctttgcctcagctacaaaggcaaaggcgaacgtaacatcgaggacgttcatgatttcgtcttcaggctacctactattgaataccgtaacaaaacatggtctaatctcgacttagctgtgaacttgaaaaatcatgtcatcaaggcgctaatctctcatacgggggctatcatcagcaacaagatgaagcggcatcgaccgaccaccgctcagcaaagcaagcttcgcgaactagctacgagcagcgtcctccttgcaacaccatccttgtccaatacagcagaaaacagtgacgattcgtccagtctatatggtaccagtccagtagattattcccgctctcctccgaggagtatcagggattcgcagtcaagcagatctataccgcagcgttcgaatagccaaagctcttccatcgcatcgtcgcggtcgtataaccgcaacggcagtaattctcgcaatggacacaatccaccgggctctagggtcgcaccattagagcgcccaatgaccggcctgggcattgatatggctcggccaaaatcaagcagcagcagtagtcttctataccctaggcggcctggcacaagtggtagcagcatagttgaatctcaagcagatcgacaaaaatctggcggaggtggcttcttcaggggcaaattcaacgcactgaccaaccgtcgcaaagatcgagacgaaagtgttgaaactctcgaggatgactag

SEQ ID NO: 15608 - protein, 1147 aa, Muscodor strobelii
  misc_feature: SGI Peptide ID NO. 565172
  misc_feature (1)..(1035): NCBI GI: 116207544 Blast Desc: CHGG_03065 [Chaetomium globosum CBS 148.51] gi|88183662|gb|EAQ91130.1| CHGG_03065 [Chaetomium globosum CBS 148.51]
  misc_feature (1)..(1030): NCBI GI: 85081746 Blast Desc: NCU00459 [Neurospora crassa OR74A] gi|28917855|gb|EAA27542.1| conserved [Neurospora crassa OR74A]
  misc_feature (1)..(980): NCBI GI: 171685936 Blast Desc: protein product [Podospora anserina] gi|170942929|emb|CAP68582.1| protein product [Podospora anserina]
  misc_feature (1)..(1071): NCBI GI: 256726171 Blast Desc: [Nectria haematococca mpVI 77-13-4]
  misc_feature (1)..(1034): NCBI GI: 46111391 Blast Desc: FG02577.1 [Gibberella zeae PH-1]
  misc_feature (1)..(1140): NCBI GI: 39939956 Blast Desc: MGG_05262 [Magnaporthe grisea 70-15] gi|145010456|gb|EDJ95112.1| MGG_05262 [Magnaporthe grisea 70-15]
  misc_feature (176)..(1133): NCBI GI: 154303046 Blast Desc: BC1G_09543 [Botryotinia fuckeliana B05.10] gi|150855006|gb|EDN30198.1| BC1G_09543 [Botryotinia fuckeliana B05.10]
  misc_feature (1)..(1047): NCBI GI: 115387937 Blast Desc: conserved [Aspergillus terreus NIH2624] gi|114195558|gb|EAU37258.1| conserved [Aspergillus terreus NIH2624]
  misc_feature (1)..(1077): NCBI GI: 121716829 Blast Desc: conserved [Aspergillus clavatus NRRL 1] gi|119404079|gb|EAW14496.1| conserved [Aspergillus clavatus NRRL 1]
  misc_feature (1)..(1061): NCBI GI: 261200359 Blast Desc: conserved [Ajellomyces dermatitidis SLH14081] gi|239593652|gb|EEQ76233.1| conserved [Ajellomyces dermatitidis SLH14081]
MDDFVELDWILPSEANPDTKILPLAYAPRVTYFRQTDIGGTIDGDPDRTSPFGNEPTHLCIMSQDDDPRRVQSQLIQARLDQLETQIVDNIRNVDDAQLRLARDETKDPNVRAEYESLHKHTGVLRDKKAFMESMLRQMAHKTATSDHNETSSDSPGPRQDSETSIHTGEGAVKVPIGADFASEFKNRFVVHNMQLKWNNLLRNIILRYSHQVSQRRGFVYYLSRPAVKFILDIVEEQAKAKQGTKTKAPRDDSNASRATKQNGQQDDIEHRIKQILQDGRKYVNADEPDSTEGTVNANMEDITSGIAEDFAPQSSYHVRLIAPQIQLQSDKNKKHVILVAAKGMELKVVEVMEKARLSDPVSGLVQRRFLLRMDSAQFFVTHQKWFSGRFLSMYSGNRYGAPSGSSWPPWVPMEVMFDFQSDPFGFKRIVQKTSAMLRYDKFNTLRLKYNDEVNNVEGDTISPDNTESRMDNLWVEFPQARALCNSSQYYAMYVIVLDLLMYSEPLEKTRSERLEKIMLASDFSDLRGTPEMVTKLQERIRSLEEIKTRFQIHSKHLDRKGWEDRLVLERDLAANEDELFFVMKAITSSQRKYDSSLQSNALLKWTISAREIVWHLIRDNNEALVELQLKNVEYDRTDNSDGSHINLMQVGTVLGLNLMRDAIYPAMVAPHLEDEKGHVTDLNEKQMVRVYWRMLEAIAGIPVMDHFEVNLFPMKIQLEHEVGKKLFEYIFPGMEEDQSNGSRSHELSTRRLMDFSEGEEAPAEERITTPDNESPFATRAGSLELRLRPTLTLDSRTPHDEGYPKSKAVSVYSGEGGHGFRLFGSKPVSKKPSYESLRSSNTPRPGVLGRASTTASSSSDIKRGTRFALPRKSGGADEPSDDLSKMITRASNYMTFAYVKMPSVVLCLSYKGKGERNIEDVHDFVFRLPTIEYRNKTWSNLDLAVNLKNHVIKALISHTGAIISNKMKRHRPTTAQQSKLRELATSSVLLATPSLSNTAENSDDSSSLYGTSPVDYSRSPPRSIRDSQSSRSIPQRSNSQSSSIASSRSYNRNGSNSRNGHNPPGSRVAPLERPMTGLGIDMARPKSSSSSSLLYPRRPGTSGSSIVESQADRQKSGGGGFFRGKFNALTNRRKDRDESVETLEDD

SEQ ID NO: 15609 - DNA, 9709 bp, Muscodor strobelii; identical to SEQ ID NO: 15606
  misc_feature: SGI EST ID NO. CUFF.36958.0
  misc_feature: Variant of the nucleotide sequence at SEQ ID NO 15607

SEQ ID NO: 15610 - DNA, 2241 bp, Muscodor strobelii
  misc_feature: SGI cDNA ID NO. 565173
  misc_feature: Reduced expression when VOC is produced
  misc_feature: Encodes the peptide sequence at SEQ ID NO 15611
atgggtccacgaaagaagcgcgcgaagcattcgccctccgagtcggctgtcccatcatcattgccaaccacagccccgggacctgccgcatcgacagacatgccatcggacagccaacaagatcccaacaaaaagggaccatccacgccgctccgaactgatgaacagaagacacgcactccgcggagttggtacggtggctcatggccgcgcccttccaaatcctccccgtccattttcatagcgagagaaacgatcagcggcactccctgccaaggcccaagtgcagacttcagtcgcttcgatactaccaagcaagaaacatcgccctgtccggacactccagttgtaccctctaccgcgacgctgcccaacgcaaccgagcctcgaaccgagtcacagcagtctgacaccgcaggcgcaacaacagatgatggaaatgcgactgataccagagaatctctcctttcgaccgatggcgcagacaagcctggcgcatcaagtgctgagactcaggtcgatgcgactccagcgaactctgccggttggctatcatggatcgcacggtccgcaccacaacccccatcccagcccgaagcccagcatacgcctacagaagattcaactgcagaagttagccaaaaagaaggagagccaacggatcccaaactcccagaagtgacgggtgaaactacaacgtcggatacctcggcaccaccaagaccagcgagctcttggtttggattcttcacgacgaacccatcgccagcgcagaacgctgagtctgcgtccaccaaagacgatattaatacggaatcggcgcctgcgagcaaaagcgacgggggtgatattgtgacgccggctccgaaaccccaaaaattgtccgctggaactacgtgggcgttttggtcaagagacacatctgatcagaagaagggagaagagccatgtcacgcagagggtgagctggctgtcatgggggaaacggcagggaacgatgcaagaggcgtcatcgatgtcgaggtcgatgaagacagtcgcaagaacgaaatcgtcgtccgacctgtagaggaaagcaaaggcaaaaagatccgagagagacctcagtcaaggaacataagcgaaccgtctataagtagaccgacgtcacaatcaggtgctgagctccaacgccagaccaaaacctcgggcaacaaggtcataccagcgaacctacttttgccttccttcaaaatcttgaggccgatgataggccaacctacagggacttccattcgctttgcgacccggtgtgctgacgctatacggcggtgggccgagaaccatgggagcgtggactgcgagatcgagaaggtagcgctcgagggcgaaggcaaaatcggcgacagggtcgacaatttgtggaagctcttgttgaactggattgatcacattcgccacgccgatttgattgtctttgcctgccactcgcaaggcgttcccgttagtatcatgcttctggctaaactcattgacatgggagtcattactaccgcgaggatcggggtctgtgcaatggctggcgtctcactaggaccctttcccgattacaaatctggtatgctcatgggatcagcggccgaattgtggcagttcgcagatcccagcagtgagatctctcaacgatacgaacactcgctcaaagcgatcatcgattacggcgcacgtgtcacctacatagggagcattgacgaccagctggtgcctatggagtctgcgctgtatggccccgcctcacatccatacatttaccgggcggtattcatcgatgggcgtattcatgcccccgactttatagctcatctggttggcttcgccttgaaactgcgcaatctcggcatttccgaccatggtttgattcgggagctatctgtctcacttgctggcagtctctacacaggcgagggccactcgaggctctatgacgacgatcaggtatatgacctggctatatcgcatacgctcgagaccacaagcgtagctagcgcaagttgccgaatcgagcggcaccagggccttaacagtgccaacccatacgttctcccatggatcatgcgaggattgctagaagaggagttcgtccgaacggaactgacatcagaaacggccgaattactgagacagttcgacgactggacgccgacgacgaaagctctgaaagatgtaaaatatagattagaagctgtcaggtcaaagctctga

SEQ ID NO: 15611 - protein, 746 aa, Muscodor strobelii
  misc_feature: SGI Peptide ID NO. 565173
  misc_feature (64)..(746): NCBI GI: 256726181 Blast Desc: NECHADRAFT_42797 [Nectria haematococca mpVI 77-13-4]
  misc_feature (1)..(746): NCBI GI: 261361661 Blast Desc: conserved [Verticillium albo-atrum VaMs.102]
  misc_feature (127)..(746): NCBI GI: 46111361 Blast Desc: FG02562.1 [Gibberella zeae PH-1]
  misc_feature (62)..(746): NCBI GI: 145602007 Blast Desc: MGG_05259 [Magnaporthe grisea 70-15] gi|145010460|gb|EDJ95116.1| MGG_05259 [Magnaporthe grisea 70-15]
  misc_feature (158)..(746): NCBI GI: 85109352 Blast Desc: NCU06271 [Neurospora crassa OR74A] gi|28924516|gb|EAA33639.1| conserved [Neurospora crassa OR74A]
  misc_feature (297)..(746): NCBI GI: 116207590 Blast Desc: CHGG_03088 [Chaetomium globosum CBS 148.51] gi|88183685|gb|EAQ91153.1| CHGG_03088 [Chaetomium globosum CBS 148.51]
  misc_feature (166)..(746): NCBI GI: 171686102 Blast Desc: protein product [Podospora anserina] gi|170943012|emb|CAP68665.1| protein product [Podospora anserina]
  misc_feature (52)..(746): NCBI GI: 255954019 Blast Desc: Pc21g07210 [Penicillium chrysogenum Wisconsin 54-1255] gi|211589473|emb|CAP95618.1| Pc21g07210 [Penicillium chrysogenum Wisconsin 54-1255]
  misc_feature (63)..(746): NCBI GI: 70997387 Blast Desc: conserved [Aspergillus fumigatus Af293] gi|66851078|gb|EAL91404.1| conserved [Aspergillus fumigatus Af293]
  misc_feature (63)..(746): NCBI GI: 145254618 Blast Desc: An18g02240 [Aspergillus niger] gi|134084265|emb|CAK47296.1| protein product [Aspergillus niger]
  misc_feature: Useful for introducing or modulating the production of volatile compounds
MGPRKKRAKHSPSESAVPSSLPTTAPGPAASTDMPSDSQQDPNKKGPSTPLRTDEQKTRTPRSWYGGSWPRPSKSSPSIFIARETISGTPCQGPSADFSRFDTTKQETSPCPDTPVVPSTATLPNATEPRTESQQSDTAGATTDDGNATDTRESLLSTDGADKPGASSAETQVDATPANSAGWLSWIARSAPQPPSQPEAQHTPTEDSTAEVSQKEGEPTDPKLPEVTGETTTSDTSAPPRPASSWFGFFTTNPSPAQNAESASTKDDINTESAPASKSDGGDIVTPAPKPQKLSAGTTWAFWSRDTSDQKKGEEPCHAEGELAVMGETAGNDARGVIDVEVDEDSRKNEIVVRPVEESKGKKIRERPQSRNISEPSISRPTSQSGAELQRQTKTSGNKVIPANLLLPSFKILRPMIGQPTGTSIRFATRCADAIRRWAENHGSVDCEIEKVALEGEGKIGDRVDNLWKLLLNWIDHIRHADLIVFACHSQGVPVSIMLLAKLIDMGVITTARIGVCAMAGVSLGPFPDYKSGMLMGSAAELWQFADPSSEISQRYEHSLKAIIDYGARVTYIGSIDDQLVPMESALYGPASHPYIYRAVFIDGRIHAPDFIAHLVGFALKLRNLGISDHGLIRELSVSLAGSLYTGEGHSRLYDDDQVYDLAISHTLETTSVASASCRIERHQGLNSANPYVLPWIMRGLLEEEFVRTELTSETAELLRQFDDWTPTTKALKDVKYRLEAVRSKL

SEQ ID NO: 15612 - DNA, 1520 bp, Muscodor strobelii
  misc_feature: SGI EST ID NO. CUFF.37050.1
  misc_feature: Variant of the nucleotide sequence at SEQ ID NO 15610
gccagcctaagatcttgtcgacacggagtcctgcgttatcccaccagcgccggtcgccaactttccatttcctatgccgtattgaccgatggagatctgatactgcagccgatactcgtcgtcatgggtccacgaaagaagcgcgcgaagcattcgccctccgagtcggctgtcccatcatcattgccaaccacagccccgggacctgccgcatcgacagacatgccatcggacagccaacaagatcccaacaaaaagggaccatccacgccgctccgaactgatgaacagaagacacgcactccgcggagttggtacggtggctcatggccgcgcccttccaaatcctccccgtccattttcatagcgagagaaacgatcagcggcactccctgccaaggcccaagtgcagacttcagtcgcttcgatactaccaagcaagaaacatcgccctgtccggacactccagttgtaccctctaccgcgacgctgcccaacgcaaccgagcctcgaaccgagtcacagcagtctgacaccgcaggcgcaacaacagatgatggaaatgcgactgataccagagaatctctcctttcgaccgatggcgcagacaagcctggcgcatcaagtgctgagactcaggtcgatgcgactccagcgaactctgccggttggctatcatggatcgcacggtccgcaccacaacccccatcccagcccgaagcccagcatacgcctacagaagattcaactgcagaagttagccaaaaagaaggagagccaacggatcccaaactcccagaagtgacgggtgaaactacaacgtcggatacctcggcaccaccaagaccagcgagctcttggtttggattcttcacgacgaacccatcgccagcgcagaacgctgagtctgcgtccaccaaagacgatattaatacggaatcggcgcctgcgagcaaaagcgacgggggtgatattgtgacgccggctccgaaaccccaaaaattgtccgctggaactacgtgggcgttttggtcaagagacacatctgatcagaagaagggagaagagccatgtcacgcagagggtgagctggctgtcatgggggaaacggcagggaacgatgcaagaggcgtcatcgatgtcgaggtcgatgaagacagtcgcaagaacgaaatcgtcgtccgacctgtagaggaaagcaaaggcaaaaagatccgagagagacctcagtcaaggaacataagcgaaccgtctataagtagaccgacgtcacaatcaggtgctgagctccaacgccagaccaaaacctcgggcaacaaggtcataccagcgaacctacttttgccttccttcaaaagtacctatcatctcaaagaaaatccttctatcatacagcaaatcacacaactcttacttcgcataaaacaacctcccataaaccatgtcttcctttccagagaatcacatcggatcaaaaaagcaatcgccatcggtgtccatggcttcttccctcacgtgtg

SEQ ID NO: 15613 - DNA, 5307 bp, Muscodor strobelii
  misc_feature: SGI cDNA ID NO. 565174
  misc_feature: Reduced expression when VOC is produced
  misc_feature: Encodes the peptide sequence at SEQ ID NO 15614
atgagttctcttaaacgaaaaacagccccggctggcgccgtcgccgccaactccccgaagcgctccaagtccgacggcgacaagacatccaagacacccaaaaccacccagtccaaagctccagctgctgccgttgtgtcccgcctcaaggaagaagagcctctgtttccccgtggtggcggtagtgttctgtcccctctcgagcacaggcaaatctccatccaggccaagcaggacgccctgttcgagcaggaatccagccagcggcctgacaaaccagcccgcgcccccaagggcaaaagaaaacagaagtcgctcaaggataagtccgcgaatgcctcgaaaccggccgacgatgcagtcaagatcgaaggtctgaattaccaacgtctcgtcaagggctccctcgtcttggcccagatcaccgaaatccagccattacagcttgttcttgccctgcccaacagtatatccggtcatgtgccaatcaccgcgatctcaagtaagctggatgagcttcttgctgccgaggctgatgtctcagatgatgactctgatggcggagatgatggagtggacctcaagtctctgtttggcgttggccaatacgttcgggcttatgtcacgtccactacagacgaggctacggccacactggccaagcccaagaagcgcatcgagctgtcgttgcggcccgagcatacaaacaccggtctatcaagccaagaaattgtagagaactgcgtcgtcatggcctcggtttcgagcgtggaggatcatggcttggtcatggaccttggtcttgatggttctagcgccaaagccttcctctctcgccaagaagttgatggtgaccttatcgaaactcgtttgcggcctggttccgtagctttgtgtcttgttgttgggaagggggccaacggcaagatcataaagctaagcacgcgcagagaaaagcttgggaaagtccagaactttgcatccaaagctaccaccattcagagctttttgccaggctctgccgtcgaactcatggtctcagacatctcaacgcacggcattgcaggcaaagtgatgggttcactggacgtcactgcggaccacattcattccggcttaggtccgaaagctttagatttggaagcaaagtacaagattggaaagaaagtcaaggctcgtgtcatctgcaacttcccaacagcgaacgagccaaagatgggcatttcactactggaccacgtcatgacattgcagtcttcacgtgatgggtcaaataagcccccgctggacctccttcccgtatcctcgatcgttgaagaatgtaccattttcaaggttgagcctgaaatcggcgtcttcgtcaatgtgggcgtggatggcataccgggctttgtgcatatttctcgtctcaaagatggcaaggtagaccatgtttccgacgactctggaccatataaaatcgggtcggtgcaccgcggtagagtcacggcctataacgctgtagatgcgctgtacagtctttcttttgaaaagagcgtcttagaacagccttaccttcgaatcgaagatatacccattggccaagtagtcaatggcgaggtcgaaaaactcatcatacatcaagaaggcatcagcggtcttctcgttaagcttgccgagggaatccgtggttatgttcctgagattcacctcgcagatgttcggcttcaacatcccgaaaagaagttccgtgagggtctgaaggtcaaggccagagtcttgtcaactgatctgatcaaacgtcaagtcaagctcacactcaagaagacaattgtaaattctgacgttgagcctttgaaatctttcgacgagttagtcgtaggtgctcagagtcctggtaccattgtcaaagtgattgacaatggtgctgttgtccaattctatgggtccttgcgagggttcttacctatcgccgaaatgagcgaggctttcattcgtgaccccaaagaacacttccgtctcggccaagttctcactctttatgttctcgacttcgatgctggcgcacaaaagttaatcgtgtcgtgcaaggacccttctgctttcggcattgaaaagcagaacgcgcttaaaaaactcgagataggcgaaattgtctctgcaaaggttgtcgaaaagaccgaagatgacgtacaccttgaactagttggcagctctctcagatcgcttctcccctttggtcaactcacagatcgtcccaacaaagccaaagcgtcattgaaaggtatacgggtgggccaaacactagatggtctcatggtattggataagaacgatagccgtcgatcaattatacttacaaagaagcctgccttgatagaagcaagtcaagacggaacgcttctcgcaagtctaacgacagctcgggttggcgagatacgccaaggttttgtgagaaacattaccgtcacggccgttttcattcaattcgcgaaccaagtcactgctttacttccgaaatccaagctaccacaagaggcgcacacgaagacggacttcggtttgaaaagacatcagtcaattgccgtcagaattgactctgtagacactgaaaatggacgcctcgtcgtttcctcggtcgattttacagagaagcccactgaggctcctcattcggcacctgctgaagaactgcagaacgctgttgacgaatctctcaaatcaacagacgacataatcgttggtagggtgacgaaagcaaagattgtatctgtcaaggcaacccagctcaatgtcaaattagccgacaatgtgcaaggtcgcgtggatgtgactgagatcttcgattcctgggccaagatctcaaattcgaaggctcctttgagccacttcaacgcagatgatattatccaggttcgagtgttagggatccacgatgccagaaaccatcgatatctacccatttctcaccgatcatcacactccgtcttcgagctttcggcaaagtcagccgacgtgaaggatgatttggcgactagactgacactcaacacgctcgaacttggatccactcatatcgggttcgttaacaatgtggagcaagactcacactctctctgggtcagcctgtcaccaagtgtacgcggcagaatcagcgtttttgaaatctcggacgatatctcggagcttgacaacctgtcaaaacacttcccggttggagcagcactgaaagtccgcgtattggctgtaaactctacagaaggccacttggacttatccgcccggtcctctagcacaacagcacatctcacttgggacactgtgaagcgtgatatggtcctccctggtagaatcacaaaagtgaacgagcggcaactgatcgtacagctaagcaacctagtttctggccctgtccacctagtcgatctcagtgatgactacgatcaagcaaacacactttcctatagcaagaatagtgtcatccgcgtctccgttgtggatgttgacaagagcaataaacgagtgcgcctttcgctccgtccgtcaaggatattgagctcgtcttcgcccatcaaagaccgcgaggtcaccaatgtcgaacagttgcaagttggcgatgtcctccgcggtttcgtcaagaacgtttctgacaaggggctcttcgtcgggctcggcggcaatgtcacctcgatggttcgaatttctgacttatcagacagatatgtcaaagaatggaaagacgagtatcaggtcgatcagcttgtgaagggtcgtgttctcttcatcgaccctgtaacgaagcagtcacgcatgagcctaaaagcatcggtggtagacaagaattttgttccccgcctcaactattcggaactccgtgtcgggcaggttattaccggtaaagtccggaaagttgaagattttggtgctttcatcctcgttgacaactctgccaatgtgagtggactgtgtcatcgaagtgagttagccgataagccagtacaggatgcaaggaaactgttgaatgagggtgacgcagtcaaagcaatcgttctaaaaattgatctgcagaagaaacagatcagtttcggtctgaaaccgtcttatcttgaagacgaagacagcagtataggcgagaatgagagtgacgtcgaagacgatgaggaagagggtggtgctgctattgaagacgatgacgatgacgatgatgaagacatggaagatgctgatacttctgctataattgagggcattgatgatgaaagtgacgtctcatctgatgaggacacagaaatggtctatggaagcactaataacgtgagcgccctcgatagccaaggattcgactggtctgcgacagcactcgacgatgatactatagatattgccggtggacaagatgccgcgcgagaaaagaagaagaagaagcaacgaaaagcccaaatcggtgaggaaacagttcgcaacctagacagatctggtccacagactgcggtggattacgaacagcttctaaaccgtcaaccaaattcttctgatttgtggactcgatacatggcattccagatgcaaataagcgaactgggcaaagctcgcgaagtggctgaacgagcggtcgccaccatcaacagttctgaggaaacggaaaaattgaatgcttggattgcgtatctcaatctggaagtacgcttcggcaacgaagatactacagacagtgtcttcaagcgtgcgtgccaagtcaacgaccagcaagaagtttaccaacggcttgctagcatatatgttcaagataataaacccggaaaagcggacgatctgttccaagttatcatgaagaaattcggcggcaagtcgcctgaagtctggtataactatgcacactggttacatgccgttcagaatgagccagatcgagctcgggcattgttaccgcgcgctacgcaagcactcccagagcatgcacgtcttcctctcatgaccaagatcgccactcttgaatacacatcgccaaatggcagtgccgagcgtggccggacaatgttcgaagggctgatctccacatttccgaaacgatttgacttgtggagtcaattgttggatcacgaagacaacccaaacgcagacaaaggcgtcattcgagatgtgtttgatcgagcgaccaaagtgaaaggactaaaggcgcgagctgcaaagaaatggttcaagcgctgggcagactgggaagagaaaaatggtgatgcgaagagtcaggagaaggtcagggcaaaggcatctcagtgggtgaggtctagagctgaaagtcaaaaagccgaagaagaggatgaagattag

SEQ ID NO: 15614 - protein, 1768 aa, Muscodor strobelii
  misc_feature: SGI Peptide ID NO. 565174
  misc_feature (1283)..(1358): Pfam Id: PF00575 Pfam Desc: S1 RNA binding domain
  misc_feature (1194)..(1267): Pfam Id: PF00575 Pfam Desc: S1 RNA binding domain
  misc_feature (1100)..(1173): Pfam Id: PF00575 Pfam Desc: S1 RNA binding domain
  misc_feature (617)..(690): Pfam Id: PF00575 Pfam Desc: S1 RNA binding domain
  misc_feature (800)..(873): Pfam Id: PF00575 Pfam Desc: S1 RNA binding domain
  misc_feature (800)..(871): Pfam Id: PF00575 Pfam Desc: S1 RNA binding domain
  misc_feature (546)..(601): Pfam Id: PF00575 Pfam Desc: S1 RNA binding domain
  misc_feature (1)..(1755): NCBI GI: 164425200 Blast Desc: NCU06272 [Neurospora crassa OR74A] gi|157070830|gb|EAA33640.2| conserved [Neurospora crassa OR74A]
  misc_feature (5)..(1758): NCBI GI: 156058222 Blast Desc: SS1G_03122 [Sclerotinia sclerotiorum 1980] gi|154700910|gb|EDO00649.1| SS1G_03122 [Sclerotinia sclerotiorum 1980]
  misc_feature (1)..(1752): NCBI GI: 171686100 Blast Desc: protein product [Podospora anserina] gi|170943011|emb|CAP68664.1| protein product [Podospora anserina]
  misc_feature (1)..(1733): NCBI GI: 46111359 Blast Desc: FG02561.1 [Gibberella zeae PH-1]
  misc_feature (1)..(1749): NCBI GI: 256725781 Blast Desc: NECHADRAFT_43434 [Nectria haematococca mpVI 77-13-4]
  misc_feature (1)..(1766): NCBI GI: 261361662 Blast Desc: rRNA biogenesis protein RRP5 [Verticillium albo-atrum VaMs.102]
  misc_feature (5)..(1550): NCBI GI: 154309384 Blast Desc: BC1G_07586 [Botryotinia fuckeliana B05.10] gi|150852410|gb|EDN27602.1| BC1G_07586 [Botryotinia fuckeliana B05.10]
  misc_feature (1)..(1362): NCBI GI: 39939960 Blast Desc: MGG_05260 [Magnaporthe grisea 70-15] gi|145010459|gb|EDJ95115.1| MGG_05260 [Magnaporthe grisea 70-15]
  misc_feature (1)..(1755): NCBI GI: 119482079 Blast Desc: rRNA biogenesis protein RRP5, [Neosartorya fischeri NRRL 181] gi|119409222|gb|EAW19171.1| rRNA biogenesis protein RRP5, [Neosartorya fischeri NRRL 181]
  misc_feature (1)..(1755): NCBI GI: 67523381 Blast Desc: AN2147.2 [Aspergillus nidulans FGSC A4] gi|40745035|gb|EAA64191.1| AN2147.2 [Aspergillus nidulans FGSC A4] gi|259487526|tpe|CBF86270.1| TPA: rRNA biogenesis protein A4]
  misc_feature: Useful for introducing or modulating the production of volatile compounds
MSSLKRKTAPAGAVAANSPKRSKSDGDKTSKTPKTTQSKAPAAAVVSRLKEEEPLFPRGGGSVLSPLEHRQISIQAKQDALFEQESSQRPDKPARAPKGKRKQKSLKDKSANASKPADDAVKIEGLNYQRLVKGSLVLAQITEIQPLQLVLALPNSISGHVPITAISSKLDELLAAEADVSDDDSDGGDDGVDLKSLFGVGQYVRAYVTSTTDEATATLAKPKKRIELSLRPEHTNTGLSSQEIVENCVVMASVSSVEDHGLVMDLGLDGSSAKAFLSRQEVDGDLIETRLRPGSVALCLVVGKGANGKIIKLSTRREKLGKVQNFASKATTIQSFLPGSAVELMVSDISTHGIAGKVMGSLDVTADHIHSGLGPKALDLEAKYKIGKKVKARVICNFPTANEPKMGISLLDHVMTLQSSRDGSNKPPLDLLPVSSIVEECTIFKVEPEIGVFVNVGVDGIPGFVHISRLKDGKVDHVSDDSGPYKIGSVHRGRVTAYNAVDALYSLSFEKSVLEQPYLRIEDIPIGQVVNGEVEKLIIHQEGISGLLVKLAEGIRGYVPEIHLADVRLQHPEKKFREGLKVKARVLSTDLIKRQVKLTLKKTIVNSDVEPLKSFDELVVGAQSPGTIVKVIDNGAVVQFYGSLRGFLPIAEMSEAFIRDPKEHFRLGQVLTLYVLDFDAGAQKLIVSCKDPSAFGIEKQNALKKLEIGEIVSAKVVEKTEDDVHLELVGSSLRSLLPFGQLTDRPNKAKASLKGIRVGQTLDGLMVLDKNDSRRSIILTKKPALIEASQDGTLLASLTTARVGEIRQGFVRNITVTAVFIQFANQVTALLPKSKLPQEAHTKTDFGLKRHQSIAVRIDSVDTENGRLVVSSVDFTEKPTEAPHSAPAEELQNAVDESLKSTDDIIVGRVTKAKIVSVKATQLNVKLADNVQGRVDVTEIFDSWAKISNSKAPLSHFNADDIIQVRVLGIHDARNHRYLPISHRSSHSVFELSAKSADVKDDLATRLTLNTLELGSTHIGFVNNVEQDSHSLWVSLSPSVRGRISVFEISDDISELDNLSKHFPVGAALKVRVLAVNSTEGHLDLSARSSSTTAHLTWDTVKRDMVLPGRITKVNERQLIVQLSNLVSGPVHLVDLSDDYDQANTLSYSKNSVIRVSVVDVDKSNKRVRLSLRPSRILSSSSPIKDREVTNVEQLQVGDVLRGFVKNVSDKGLFVGLGGNVTSMVRISDLSDRYVKEWKDEYQVDQLVKGRVLFIDPVTKQSRMSLKASVVDKNFVPRLNYSELRVGQVITGKVRKVEDFGAFILVDNSANVSGLCHRSELADKPVQDARKLLNEGDAVKAIVLKIDLQKKQISFGLKPSYLEDEDSSIGENESDVEDDEEEGGAAIEDDDDDDDEDMEDADTSAIIEGIDDESDVSSDEDTEMVYGSTNNVSALDSQGFDWSATALDDDTIDIAGGQDAAREKKKKKQRKAQIGEETVRNLDRSGPQTAVDYEQLLNRQPNSSDLWTRYMAFQMQISELGKAREVAERAVATINSSEETEKLNAWIAYLNLEVRFGNEDTTDSVFKRACQVNDQQEVYQRLASIYVQDNKPGKADDLFQVIMKKFGGKSPEVWYNYAHWLHAVQNEPDRARALLPRATQALPEHARLPLMTKIATLEYTSPNGSAERGRTMFEGLISTFPKRFDLWSQLLDHEDNPNADKGVIRDVFDRATKVKGLKARAAKKWFKRWADWEEKNGDAKSQEKVRAKASQWVRSRAESQKAEEEDED

SEQ ID NO: 15615 - DNA, 5550 bp, Muscodor strobelii
  misc_feature: SGI EST ID NO. CUFF.36967.0
  misc_feature: Variant of the nucleotide sequence at SEQ ID NO 15613
catcacactccggtcacttgcattgtacttgcacataggcattgtgcctttgaaccgtcatgagatgagttctcttaaacgaaaaacagccccggctggcgccgtcgccgccaactccccgaagcgctccaagtccgacggcgacaagacatccaagacacccaaaaccacccagtccaaagctccagctgctgccgttgtgtcccgcctcaaggaagaagagcctctgtttccccgtggtggcggtagtgttctgtcccctctcgagcacaggcaaatctccatccaggccaagcaggacgccctgttcgagcaggaatccagccagcggcctgacaaaccagcccgcgcccccaagggcaaaagaaaacagaagtcgctcaaggataagtccgcgaatgcctcgaaaccggccgacgatgcagtcaagatcgaaggtctgaattaccaacgtctcgtcaagggctccctcgtcttggcccagatcaccgaaatccagccattacagcttgttcttgccctgcccaacagtatatccggtcatgtgccaatcaccgcgatctcaagtaagctggatgagcttcttgctgccgaggctgatgtctcagatgatgactctgatggcggagatgatggagtggacctcaagtctctgtttggcgttggccaatacgttcgggcttatgtcacgtccactacagacgaggctacggccacactggccaagcccaagaagcgcatcgagctgtcgttgcggcccgagcatacaaacaccggtctatcaagccaagaaattgtagagaactgcgtcgtcatggcctcggtttcgagcgtggaggatcatggcttggtcatggaccttggtcttgatggttctagcgccaaagccttcctctctcgccaagaagttgatggtgaccttatcgaaactcgtttgcggcctggttccgtagctttgtgtcttgttgttgggaagggggccaacggcaagatcataaagctaagcacgcgcagagaaaagcttgggaaagtccagaactttgcatccaaagctaccaccattcagagctttttgccaggctctgccgtcgaactcatggtctcagacatctcaacgcacggcattgcaggcaaagtgatgggttcactggacgtcactgcggaccacattcattccggcttaggtccgaaagctttagatttggaagcaaagtacaagattggaaagaaagtcaaggctcgtgtcatctgcaacttcccaacagcgaacgagccaaagatgggcatttcactactggaccacgtcatgacattgcagtcttcacgtgatgggtcaaataagcccccgctggacctccttcccgtatcctcgatcgttgaagaatgtaccattttcaaggttgagcctgaaatcggcgtcttcgtcaatgtgggcgtggatggcataccgggctttgtgcatatttctcgtctcaaagatggcaaggtagaccatgtttccgacgactctggaccatataaaatcgggtcggtgcaccgcggtagagtcacggcctataacgctgtagatgcgctgtacagtctttcttttgaaaagagcgtcttagaacagccttaccttcgaatcgaagatatacccattggccaagtagtcaatggcgaggtcgaaaaactcatcatacatcaagaaggcatcagcggtcttctcgttaagcttgccgagggaatccgtggttatgttcctgagattcacctcgcagatgttcggcttcaacatcccgaaaagaagttccgtgagggtctgaaggtcaaggccagagtcttgtcaactgatctgatcaaacgtcaagtcaagctcacactcaagaagacaattgtaaattctgacgttgagcctttgaaatctttcgacgagttagtcgtaggtgctcagagtcctggtaccattgtcaaagtgattgacaatggtgctgttgtccaattctatgggtccttgcgagggttcttacctatcgccgaaatgagcgaggctttcattcgtgaccccaaagaacacttccgtctcggccaagttctcactctttatgttctcgacttcgatgctggcgcacaaaagttaatcgtgtcgtgcaaggacccttctgctttcggcattgaaaagcagaacgcgcttaaaaaactcgagataggcgaaattgtctctgcaaaggttgtcgaaaagaccgaagatgacgtacaccttgaactagttggcagctctctcagatcgcttctcccctttggtcaactcacagatcgtcccaacaaagccaaagcgtcattgaaaggtatacgggtgggccaaacactagatggtctcatggtattggataagaacgatagccgtcgatcaattatacttacaaagaagcctgccttgatagaagcaagtcaagacggaacgcttctcgcaagtctaacgacagctcgggttggcgagatacgccaaggttttgtgagaaacattaccgtcacggccgttttcattcaattcgcgaaccaagtcactgctttacttccgaaatccaagctaccacaagaggcgcacacgaagacggacttcggtttgaaaagacatcagtcaattgccgtcagaattgactctgtagacactgaaaatggacgcctcgtcgtttcctcggtcgattttacagagaagcccactgaggctcctcattcggcacctgctgaagaactgcagaacgctgttgacgaatctctcaaatcaacagacgacataatcgttggtagggtgacgaaagcaaagattgtatctgtcaaggcaacccagctcaatgtcaaattagccgacaatgtgcaaggtcgcgtggatgtgactgagatcttcgattcctgggccaagatctcaaattcgaaggctcctttgagccacttcaacgcagatgatattatccaggttcgagtgttagggatccacgatgccagaaaccatcgatatctacccatttctcaccgatcatcacactccgtcttcgagctttcggcaaagtcagccgacgtgaaggatgatttggcgactagactgacactcaacacgctcgaacttggatccactcatatcgggttcgttaacaatgtggagcaagactcacactctctctgggtcagcctgtcaccaagtgtacgcggcagaatcagcgtttttgaaatctcggacgatatctcggagcttgacaacctgtcaaaacacttcccggttggagcagcactgaaagtccgcgtattggctgtaaactctacagaaggccacttggacttatccgcccggtcctctagcacaacagcacatctcacttgggacactgtgaagcgtgatatggtcctccctggtagaatcacaaaagtgaacgagcggcaactgatcgtacagctaagcaacctagtttctggccctgtccacctagtcgatctcagtgatgactacgatcaagcaaacacactttcctatagcaagaatagtgtcatccgcgtctccgttgtggatgttgacaagagcaataaacgagtgcgcctttcgctccgtccgtcaaggatattgagctcgtcttcgcccatcaaagaccgcgaggtcaccaatgtcgaacagttgcaagttggcgatgtcctccgcggtttcgtcaagaacgtttctgacaaggggctcttcgtcgggctcggcggcaatgtcacctcgatggttcgaatttctgacttatcagacagatatgtcaaagaatggaaagacgagtatcaggtcgatcagcttgtgaagggtcgtgttctcttcatcgaccctgtaacgaagcagtcacgcatgagcctaaaagcatcggtggtagacaagaattttgttccccgcctcaactattcggaactccgtgtcgggcaggttattaccggtaaagtccggaaagttgaagattttggtgctttcatcctcgttgacaactctgccaatgtgagtggactgtgtcatcgaagtgagttagccgataagccagtacaggatgcaaggaaactgttgaatgagggtgacgcagtcaaagcaatcgttctaaaaattgatctgcagaagaaacagatcagtttcggtctgaaaccgtcttatcttgaagacgaagacagcagtataggcgagaatgagagtgacgtcgaagacgatgaggaagagggtggtgctgctattgaagacgatgacgatgacgatgatgaagacatggaagatgctgatacttctgctataattgagggcattgatgatgaaagtgacgtctcatctgatgaggacacagaaatggtctatggaagcactaataacgtgagcgccctcgatagccaaggattcgactggtctgcgacagcactcgacgatgatactatagatattgccggtggacaagatgccgcgcgagaaaagaagaagaagaagcaacgaaaagcccaaatcggtgaggaaacagttcgcaacctagacagatctggtccacagactgcggtggattacgaacagcttctaaaccgtcaaccaaattcttctgatttgtggactcgatacatggcattccagatgcaaataagcgaactgggcaaagctcgcgaagtggctgaacgagcggtcgccaccatcaacagttctgaggaaacggaaaaattgaatgcttggattgcgtatctcaatctggaagtacgcttcggcaacgaagatactacagacagtgtcttcaagcgtgcgtgccaagtcaacgaccagcaagaagtttaccaacggcttgctagcatatatgttcaagataataaacccggaaaagcggacgatctgttccaagttatcatgaagaaattcggcggcaagtcgcctgaagtctggtataactatgcacactggttacatgccgttcagaatgagccagatcgagctcgggcattgttaccgcgcgctacgcaagcactcccagagcatgcacgtcttcctctcatgaccaagatcgccactcttgaatacacatcgccaaatggcagtgccgagcgtggccggacaatgttcgaagggctgatctccacatttccgaaacgatttgacttgtggagtcaattgttggatcacgaagacaacccaaacgcagacaaaggcgtcattcgagatgtgtttgatcgagcgaccaaagtgaaaggactaaaggcgcgagctgcaaagaaatggttcaagcgctgggcagactgggaagagaaaaatggtgatgcgaagagtcaggagaaggtcagggcaaaggcatctcagtgggtgaggtctagagctgaaagtcaaaaagccgaagaagaggatgaagattagaatgtattatgatacccgtatgacttgaaacttgatgggtttacttacatggccccaaatcatatgatgactttagcggcctgtgtgccggtgtatgcgattgtacttataataggaccatgagaatcaagcgagacacttttcaaggcatcagtctttttaatcgtcctgcttccttg

SEQ ID NO: 15616 - DNA, 510 bp, Muscodor strobelii
  misc_feature: SGI cDNA ID NO. 565176
  misc_feature: Encodes the peptide sequence at SEQ ID NO 15617
atgtcgcatcctccgtcgacaccggtcaaagtaccggcttcggcggcgacttacacgcctgccacccaagacaacgacctgcgctcacagatcaacaccttgatgctgcgagaagggcaaatggaaaagatccaagagaacctcctccacgctctcgacgcacatagctccaattggccctccgcaatccagactcacgccctggcattattaagatcaggcgaaatccacacattccccgccctcgtacggcgcgtcctcgaggacgtccggagggagaccaccgctgcagccgacgccacttcctcctccacagccaactccgactccaaagaacccaacggcaccgctacaaacggtacgaataaaaccggtgtgaacggaacctcgagcacgacagatctcaacacgcagagcctcgctatacccccggccgtagtagagacggtgctcaaggccgcccgcgacagcttggaggcatattgcgagatagacgatggtcctggatga

SEQ ID NO: 15617 - protein, 169 aa, Muscodor strobelii
  misc_feature: SGI Peptide ID NO. 565176
  misc_feature (5)..(166): NCBI GI: 46122303 Blast Desc: FG05529.1 [Gibberella zeae PH-1]
  misc_feature (2)..(166): NCBI GI: 116207436 Blast Desc: CHGG_03011 [Chaetomium globosum CBS 148.51] gi|88183608|gb|EAQ91076.1| CHGG_03011 [Chaetomium globosum CBS 148.51]
  misc_feature (5)..(166): NCBI GI: 256729885 Blast Desc: NECHADRAFT_95530 [Nectria haematococca mpVI 77-13-4]
  misc_feature (5)..(164): NCBI GI: 156058354 Blast Desc: SS1G_03188 [Sclerotinia sclerotiorum 1980] gi|154700976|gb|EDO00715.1| SS1G_03188 [Sclerotinia sclerotiorum 1980]
  misc_feature (9)..(159): NCBI GI: 164428749 Blast Desc: NCU00014 [Neurospora crassa OR74A] gi|157072264|gb|EAA27765.2| conserved [Neurospora crassa OR74A]
  misc_feature (1)..(164): NCBI GI: 154309230 Blast Desc: BC1G_07509 [Botryotinia fuckeliana B05.10] gi|150852333|gb|EDN27525.1| BC1G_07509 [Botryotinia fuckeliana B05.10]
  misc_feature (1)..(164): NCBI GI: 39940092 Blast Desc: MGG_05194 [Magnaporthe grisea 70-15] gi|145010539|gb|EDJ95195.1| MGG_05194 [Magnaporthe grisea 70-15]
  misc_feature (5)..(167): NCBI GI: 171685950 Blast Desc: protein product [Podospora anserina] gi|170942936|emb|CAP68589.1| protein product [Podospora anserina]
  misc_feature (7)..(166): NCBI GI: 242761710 Blast Desc: conserved [Talaromyces stipitatus ATCC 10500] gi|218723429|gb|EED22846.1| conserved [Talaromyces stipitatus ATCC 10500]
MSHPPSTPVKVPASAATYTPATQDNDLRSQINTLMLREGQMEKIQENLLHALDAHSSNWPSAIQTHALALLRSGEIHTFPALVRRVLEDVRRETTAAADATSSSTANSDSKEPNGTATNGTNKTGVNGTSSTTDLNTQSLAIPPAVVETVLKAARDSLEAYCEIDDGPG

SEQ ID NO: 15618 - DNA, 1481 bp, Muscodor strobelii
  misc_feature: SGI EST ID NO. CUFF.36981.0
  misc_feature: Variant of the nucleotide sequence at SEQ ID NO 15616
ccccacttaggcgagctaggtacgtctatcaagctctatctttcagccttgttcctttatatgcctttgccatctattcctcagccttgtctcaacacgccgttctgcatatgcaccgtcatcaatctcattgctcttgccccgtagccttgctgagcctatgtgtagacaatagctgaaacgtctgtcgccctgatagcctggctatcatagagggggaaccgtaccggcatgccacatgtcaatagacatagtagtaccctctgaatcgcattccagggactacctgcctgctgtacagggctagcatctagtgcatcacacagggccctgctgccagttacgtctcgattcgagctgcggataggaaaccatcactgattctatccaaaattcggtgcaatatcaccacgcattgagctttatttctgcttctgaattgcgtcacacagagcagaggcaagcgcagcaagcgcagcaaagagagcccaccaccatgtcgcatcctccgtcgacaccggtcaaagtaccggcttcggcggcgacttacacgcctgccacccaagacaacgacctgcgctcacagatcaacaccttgatgctgcgagaagggcaaatggaaaagatccaagagaacctcctccacgctctcgacgcacatagctccaattggccctccgcaatccagactcacgccctggcattattaagatcaggcgaaatccacacattccccgccctcgtacggcgcgtcctcgaggacgtccggagggagaccaccgctgcagccgacgccacttcctcctccacagccaactccgactccaaagaacccaacggcaccgctacaaacggtacgaataaaaccggtgtgaacggaacctcgagcacgacagatctcaacacgcagagcctcgctatacccccggccgtagtagagacggtgctcaaggccgcccgcgacagcttggaggcatattgcgagatagacgatggtcctggatgagccgtcatgacacccaacattaaacgatgctacatgaacaccgacctacccaccttacccaccttacctacctaagtcagaatgaatgaatgaacgaattgaaaatctaccaagaggcccaataaaagccggctggttctctctgctttaccgacatccagtaccacgatattacaaccgtgaaattttgctatccttgttctagtgcatgtgttcgacgctacaaggtgaaaattatgaataacttgccgcacctttattagtcagtggacctgatctggcactgttctgtcgatatgacctccttgcagactccgtaggactgtgtggaagttaccatgctctaggaagagaccaagtagttgagaagacatctcattaatatcaaacaagtgcacacaaggaaagtgaacacgcaagcactggatagtctgcacgcgcaagaaaacacgagcgggaataaaaatgcgacaag

SEQ ID NO: 15619 - DNA, 2874 bp, Muscodor strobelii
  misc_feature: SGI cDNA ID NO. 565177
  misc_feature: Reduced expression when VOC is produced
  misc_feature: Encodes the peptide sequence at SEQ ID NO 15620
atggctgcgtttgtcgcaggaccaaacgagagtttggcggagagaaccctggcaacaacacaatatctgtatccagacttgctcttggtcattttattggttgttggggccatatattcgttttatacggccagtaatagtaatgatcagaccgctcccgccgtcactgggcctggtggcagaccactaccggctagcaagaaaagacaaatggacgacaagccacacgaacctgaacaaaagttctctcccgccattagaggactgttccaatggctctacacggcagtaacactcactttcgttggtcaaggtgctgcaattgcaactcgtgcgttggcctatagaagtcgtgacggtgagacttcttggtggtgtggcgaacctaaagcagtgtatatcctagggtcgacattcctttacctctatgtcttcattacccttttcgagcagaagcaccacccaggacctgtgtttatgttgatgtggacaatcgcgttgtgcatggagactatcatctttacttgtgatgctgtcattttgtcacatcctcacagacttctgaccaacatcaaacatggtgattacgtcagggttgattacataaaccagtgggatgtaatggacctcagctttgctggaattcgcttattgctggtggctggtagcgtcattctctggactgcctcaacattggcagatagacgagctgagcgagacaagtgcaaacgcgaactggaaagcaactttgaggccgatgagaactccccacttttggatcgagactcgaacacttaccataccaacggacatactcccggtatgaatggctccgctaacggaaatgcacacagtggccagagccacgcaattgtggacgaggatgctgggttttaccgcccagacaaacttccacgtacgacttggctagaatacttgcgaggatactctgtattcttcccctacatgtggccttctaagcagcgaaagctacagtggcttgttattacctgttttgtcctccttgccctgcaaagatgggtcaacattatggtaccttaccagattggccttgtgaccaaccagctcaccgatggatttgaacaagatggcaaattacagatgccatggacctcgctcgggttgctaatactgtttaagttgctgcaagggccctcgggactgctcggttcttggaggtccatgttatggatcccagtctcacagcacgcttaccgagcgctgaccacttcggccttcgagcacgtacattctctcagtctggattttcatctcggaaaaaggactggcgaagtattgtctgcgttgaacaaaggcgcctcggttaactcatttcttgagcaagtcacctttcaggtcttccccatgattgtcgatctattcgtggccattagttatttctattttaggttcgatgccctctatgctgtcattgtctgcattgtcacattctactatcttcttcttactattaggctggcatccaagacggccgaccagcgaagggcgatgtcgaatgcagatagggaagaagaggcagtgaagaatgattctatcataagctacgaaacggttaaatatttcaacgccgaggaattcgaattcaacaggtatcgcgaggccataaaaaacttccaggctgctgaagccgacgtcacatggagcatcagcctcatgaacatgtaccaatcccttgttttcatgactggcatgctagcggccgttatgttgggagcttatcaagtcacccaaggcacgcggcaggttggagatttcgtcgccctcatgacgtatctgggtcagctgcagggtccgttgaacttcttcgggacattctatcgcactgtccagcaagccatgatttctggtgaacgcctcctagagctgttcaagcagcgaccaactgtcgtggatcgcccaggtgctccacctatgacttcttgtgatgggcatgtcgaattttctaaggtcaaatttgcttatgacaagagaaagcccgcactgcgaaacttgacattcgactgcccgcccgggacgacgactgcccttgtcggagaatctggtggtggcaaatccactttgttccgtttactttatcgctacttcaattgtcaggctgggaatatcagagttgacggtcacaacgttaaggacgttacgatcgattcaattcgacgtttcataggagtagtgcctcaggatacgatcatgtttaacgatacactcatgtacaacctcaaatatgctaatcagaacgcaactgacgaggaagtcattgcggcgtgccaggctgccagcattcacgaaaggatcatgtcgtttcctgatggttactgtaccaaggtcggggaacgtggtctcaggctcagtggcggtgaaaagcagcgtgtcgccatcgcgcgcacacttctgaaaaacccgaagatcataatgcttgacgaagcgacctcggctctggactcgcacacggagcaacaaatccaatcaagacttgccaacattggtcgtggtcgcaccatgttgatcattgcgcatcgattgtcgacaattacacacgcagaccagattcttgtgttaaaccaaggcaccattgttgaaaggggcacccacgaagagctcctgcagctcaatggcaaatacgcgtcgatgtggaatcggcaagcaaaagccgaaaaagctgcagaagacgccagagccgccacccggagagctgagaagctcatgcgaaaggccaacatcccgtcgccctcggcggaaaatggtaatcgaaacccgacacataatggccacgacgagtcaagcagttcgtccgatgagtcaacaaagccaacaaagcctacaaacgccggctag

SEQ ID NO: 15620 - protein, 957 aa, Muscodor strobelii
  misc_feature: SGI Peptide ID NO. 565177
  misc_feature (335)..(613): Pfam Id: PF00664 Pfam Desc: ABC transporter transmembrane region
  misc_feature (685)..(869): Pfam Id: PF00005 Pfam Desc: ABC transporter
  misc_feature (7)..(954): NCBI GI: 164428745 Blast Desc: NCU00010 [Neurospora crassa OR74A] gi|157072262|gb|EAA27761.2| NCU00010 [Neurospora crassa OR74A]
  misc_feature (10)..(928): NCBI GI: 171685952 Blast Desc: protein product [Podospora anserina] gi|170942937|emb|CAP68590.1| protein product [Podospora anserina]
  misc_feature (8)..(920): NCBI GI: 116207444 Blast Desc: CHGG_03015 [Chaetomium globosum CBS 148.51] gi|88183612|gb|EAQ91080.1| CHGG_03015 [Chaetomium globosum CBS 148.51]
  misc_feature (24)..(953): NCBI GI: 261358494 Blast Desc: heavy metal tolerance protein [Verticillium albo-atrum VaMs.102]
  misc_feature (5)..(927): NCBI GI: 154310536 Blast Desc: BC1G_06742 [Botryotinia fuckeliana B05.10] gi|150851282|gb|EDN26475.1| BC1G_06742 [Botryotinia fuckeliana B05.10]
  misc_feature (12)..(949): NCBI GI: 256729695 Blast Desc: [Nectria haematococca mpVI 77-13-4]
  misc_feature (25)..(949): NCBI GI: 119498231 Blast Desc: vacuolar ABC heavy metal transporter (Hmt1), [Neosartorya fischeri NRRL 181] gi|119414037|gb|EAW23976.1| vacuolar ABC heavy metal transporter (Hmt1), [Neosartorya NRRL
  misc_feature (6)..(953): NCBI GI: 189209237 Blast Desc: heavy metal tolerance protein precursor [Pyrenophora tritici-repentis Pt-1C-BFP] gi|187977044|gb|EDU43670.1| heavy metal tolerance protein precursor [Pyrenophora tritici-repentis
  misc_feature (24)..(914): NCBI GI: 121710574 Blast Desc: vacuolar ABC heavy metal transporter (Hmt1), [Aspergillus clavatus NRRL 1] gi|119401053|gb|EAW11477.1| vacuolar ABC heavy metal transporter (Hmt1), [Aspergillus NRRL 1]
  misc_feature (13)..(950): NCBI GI: 212540468 Blast Desc: vacuolar ABC heavy metal transporter (Hmt1), [Penicillium marneffei ATCC 18224] gi|210067688|gb|EEA21780.1| vacuolar ABC heavy metal transporter (Hmt1), [Penicillium ATCC
  misc_feature (328)..(894): SWISSPROT Homolog: EC 3.6.3.42 Beta-glucan-transporting ATPase
  misc_feature: Useful for introducing or modulating the production of volatile compounds
MAAFVAGPNESLAERTLATTQYLYPDLLLVILLVVGAIYSFYTASNSNDQTAPAVTGPGGRPLPASKKRQMDDKPHEPEQKFSPAIRGLFQWLYTAVTLTFVGQGAAIATRALAYRSRDGETSWWCGEPKAVYILGSTFLYLYVFITLFEQKHHPGPVFMLMWTIALCMETIIFTCDAVILSHPHRLLTNIKHGDYVRVDYINQWDVMDLSFAGIRLLLVAGSVILWTASTLADRRAERDKCKRELESNFEADENSPLLDRDSNTYHTNGHTPGMNGSANGNAHSGQSHAIVDEDAGFYRPDKLPRTTWLEYLRGYSVFFPYMWPSKQRKLQWLVITCFVLLALQRWVNIMVPYQIGLVTNQLTDGFEQDGKLQMPWTSLGLLILFKLLQGPSGLLGSWRSMLWIPVSQHAYRALTTSAFEHVHSLSLDFHLGKRTGEVLSALNKGASVNSFLEQVTFQVFPMIVDLFVAISYFYFRFDALYAVIVCIVTFYYLLLTIRLASKTADQRRAMSNADREEEAVKNDSIISYETVKYFNAEEFEFNRYREAIKNFQAAEADVTWSISLMNMYQSLVFMTGMLAAVMLGAYQVTQGTRQVGDFVALMTYLGQLQGPLNFFGTFYRTVQQAMISGERLLELFKQRPTVVDRPGAPPMTSCDGHVEFSKVKFAYDKRKPALRNLTFDCPPGTTTALVGESGGGKSTLFRLLYRYFNCQAGNIRVDGHNVKDVTIDSIRRFIGVVPQDTIMFNDTLMYNLKYANQNATDEEVIAACQAASIHERIMSFPDGYCTKVGERGLRLSGGEKQRVAIARTLLKNPKIIMLDEATSALDSHTEQQIQSRLANIGRGRTMLIIAHRLSTITHADQILVLNQGTIVERGTHEELLQLNGKYASMWNRQAKAEKAAEDARAATRRAEKLMRKANIPSPSAENGNRNPTHNGHDESSSSSDESTKPTKPTNAG

SEQ ID NO: 15621 - DNA, 4571 bp, Muscodor strobelii
  misc_feature: SGI EST ID NO. CUFF.37404.2
  misc_feature: Variant of the nucleotide sequence at SEQ ID NO 15619
gccctctatctcaactgtcctttttcttttattaatgcttctcttcctcctcagtctacctttggccttaccaacaacgtttcttcacaacggtgttgtctacctaacttgtatattcttcatcttaccactttcgcaccatctccacttacccgtgcttcctccaccactgaagcataagttattgacgtacttcaaatctacacaggtctagataactcacgctcaagcactacaatacccttttctggcatttaatgtgaaaacgaggaaattaatcgaataccacatatcgcctgacctcagttgctgtgttcctccacatccttcagcatacaggttactaggttgagcatagcatccttgtcatcaagctaaggtgcatactatacacttcgttctgtggagtatatttcacgggtctcttatttctgcctttgactcgcccttcttgcaacctagcaatcgtttctcttcgttcttttcaagcttctccggtttactactgtgggcgatcgtcgtaccgctgctcgacattcacccacatattgtcgagactgtctcgcgattactgtcccgtggtgctcattcagccattgctgtggagtactgagctgcttcgactccaggtgattcctgttccttcgcgtcttctagggaaattcctcccattgtcttcgtcgaaagacgacaacgggtgcgaaaggttctagttgacttggacgtgaggttgggtattgcaatgaggcaatgatcaagttggaggactgccgctaacagtatgtatgtcaccctcaccttgcagcatgcagtgcaatcaaatctcgtcccatctttttctttgtcagtgtcatggggcttggcgtgctaatacatccgtccatagaccaacatggctgcgtttgtcgcaggaccaaacgagagtttggcggagagaaccctggcaacaacacaatatctgtatccagacttgctcttggtcattttattggttgttggggccatatattcgttttatacggccagtaatagtaatgatcagaccgctcccgccgtcactgggcctggtggcagaccactaccggctagcaagaaaagacaaatggacgacaagccacacgaacctgaacaaaagttctctcccgccattagaggactgttccaatggctctacacggcagtaacactcactttcgttggtcaaggtgctgcaattgcaactcgtgcgttggcctatagaagtcgtgacggtgagacttcttggtggtgtggcgaacctaaagcagtgtatatcctagggtcgacattcctttacctctatgtcttcattacccttttcgagcagaagcaccacccaggacctgtgtttatgttgatgtggacaatcgcgttgtgcatggagactatcatctttacttgtgatgctgtcattttgtcacatcctcacagacttctgaccaacatcaaacatggtgattacgtcagggttgattacataaaccagtgggatgtaatggacctcagctttgctggaattcgcttattgctggtggctggtagcgtcattctctggactgcctcaacattggcagatagacgagctgagcgagacaagtgcaaacgcgaactggaaagcaactttgaggccgatgagaactccccacttttggatcgagactcgaacacttaccataccaacggacatactcccggtatgaatggctccgctaacggaaatgcacacagtggccagagccacgcaattgtggacgaggatgctgggttttaccgcccagacaaacttccacgtacgacttggctagaatacttgcgaggatactctgtattcttcccctacatgtggccttctaagcagcgaaagctacagtggcttgttattacctgttttgtcctccttgccctgcaaagatgggtcaacattatggtaccttaccagattggccttgtgaccaaccagctcaccgatggatttgaacaagatggcaaattacagatgccatggacctcgctcgggttgctaatactgtttaagttgctgcaagggccctcgggactgctcggttcttggaggtccatgttatggatcccagtctcacagcacgcttaccgagcgctgaccacttcggccttcgagcacgtacattctctcagtctggattttcatctcggaaaaaggactggcgaagtattgtctgcgttgaacaaaggcgcctcggttaactcatttcttgagcaagtcacctttcaggtcttccccatgattgtcgatctattcgtggccattagttatttctattttaggttcgatgccctctatgctgtcattgtctgcattgtcacattctactatcttcttcttactattaggctggcatccaagacggccgaccagcgaagggcgatgtcgaatgcagatagggaagaagaggcagtgaagaatgattctatcataagctacgaaacggttaaatatttcaacgccgaggaattcgaattcaacaggtatcgcgaggccataaaaaacttccaggctgctgaagccgacgtcacatggagcatcagcctcatgaacatgtaccaatcccttgttttcatgactggcatgctagcggccgttatgttgggagcttatcaagtcacccaaggcacgcggcaggttggagatttcgtcgccctcatgacgtatctgggtcagctgcagggtccgttgaacttcttcgggacattctatcgcactgtccagcaagccatgatttctggtgaacgcctcctagagctgttcaagcagcgaccaactgtcgtggatcgcccaggtgctccacctatgacttcttgtgatgggcatgtcgaattttctaaggtcaaatttgcttatgacaagagaaagcccgcactgcgaaacttgacattcgactgcccgcccgggacgacgactgcccttgtcggagaatctggtggtggcaaatccactttgttccgtttactttatcgctacttcaattgtcaggctgggaatatcagagttgacggtcacaacgttaaggacgttacgatcgattcaattcgacgtttcataggagtagtgcctcaggatacgatcatgtttaacgatacactcatgtacaacctcaaatatgctaatcagaacgcaactgacgaggaagtcattgcggcgtgccaggctgccagcattcacgaaaggatcatgtcgtttcctgatggttactgtaccaaggtcggggaacgtggtctcaggctcagtggcggtgaaaagcagcgtgtcgccatcgcgcgcacacttctgaaaaacccgaagatcataatgcttgacgaagcgacctcggctctggactcgcacacggagcaacaaatccaatcaagacttgccaacattggtcgtggtcgcaccatgttgatcattgcgcatcgattgtcgacaattacacacgcagaccagattcttgtgttaaaccaaggcaccattgttgaaaggggcacccacgaagagctcctgcagctcaatggcaaatacgcgtcgatgtggaatcggcaagcaaaagccgaaaaagctgcagaagacgccagagccgccacccggagagctgagaagctcatgcgaaaggccaacatcccgtcgccctcggcggaaaatggtaatcgaaacccgacacataatggccacgacgagtcaagcagttcgtccgatgagtcaacaaagccaacaaagcctacaaacgccggctagatcgttgcatctggttcccaaaatcttccccgggatcataacgatgcccgggggaggacatgttatcattaataaaaacgaccattcgcctatatacaaatcatttttcgctcattcccctttcaggccccgtctttcggagcattgcattgcattgcaggcggcgttggtgggatatacaaaacatgcgagattttccctcttagggaacctaatatgggctttagatgcctgccctgtcttacgttgatgccacgataccgaggaatgttgatgttgtctgtgtcttgatattcacactttgaaggaacaaattaatgtggcattacagaaatcaagcacgcgaaactagagtttgaatagagttggggaccaatggtgcggatattggaatgttgtctgatcatctggccagatctgctcttctttgtcccctctctgtctttggtcttctacaaaacgtttgccttccgttttctctcctattttcctgacataatggccacagtctttgcgattgttgatgagagacgattacacgtgcataattcggcggggcaacctaacgagtaggaggaagagaacttgtgcatcatagatgatacctaggtaaacaagggcgagaagcgcgctgcccgtgagtaaaagctaattatgaaatacaaaaggcttgttttgacaagagtacaccgtgcttgcgtatctgtgctttacgaattcgtgatgatgctgaccagaaaattcatgatattagcacgtgcggatttttggtagttgagggatcggatctgtagccgcatgcagg

SEQ ID NO: 15622 - DNA, 1392 bp, Muscodor strobelii
  misc_feature: SGI cDNA ID NO. 565178
  misc_feature: Reduced expression when VOC is produced
  misc_feature: Encodes the peptide sequence at SEQ ID NO 15623
atggcatcttccgagccgttcccactgctgagcacccccgcggaccagctgcgctctgtcgcggagcagaacacggcacgccgacgtaggaagtcgagtctccccgtcgagatccgcgccggcgacacgggcgcgcccagcctgcagacgagcctcgagactctgcagagcagccccggcacgccgtccaaggcggtcgatgcctccagcaggaagggctccaagcgccgcaaggcacgctcggccctgcgccgcttccagcacttcagcctcaagcacacctgggtgctgcccctgatgctgctcgtcctcttcggcctcgcctacgccgtcaacccctccgagtccaaccccgtccaccgcttcatcttcctctcctaccgcatgcccccccaccccgacgccgcccccggcacgcccccccagtacggcaaggggccctgggacatcgccttcttcagcttctacaccgtcgtgctctccttcacccgcgagttcatcatgcagcagttcctcaggcccctgtcccgcgccgccggtctcaagtcgcgcggcaagcaggcccgcttcatggagcaggcatacacggccatctacttcggcttcctgggccccgccggcctgtacgtcatgaagcagacccccatctggtacttcaacacacgtgctttctacgaggacttcccccacaagacgcacgtcgccggcttcaagttctactacctgttccaggccgcatactgggcccagcaggccatcgtgctcttgatcggtctcgagaagccgagaaaggactacaaggagcttgtcggtcaccacatcgtcagtctggctctgattgctctctcctatcgcttccatttcacctacctcggcatcgccgtctacataacccacgacatctccgacttcttcttggcgacgtccaaggtcctcaattacgttgaccattggctggtcgggccttatttcttcgttttcatgtgtgtgtggacgtatctacgccacttcctcaacttgcgctttatctggtctctcttcaccgagttcaagacggttggcccctacgagctcaactgggagaccgagcagtacaagtgcgacattgctttcgtcatcaccttcacattgctcgcctctcttcaggcactgaatctcttctggatgttcttcattgtcaggattgcctatcgctttgtcgtgtaccagactgccgacgatgaccgctcagaggccgaagaatccgagcttgaagaaatggaacgcgaaaagaaggccaaagaggccaaggcgctgctcaacagtccggcgactggagccaacgtgcagctgaatggctctgtcaagagccgcgccaacggggcggcgcccaagaagaaggcgtcccgatag

SEQ ID NO: 15623 - protein, 463 aa, Muscodor strobelii
  misc_feature: SGI Peptide ID NO. 565178
  misc_feature (208)..(417): Pfam Id: PF03798 Pfam Desc: Longevity-assurance protein (LAG1)
  misc_feature (118)..(186): Pfam Id: PF08390 Pfam Desc: TRAM1-like protein
  misc_feature (4)..(425): NCBI GI: 85082845 Blast Desc: NCU00008 [Neurospora crassa OR74A] gi|28918078|gb|EAA27759.1| NCU00008 [Neurospora crassa OR74A]
  misc_feature (2)..(460): NCBI GI: 116207446 Blast Desc: CHGG_03016 [Chaetomium globosum CBS 148.51] gi|88183613|gb|EAQ91081.1| CHGG_03016 [Chaetomium globosum CBS 148.51]
  misc_feature (1)..(460): NCBI GI: 39940102 Blast Desc: MGG_05189 [Magnaporthe grisea 70-15] gi|145010545|gb|EDJ95201.1| MGG_05189 [Magnaporthe grisea 70-15]
  misc_feature (1)..(454): NCBI GI: 156058374 Blast Desc: SS1G_03198 [Sclerotinia sclerotiorum 1980] gi|154700986|gb|EDO00725.1| SS1G_03198 [Sclerotinia sclerotiorum 1980]
  misc_feature (2)..(427): NCBI GI: 171686028 Blast Desc: protein product [Podospora anserina] gi|170942975|emb|CAP68628.1| protein product [Podospora anserina]
  misc_feature (2)..(441): NCBI GI: 261358493 Blast Desc: sphingosine N-acyltransferase lac1 [Verticillium albo-atrum VaMs.102]
  misc_feature (1)..(454): NCBI GI: 46122295 Blast Desc: FG05525.1 [Gibberella zeae PH-1]
  misc_feature (1)..(463): NCBI GI: 256729886 Blast Desc: [Nectria haematococca mpVI 77-13-4]
  misc_feature (28)..(411): NCBI GI: 70992171 Blast Desc: ceramide synthase membrane component (LAG1) [Aspergillus fumigatus Af293] gi|66848567|gb|EAL88896.1| ceramide synthase membrane component (LAG1), [Aspergillus fumigatus Af293]
  misc_feature (28)..(411): NCBI GI: 159124503 Blast Desc: ceramide synthase membrane component (LAG1), [Aspergillus fumigatus A1163]
  misc_feature (90)..(398): SWISSPROT Homolog: EC 2.3.1.24 Sphingosine N-acyltransferase
  misc_feature: Useful for introducing or modulating the production of volatile compounds
MASSEPFPLLSTPADQLRSVAEQNTARRRRKSSLPVEIRAGDTGAPSLQTSLETLQSSPGTPSKAVDASSRKGSKRRKARSALRRFQHFSLKHTWVLPLMLLVLFGLAYAVNPSESNPVHRFIFLSYRMPPHPDAAPGTPPQYGKGPWDIAFFSFYTVVLSFTREFIMQQFLRPLSRAAGLKSRGKQARFMEQAYTAIYFGFLGPAGLYVMKQTPIWYFNTRAFYEDFPHKTHVAGFKFYYLFQAAYWAQQAIVLLIGLEKPRKDYKELVGHHIVSLALIALSYRFHFTYLGIAVYITHDISDFFLATSKVLNYVDHWLVGPYFFVFMCVWTYLRHFLNLRFIWSLFTEFKTVGPYELNWETEQYKCDIAFVITFTLLASLQALNLFWMFFIVRIAYRFVVYQTADDDRSEAEESELEEMEREKKAKEAKALLNSPATGANVQLNGSVKSRANGAAPKKKASR

SEQ ID NO: 15624 - DNA, 7203 bp, Muscodor strobelii
  misc_feature: SGI EST ID NO. CUFF.37628.1
  misc_feature: Variant of the nucleotide sequence at SEQ ID NO 15622
gtgtgcagcgtgcatgtcattatagtagggtcggcaatagcgcgccaaaacactgggagcaacggccaaacggcgaacggtcccccgtacctgtgctgtgccaattctgcaacactttgctcctcatcctcgtcgcccgcagaaaccccctcccgcagaccgtcgttcctcgatctctcggcgcccagcactcatccgcctgtctttccgctcatcaactccagggccccaggaccccaagaccaactaccaaacaaacactccaccactctcgacggcatcttcaattcgacagttctcgatacataattaggtcacgacccgcgttcgacaattcatatcgatacggccactccacgaattagaccatcaaaccgcaagactacgccggcgtcgagatatatacatatatacaagtagcgctgacagactcactgctgagcctcccgagtcttacgcgttgcgttgcaccaccgtctgggcgtcggccatcaccctgctcgtcgtcgctgcccgccagagggccttcagggcgttccatggcgacgcattctcgatagcagcaccccgtcgctcaagtctcgtgtcgccgtgcggtcgggtcggcattttattccgtcgcgatgggctgggttcagccgcccgatgctgtggcacgccgcggaggcatcatcgcgactgggttgtcgggcgatggagccgaagctctcgccgtgccccggcccgaagactttcgcgatcccttctacgcttccgtgtttccgcaatgctacgcactggctgctaccaccgtcctcgcctatcttctgttgatcatgctcgtcattgccccgagatcgttcttggatggaggtgttgtcacgctcggacggcgcggctttaccaacggccattccaatggcatcaccatcggcggccggccctggctgcagaaggtcgcgacactcttcgtcgccatatcgctgaccatcgcaagcaacgacacgttccgtgttgccgaggaccagtactccaacggcaacttcgacgcacagaagctgcagcagatggttctggatggtacccagctgcaggtcatccgcctgatatcagacacctttctctggctggcccaggcccagactttgatccgtctattcccgcgtcagcgcgagaaaatcatcatcaaatggaccgccttctctctcatttccctcgatgtcatcttcagtgccctcgacgccttcaaatacaaaggcacgacaggtgccagaccgcagcaattcaccgaggccattcccgcactgagctacctcttccaattgtccctcgggcttctatatgccgcctgggtcctctactacgccgtgaccaagaagaagtatgcgttttaccatccactgatgaagaacatttccttatgtgcagttctatccatcgcctctttgcttattccggtcactttcttcatcttggatatcgccgagccgacatttacagtttggggtgactatgttcgatgggttggcgctgcggctgcgagtgtcgtggtatgggaatgggttgagcgcattgaagcgttggaacgagaagaaaagaaggacggcgttttggggcgtgagattttcgatggggatgagctcatagaagtatcgccttcagaccttgggtggcctagccggaggaagcacaaggaggccggtggggatggagatcagggcgaaagcggtataagtcgcttctctggagaccgcggcaacatgtggccagcgatgtccaacatcgccaggcgataccgccccagatcctcgggcaccccgagccagtcgcaaggtacgacggctgtgcagaccgaaacaacgggcagatatatggcaagattacggcgaccacctctttggccggcaagaccacccccagccgccacaccagttagcagaacagacactgccagtcccgacagtacaatctatgctgtccgatatcagccgctcacagagacgacctcgagaaccacagacgaaagacgaaggtcaccgtcaaggggtgagacggccacttcttcgtctgcccatggagtaatagagaacgcagaggctggaatcaatcgtgtggaagtccagcaaacccaggtcacggagagcacgaagaatgggaacaccgggcccgtcggtcgttttgggcaactcaaacagttgaatatatttcaacggagaggccacgatctaccggccgaatgtgcacctcatgccatagcgaataagccaggcgtgggccatgggcacgagacgttgtcgaggtgggacatcagaagtcgaatagaggccttcacggcttcacaggcagataggatactgcaacagatacggccagcacctgacaccgaaagcctaacggtgactgtcattcctgcgccagcccgccgtggcgcagctctagcacaattactagaggaggaggaactccaaacgcagagctcgattccccatgcttcggctcctgtgccattaccgacggcagcgccaatgcctcgggcgacgagcaatacaagcgccgcaagaggcacgccacggaggaagccaagtcaaggcagaggaagtgagatttcaggaccatctttacccaattcgacagtgcagcggcctcggaatggacatagcgagtccggccacggcaattctcgcgagagggcctatagtgagcggaggcccgtggatgatattctcggcgccgaagctcagccgcactcgccacggacatagcaaacggcagtctattttccgcagcacttctgtactgtaatgcaccaacgatttcagcgaattcttgggccccactggcactatatggtgtcctttttagtgcacttcaacttgggggatattgtttcgaagcatggcatggagtttgttcagtaaaaagtaaggagtttggtctcgggcggggatatctgactgcattttaggccgtcatagtgggaaactcaaatcagctgagccattgaattcacataagcgagtatatgtggaggaacaaacaggtatataagggatgggtatatgtattatatactacccgactttgtctgggtctaagtgttatatgaagaagcctgaatacatatggtgagaaggtgatgaatctagcacgggatgagatggcccctctcctttatgcgatttaggaagcaatcactaaacaaagcacatgatagtgtgacaatcaatcgaactaatctaaccgtcgctgttcacgtttatgggcgcagacaaccagggcatataactacatacctaatgtacctaggtattccagccacggcctgccagcggtagcttagtgtgtaagacacaaacagctacctatggcaatgctgctcacctggcagcctagtgaagccaacgaaggcgtgtaagtcaatggcagtacctcgatgcatgctgttgacggcggcatgcaaagaggactgccacgctcgtgtaccaagactcgacttggccaggtaaagcagacgaggcaagccaatcatgtacctacgatcggggataggggaaaacgggagtgggattggcgtgtgagggggggccataattcgctacttcgcatgcctccaccggccaatctgcaatgcgtaaattggcaattatttcagtgctcctgacccgaccctggcctgccgtcgtcgacttggtcgcatcttccaaaccttggggttcatttctatcgcgtcgagctatctagcacgacatttgcatctcaccgcgctgcattgtcttcatttatcgcgttcctcgtggtcgagtcgagcgcatagcgacaagccgaccagccttattctgttccgtccgtggatgacttcactcctttagcatcttcggaacgcggccattcgatctcgcactcgagcccgtcgcggcagacggttcagttgcatcctcgcgcatcatcctcaacctcactatacgctacctgtaacagccatcagatctcgcagcgatggcatcttccgagccgttcccactgctgagcacccccgcggaccagctgcgctctgtcgcggagcagaacacggcacgccgacgtaggaagtcgagtctccccgtcgagatccgcgccggcgacacgggcgcgcccagcctgcagacgagcctcgagactctgcagagcagccccggcacgccgtccaaggcggtcgatgcctccagcaggaagggctccaagcgccgcaaggcacgctcggccctgcgccgcttccagcacttcagcctcaagcacacctgggtgctgcccctgatgctgctcgtcctcttcggcctcgcctacgccgtcaacccctccgagtccaaccccgtccaccgcttcatcttcctctcctaccgcatgcccccccaccccgacgccgcccccggcacgcccccccagtacggcaaggggccctgggacatcgccttcttcagcttctacaccgtcgtgctctccttcacccgcgagttcatcatgcagcagttcctcaggcccctgtcccgcgccgccggtctcaagtcgcgcggcaagcaggcccgcttcatggagcaggcatacacggccatctacttcggcttcctgggccccgccggcctgtacgtcatgaagcagacccccatctggtacttcaacacacgtgctttctacgaggacttcccccacaagacgcacgtcgccggcttcaagttctactacctgttccaggccgcatactgggcccagcaggccatcgtgctcttgatcggtctcgagaagccgagaaaggactacaaggagcttgtcggtcaccacatcgtcagtctggctctgattgctctctcctatcgcttccatttcacctacctcggcatcgccgtctacataacccacgacatctccgacttcttcttggcgacgtccaaggtcctcaattacgttgaccattggctggtcgggccttatttcttcgttttcatgtgtgtgtggacgtatctacgccacttcctcaacttgcgctttatctggtctctcttcaccgagttcaagacggttggcccctacgagctcaactgggagaccgagcagtacaagtgcgacattgctttcgtcatcaccttcacattgctcgcctctcttcaggcactgaatctcttctggatgttcttcattgtcaggattgcctatcgctttgtcgtgtaccagactgccgacgatgaccgctcagaggccgaagaatccgagcttgaagaaatggaacgcgaaaagaaggccaaagaggccaaggcgctgctcaacagtccggcgactggagccaacgtgcagctgaatggctctgtcaagagccgcgccaacggggcggcgcccaagaagaaggcgtcccgatagttcgttatgaacagcgacctcaatcaattgcttactcttcgttggtaggccggggaccttaaagcgataatctgtatgatcgtaactccgcggtacagttaacaccacggcggctcaccgtatgagtggacacaacaggaacagggcagtctccggtgggaccccaaactgtagtaaaaatgccctgtaaagatctatcaagatattatagaacagcacgttagcccgtgggcctttggggcagaagagaagtgttatcgccttgaggtgaggttacggtattaagtatcatgggtaactcgctgcgctggtagccccctggaatatcaatatcatcgtcatatatttagttggataacggatactaggccttggttgcttggctccaaccttcgtcgacggctagaagacagtgacgaaaaattatgaggggaaaaacagaaggtatggactggggtgcatggttcaagaaggtgatgaaaaatggctttacgactttaactcctccattcacttcttgtcacataactgccggatacataataatacctaatcgagaaaggaaacatatgtttaaacttttgcaatttactttactgattggcccgtccagccagccaatgttcctgttggtcaactctaactcttaagaaatcgttacttacgaagtacgtaggaattcgagagcaaacccaagttaggtagtagatagatgaatggtactctattattctatgatgataatcattagctatgtagaaatagcttatgccgttctaattgactatcataacaatgattttgattagatgctttatcaagtgtcccgctgttaactattctaagttgatgtcagtctgtagatgggatatcctctattccatttactgcctagaaaaccccctaatcaaaactttccttcttcatgaccaacgatagatcatctgctccctccatctcatcttctgaagcaaattttaggaaatcatgtgtttaacaactgggtctattacatccgatagaagccgcctcatctccctttacccgtccctcacttttagcctttcgtcatcatctagctatgccaatgctatcataatcactaaacataactagtactcaactgcgcctccatcagatgacaaagtgacaaaagaacttttcaaacttatgtaagtatgtccgtatcctaaagtacatcaatatattcacctcggggtaccaatcaacacaccttataggatcactccctccctcccaacttaccttaaccccttcggcacttccacacgtcatgcacaggaaaaaatctccattcgtaaactaccgtagtcttcgctagtgcacctcatacctcatgcatcaagcccaaaaagaaggattaataaacgagccggatccaaacatcccactatatcaagtctcggtagtgtacgttacgcccctgcatatcgacacctgaaaggtcctcttgcatgcgcctacatattctaacaatacgtaaggtaggtagcgctgcatcatgtatgtatgtctttctgtacgcacagatatgcgtctctatatgtaggtctatgtatgtctatgtatgtctctgcctcgtgtatgtatgtacgtccatccatccatacatacataatcaaatcgccattgattaatatacatcaattactaccattcaagccccatacagccgttcaaccgcccatgcggtaccaaaaacggagtagtatcgtgtcggcagtcgcagtctctttcctccaatgatctaccaatgcaagccaaggtctcgaccgtcaataagcttataccatccaccactcccacaatatgatc

SEQ ID NO: 15625 - DNA, 2118 bp, Muscodor strobelii
  misc_feature: SGI cDNA ID NO. 565179
  misc_feature: Reduced expression when VOC is produced
  misc_feature: Encodes the peptide sequence at SEQ ID NO 15626
atgggctgggttcagccgcccgatgctgtggcacgccgcggaggcatcatcgcgactgggttgtcgggcgatggagccgaagctctcgccgtgccccggcccgaagactttcgcgatcccttctacgcttccgtgtttccgcaatgctacgcactggctgctaccaccgtcctcgcctatcttctgttgatcatgctcgtcattgccccgagatcgttcttggatggaggtgttgtcacgctcggacggcgcggctttaccaacggccattccaatggcatcaccatcggcggccggccctggctgcagaaggtcgcgacactcttcgtcgccatatcgctgaccatcgcaagcaacgacacgttccgtgttgccgaggaccagtactccaacggcaacttcgacgcacagaagctgcagcagatggttctggatggtacccagctgcaggtcatccgcctgatatcagacacctttctctggctggcccaggcccagactttgatccgtctattcccgcgtcagcgcgagaaaatcatcatcaaatggaccgccttctctctcatttccctcgatgtcatcttcagtgccctcgacgccttcaaatacaaaggcacgacaggtgccagaccgcagcaattcaccgaggccattcccgcactgagctacctcttccaattgtccctcgggcttctatatgccgcctgggtcctctactacgccgtgaccaagaagaagtatgcgttttaccatccactgatgaagaacatttccttatgtgcagttctatccatcgcctctttgcttattccggtcactttcttcatcttggatatcgccgagccgacatttacagtttggggtgactatgttcgatgggttggcgctgcggctgcgagtgtcgtggtatgggaatgggttgagcgcattgaagcgttggaacgagaagaaaagaaggacggcgttttggggcgtgagattttcgatggggatgagctcatagaagtatcgccttcagaccttgggtggcctagccggaggaagcacaaggaggccggtggggatggagatcagggcgaaagcggtataagtcgcttctctggagaccgcggcaacatgtggccagcgatgtccaacatcgccaggcgataccgccccagatcctcgggcaccccgagccagtcgcaaggtacgacggctgtgcagaccgaaacaacgggcagatatatggcaagattacggcgaccacctctttggccggcaagaccacccccagccgccacaccagttagcagaacagacactgccagtcccgacagtacaatctatgctgtccgatatcagccgctcacagagacgacctcgagaaccacagacgaaagacgaaggtcaccgtcaaggggtgagacggccacttcttcgtctgcccatggagtaatagagaacgcagaggctggaatcaatcgtgtggaagtccagcaaacccaggtcacggagagcacgaagaatgggaacaccgggcccgtcggtcgttttgggcaactcaaacagttgaatatatttcaacggagaggccacgatctaccggccgaatgtgcacctcatgccatagcgaataagccaggcgtgggccatgggcacgagacgttgtcgaggtgggacatcagaagtcgaatagaggccttcacggcttcacaggcagataggatactgcaacagatacggccagcacctgacaccgaaagcctaacggtgactgtcattcctgcgccagcccgccgtggcgcagctctagcacaattactagaggaggaggaactccaaacgcagagctcgattccccatgcttcggctcctgtgccattaccgacggcagcgccaatgcctcgggcgacgagcaatacaagcgccgcaagaggcacgccacggaggaagccaagtcaaggcagaggaagtgagatttcaggaccatctttacccaattcgacagtgcagcggcctcggaatggacatagcgagtccggccacggcaattctcgcgagagggcctatagtgagcggaggcccgtggatgatattctcggcgccgaagctcagccgcactcgccacggacatag

SEQ ID NO: 15626 - protein, 705 aa, Muscodor strobelii
  misc_feature: SGI Peptide ID NO. 565179
  misc_feature (1)..(341): Pfam Id: PF08733 Pfam Desc: PalH/RIM21
  misc_feature (36)..(341): Pfam Id: PF08733 Pfam Desc: PalH/RIM21
  misc_feature (7)..(611): NCBI GI: 85082841 Blast Desc: NCU00007 [Neurospora crassa OR74A] gi|73921610|sp|Q7RY98.1|PALH_NEUCR RecName: Full=pH-response regulator protein palH/rim-21 gi|28918077|gb|EAA27758.1| crassa
  misc_feature (32)..(609): NCBI GI: 256729887 Blast Desc: NECHADRAFT_47031 [Nectria haematococca mpVI 77-13-4]
  misc_feature (32)..(639): NCBI GI: 46122293 Blast Desc: FG05524.1 [Gibberella zeae PH-1]
  misc_feature (4)..(610): NCBI GI: 116207456 Blast Desc: CHGG_03021 [Chaetomium globosum CBS 148.51] gi|88183618|gb|EAQ91086.1| CHGG_03021 [Chaetomium globosum CBS 148.51]
  misc_feature (36)..(625): NCBI GI: 154309214 Blast Desc: BC1G_07501 [Botryotinia fuckeliana B05.10] gi|160112708|sp|Q5V9L7.2|PALH_BOTFB RecName: Full=pH-response regulator protein palH/RIM21 gi|150852325|gb|EDN27517.1| B05.10]
  misc_feature (36)..(625): NCBI GI: 50726906 Blast Desc: PalH [Botryotinia fuckeliana]
  misc_feature (36)..(597): NCBI GI: 156058372 Blast Desc: SS1G_03197 [Sclerotinia sclerotiorum 1980] gi|154700985|gb|EDO00724.1| SS1G_03197 [Sclerotinia sclerotiorum 1980]
  misc_feature (32)..(455): NCBI GI: 39977075 Blast Desc: MGG_06440 [Magnaporthe grisea 70-15] gi|73921609|sp|Q52E66.1|PALH_MAGGR RecName: Full=pH-response regulator protein palH/RIM21 gi|145016143|gb|EDK00633.1| grisea
  misc_feature (32)..(352): NCBI GI: 261358492 Blast Desc: pH-response regulator protein palH/RIM21 [Verticillium albo-atrum VaMs.102]
  misc_feature (36)..(533): NCBI GI: 67541432 Blast Desc: AN6886.2 [Aspergillus nidulans FGSC A4] gi|68052825|sp|Q9P904.1|PALH_EMENI RecName: Full=pH-response regulator protein palH/RIM21 gi|7958612|gb|AAF70858.1|AF152926_1
  misc_feature: Useful for introducing or modulating the production of volatile compounds
MGWVQPPDAVARRGGIIATGLSGDGAEALAVPRPEDFRDPFYASVFPQCYALAATTVLAYLLLIMLVIAPRSFLDGGVVTLGRRGFTNGHSNGITIGGRPWLQKVATLFVAISLTIASNDTFRVAEDQYSNGNFDAQKLQQMVLDGTQLQVIRLISDTFLWLAQAQTLIRLFPRQREKIIIKWTAFSLISLDVIFSALDAFKYKGTTGARPQQFTEAIPALSYLFQLSLGLLYAAWVLYYAVTKKKYAFYHPLMKNISLCAVLSIASLLIPVTFFILDIAEPTFTVWGDYVRWVGAAAASVVVWEWVERIEALEREEKKDGVLGREIFDGDELIEVSPSDLGWPSRRKHKEAGGDGDQGESGISRFSGDRGNMWPAMSNIARRYRPRSSGTPSQSQGTTAVQTETTGRYMARLRRPPLWPARPPPAATPVSRTDTASPDSTIYAVRYQPLTETTSRTTDERRRSPSRGETATSSSAHGVIENAEAGINRVEVQQTQVTESTKNGNTGPVGRFGQLKQLNIFQRRGHDLPAECAPHAIANKPGVGHGHETLSRWDIRSRIEAFTASQADRILQQIRPAPDTESLTVTVIPAPARRGAALAQLLEEEELQTQSSIPHASAPVPLPTAAPMPRATSNTSAARGTPRRKPSQGRGSEISGPSLPNSTVQRPRNGHSESGHGNSRERAYSERRPVDDILGAEAQPHSPRT

SEQ ID NO: 15627 - DNA, 7203 bp, Muscodor strobelii; identical to SEQ ID NO: 15624
  misc_feature: SGI EST ID NO. CUFF.37628.1
  misc_feature: Variant of the nucleotide sequence at SEQ ID NO 15625

SEQ ID NO: 15628 - DNA, 507 bp, Muscodor strobelii
  misc_feature: SGI cDNA ID NO. 565180
  misc_feature: Encodes the peptide sequence at SEQ ID NO 15629
atgaacaccttccgcgtcgcccgcgcagctctgcgagctcgccctgctgccatgcggctgcctgttcagcctctgcagcgccgggcatacgccgatgctgcccccgataagatcaagctcagcttgtctcttccccaccagtccatctacacctcacaggacgtcgtccaggtcaacatccccgccgagtctggagagatgggtgtccttgccaaccacgtcccatctatcgagcagttgaagcctggtctgattgaggtcatcgaggagagcggatccagcaagcagttcttcctgtctggtggcttcgctactgttcaacccaactcggtcctgagcatcaacgcggttgagggctaccctttggaggatttcagcgcagaggctgtcaaggctcagattgctgaggcgcagaaggtggccaatggcagtggaagcgagcaggacgttgctgaggccaaaattgaactcgaggttctggagagcttgcaggccgttctcaaatag

SEQ ID NO: 15629 - protein, 168 aa, Muscodor strobelii
  misc_feature: SGI Peptide ID NO. 565180
  misc_feature (37)..(118): Pfam Id: PF02823 Pfam Desc: ATP synthase, Delta/Epsilon chain, beta-sandwich domain
  misc_feature (45)..(111): Pfam Id: PF02823 Pfam Desc: ATP synthase, Delta/Epsilon chain, beta-sandwich domain
  misc_feature (1)..(168): NCBI GI: 169595170 Blast Desc: SNOG_00319 [Phaeosphaeria nodorum SN15] gi|160701031|gb|EAT91814.2| SNOG_00319 [Phaeosphaeria nodorum SN15]
  misc_feature (1)..(168): NCBI GI: 145615661 Blast Desc: ATP synthase subunit delta precursor [Magnaporthe grisea 70-15] gi|145022448|gb|EDK06468.1| ATP synthase subunit delta precursor [Magnaporthe grisea 70-15]
  misc_feature (1)..(168): NCBI GI: 70990422 Blast Desc: ATP synthase delta chain, mitochondrial precursor [Aspergillus fumigatus Af293] gi|66847692|gb|EAL88022.1| ATP synthase delta chain, mitochondrial precursor, [Aspergillus ATP
  misc_feature (1)..(168): NCBI GI: 261196376 Blast Desc: ATP synthase F1 epsilon subunit [Ajellomyces dermatitidis SLH14081] gi|239595836|gb|EEQ78417.1| ATP synthase F1 epsilon subunit [Ajellomyces dermatitidis SLH14081] ATP F1
  misc_feature (1)..(168): NCBI GI: 164429048 Blast Desc: ATP synthase delta chain, mitochondrial precursor [Neurospora crassa OR74A] gi|51704300|sp|P56525.2|ATPD_NEUCR RecName: Full=ATP synthase subunit delta, mitochondrial; AltName:
  misc_feature (1)..(168): NCBI GI: 156051296 Blast Desc: ATP synthase delta chain, mitochondrial precursor [Sclerotinia sclerotiorum 1980] gi|154704833|gb|EDO04572.1| ATP synthase delta chain, mitochondrial precursor [Sclerotinia 1980]
  misc_feature (1)..(168): NCBI GI: 119497145 Blast Desc: ATP synthase delta chain, mitochondrial precursor, [Neosartorya fischeri NRRL 181] gi|119413499|gb|EAW23440.1| ATP synthase delta chain, mitochondrial precursor, [Neosartorya NRRL
  misc_feature (1)..(168): NCBI GI: 259489503 Blast Desc: TPA: ATP synthase delta chain, mitochondrial precursor, (AFU_orthologue; AFUA_1G03100) [Aspergillus nidulans FGSC A4]
  misc_feature (1)..(168): NCBI GI: 145229221 Blast Desc: An01g04930 [Aspergillus niger] gi|134055020|emb|CAK37027.1| protein product [Aspergillus niger]
  misc_feature (1)..(168): NCBI GI: 212539488 Blast Desc: ATP synthase delta chain, mitochondrial precursor, [Penicillium marneffei ATCC 18224] gi|210067198|gb|EEA21290.1| ATP synthase delta chain, mitochondrial precursor, [Penicillium
MNTFRVARAALRARPAAMRLPVQPLQRRAYADAAPDKIKLSLSLPHQSIYTSQDVVQVNIPAESGEMGVLANHVPSIEQLKPGLIEVIEESGSSKQFFLSGGFATVQPNSVLSINAVEGYPLEDFSAEAVKAQIAEAQKVANGSGSEQDVAEAKIELEVLESLQAVLK

SEQ ID NO: 15630 - DNA, 1168 bp, Muscodor strobelii
  misc_feature: SGI EST ID NO. CUFF.37035.0
  misc_feature: Variant of the nucleotide sequence at SEQ ID NO 15628
gcttaaggaccagactcggccaggcagagttcactgcctatggggacgtgttataaacctctcccgtgttatccacaaagctaactagcttacaccggtatgagaaattggttgagcacctaggttcagatgaatgcaaataccaatctaaagtcgatgacactgaagaattcaagcagtgacctttttgacaatgggatgaagcgtactattcaatcgatattgctcggctgccacctaatacctatgcccacacctcatgagaacttgacctgcttagaggtggattgctgagtcacgtgactcgtcgattgagcttgggcctcattgccgaatcaggcctggcgcaattcgaagattccgcgccgtcccgacctctgctcagcactgcgtctcaatttgctgccgtcgtctatcgcaagcctcgtctcgtcacgaatcccttcaattgacaccacccgtcatcatgaacaccttccgcgtcgcccgcgcagctctgcgagctcgccctgctgccatgcggctgcctgttcagcctctgcagcgccgggcatacgccgatgctgcccccgataagatcaagctcagcttgtctcttccccaccagtccatctacacctcacaggacgtcgtccaggtcaacatccccgccgagtctggagagatgggtgtccttgccaaccacgtcccatctatcgagcagttgaagcctggtctgattgaggtcatcgaggagagcggatccagcaagcagttcttcctgtctggtggcttcgctactgttcaacccaactcggtcctgagcatcaacgcggttgagggctaccctttggaggatttcagcgcagaggctgtcaaggctcagattgctgaggcgcagaaggtggccaatggcagtggaagcgagcaggacgttgctgaggccaaaattgaactcgaggttctggagagcttgcaggccgttctcaaatagactgtatagagcattctgtcaccctaacttgtacatcattattccccaaaaacttcaggagcgaatcaagaagacctctaattttaatcctcgtgcctacccagacatgtgaatgacgttatatccaatgtgctgtgctgcttcccaagctttaagcgctgcttcccacgttatcttacatgtgctacatgttac

SEQ ID NO: 15631 - DNA, 2274 bp, Muscodor strobelii
  misc_feature: SGI cDNA ID NO. 565181
  misc_feature: Reduced expression when VOC is produced
  misc_feature: Encodes the peptide sequence at SEQ ID NO 15632
atgcaggacccaagtcgtgaccctgccacgtcaagtgtgctggcgtgggcttccctggatacagagaacgccatagaagatgaaacggcgagcgatgtagacgagccccccgacaacacatgtggtattggttcttcagacagcaacttcaaaaggagcgctgtcttgaagactgccgagcatacggaatcactcttgacgaaggcgctccatcagtctagcgatgagacccgattccaattcagtacttcacccacgagacgccgttcaatgaacagcagtattagcctcgcatcaacggccgatcttacgagcgacacaggattcaccagtccggctcgcacgaatacgcctagtcccccaccccctatgttctccttggggaaaggtcatggtgacatgtaccacacgaaaagaaagatcatcacttcggctgacctcacaccaaaaccgtccgcgcgcctagtctctgcttcggtcaagttccccgatggaacaaacgaccctgctgttcagactctgaagcagaagcgatgcatctcgtttgcatgtggcaaccctcaatctaaaaagcctgcgaaccagcagccacttgaggaagtcaaggcgatgacagaggacaagccgcaacgcaaaagctgcattagatttgcgtgcccagctaaagtgtccaccaagactggctctcctaagcctcagaacatgacctccgattcgttccgcaccgagactcctgctaggcaacaaaagcctgtttccccagctacatctcgtaaacatcgctcaccttcggtcaaccgcggccggcagccacgatctgtaactccgcgacctgtcaccggaagtcacacggatgctcggtcttccagatatcttactgcgaacgcgcacgacttgaatacagaatcatcacatttccatgaatttgcaagcgatgaaccacgagaagaggattggattaagcagaacccgctttcgataaccacgcgcctgaccattaacgacacgcttcgcaaagagaatgagattcgtcgccttggcaaagaggccgaagaagaagctctggaagaagaagagcaagaagaggaagagcaagatgatgtggatctggacgccgacgacgacagcggtcttctagacgacgatgaaggtttcgaagatgaggacgttgaagacgaagagaattttgacgatcattccaattaccattctgatgaagaagtttcggatggatacaacactgacaacgagatcggctttgctgattctgatgatgatgatgaaaacctacagttgtggacaccgagtaaagggctcgccgtgcgattgccaggggactcccccatcaaccgtcgaccctccttgaaaggtgacgcctctgactcctcactatcctcagatggcgggaatacgtctcaaagagtacgcgagaagaggcgccgcatcaagatccgacctggtacccctgaattgcctgacagcaccgactttgtatgcggtactttggacgaagatcgcgctcttgaagatgcttatatatcgtgcgtggcagccaggcggagagaaaagcttcacgtaattcctcaagacattgatcccagcttccccacttcggaacccgaagaagaggaagaagtcgatccagtaagacatggccatgacagcgacgagcagctctggattcatggtgaacttgaggatctccaccacaccaaggatcatcaagaggtcgatcgacgtaagaaaaagtgcggtcaaacgtcacctcgacgctaccattcaccgccaccaaaatgccgagggcggtcaccgcggcggctctttgacaggcactcccctcgccgagttccatctcctgcgccgggccggatgatgcggtccccgccggcatcccttgtgcagggtgtgaattttgctcctgccgagttcaagacgcttgcctttcgtcccggtttaactcataccaaatccttgccacgggccccagccatctttccgcagcacgtcaagtgccatcgccggtccggaaaggcgacgcagtcaaaaggccacgtgcgcggtgccatcgacatcgtgaaaggacttgagcaaaagcgccagcgccggacagagaagttcaaggagaaataccttcagaagcacaacaacaaggcgcgaaagggccaactagtgcagacacggccacaacccggccaaggagctcagcgcatgcgcgagatcggactcctctcggcaggcaaagtcgggcctgatcaatacgtgctgtccgtctag

SEQ ID NO: 15632 - protein, 757 aa, Muscodor strobelii
  misc_feature: SGI Peptide ID NO. 565181
  misc_feature (7)..(757): NCBI GI: 145615659 Blast Desc: MGG_13168 [Magnaporthe grisea 70-15] gi|145022447|gb|EDK06467.1| MGG_13168 [Magnaporthe grisea 70-15]
  misc_feature (7)..(757): NCBI GI: 171685726 Blast Desc: protein product [Podospora anserina] gi|170942824|emb|CAP68477.1| protein product [Podospora anserina]
  misc_feature (32)..(757): NCBI GI: 256732843 Blast Desc: NECHADRAFT_68711 [Nectria haematococca mpVI 77-13-4]
  misc_feature (28)..(757): NCBI GI: 46124539 Blast Desc: FG06647.1 [Gibberella zeae PH-1]
  misc_feature (21)..(757): NCBI GI: 156051302 Blast Desc: SS1G_07058 [Sclerotinia sclerotiorum 1980] gi|154704836|gb|EDO04575.1| SS1G_07058 [Sclerotinia sclerotiorum 1980]
  misc_feature (407)..(757): NCBI GI: 116207210 Blast Desc: CHGG_02898 [Chaetomium globosum CBS 148.51] gi|88183495|gb|EAQ90963.1| CHGG_02898 [Chaetomium globosum CBS 148.51]
  misc_feature (26)..(635): NCBI GI: 154316027 Blast Desc: BC1G_03598 [Botryotinia fuckeliana B05.10] gi|150846385|gb|EDN21578.1| BC1G_03598 [Botryotinia fuckeliana B05.10]
  misc_feature (194)..(734): NCBI GI: 261354101 Blast Desc: conserved [Verticillium albo-atrum VaMs.102]
  misc_feature (27)..(757): NCBI GI: 240111138 Blast Desc: CPC735_069730 [Coccidioides posadasii C735 delta SOWgp]
  misc_feature (26)..(757): NCBI GI: 145229045 Blast Desc: An01g04030 [Aspergillus niger] gi|134054927|emb|CAK36939.1| protein product [Aspergillus niger]
  misc_feature: Useful for introducing or modulating the production of volatile compounds
MQDPSRDPATSSVLAWASLDTENAIEDETASDVDEPPDNTCGIGSSDSNFKRSAVLKTAEHTESLLTKALHQSSDETRFQFSTSPTRRRSMNSSISLASTADLTSDTGFTSPARTNTPSPPPPMFSLGKGHGDMYHTKRKIITSADLTPKPSARLVSASVKFPDGTNDPAVQTLKQKRCISFACGNPQSKKPANQQPLEEVKAMTEDKPQRKSCIRFACPAKVSTKTGSPKPQNMTSDSFRTETPARQQKPVSPATSRKHRSPSVNRGRQPRSVTPRPVTGSHTDARSSRYLTANAHDLNTESSHFHEFASDEPREEDWIKQNPLSITTRLTINDTLRKENEIRRLGKEAEEEALEEEEQEEEEQDDVDLDADDDSGLLDDDEGFEDEDVEDEENFDDHSNYHSDEEVSDGYNTDNEIGFADSDDDDENLQLWTPSKGLAVRLPGDSPINRRPSLKGDASDSSLSSDGGNTSQRVREKRRRIKIRPGTPELPDSTDFVCGTLDEDRALEDAYISCVAARRREKLHVIPQDIDPSFPTSEPEEEEEVDPVRHGHDSDEQLWIHGELEDLHHTKDHQEVDRRKKKCGQTSPRRYHSPPPKCRGRSPRRLFDRHSPRRVPSPAPGRMMRSPPASLVQGVNFAPAEFKTLAFRPGLTHTKSLPRAPAIFPQHVKCHRRSGKATQSKGHVRGAIDIVKGLEQKRQRRTEKFKEKYLQKHNNKARKGQLVQTRPQPGQGAQRMREIGLLSAGKVGPDQYVLSV

SEQ ID NO: 15633 - DNA, 3590 bp, Muscodor strobelii
  misc_feature: SGI EST ID NO. CUFF.37046.0
  misc_feature: Variant of the nucleotide sequence at SEQ ID NO 15631
aaaatacggtacagtggacattggccactacccaaaccggcgagttacctaccacaaccaacttcgcaggtggcacccacaccagccgcccgctctcctgtcctccacgttcttaaggctacctctcttgcccaccttcatctccctcacttgagacaccctcacttctctcgtgcaaaagtcaagtcaatcagaggggaagtcgtcggctttcatagtcgacgcttggcctcacccgcttcaccgggactcgtcgaagatcttcagacactgcacataccacagactctgcgccactcatccgacgtcagtaggagtcgcctcttaggaccttgcgccttggtcacatcccctgtttcttggtaaacagccattcctctggcgcgcactcgacgtcaaacgtctctggtttgcttggcttgtcgcactcccgttacattcgtctcttttcctaatcccatcacccattctcaacagccctcgacaatcatggctctagaattatagcaacgcggtccctagggacacacacaaccacgcttcttctagccaagaaacgacggttacgcactcagtgcacggatcttagattcacttggtcatacatcatcttcaccttgaacctcctactacgctcaaaccagagtctcaaccagacataaccccctggcctgcgacagtcgatactgtcatatcgactgatcactgaggatcgttttgagcctcaacagctaagcctcatcttagtatttcagtcgagcattcatttcgacccccatcacgatgcaggacccaagtcgtgaccctgccacgtcaagtgtgctggcgtgggcttccctggatacagagaacgccatagaagatgaaacggcgagcgatgtagacgagccccccgacaacacatgtggtattggttcttcagacagcaacttcaaaaggagcgctgtcttgaagactgccgagcatacggaatcactcttgacgaaggcgctccatcagtctagcgatgagacccgattccaattcagtacttcacccacgagacgccgttcaatgaacagcagtattagcctcgcatcaacggccgatcttacgagcgacacaggattcaccagtccggctcgcacgaatacgcctagtcccccaccccctatgttctccttggggaaaggtcatggtgacatgtaccacacgaaaagaaagatcatcacttcggctgacctcacaccaaaaccgtccgcgcgcctagtctctgcttcggtcaagttccccgatggaacaaacgaccctgctgttcagactctgaagcagaagcgatgcatctcgtttgcatgtggcaaccctcaatctaaaaagcctgcgaaccagcagccacttgaggaagtcaaggcgatgacagaggacaagccgcaacgcaaaagctgcattagatttgcgtgcccagctaaagtgtccaccaagactggctctcctaagcctcagaacatgacctccgattcgttccgcaccgagactcctgctaggcaacaaaagcctgtttccccagctacatctcgtaaacatcgctcaccttcggtcaaccgcggccggcagccacgatctgtaactccgcgacctgtcaccggaagtcacacggatgctcggtcttccagatatcttactgcgaacgcgcacgacttgaatacagaatcatcacatttccatgaatttgcaagcgatgaaccacgagaagaggattggattaagcagaacccgctttcgataaccacgcgcctgaccattaacgacacgcttcgcaaagagaatgagattcgtcgccttggcaaagaggccgaagaagaagctctggaagaagaagagcaagaagaggaagagcaagatgatgtggatctggacgccgacgacgacagcggtcttctagacgacgatgaaggtttcgaagatgaggacgttgaagacgaagagaattttgacgatcattccaattaccattctgatgaagaagtttcggatggatacaacactgacaacgagatcggctttgctgattctgatgatgatgatgaaaacctacagttgtggacaccgagtaaagggctcgccgtgcgattgccaggggactcccccatcaaccgtcgaccctccttgaaaggtgacgcctctgactcctcactatcctcagatggcgggaatacgtctcaaagagtacgcgagaagaggcgccgcatcaagatccgacctggtacccctgaattgcctgacagcaccgactttgtatgcggtactttggacgaagatcgcgctcttgaagatgcttatatatcgtgcgtggcagccaggcggagagaaaagcttcacgtaattcctcaagacattgatcccagcttccccacttcggaacccgaagaagaggaagaagtcgatccagtaagacatggccatgacagcgacgagcagctctggattcatggtgaacttgaggatctccaccacaccaaggatcatcaagaggtcgatcgacgtaagaaaaagtgcggtcaaacgtcacctcgacgctaccattcaccgccaccaaaatgccgagggcggtcaccgcggcggctctttgacaggcactcccctcgccgagttccatctcctgcgccgggccggatgatgcggtccccgccggcatcccttgtgcagggtgtgaattttgctcctgccgagttcaagacgcttgcctttcgtcccggtttaactcataccaaatccttgccacgggccccagccatctttccgcagcacgtcaagtgccatcgccggtccggaaaggcgacgcagtcaaaaggccacgtgcgcggtgccatcgacatcgtgaaaggacttgagcaaaagcgccagcgccggacagagaagttcaaggagaaataccttcagaagcacaacaacaaggcgcgaaagggccaactagtgcagacacggccacaacccggccaaggagctcagcgcatgcgcgagatcggactcctctcggcaggcaaagtcgggcctgatcaatacgtgctgtccgtctagcaagttcggaccaccatttctagtatattttacacacctggcgttacgatgctgcgctgggtttttcataaattcatgatgtacatattttccaaggacttccccttcgtttgcgttacggcctacacgaatttcttttgtctcggacctcggaagcttctctagaagcgagaacgtggagtttcccgctggtggtatcgggcggattgcactgatttcggaataccaattgggaaggcacattagcatggggtggcgcaataccaacagacacagagagagacgatagccgtcttgcagaaattgccgtcttcaatgatactattttatatcaccattgcgtctcccaaggttgagactactccatcacatgaatttgaatagcagtgcttcgtgatccgttttgccctgtagatatgatgcacacacggccagtccgagcaattgaatctgtgccttggtgaatagaagcgacatgttcggatgcaagaccgacttattgtggatacatgtatcgcgagaaatgtttcctc

SEQ ID NO: 15634 - DNA, 570 bp, Muscodor strobelii
  misc_feature: SGI cDNA ID NO. 565182
  misc_feature: Encodes the peptide sequence at SEQ ID NO 15635
atgtggatgattcaatggttctacgatgttctctcgtcgctcggcttgatgaacaagcatgccaagctgctcttcctcggtctcgataatgctggcaagaccacgttgttacatatgctaaagaacgaccgcgttgccattctccaacccactctccaccccacatccgaagaactggccatcgggaatgtccgcttcaccaccttcgacctcggcggccaccaacaggctcgccggctgtggaaggactacttccccgaagtaaacggcatcgtcttcctcgtcgacgccaaggaccacgagcgtctgccagaatcgaaagccgagatcgacgctctactgtcgatggaggagctcagcaaggttcccttcgtggtccttgggaacaagatcgaccatcctgatgcaatttccgaagaccagctgcgtcacgagctcggtctctaccagaccactggcaagggcaaggttcctctggacggcatccggcccattgaggtcttcatgtgctcggtggtcatgcgccaaggctatggcgagggcatcagatggctctcccaatacgtctaa

SEQ ID NO: 15635 - protein, 189 aa, Muscodor strobelii
  misc_feature: SGI Peptide ID NO. 565182
  misc_feature (6)..(189): Pfam Id: PF00025 Pfam Desc: ADP-ribosylation factor family
  misc_feature (22)..(132): Pfam Id: PF08477 Pfam Desc: Miro-like protein
  misc_feature (1)..(189): NCBI GI: 39976919 Blast Desc: GTP-binding protein SAR1 [Magnaporthe grisea 70-15] gi|74588165|sp|Q5EMZ6.1|SAR1_MAGGR RecName: Full=Small COPII coat GTPase SAR1 gi|59802891|gb|AAX07657.1| GTP-binding protein-like
  misc_feature (1)..(189): NCBI GI: 171685728 Blast Desc: protein product [Podospora anserina] gi|170942825|emb|CAP68478.1| protein product [Podospora anserina]
  misc_feature (1)..(188): NCBI GI: 158564256 Blast Desc: protein product [Podospora anserina] gi|170942825|emb|CAP68478.1| protein product [Podospora anserina]
  misc_feature (1)..(189): NCBI GI: 256732844 Blast Desc: [Nectria haematococca mpVI 77-13-4]
  misc_feature (1)..(189): NCBI GI: 169771007 Blast Desc: [Aspergillus oryzae RIB40] gi|238486496|ref|XP_002374486.1| small monomeric GTPase SarA, [Aspergillus flavus NRRL3357] gi|74663790|sp|Q877B9.1|SAR1_ASPOR
  misc_feature (1)..(189): NCBI GI: 121702803 Blast Desc: small monomeric GTPase SarA, [Aspergillus clavatus NRRL 1] gi|158512634|sp|A1CRG9.1|SAR1_ASPCL RecName: Full=Small COPII coat GTPase sar1 gi|119397809|gb|EAW08240.1| small GTPase
  misc_feature (1)..(189): NCBI GI: 145229047 Blast Desc: small monomeric GTPase SarA, [Aspergillus clavatus NRRL 1] gi|158512634|sp|A1CRG9.1|SAR1_ASPCL RecName: Full=Small COPII coat GTPase sar1 gi|119397809|gb|EAW08240.1| small GTPase
  misc_feature (1)..(189): NCBI GI: 261354102 Blast Desc: small COPII coat GTPase SAR1 [Verticillium albo-atrum VaMs.102]
  misc_feature (1)..(189): NCBI GI: 119496795 Blast Desc: small monomeric GTPase SarA, [Neosartorya fischeri NRRL 181] gi|158512646|sp|A1D4D1.1|SAR1_NEOFI RecName: Full=Small COPII coat GTPase sar1 gi|119413333|gb|EAW23274.1| small GTPase
  misc_feature (1)..(189): NCBI GI: 70990788 Blast Desc: small monomeric GTPase SarA [Aspergillus fumigatus Af293] gi|74669779|sp|Q4WJS7.1|SAR1_ASPFU RecName: Full=Small COPII coat GTPase sar1 gi|66847875|gb|EAL88205.1| small monomeric
MWMIQWFYDVLSSLGLMNKHAKLLFLGLDNAGKTTLLHMLKNDRVAILQPTLHPTSEELAIGNVRFTTFDLGGHQQARRLWKDYFPEVNGIVFLVDAKDHERLPESKAEIDALLSMEELSKVPFVVLGNKIDHPDAISEDQLRHELGLYQTTGKGKVPLDGIRPIEVFMCSVVMRQGYGEGIRWLSQYV

SEQ ID NO: 15636 - DNA, 1676 bp, Muscodor strobelii
  misc_feature: SGI EST ID NO. CUFF.37094.1
  misc_feature: Variant of the nucleotide sequence at SEQ ID NO 15634
gggcagggggattgtgcccattgatagcgcccgtggtggcattccgggcctaagccaggtggacgattacatgctgacaggtgggcatggaaaccaccggctccgactctttacttatcttgccttgtcgaccagcaccaccaccaccttgtccggcttgctgctgcacatctcaaatcggcatccttctcacagtcatcccagcccaattgcgcacttccccttggactcgctcccgactacaaccacctgctgtgctccgcgtgggatcgtcgtcaagatgtggatgattcaatggttctacgatgttctctcgtcgctcggcttgatgaacaagcatgccaagctgctcttcctcggtctcgataatgctggcaagaccacgttgttacatatgctaaagaacgaccgcgttgccattctccaacccactctccaccccacatccgaagaactggccatcgggaatgtccgcttcaccaccttcgacctcggcggccaccaacaggctcgccggctgtggaaggactacttccccgaagtaaacggcatcgtcttcctcgtcgacgccaaggaccacgagcgtctgccagaatcgaaagccgagatcgacgctctactgtcgatggaggagctcagcaaggttcccttcgtggtccttgggaacaagatcgaccatcctgatgcaatttccgaagaccagctgcgtcacgagctcggtctctaccagaccactggcaagggcaaggttcctctggacggcatccggcccattgaggtcttcatgtgctcggtggtcatgcgccaaggctatggcgagggcatcagatggctctcccaatacgtctaagtacagaaacacgtgcgagatgcaccgatgccgcggcatcgcggctacttacacgaatgattatgcgaacattacagggaaacgaggagtttgattattctgagcttgcttgttttcattttgctggtcaaggctcgtggggatgggttaacggagtcaaacgactagagcatttctgcccattctagcaattcttttccactcgggctcccgacctcttcagaggcaaatcaccagttctccaatgcgaatctctcgagtgactaccgtgtctgctcactgcaccgcatacttgcccttgtcacaaatcagaaggtgaaaggtattcaagctgatatgccatgtctacgataccactgtgattagagcctcagtgctgaatgtattgccgtgttttctgtttactcgcggttgattcgcaacatgatgtgtgtgtgaataacgcggcacctaacccatagtcggaagtgccagagtcattgtatgaaacacgatgctccaaaaactttaagcaagtacatgtagacaccaaggcaagtaagagacagagatgtggcatcgtcagatgaccacgtgaggtaggcaccttagttgcgtagaatccaacccaaaaaggacaacccactcttggcgtacagacgtcatcattgaagacctgtgataacaccttcgtctgttccgtcagctaggataagtatcgttcatcgcaacgtgctattatttgtgtggtatagatgtcaagggatgtgctttgctttcttcagcaaccaagacgtggtttatgtagcattcggcgacgctccggactgtgggctgtcccaggcgc

SEQ ID NO: 15637 - DNA, 1338 bp, Muscodor strobelii
  misc_feature: SGI cDNA ID NO. 565183
  misc_feature: Encodes the peptide sequence at SEQ ID NO 15638
atggccgatgagaagaatcgaatctctttgccgttccttggcgccaaacgccaccataattacggctttcccgacgaggcattcgactatcagaaattgcctgatgccgaccgtgatttcctcccggccgaacacctcgaagccttcgcccaagctctctctgcctccgatcccaacccgtcgcatgacgatgcatcgtcccccactgctctgaacagcccggcgacgcggagttccatgagcttggacatcactcggtctgcttcaataggctccatcgatgcgctcggcgcgtcagggtctgcgccgggcgcgagcggcagcggctcgcatggcatgttcataacagctcagaacgactgggcgcctgtcaaccaaaaggtaaccaaacacggacgccgccgcaagaggaagaggacttccctgggcagtcgaactgtggacgagactagagaaggctatctctacggcctcctgaagtggccattcttgttcttcgtgatatcctggatcgtctttttgggcgcttcgtatctcgctacgagatcttacatctttctgtacgagcactacatagcgtggaccgggcggagagagagactgcgacggagcatgcgtgctactagtacgtatcgcgactgggtccatgcggcgaaagagatggacgcatatctgggcaatcagcgatggaaagaagagaatgaatatgcctattacgactccaagaccgtccgcagggtgtacgaccagctgcgaaagcaccgtggagcagctgaacaacaagaggccgcgctttcgggcgcgcctggagtcgaacaaacgggcctgaccacagcaaatggcagtagaacagtggtagaagatctgaaggctttgactgaggcttgtgtcaaaaacaacttcgtcggcgtcgaaaactctagattgtatagccaaacatattacggtacgaaaaacctcgttcagcattttgttgacgaggtcgagaagagtactcagttcttgatcaataccgaacagctggcattagaggagaaacgtgcacttttcaaaagaatgcacgccaatttcgggcgcactgctctctgcctttcaggtggagccggatttgcatattatcatttcggcatcgtgaaagctctactcgaggccgatcttgtgcccgatgtgattacaggcacgagcggcggcgctcttgttgctgctctcgtggcgacccgaacaaacgaggaactcaagaatctcctgattccggccttagcctataagataggtgcttgttccgaacccatcacaacatgggtttccaaggtggtggaatacgggcgccagatttga

SEQ ID NO: 15638 - protein, 445 aa, Muscodor strobelii
  misc_feature: SGI Peptide ID NO. 565183
  misc_feature (362)..(406): Pfam Id: PF01734 Pfam Desc: Patatin-like phospholipase
  misc_feature (1)..(434): NCBI GI: 164429040 Blast Desc: NCU11180 [Neurospora crassa OR74A] gi|158517735|sp|P0C584.1|PLPL_NEUCR RecName: Full=Patatin-like phospholipase domain-containing protein NCU11180 conserved crassa
  misc_feature (21)..(437): NCBI GI: 145608802 Blast Desc: MGG_12849 [Magnaporthe grisea 70-15] gi|158514088|sp|A4R8V2.1|PLPL_MAGGR RecName: Full=Patatin-like phospholipase domain-containing protein MGG_12849 MGG_12849
  misc_feature (26)..(437): NCBI GI: 154291377 Blast Desc: BC1G_15212 [Botryotinia fuckeliana B05.10] gi|150846815|gb|EDN22008.1| BC1G_15212 [Botryotinia fuckeliana B05.10]
  misc_feature (15)..(437): NCBI GI: 156051828 Blast Desc: SS1G_07321 [Sclerotinia sclerotiorum 1980] gi|154705099|gb|EDO04838.1| SS1G_07321 [Sclerotinia sclerotiorum 1980]
  misc_feature (17)..(442): NCBI GI: 256732845 Blast Desc: [Nectria haematococca mpVI 77-13-4]
  misc_feature (21)..(437): NCBI GI: 171685730 Blast Desc: protein product [Podospora anserina] gi|170942826|emb|CAP68479.1| protein product [Podospora anserina]
  misc_feature (3)..(437): NCBI GI: 116207214 Blast Desc: CHGG_02900 [Chaetomium globosum CBS 148.51] gi|121788463|sp|Q2HA54.1|PLPL_CHAGB RecName: Full=Patatin-like phospholipase domain-containing protein CHGG_02900 CHGG_02900 CBS
  misc_feature (17)..(437): NCBI GI: 46124535 Blast Desc: FG06645.1 [Gibberella zeae PH-1]
  misc_feature (28)..(442): NCBI GI: 189202270 Blast Desc: lipid particle protein [Pyrenophora tritici-repentis Pt-1C-BFP] gi|187984570|gb|EDU50058.1| lipid particle protein [Pyrenophora tritici-repentis Pt-1C-BFP]
  misc_feature (116)..(435): NCBI GI: 121702797 Blast Desc: Patatin-like serine hydrolase, [Aspergillus clavatus NRRL 1] gi|158512633|sp|A1CRG6.1|PLPL_ASPCL RecName: Full=Patatin-like phospholipase domain-containing protein serine
  misc_feature (178)..(416): SWISSPROT Homolog: EC 3.1.1.3 Triacylglycerol lipase
MADEKNRISLPFLGAKRHHNYGFPDEAFDYQKLPDADRDFLPAEHLEAFAQALSASDPNPSHDDASSPTALNSPATRSSMSLDITRSASIGSIDALGASGSAPGASGSGSHGMFITAQNDWAPVNQKVTKHGRRRKRKRTSLGSRTVDETREGYLYGLLKWPFLFFVISWIVFLGASYLATRSYIFLYEHYIAWTGRRERLRRSMRATSTYRDWVHAAKEMDAYLGNQRWKEENEYAYYDSKTVRRVYDQLRKHRGAAEQQEAALSGAPGVEQTGLTTANGSRTVVEDLKALTEACVKNNFVGVENSRLYSQTYYGTKNLVQHFVDEVEKSTQFLINTEQLALEEKRALFKRMHANFGRTALCLSGGAGFAYYHFGIVKALLEADLVPDVITGTSGGALVAALVATRTNEELKNLLIPALAYKIGACSEPITTWVSKVVEYGRQI

SEQ ID NO: 15639 - DNA, 2621 bp, Muscodor strobelii
  misc_feature: SGI EST ID NO. CUFF.37097.0
  misc_feature: Variant of the nucleotide sequence at SEQ ID NO 15637
cgggaggctctgtcgcgttcttcaacgactcttacttcggcacctaggctcttgagcttgagtcacttcaaatatgaacatatgaatatctgcaacgaatgaattatgattaagtcttgccattcatcaaggtaaacatctactatcatcactcttcgacaattccctacggctcgttagactgtagcactcgcacgaccgtactgctcagctgcccggcccatctggcgctcctcatcattgtcatcatgacactccgcgccgcggccgaacccagtcaatatggccgatgagaagaatcgaatctctttgccgttccttggcgccaaacgccaccataattacggctttcccgacgaggcattcgactatcagaaattgcctgatgccgaccgtgatttcctcccggccgaacacctcgaagccttcgcccaagctctctctgcctccgatcccaacccgtcgcatgacgatgcatcgtcccccactgctctgaacagcccggcgacgcggagttccatgagcttggacatcactcggtctgcttcaataggctccatcgatgcgctcggcgcgtcagggtctgcgccgggcgcgagcggcagcggctcgcatggcatgttcataacagctcagaacgactgggcgcctgtcaaccaaaaggtaaccaaacacggacgccgccgcaagaggaagaggacttccctgggcagtcgaactgtggacgagactagagaaggctatctctacggcctcctgaagtggccattcttgttcttcgtgatatcctggatcgtctttttgggcgcttcgtatctcgctacgagatcttacatctttctgtacgagcactacatagcgtggaccgggcggagagagagactgcgacggagcatgcgtgctactagtacgtatcgcgactgggtccatgcggcgaaagagatggacgcatatctgggcaatcagcgatggaaagaagagaatgaatatgcctattacgactccaagaccgtccgcagggtgtacgaccagctgcgaaagcaccgtggagcagctgaacaacaagaggccgcgctttcgggcgcgcctggagtcgaacaaacgggcctgaccacagcaaatggcagtagaacagtggtagaagatctgaaggctttgactgaggcttgtgtcaaaaacaacttcgtcggcgtcgaaaactctagattgtatagccaaacatattacggtacgaaaaacctcgttcagcattttgttgacgaggtcgagaagagtactcagttcttgatcaataccgaacagctggcattagaggagaaacgtgcacttttcaaaagaatgcacgccaatttcgggcgcactgctctctgcctttcaggtggagccggatttgcatattatcatttcggcatcgtgaaagctctactcgaggccgatcttgtgcccgatgtgattacaggcacgagcggcggcgctcttgttgctgctctcgtggcgacccgaacaaacgaggaactcaagaatctcctgattccggccttagcctataagataggtgcttgttccgaacccatcacaacatgggtttccaaggtggtggaatacgggcgccagatttgattctgtcgactgggcacggcaggcgagttggtggtctcgtggctccatgacattcagagaagcatatgaaagaacaggtcgcatcctcaacgtctcatgtgtgccagctgacccccattcaccgaccattctctgcaactacctgacgtcgccggattgtgtaatttggtcagctgtactagcgagcgctgcagttccgggaattctaaatcccgtcgtccttatgatgaagactcaagacgggtctctcgtgccttactcattcggtcacaaatggaaggacggtagcttacgaactgatatcccaatcaaggcgcttaatctccatttcaacgtcaactttaccattgttagtcaagtaaacccacatatatcactgttcttcttctcgtccagaggtacggtgggttctccggtcacacacagaaagggtcgtgggtggcgtggcgggtttcttggatccgctgccgagcaatatatcaaattggaccttcgcaagtggttgaaggtgctcaaacatctcgagctcctccctcgaccattgggccaagattggtcgcaattgtggttgcaggagttcagcggcacggtcacgatttggccaaaagcagcaccgtccgatttctggaatatactatcagatcccgaccctcagcgtttgagtcgtatgcttcacgaaggtcaacaaagtgccttcccgaagcttaaattcattgcgaataggctaaagatagagcgtcttattgaacaaggcaggcgagagactagaccatccgtgaggaggggtagcatcgagagtatcatcagcgaggaggacctccagagtctccttcgccggaatattggtacagatgacgagacgacagatgctgaggtggatgaggacgctattgaagatgatgttcaagatgaaagcttcgaacaggatgtagatagttcaaaggaggactgagatagatcatagtataataagcattatagacgtattagtataaatcatc

SEQ ID NO: 15640 - DNA, 729 bp, Muscodor strobelii
  misc_feature: SGI cDNA ID NO. 565184
  misc_feature: Encodes the peptide sequence at SEQ ID NO 15641
atgatgaagactcaagacgggtctctcgtgccttactcattcggtcacaaatggaaggacggtagcttacgaactgatatcccaatcaaggcgcttaatctccatttcaacgtcaactttaccattgttagtcaagtaaacccacatatatcactgttcttcttctcgtccagaggtacggtgggttctccggtcacacacagaaagggtcgtgggtggcgtggcgggtttcttggatccgctgccgagcaatatatcaaattggaccttcgcaagtggttgaaggtgctcaaacatctcgagctcctccctcgaccattgggccaagattggtcgcaattgtggttgcaggagttcagcggcacggtcacgatttggccaaaagcagcaccgtccgatttctggaatatactatcagatcccgaccctcagcgtttgagtcgtatgcttcacgaaggtcaacaaagtgccttcccgaagcttaaattcattgcgaataggctaaagatagagcgtcttattgaacaaggcaggcgagagactagaccatccgtgaggaggggtagcatcgagagtatcatcagcgaggaggacctccagagtctccttcgccggaatattggtacagatgacgagacgacagatgctgaggtggatgaggacgctattgaagatgatgttcaagatgaaagcttcgaacaggatgtagatagttcaaaggaggactga

SEQ ID NO: 15641 - protein, 242 aa, Muscodor strobelii
  misc_feature: SGI Peptide ID NO. 565184
  misc_feature (1)..(221): NCBI GI: 46124535 Blast Desc: FG06645.1 [Gibberella zeae PH-1]
  misc_feature (1)..(242): NCBI GI: 261354104 Blast Desc: lipase [Verticillium albo-atrum VaMs.102]
  misc_feature (1)..(219): NCBI GI: 164429040 Blast Desc: NCU11180 [Neurospora crassa OR74A] gi|158517735|sp|P0C584.1|PLPL_NEUCR RecName: Full=Patatin-like phospholipase domain-containing protein NCU11180 conserved crassa
  misc_feature (1)..(183): NCBI GI: 121702797 Blast Desc: Patatin-like serine hydrolase, [Aspergillus clavatus NRRL 1] gi|158512633|sp|A1CRG6.1|PLPL_ASPCL RecName: Full=Patatin-like phospholipase domain-containing protein serine
  misc_feature (1)..(217): NCBI GI: 171685730 Blast Desc: protein product [Podospora anserina] gi|170942826|emb|CAP68479.1| protein product [Podospora anserina]
  misc_feature (1)..(220): NCBI GI: 242802889 Blast Desc: Patatin-like serine hydrolase, [Talaromyces stipitatus ATCC 10500] gi|218717410|gb|EED16831.1| Patatin-like serine hydrolase, [Talaromyces stipitatus ATCC 10500]
  misc_feature (1)..(177): NCBI GI: 212540086 Blast Desc: Patatin-like serine hydrolase, [Penicillium marneffei ATCC 18224] gi|210067497|gb|EEA21589.1| Patatin-like serine hydrolase, [Penicillium marneffei ATCC 18224]
  misc_feature (1)..(183): NCBI GI: 115388533 Blast Desc: ATEG_02594 [Aspergillus terreus NIH2624] gi|121740798|sp|Q0CUP0.1|PLPL_ASPTN RecName: Full=Patatin-like phospholipase domain-containing protein ATEG_02594 ATEG_02594
  misc_feature (1)..(239): NCBI GI: 70990794 Blast Desc: Patatin-like serine hydrolase [Aspergillus fumigatus Af293] gi|74669776|sp|Q4WJS4.1|PLPL_ASPFU RecName: Full=Patatin-like phospholipase domain-containing protein serine
  misc_feature (1)..(239): NCBI GI: 145608802 Blast Desc: MGG_12849 [Magnaporthe grisea 70-15] gi|158514088|sp|A4R8V2.1|PLPL_MAGGR RecName: Full=Patatin-like phospholipase domain-containing protein MGG_12849 MGG_12849
  misc_feature (17)..(177): SWISSPROT Homolog: EC 3.1.1.3 Triacylglycerol lipase
MMKTQDGSLVPYSFGHKWKDGSLRTDIPIKALNLHFNVNFTIVSQVNPHISLFFFSSRGTVGSPVTHRKGRGWRGGFLGSAAEQYIKLDLRKWLKVLKHLELLPRPLGQDWSQLWLQEFSGTVTIWPKAAPSDFWNILSDPDPQRLSRMLHEGQQSAFPKLKFIANRLKIERLIEQGRRETRPSVRRGSIESIISEEDLQSLLRRNIGTDDETTDAEVDEDAIEDDVQDESFEQDVDSSKED

SEQ ID NO: 15642 - DNA, 2621 bp, Muscodor strobelii; identical to SEQ ID NO: 15639
  misc_feature: SGI EST ID NO. CUFF.37097.0
  misc_feature: Variant of the nucleotide sequence at SEQ ID NO 15640

SEQ ID NO: 15643 - DNA, 909 bp, Muscodor strobelii
  misc_feature: SGI cDNA ID NO. 565185
  misc_feature: Encodes the peptide sequence at SEQ ID NO 15644
atggaacaacatgcgaatagcaacaacaaggccccgaactacgacttgcacttcacggacaatgtcattgcggcgactggtgctcatgcccatccgcgactgaaggagatcatgccatctcttctccgtcatctccacgattttgcacgagaggtgaaccttattgttccggaatggatggctgcagtagaaatgatcaacgaagcgggacgcatgtcaacaaacaagcgcaacgagacacagcttctctgcgacattctcggtctcgaatcactagtcgatgagatctcttccaagctgctggaacgcgcgggtcagacagccacgccatcagcagtgcttgggccgttctaccggctcgatgcgccggtactgtcaaacggtagtagcatcatctcgaagtcggtagaaaactcaacctggtatcacaacgcactgccattactagcaaatatttctggtcgagtgctctcggcatccacacgacgcccgattcccaacgcaatggtagatgtctggctcgcgggccccaatggtttatacgagcaacaagatcccgagcaaccggatatgaacctacgagggcggtttcagacagacggcgaaggccgatatgagatgtactgtctgcgcccgacggcgtacccgatcccatttgatggcccagctgggcgactcctaaagctgcttgatcggcacccgtacaggccggcgcatatccacttcatcgtcacggcagatgggtttcgagcgttgaccacgcaggttttcgaccgcgaggatgattatacgagagatgatgctgtgtttgcggtgaaagaggagctacttgttaagtttgagaagaaagaaggggatgagaaggccaagtgggagctggtgtatgacttcttgttgtgtgagtcgtga

SEQ ID NO: 15644 - protein, 302 aa, Muscodor strobelii
  misc_feature: SGI Peptide ID NO. 565185
  misc_feature (113)..(302): Pfam Id: PF00775 Pfam Desc: Dioxygenase
  misc_feature (31)..(109): Pfam Id: PF04444 Pfam Desc: Catechol dioxygenase N terminus
  misc_feature (163)..(302): Pfam Id: PF00775 Pfam Desc: Dioxygenase
  misc_feature (20)..(300): NCBI GI: 85075715 Blast Desc: NCU00055 [Neurospora crassa OR74A] gi|28916822|gb|EAA26570.1| NCU00055 [Neurospora crassa OR74A]
  misc_feature (4)..(299): NCBI GI: 116192095 Blast Desc: CHGG_05765 [Chaetomium globosum CBS 148.51] gi|88181678|gb|EAQ89146.1| CHGG_05765 [Chaetomium globosum CBS 148.51]
  misc_feature (6)..(299): NCBI GI: 171686748 Blast Desc: protein product [Podospora anserina] gi|170943335|emb|CAP68988.1| protein product [Podospora anserina]
  misc_feature (13)..(300): NCBI GI: 189188426 Blast Desc: catechol 1,2-dioxygenase 1 [Pyrenophora tritici-repentis Pt-1C-BFP] gi|187972158|gb|EDU39657.1| catechol 1,2-dioxygenase 1 [Pyrenophora tritici-repentis Pt-1C-BFP]
  misc_feature (14)..(300): NCBI GI: 67536724 Blast Desc: AN4532.2 [Aspergillus nidulans FGSC A4] gi|40741685|gb|EAA60875.1| AN4532.2 [Aspergillus nidulans FGSC A4] gi|259482639|tpe|CBF77312.1| TPA: catechol dioxygenase, FGSC
  misc_feature (5)..(300): NCBI GI: 169617391 Blast Desc: SNOG_11873 [Phaeosphaeria nodorum SN15] gi|111059797|gb|EAT80917.1| SNOG_11873 [Phaeosphaeria nodorum SN15]
  misc_feature (14)..(300): NCBI GI: 115442834 Blast Desc: ATEG_09602 [Aspergillus terreus NIH2624] gi|114188093|gb|EAU29793.1| ATEG_09602 [Aspergillus terreus NIH2624]
  misc_feature (3)..(299): NCBI GI: 39943524 Blast Desc: MGG_03773 [Magnaporthe grisea 70-15] gi|145014452|gb|EDJ99020.1| MGG_03773 [Magnaporthe grisea 70-15]
  misc_feature (14)..(300): NCBI GI: 169775191 Blast Desc: [Aspergillus oryzae RIB40] gi|238496187|ref|XP_002379329.1| catechol dioxygenase, [Aspergillus flavus NRRL3357] gi|83769926|dbj|BAE60061.1| protein
  misc_feature (14)..(300): NCBI GI: 67904022 Blast Desc: AN8998.2 [Aspergillus nidulans FGSC A4] gi|40745174|gb|EAA64330.1| AN8998.2 [Aspergillus nidulans FGSC A4] gi|259486552|tpe|CBF84491.1| TPA: catechol dioxygenase, FGSC
  misc_feature (18)..(271): SWISSPROT Homolog: EC 1.13.11.1 Catechol 1,2-dioxygenase
MEQHANSNNKAPNYDLHFTDNVIAATGAHAHPRLKEIMPSLLRHLHDFAREVNLIVPEWMAAVEMINEAGRMSTNKRNETQLLCDILGLESLVDEISSKLLERAGQTATPSAVLGPFYRLDAPVLSNGSSIISKSVENSTWYHNALPLLANISGRVLSASTRRPIPNAMVDVWLAGPNGLYEQQDPEQPDMNLRGRFQTDGEGRYEMYCLRPTAYPIPFDGPAGRLLKLLDRHPYRPAHIHFIVTADGFRALTTQVFDREDDYTRDDAVFAVKEELLVKFEKKEGDEKAKWELVYDFLLCES

SEQ ID NO: 15645 - DNA, 1863 bp, Muscodor strobelii
  misc_feature: SGI cDNA ID NO. 565186
  misc_feature: Encodes the peptide sequence at SEQ ID NO 15646
atgggcaagccgaagatctccagtgcccgcatccagctggcctaccctctatttgcctgcgactttgtagatcccaaccacctggtcgtggcaggcggcggcgggccagggaacaacggcgtcggcaacaaagtcaccctcctcgacctgtccgaccccgccctgatcgccgaggccgcggagctcgagctcagcgccaaggaggacagtgtcatgtccatggtcgtcgcgggcccccagaaggacaggccgctgacgacgacggtcttcgcgggcgtcaactcgagccccggcgacatcaagaacgggcagaacaggcacttccgcgcgctaaccatcgcccaaccgggcaagtcggccaagactggcggtgtgggcggtgagcgcggcgtgaaaatctccgagctcaagcgcgatgcgctgttcgtgcatggggacaaaggcgacaaagacacctaccagcgggtcctcaggctctcgccccctcacgacggcttcacctctccacgcttgggcgctgctgccaccggcctagcacgcaagtcccagatcgccctcttcgatgtccccagcaccaacagcccgcagtggaaatcgaggggcaggctggagctctccgccgaagccatggatctcgacgtgattcagaccggccccgacacctaccagctcgcctactgcgacgaggacgagctgttcaccgtcgaggtctccaagaacgaggtctccgagccgcgctgcatcttcaccatcacccccgaccagggcgagtccgccaagcccaccttcaagtcgctgcgctacctgaccaccggcttcgtcgtcaccgttgtcaaccaccccaaggccgagggcagcggcgtctccctgcacggcatccggctgcccagcaacgacgaggagaatggccgtctctccatccgcgccaggctgcccaagactgtgtccaaggccacgagcctcgccgtccgaaatctctcgcccaccgcgctgccccaggacaagcagggcgatgcgcagtttgtcatcgctgtcgccgggaacgactcctctatatccctctacaccatggagcacaagacggtcctgaactccgacgtgctggctgatctggccccgtttcagatcatcaaatccgtccacccctcgagcatcaccaacttatcgttctctaccttcacaccgccttcggggtctagcagggctccctccgacctctgtgtcaagcttgccagtgtatcggtcgactgctcgaccgtcgtacacagcatacctatcaagaaacatccgggcaagggatcagcgccaaataaacgaggtccaccaaaattaccgcgctttattgtcgctttgaaatccaagggcgagtcgcacacagtcgttctcagcgtggccgtgctgatgctcttgttcgtcatccttgttggccaagtattactcgaggccaaagatatcgttgaacctacgctcggtgccaggaaatatttgcctacgtcttggaccaagccactgaggagagtgccgagaattcgagatgaacctgttgaaaaacagaagacgatcgaagatcttctttccaatgtcaacgcccatcattcacagcagatggttgtaagacacgacgatctgggtgcggtcggcccagatggactccctgccctccatgtcggtgttcacgacgaatttacacatggcccagccaccgagtggcaaaatctagacaagaaggatcaagatctatggaagaaacgtctacaaaagtcaggtcattacatggaagatatgggcgaggccatcttcaaaggcgtgcttttcggcgagattggtggtgctattggcaacatcgttggtgaggcgctttaa

SEQ ID NO: 15646 - protein, 620 aa, Muscodor strobelii
  misc_feature: SGI Peptide ID NO. 565186
  misc_feature (4)..(616): NCBI GI: 171685776 Blast Desc: protein product [Podospora anserina] gi|170942849|emb|CAP68502.1| protein product [Podospora anserina]
  misc_feature (6)..(616): NCBI GI: 85084201 Blast Desc: NCU00379 [Neurospora crassa OR74A] gi|28918354|gb|EAA28029.1| [Neurospora crassa OR74A]
  misc_feature (4)..(617): NCBI GI: 256733301 Blast Desc: NECHADRAFT_104225 [Nectria haematococca mpVI 77-13-4]
  misc_feature (11)..(617): NCBI GI: 46124549 Blast Desc: FG06652.1 [Gibberella zeae PH-1]
  misc_feature (4)..(608): NCBI GI: 156065251 Blast Desc: SS1G_00636 [Sclerotinia sclerotiorum 1980] gi|154691495|gb|EDN91233.1| SS1G_00636 [Sclerotinia sclerotiorum 1980]
  misc_feature (4)..(619): NCBI GI: 154311333 Blast Desc: BC1G_06519 [Botryotinia fuckeliana B05.10] gi|150850916|gb|EDN26109.1| BC1G_06519 [Botryotinia fuckeliana B05.10]
  misc_feature (4)..(351): NCBI GI: 261354056 Blast Desc: conserved [Verticillium albo-atrum VaMs.102]
  misc_feature (47)..(620): NCBI GI: 121712624 Blast Desc: conserved [Aspergillus clavatus NRRL 1] gi|119402076|gb|EAW12497.1| conserved [Aspergillus clavatus NRRL 1]
  misc_feature (4)..(617): NCBI GI: 238844289 Blast Desc: conserved [Microsporum canis CBS 113480]
  misc_feature (4)..(616): NCBI GI: 240109257 Blast Desc: CPC735_027620 [Coccidioides posadasii C735 delta SOWgp]
MGKPKISSARIQLAYPLFACDFVDPNHLVVAGGGGPGNNGVGNKVTLLDLSDPALIAEAAELELSAKEDSVMSMVVAGPQKDRPLTTTVFAGVNSSPGDIKNGQNRHFRALTIAQPGKSAKTGGVGGERGVKISELKRDALFVHGDKGDKDTYQRVLRLSPPHDGFTSPRLGAAATGLARKSQIALFDVPSTNSPQWKSRGRLELSAEAMDLDVIQTGPDTYQLAYCDEDELFTVEVSKNEVSEPRCIFTITPDQGESAKPTFKSLRYLTTGFVVTVVNHPKAEGSGVSLHGIRLPSNDEENGRLSIRARLPKTVSKATSLAVRNLSPTALPQDKQGDAQFVIAVAGNDSSISLYTMEHKTVLNSDVLADLAPFQIIKSVHPSSITNLSFSTFTPPSGSSRAPSDLCVKLASVSVDCSTVVHSIPIKKHPGKGSAPNKRGPPKLPRFIVALKSKGESHTVVLSVAVLMLLFVILVGQVLLEAKDIVEPTLGARKYLPTSWTKPLRRVPRIRDEPVEKQKTIEDLLSNVNAHHSQQMVVRHDDLGAVGPDGLPALHVGVHDEFTHGPATEWQNLDKKDQDLWKKRLQKSGHYMEDMGEAIFKGVLFGEIGGAIGNIVGEAL

SEQ ID NO: 15647 - DNA, 2442 bp, Muscodor strobelii
  misc_feature: SGI EST ID NO. CUFF.37082.1
  misc_feature: Variant of the nucleotide sequence at SEQ ID NO 15645
cagcaggcctcattggaaagaaaaagtccagatcaggcccctgtcgctcaggtcttgggatcgttctttcgcattctagagagaaaggccagctcacgagtcgcgccagtgtcgttcatcaataggctacgtgtacatacatcttcagcaatgtcaggctcctttgtcaacctcaagccatgatctcctgccagacgaatctgaacctgtacacataattatccccttcgttgactggcagcctgcgagcggccttgactgctattgcgaccgcgcccgcgcccgcgactgtaaccagcctcatcaatcgccatgggcaagccgaagatctccagtgcccgcatccagctggcctaccctctatttgcctgcgactttgtagatcccaaccacctggtcgtggcaggcggcggcgggccagggaacaacggcgtcggcaacaaagtcaccctcctcgacctgtccgaccccgccctgatcgccgaggccgcggagctcgagctcagcgccaaggaggacagtgtcatgtccatggtcgtcgcgggcccccagaaggacaggccgctgacgacgacggtcttcgcgggcgtcaactcgagccccggcgacatcaagaacgggcagaacaggcacttccgcgcgctaaccatcgcccaaccgggcaagtcggccaagactggcggtgtgggcggtgagcgcggcgtgaaaatctccgagctcaagcgcgatgcgctgttcgtgcatggggacaaaggcgacaaagacacctaccagcgggtcctcaggctctcgccccctcacgacggcttcacctctccacgcttgggcgctgctgccaccggcctagcacgcaagtcccagatcgccctcttcgatgtccccagcaccaacagcccgcagtggaaatcgaggggcaggctggagctctccgccgaagccatggatctcgacgtgattcagaccggccccgacacctaccagctcgcctactgcgacgaggacgagctgttcaccgtcgaggtctccaagaacgaggtctccgagccgcgctgcatcttcaccatcacccccgaccagggcgagtccgccaagcccaccttcaagtcgctgcgctacctgaccaccggcttcgtcgtcaccgttgtcaaccaccccaaggccgagggcagcggcgtctccctgcacggcatccggctgcccagcaacgacgaggagaatggccgtctctccatccgcgccaggctgcccaagactgtgtccaaggccacgagcctcgccgtccgaaatctctcgcccaccgcgctgccccaggacaagcagggcgatgcgcagtttgtcatcgctgtcgccgggaacgactcctctatatccctctacaccatggagcacaagacggtcctgaactccgacgtgctggctgatctggccccgtttcagatcatcaaatccgtccacccctcgagcatcaccaacttatcgttctctaccttcacaccgccttcggggtctagcagggctccctccgacctctgtgtcaagcttgccagtgtatcggtcgactgctcgaccgtcgtacacagcatacctatcaagaaacatccgggcaagggatcagcgccaaataaacgaggtccaccaaaattaccgcgctttattgtcgctttgaaatccaagggcgagtcgcacacagtcgttctcagcgtggccgtgctgatgctcttgttcgtcatccttgttggccaagtattactcgaggccaaagatatcgttgaacctacgctcggtgccaggaaatatttgcctacgtcttggaccaagccactgaggagagtgccgagaattcgagatgaacctgttgaaaaacagaagacgatcgaagatcttctttccaatgtcaacgcccatcattcacagcagatggttgtaagacacgacgatctgggtgcggtcggcccagatggactccctgccctccatgtcggtgttcacgacgaatttacacatggcccagccaccgagtggcaaaatctagacaagaaggatcaagatctatggaagaaacgtctacaaaagtcaggtcattacatggaagatatgggcgaggccatcttcaaaggcgtgcttttcggcgagattggtggtgctattggcaacatcgttggtgaggcgctttaaataccgtcgaccggaacatcatacactacacgcgtatgcttgcgtgaataaaagtgtagaatggaaaattagcattagaagtcaggattggcacccctacctcatttgtgtgtacgatgaagaatattgtacgaagaagcacaagtatctagcatttgcatcagcatcggcatcagcaccagtatctacaggcacaccaaatatcccaaaatattgcatataaagaccaatagaaaaaaattcataacttttccaactgcataattt

SEQ ID NO: 15648 - DNA, 582 bp, Muscodor strobelii
  misc_feature: SGI cDNA ID NO. 565187
  misc_feature: Encodes the peptide sequence at SEQ ID NO 15649
atgcgacgaagcatcagcaagctgttggcaagttggatcttctggcaagttgtcctacctaatccctggatgatcgacagcaaagagaatgtgcaccggcttctgacagactctaggttctacgacgagttcctacctggggttgagtggctttttaagtacgaatcagatagcatcctatgcgccaactcggagagaagccttaatgaatggctccaatgggactgggtaggaccgccgcggaccggaaataatcgattttcaggaaatggaggtctctcacttcgacgagtttctgcgatcaaacgagttctgaagttccagatgcgctataatgatacaatacccgaggacgagtggttcgaggaacagcttgttgaggacgtatatattccgaatgccagcggccaggccattgcggatgaggtttggaaagatcctgttcaacggaaaaacatacttgactattgtccagagctaagtctcatcgtggatatgaaattagtgcgcgagcgctgcgagggcgacaagttggatgggacgatgggaacgcaagtgccaacagacgttgctggatcctag

SEQ ID NO: 15649 - protein, 193 aa, Muscodor strobelii
  misc_feature: SGI Peptide ID NO. 565187
  misc_feature (17)..(193): NCBI GI: 261354062 Blast Desc: conserved [Verticillium albo-atrum VaMs.102]
  misc_feature (17)..(182): NCBI GI: 39940260 Blast Desc: [Magnaporthe grisea 70-15] gi|145010635|gb|EDJ95291.1| [Magnaporthe grisea 70-15]
  misc_feature (17)..(180): NCBI GI: 171685764 Blast Desc: protein product [Podospora anserina] gi|170942843|emb|CAP68496.1| protein product [Podospora anserina]
  misc_feature (17)..(182): NCBI GI: 156065291 Blast Desc: SS1G_00656 [Sclerotinia sclerotiorum 1980] gi|154691515|gb|EDN91253.1| SS1G_00656 [Sclerotinia sclerotiorum 1980]
  misc_feature (17)..(186): NCBI GI: 154311299 Blast Desc: BC1G_06502 [Botryotinia fuckeliana B05.10] gi|150850899|gb|EDN26092.1| BC1G_06502 [Botryotinia fuckeliana B05.10]
  misc_feature (24)..(173): NCBI GI: 256733300 Blast Desc: NECHADRAFT_79451 [Nectria haematococca mpVI 77-13-4]
  misc_feature (19)..(125): NCBI GI: 171685762 Blast Desc: protein product [Podospora anserina] gi|170942842|emb|CAP68495.1| protein product [Podospora anserina]
  misc_feature (3)..(125): NCBI GI: 156065285 Blast Desc: SS1G_00653 [Sclerotinia sclerotiorum 1980] gi|154691512|gb|EDN91250.1| SS1G_00653 [Sclerotinia sclerotiorum 1980]
  misc_feature (19)..(171): NCBI GI: 154313845 Blast Desc: BC1G_05772 [Botryotinia fuckeliana B05.10] gi|150849354|gb|EDN24547.1| BC1G_05772 [Botryotinia fuckeliana B05.10]
  misc_feature (3)..(125): NCBI GI: 154311295 Blast Desc: BC1G_06500 [Botryotinia fuckeliana B05.10] gi|150850897|gb|EDN26090.1| BC1G_06500 [Botryotinia fuckeliana B05.10]
MRRSISKLLASWIFWQVVLPNPWMIDSKENVHRLLTDSRFYDEFLPGVEWLFKYESDSILCANSERSLNEWLQWDWVGPPRTGNNRFSGNGGLSLRRVSAIKRVLKFQMRYNDTIPEDEWFEEQLVEDVYIPNASGQAIADEVWKDPVQRKNILDYCPELSLIVDMKLVRERCEGDKLDGTMGTQVPTDVAGS

SEQ ID NO: 15650 - DNA, 1788 bp, Muscodor strobelii
  misc_feature: SGI cDNA ID NO. 565188
  misc_feature: Encodes the peptide sequence at SEQ ID NO 15651
atgcggatgttatataccctcttcttattgtgtgttggccagacactggctcacgcgcatcaaggcgatcaccctgttccgcagcttgctggggcaagaagatttcttgaggagttttcggggcctaggaaatgggagagacgctcacgtgctaccattttggcacagccaaaagatgatcaacagaaggcagatctggcacaacgtggagaaatcaaggaaagacaaaacacgagcggtaagtgtggcggaactcgcggatcatgcgctgctggatattgttgttccattgatggatggtgtggcttgggtgcagactattgcacgtcgcccgactgtcaaatcaattatggtcccggttgtgatggtaatcagaaaccttccggtgtcgatacgtcgaagattgcaagaccaaagctaggtaaagtgacgtacggtggtgctggaatatacgactgtgtaaacaagggtgacatcgctgtcacgttcgatgatggcccttggaactacacagatgacctcctggacaagcttgcgagttacgatgcgaaggctacatttttcattaccggaaccaatcttcacaagggccagataaatgaccccgagactccttggccagctgttatccaacgaatggctgccgaaggccatcagattgcgagccatacctggtcgcatgagaacttcagcacgttgacgaccacccagttcacgaaccagatgatttggaacgagatcgcattcaatgatatattgggctatttcccaacctatatgagacctcccttttcaatttgcccgacacgaacctgcggagcgcaattggcgactcttggttatcatgccatctatttcgatttggatactgaaggctatcttaacgatgacgcagtagatattcaaaacagcaaggatatttgggatgatacgattgatgactccaacccatgctcggacagttggttgcagatcgagcatgatatccactaccagactgtgtacaatctcacggactacgtcctaaaatctctcttcgaccatggctacagatcagtcactgtgggagagtgtcttggtgaccctccagagaattggtaccgagctggcagtggacaagcgcctacttatagcttcaacacccgtgctcctaccggtacatgggcttgtttgtcttcaacaagaacatctacatcaacgagtacgtctagatcgacatcgacatcgcgaaccacaacaacaaccactacgaaacctagctcgccgacgggtacgctgcaagtcagtacggatggggtttgtgggaatggattcacttgtcaaggatcagtctatggcaattgttgctctcaaaataattattgtggcgcttctatcgactactgcggaaacggttgcaagtcgcagtttgggtcttgtacaaccagtgatgatcctttgcctccccctcaaaaaagatcaccagcatccaatcctacgagaaatgctccggttgcaacaacaagctccgcggcggtacctactggtactctcgaggtatcgactgatggaagctgcggaaacggcttcacatgtgatggatcggaatggggaccttgctgctcagaacataacttttgcggaaataccgaagactattgcggaactggctgtcaacctatatttggcagtggctgcgacgtagggcggcgctaccaccaccaccactacagttacgatcactccaaccgaaaccacttcgacggcaacccacacgacgacttcgacgccgggtatcacgatctctag

SEQ ID NO: 15651 - protein, 595 aa, Muscodor strobelii
  misc_feature: SGI Peptide ID NO. 565188
  misc_feature (152)..(284): Pfam Id: PF01522 Pfam Desc: Polysaccharide deacetylase
  misc_feature (1)..(557): NCBI GI: 116207220 Blast Desc: CHGG_02903 [Chaetomium globosum CBS 148.51] gi|88183500|gb|EAQ90968.1| CHGG_02903 [Chaetomium globosum CBS 148.51]
  misc_feature (1)..(557): NCBI GI: 154311313 Blast Desc: BC1G_06509 [Botryotinia fuckeliana B05.10] gi|150850906|gb|EDN26099.1| BC1G_06509 [Botryotinia fuckeliana B05.10]
  misc_feature (1)..(557): NCBI GI: 156065263 Blast Desc: SS1G_00642 [Sclerotinia sclerotiorum 1980] gi|154691501|gb|EDN91239.1| SS1G_00642 [Sclerotinia sclerotiorum 1980]
  misc_feature (1)..(467): NCBI GI: 145602203 Blast Desc: MGG_12939 [Magnaporthe grisea 70-15] gi|145010634|gb|EDJ95290.1| MGG_12939 [Magnaporthe grisea 70-15]
  misc_feature (13)..(473): NCBI GI: 164425267 Blast Desc: NCU10651 [Neurospora crassa OR74A] gi|157070858|gb|EDO65126.1| conserved [Neurospora crassa OR74A]
  misc_feature (1)..(480): NCBI GI: 18143615 Blast Desc: chitin binding protein [Magnaporthe grisea]
  misc_feature (43)..(556): NCBI GI: 189204972 Blast Desc: chitin binding protein [Pyrenophora tritici-repentis Pt-1C-BFP] gi|187985920|gb|EDU51408.1| chitin binding protein [Pyrenophora tritici-repentis Pt-1C-BFP]
  misc_feature (16)..(557): NCBI GI: 39957297 Blast Desc: MGG_09159 [Magnaporthe grisea 70-15] gi|145017002|gb|EDK01365.1| MGG_09159 [Magnaporthe grisea 70-15] gi|270055148|dbj|BAI52768.1| chitin deacetylase [Magnaporthe
  misc_feature (16)..(557): NCBI GI: 260279107 Blast Desc: chitin deacetylase [Magnaporthe oryzae]
  misc_feature (16)..(473): NCBI GI: 149210993 Blast Desc: MGCH7_ch7g959 [Magnaporthe grisea 70-15] gi|86196914|gb|EAQ71552.1| MGCH7_ch7g959 [Magnaporthe grisea 70-15]
MRMLYTLFLLCVGQTLAHAHQGDHPVPQLAGARRFLEEFSGPRKWERRSRATILAQPKDDQQKADLAQRGEIKERQNTSGKCGGTRGSCAAGYCCSIDGWCGLGADYCTSPDCQINYGPGCDGNQKPSGVDTSKIARPKLGKVTYGGAGIYDCVNKGDIAVTFDDGPWNYTDDLLDKLASYDAKATFFITGTNLHKGQINDPETPWPAVIQRMAAEGHQIASHTWSHENFSTLTTTQFTNQMIWNEIAFNDILGYFPTYMRPPFSICPTRTCGAQLATLGYHAIYFDLDTEGYLNDDAVDIQNSKDIWDDTIDDSNPCSDSWLQIEHDIHYQTVYNLTDYVLKSLFDHGYRSVTVGECLGDPPENWYRAGSGQAPTYSFNTRAPTGTWACLSSTRTSTSTSTSRSTSTSRTTTTTTTKPSSPTGTLQVSTDGVCGNGFTCQGSVYGNCCSQNNYCGASIDYCGNGCKSQFGSCTTSDDPLPPPQKRSPASNPTRNAPVATTSSAAVPTGTLEVSTDGSCGNGFTCDGSEWGPCCSEHNFCGNTEDYCGTGCQPIFGSGCDVGRRYHHHHYSYDHSNRNHFDGNPHDDFDAGYHDL

SEQ ID NO: 15652 - DNA, 1327 bp, Muscodor strobelii
  misc_feature: SGI EST ID NO. CUFF.37076.0
  misc_feature: Variant of the nucleotide sequence at SEQ ID NO 15650
gggagagacgctcacgtgctaccattttggcacagccaaaagatgatcaacagaaggcagatctggcacaacgtggagaaatcaaggaaagacaaaacacgagcggtaagtgtggcggaactcgcggatcatgcgctgctggatattgttgttccattgatggatggtgtggcttgggtgcagactattgcacgtcgcccgactgtcaaatcaattatggtcccggttgtgatggtaatcagaaaccttccggtgtcgatacgtcgaagattgcaagaccaaagctaggtaaagtgacgtacggtggtgctggaatatacgactgtgtaaacaagggtgacatcgctgtcacgttcgatgatggcccttggaactacacagatgacctcctggacaagcttgcgagttacgatgcgaaggctacatttttcattaccggaaccaatcttcacaagggccagataaatgaccccgagactccttggccagctgttatccaagtaaataccaccgtggactgtatatgataacaacgggctgacaggagttagcgaatggctgccgaaggccatcagattgcgagccatacctggtcgcatgagaacttcagcacgttgacgaccacccagttcacgaaccagatgatttggaacgagatcgcattcaatgatatattgggctatttcccaacctatatgagacctcccttttcaatttgcccgacacgaacctgcggagcgcaattggcgactcttggttatcatgccatctatttcgatttggatactgaaggctatcttaacgatgacgcagtagatattcaaaacagcaaggatatttgggatgatacgattgatgactccaacccatgctcggacagttggttgcagatcgagcatgatatccactaccagactgtgtacaatctcacggactacgtcctaaaatctctcttcgaccatggctacagatcagtcactgtgggagagtgtcttggtgaccctccagagaattggtaccgagctggcagtggacaagcgcctacttatagcttcaacacccgtgctcctaccggtacatgggcttgtttgtcttcaacaagaacatctacatcaacgagtacgtctagatcgacatcgacatcgcgaaccacaacaacaaccactacgaaacctagctcgccgacgggtacgctgcaagtcagtacggatggggtttgtgggaatggattcacttgtcaaggatcagtctatggcaattgttgctctcaaaataattattgtggcgcttctatcgactactgcggaaacggttgcaagtcgcagtt

SEQ ID NO: 15653 - DNA, 891 bp, Muscodor strobelii
  misc_feature: SGI cDNA ID NO. 565189
  misc_feature: Reduced expression when VOC is produced
  misc_feature: Encodes the peptide sequence at SEQ ID NO 15654
atgcctgtcctatcctcagcacgctacggcaaagacaatgtgcgtgtttacaaagtacaccgggatgaggcgacaggcgtacacaatgtgacggagatgaccgtgtgcgtgcttctagagggcaaaatcgaggagtcatacaccgtggcagataatagcccggtagtggcaacggattcaatgaagaacacaatttacatcaaagcaaaggagcacccggtaaacccaccggagctctacgcaagcatcctcggacagcatttcttggacacatacccacacatcaatgttgccaacgtgcacgtagaggtgaagcggtggacgcgaatggagattgatggtaaaacacacccacacagcttctaccgggacggtgaggagacgcgtaacgttgacgcccgcatttcacgtgccgatggtatagaaattactagcggcctcgcaggcctgctcgtgctaaagagcaccggctcacagttccatggctttatacgtgatgagttcactacgctcggtgagacctgggaccggatcttgtcgacctcagtcgatgcgacgtggaagtggaagactctctcaacgctgcaggcactgcagggcaatgtggccatgtttgacaaggccttcgacgacgcccgtgccatcactatgaagacttttgcagaggaggatagcccgtccgttcagaacgtcatgtataagatggctgagaagatactggaggcggcctcggaggtcgcgactgtgagctatgcgttgcccaataagcattactttgagatcgatctctcgtggcacaaaggcttgaagaacaccggcaaggatgccgaagtctacgccccacagtcaggaccaaacggcctcatcaaatgcgaagtgtcccgctcatag

SEQ ID NO: 15654 - protein, 296 aa, Muscodor strobelii
  misc_feature: SGI Peptide ID NO. 565189
  misc_feature (6)..(135): Pfam Id: PF01014 Pfam Desc: Uricase
  misc_feature (142)..(291): Pfam Id: PF01014 Pfam Desc: Uricase
  misc_feature (1)..(296): NCBI GI: 171687126 Blast Desc: protein product [Podospora anserina] gi|170943524|emb|CAP69177.1| protein product [Podospora anserina]
  misc_feature (1)..(296): NCBI GI: 156064197 Blast Desc: SS1G_00106 [Sclerotinia sclerotiorum 1980] gi|154690968|gb|EDN90706.1| SS1G_00106 [Sclerotinia sclerotiorum 1980]
  misc_feature (1)..(296): NCBI GI: 154312332 Blast Desc: uricase [Botryotinia fuckeliana B05.10] gi|150850162|gb|EDN25355.1| uricase [Botryotinia fuckeliana B05.10]
  misc_feature (1)..(296): NCBI GI: 261358101 Blast Desc: uricase [Verticillium albo-atrum VaMs.102]
  misc_feature (1)..(295): NCBI GI: 116191661 Blast Desc: CHGG_05548 [Chaetomium globosum CBS 148.51] gi|88181461|gb|EAQ88929.1| CHGG_05548 [Chaetomium globosum CBS 148.51]
  misc_feature (1)..(296): NCBI GI: 85109841 Blast Desc: uricase [Neurospora crassa OR74A] gi|28924766|gb|EAA33878.1| uricase [Neurospora crassa OR74A]
  misc_feature (1)..(295): NCBI GI: 256726149 Blast Desc: [Nectria haematococca mpVI 77-13-4]
  misc_feature (1)..(295): NCBI GI: 145601983 Blast Desc: MGG_05283 [Magnaporthe grisea 70-15] gi|145010434|gb|EDJ95090.1| MGG_05283 [Magnaporthe grisea 70-15]
  misc_feature (1)..(295): NCBI GI: 46116568 Blast Desc: FG04126.1 [Gibberella zeae PH-1]
  misc_feature (1)..(295): NCBI GI: 62953146 Blast Desc: uricase [Gibberella fujikuroi]
  misc_feature (1)..(296): SWISSPROT Homolog: EC 1.7.3.3 Urate oxidase
  misc_feature: Useful for introducing or modulating the production of volatile compounds
MPVLSSARYGKDNVRVYKVHRDEATGVHNVTEMTVCVLLEGKIEESYTVADNSPVVATDSMKNTIYIKAKEHPVNPPELYASILGQHFLDTYPHINVANVHVEVKRWTRMEIDGKTHPHSFYRDGEETRNVDARISRADGIEITSGLAGLLVLKSTGSQFHGFIRDEFTTLGETWDRILSTSVDATWKWKTLSTLQALQGNVAMFDKAFDDARAITMKTFAEEDSPSVQNVMYKMAEKILEAASEVATVSYALPNKHYFEIDLSWHKGLKNTGKDAEVYAPQSGPNGLIKCEVSRS

SEQ ID NO: 15655 - DNA, 5869 bp, Muscodor strobelii
  misc_feature: SGI EST ID NO. CUFF.37238.1
  misc_feature: Variant of the nucleotide sequence at SEQ ID NO 15653
ttcgcggtctagctcgacctcgccgatcgtttgagacccacgagcaagatgcccaatctgacttttgtgccctttgaaatgggaggcagttgcgattcttaaaagtcatactgactccgattacagacataacttttgcggaaataccgaagactattgcggaactggctgtcaacctatatttggcagtggctgcgacgtaggtcattctcaagtcaactttcaaaccgctcttgtgaatttcacgatcgccaaaagcagcttggccggcagtaaaggggcataaccattgaccatatgagattacagggcggcgctaccaccaccaccactacagttacgatcactccaaccgaaaccacttcgacggcaacccacacgacgacttcgacgccgggtatcacgatctctagagacggtacttgcggcccagtcgtgaatcacacatgtagaggctctctgtttggtcaatgttgttctgccttaacccatcgatgtggagctctgtgtttgattggagaatgtcttcccaaatacggcacgtgcattcttgacgatggtgtcaattcccaaacaatataaactgcatgcatcagtgggatcgtaaccgggatggttcatggcttgctgcttgatggctttgcgttctcgtgttggtcatctgcatgaaaggacactataggttggaggaacaataattagtggcgggacgactccagcatttctcaggtcctaaaggtaaagcgccctgatacctagtcgagagcaactgacggagttgcatggtgcgcgtagtgcagtggttgctctagagactttggtatgtaaaattttaggtaaaatatgcattgatagactagtaaaagagcttggttgttgttttggatgtggcgtggtgtctctcaattgatataccctacatgaatgtacgaggaagcgccggccggatggcaccggaagacccttgaatagcgagcgtcagggtgctgtgagtggtatctgcagaagctgcatagacttttgaaactggcgagatcgtcatactcaacatataatctgcgttatttggacttctagtggtccataaagcttgctatggtggctttctggacaagcaacaacttggtctaaaatccggatatcggaatttgagacggaggcaacggattagccatggctaatgttcgaaattcgacacctaaagtaacgtttaagatggcgctattgtattgacgggcacaggtcgttggcactgggaagcggcgtcttccggggcctgctcgcgaacccacctgcgggcattgaacggcttgcaccctttcggcgcacctccattccttccattgggacttttcaaggagctctccgacatacgccttgcattgctcaggccgaacagagctggtagatcagcgacccgcctcgcgccggttagatgcgcgacctctgctagtccaaacgtctcagaggccccatctgatctctctccgcggcgctgcacacgacattgatcgtcttctcgcgtcgtcgacacattcctagaacagcgagccaaggttatgttagatagagtttcgaacgaatgctgctagggtagtctgatatataaactaaagagtaacgccgctagatcttactttcgtggtctacatttgtgactatcagattcttaccaatcgaaaacggatatctgcagcttcactcataaccattctcccacataggtgccagcgtagtcccgtcaccctgtcgtgattcagaattaaacctcgttctgtttcactgagatacgttgtacaagataagctccctgtgcgcctcacccatcatcacgcattcagctgtgaatcggcaccaaatttccagcgaagagctgtgaagataaggtctcgttggggcagctctcctcgctgtccgccttccttctcttaaaccagtactattgctcccattgcagcttgcaagaatcacatcgccaccatgcctgtcctatcctcagcacgctacggcaaagacaatgtgcgtgtttacaaagtacaccgggatgaggcgacaggcgtacacaatgtgacggagatgaccgtgtgcgtgcttctagagggcaaaatcgaggagtcatacaccgtggcagataatagcccggtagtggcaacggattcaatgaagaacacaatttacatcaaagcaaaggagcacccggtaaacccaccggagctctacgcaagcatcctcggacagcatttcttggacacatacccacacatcaatgttgccaacgtgcacgtagaggtgaagcggtggacgcgaatggagattgatggtaaaacacacccacacagcttctaccgggacggtgaggagacgcgtaacgttgacgcccgcatttcacgtgccgatggtatagaaattactagcggcctcgcaggcctgctcgtgctaaagagcaccggctcacagttccatggctttatacgtgatgagttcactacgctcggtgagacctgggaccggatcttgtcgacctcagtcgatgcgacgtggaagtggaagactctctcaacgctgcaggcactgcagggcaatgtggccatgtttgacaaggccttcgacgacgcccgtgccatcactatgaagacttttgcagaggaggatagcccgtccgttcagaacgtcatgtataagatggctgagaagatactggaggcggcctcggaggtcgcgactgtgagctatgcgttgcccaataagcattactttgagatcgatctctcgtggcacaaaggcttgaagaacaccggcaaggatgccgaagtctacgccccacagtcaggaccaaacggcctcatcaaatgcgaagtgtcccgctcatagaaatctgcgttttttgagtaattacgtttaattttacggtcattctttggagttcgcaacgtttagtagatagcgtacgcgacgctttttaggttggtctctacgatgaccggaggtattttgtcatctaggaccacaatgcatcatggatcggaccaattctgtttgctgctgaatagacgcattaatcaagcgctagataacaatataccaactaatgacaatgttcatctgcttctaggtgaccaatttgaatgcttgcaaatcagccatggcttccgggatccaaggtgtcgactcacccccaagatattccgcaagatcgataccgagctgatgcgagaggtcgtagaaaatttgttcatggtagttgtacatattgtagtacacagcagatatacagagtaaggctatagtataagcagatggcatagctttagcacaaggtgctcatatcgtttgtccacaacgacgtctctctttcctgtcaccctccgatcgctcgactataacctctgagcgtctgcttgtctgatagccttgaccacgtccttccagccttcctcgccgactttgaccccaccaaagcttatcagattcttcttgtacggatgggcatctccctcgaaggccttgaggcgagccagacgcttgtctctcagtctgttcttgggcagcatgccggagacggccttccgcagaacctcggcgcctccatgcttgccgatgaggacgtccatggtgactgctctcagggaacctggtctcgtgttgtggcggtagtaggtcttttggtacttcttgcggccggtgacgtgcagggcggcacagttggtgacgacgacatagtcgccgcagtcggtggaagggtcccatataggcttgtgtttgcccatcaagatgacggcgattcgcgatgcgaggcgtcccagagaaggcggcgtcacgccgggctgtgtggagagagtcgggtgcggtgccgaggcagagacatggtgccatgctcgcgagtaggccagcttggtctgagatgaagaacaccgggtcaggttttgccagcagttggggcaggtagcgacatatggaaaagggaactcaccaaacctatcgtctgcgacatgctggctgctgtctgacccttctctggctactctcctcaattgatcctcccagtagctcaaaaagtcacagccctggaagcacagggaagaagaacttgaatggttctgctggctagccggcgatactttgtgggtttcgcgggttggtctctggggtccaagtcggcagcacggcgtctcacgcggttgatacatctcgaagctaagatagaaattgtagcttaggtagtctccgaaatacttccgcgacaaggcctacccgggactctcaacctttgcttgaactaggtacataacagagttcgatcaaattgaattacttatcctatcagacatacctacacattgcgacggagcagtcaagtgaagtgggtaattgagaatagtataactcactactccctgccgatgctaggaaagcagatagttaaagttactaaggctggactggaggtttgacgaattctgcttccttccgcatcggaagcttctggtagctagatggaccacccggcgtctctcattcggttcgaccctcactcagatttcaaagcaatctgagagtacttgtggaccgtcagtcgtgtaagtcaggctaagcaacatccgcccttcttctcgactacaacacgatgctcaataaatcggctcggttccgtatcccgttgccattcatcgccgccactgtcgctaccgcaggccttgcatacgtaacagcctcttattacagctctgtgcatcaacgcgacaagcaacaacgtagcaccaccaccaccatggcgcagaataagataaagactcccttccagactctattcgctgtgcacatgacctgcgaccattgcgtcaaatccgtttcagatgctcttttcagcctcgaggggattactaaggtcgatgccaacctcaaagatcagctagtcgccgttgagggaacagctgcgccatctgccattgtcagtgccatagaagcaacgggccgagacgccatcttgcgcggatcaggggcatcaaaccaggcggctgtctgcatccttgagacgtatcatcaaaatgagaaaggcgatgatgcgttaataccggcttcggagagttcccaagcaagcgatcgtgatgtcaaaggcttagcacgtatggttcaagtatctcctacgactacgctggttgacttgactctgcgaggagttactcctggtaagtataatgcgactattcgcgaatatggcgatctcaaatacggagcaacttccactggtccggtttgggctggcggcagtgacatatcacaacctcgtgggatccttggctctttggaaatcgggaaagatggccgcggtgcggttttcctggatcactcgtcccaagtttgggaagttatcggccatgctatgatcctatcgcgtcaagacggacgcgacaacgaagtaaaaaatgatggaaatacggtactcggtgtgattgcgcgaagtgctgggatgtgggataatgataaaacagtgtgttcatgctcgggcaagaccctttgggaagagcgtacagaccaagtcaaaaagggtatgatttgaacagatcatactgtacgtgttagactcgctggccgtttcatgccaagtaaaaacaaacgagacaaaaagaactccatcacttttatcgtcaaagctgcaggatcatgagccgtattccgaatcatcaataacaccctacgtagtattcagacaacgtgctatcccaactaggcttctgtagtcggcgaatcatgacagaagtacctgcagcagcaggatgttgacgagtgcacccacatgtacggatgattcgtttaatccccccacgacatgaagcgtctcgtcacattaatgtgactgtatgcaatgccg

SEQ ID NO: 15656 - DNA, 540 bp, Muscodor strobelii
  misc_feature: SGI cDNA ID NO. 565190
  misc_feature: Reduced expression when VOC is produced
  misc_feature: Encodes the peptide sequence at SEQ ID NO 15657
atgtcgcagacgataggtttgaccaagctggcctactcgcgagcatggcaccatgtctctgcctcggcaccgcacccgactctctccacacagcccggcgtgacgccgccttctctgggacgcctcgcatcgcgaatcgccgtcatcttgatgggcaaacacaagcctatatgggacccttccaccgactgcggcgactatgtcgtcgtcaccaactgtgccgccctgcacgtcaccggccgcaagaagtaccaaaagacctactaccgccacaacacgagaccaggttccctgagagcagtcaccatggacgtcctcatcggcaagcatggaggcgccgaggttctgcggaaggccgtctccggcatgctgcccaagaacagactgagagacaagcgtctggctcgcctcaaggccttcgagggagatgcccatccgtacaagaagaatctgataagctttggtggggtcaaagtcggcgaggaaggctggaaggacgtggtcaaggctatcagacaagcagacgctcagaggttatag

SEQ ID NO: 15657 - protein, 179 aa, Muscodor strobelii
  misc_feature: SGI Peptide ID NO. 565190
  misc_feature (39)..(156): Pfam Id: PF00572 Pfam Desc: Ribosomal protein L13
  misc_feature (39)..(149): Pfam Id: PF00572 Pfam Desc: Ribosomal protein L13
  misc_feature (1)..(179): NCBI GI: 116191663 Blast Desc: conserved [Chaetomium globosum CBS 148.51] gi|88181462|gb|EAQ88930.1| conserved [Chaetomium globosum CBS 148.51]
  misc_feature (1)..(179): NCBI GI: 46116566 Blast Desc: FG04125.1 [Gibberella zeae PH-1]
  misc_feature (1)..(179): NCBI GI: 256725739 Blast Desc: [Nectria haematococca mpVI 77-13-4]
  misc_feature (1)..(175): NCBI GI: 171687124 Blast Desc: protein product [Podospora anserina] gi|170943523|emb|CAP69176.1| protein product [Podospora anserina]
  misc_feature (1)..(179): NCBI GI: 85109839 Blast Desc: NCU07852 [Neurospora crassa OR74A] gi|28924765|gb|EAA33877.1| NCU07852 [Neurospora crassa OR74A]
  misc_feature (1)..(179): NCBI GI: 39939916 Blast Desc: MGG_05282 [Magnaporthe grisea 70-15] gi|145010435|gb|EDJ95091.1| MGG_05282 [Magnaporthe grisea 70-15]
  misc_feature (1)..(164): NCBI GI: 154312340 Blast Desc: BC1G_06203 [Botryotinia fuckeliana B05.10] gi|150850166|gb|EDN25359.1| BC1G_06203 [Botryotinia fuckeliana B05.10]
  misc_feature (1)..(164): NCBI GI: 156064191 Blast Desc: SS1G_00103 [Sclerotinia sclerotiorum 1980] gi|154690965|gb|EDN90703.1| SS1G_00103 [Sclerotinia sclerotiorum 1980]
  misc_feature (51)..(179): NCBI GI: 261358102 Blast Desc: 54S ribosomal protein L23 [Verticillium albo-atrum VaMs.102]
  misc_feature (1)..(159): NCBI GI: 225556197 Blast Desc: 50S ribosomal protein L13 [Ajellomyces capsulatus G186AR]
  misc_feature: Useful for introducing or modulating the production of volatile compounds
MSQTIGLTKLAYSRAWHHVSASAPHPTLSTQPGVTPPSLGRLASRIAVILMGKHKPIWDPSTDCGDYVVVTNCAALHVTGRKKYQKTYYRHNTRPGSLRAVTMDVLIGKHGGAEVLRKAVSGMLPKNRLRDKRLARLKAFEGDAHPYKKNLISFGGVKVGEEGWKDVVKAIRQADAQRL

SEQ ID NO: 15658 - DNA, 6243 bp, Muscodor strobelii
  misc_feature: SGI EST ID NO. CUFF.37239.2
  misc_feature: Variant of the nucleotide sequence at SEQ ID NO 15656
cggcattgcatacagtcacattaatgtgacgagacgcttcatgtcgtggggggattaaacgaatcatccgtacatgtgggtgcactcgtcaacatcctgctgctgcaggtacttctgtcatgattcgccgactacagaagcctagttgggatagcacgttgtctgaatactacgtagggtgttattgatgattcggaatacggctcatgatcctgcagctttgacgataaaagtgatggagttctttttgtctcgtttgtttttacttggcatgaaacggccagcgagtctaacacgtacagtatgatctgttcaaatcataccctttttgacttggtctgtacgctcttcccaaagggtcttgcccgagcatgaacacactgttttatcattatcccacatcccagcacttcgcgcaatcacaccgagtaccgtatttccatcattttttacttcgttgtcgcgtccgtcttgacgcgataggatcatagcatggccgataacttcccaaacttgggacgagtgatccaggaaaaccgcaccgcggccatctttcccgatttccaaagagccaaggatcccacgaggttgtgatatgtcactgccgccagcccaaaccggaccagtggaagttgctccgtatttgagatcgccatattcgcgaatagtcgcattatacttaccaggagtaactcctcgcagagtcaagtcaaccagcgtagtcgtaggagatacttgaaccatacgtgctaagcctttgacatcacgatcgcttgcttgggaactctccgaagccggtattaacgcatcatcgcctttctcattttgatgatacgtctcaaggatgcagacagccgcctctattggtcatgaccaggttgcttgcagtcagccaactagccaaagccgtgaaacaggacttgtttccaaatgtgatgaagtggaaaatgaggcgtaagattaaaggtggacgagtcaagattaatgtgaagggggcttgacgtcagggagaagcataacctcgctgagtgaaaggggtttgctaccaccagaccggaaagttggcgggtagcatatcgatggggagaaagatatactgaactcacgatggcgcagctggtacgacggacactagaatcagctgatttatgttcggacgatgacgacggattctagaacgaggaaagaacccaaggaatcggttccacggcagaaccaaggtgtaatcccctcgaggctgaaaagagcatctgaaacggatttgacgcaatggtcgcaggtcatgtgcacagcgaatagagtctaagatgagttcacgtcggatttatcagccatcttcactaccaatacaagtcgagagatcagtcagaaagacggcgcaggtgttttcatttaggacacgtagtagttaattcttggtttggtaagataaataagacagtatttttacgaacctggaagggagtctttatcttattctgcgccatggtggtggtggtgctacgttgttgcttgtcgcgttgatgcacagagctgtaataagaggctgttacgtatgcaaggcctgcggtagcgacagtggcggcgatgaatggcaacgggatacggaaccgagccgatttattgagcatcgtgttgtagtcgagaagaagggcggatgttgcttagcctgacttacacgactgacggtccacaagtactctcagattgctttgaaatctgagtgagggtcgaaccgaatgagagacgccgggtggtccatctagctaccagaagcttccgatgcggaaggaagcagaattcgtcaaacctccagtccagccttagtaactttaactatctgctttcctagcatcggcagggagtagtgagttatactattctcaattacccacttcacttgactgctccgtcgcaatgtgtaggtatgtctgataggataagtaattcaatttgatcgaactctgttatgtacctagttcaagcaaaggttgagagtcccgggtaggccttgtcgcggaagtatttcggagactacctaagctacaatttctatcttagcttcgagatgtatcaaccgcgtgagacgccgtgctgccgacttggaccccagagaccaacccgcgaaacccacaaagtatcgccggctagccagcagaaccattcaagttcttcttccctgtgcttccagggctgtgactttttgagctactgggaggatcaattgaggagagtagccagagaagggtcagacagcagccagcatgtcgcagacgataggtttgaccaagctggcctactcgcgagcatggcaccatgtctctgcctcggcaccgcacccgactctctccacacagcccggcgtgacgccgccttctctgggacgcctcgcatcgcgaatcgccgtcatcttgatgggcaaacacaagcctatatgggacccttccaccgactgcggcgactatgtcgtcgtcaccaactgtgccgccctgcacgtcaccggccgcaagaagtaccaaaagacctactaccgccacaacacgagaccaggttccctgagagcagtcaccatggacgtcctcatcggcaagcatggaggcgccgaggttctgcggaaggccgtctccggcatgctgcccaagaacagactgagagacaagcgtctggctcgcctcaaggccttcgagggagatgcccatccgtacaagaagaatctgataagctttggtggggtcaaagtcggcgaggaaggctggaaggacgtggtcaaggctatcagacaagcagacgctcagaggttatagtcgagcgatcggagggtgacaggaaagagagacgtcgttgtggacaaacgatatgagcaccttgtgctaaagctatgccatctgcttatactatagccttactctgtatatctgctgtgtactacaatatgtacaactaccatgaacaaattttctacgacctctcgcatcagctcggtatcgatcttgcggaatatcttgggggtgagtcgacaccttggatcccggaagccatggctgatttgcaagcattcaaattggtcacctagaagcagatgaacattgtcattagttggtatattgttatctagcgcttgattaatgcgtctattcagcagcaaacagaattggtccgatccatgatgcattgtggtcctagatgacaaaatacctccggtcatcgtagagaccaacctaaaaagcgtcgcgtacgctatctactaaacgttgcgaactccaaagaatgaccgtaaaattaaacgtaattactcaaaaaacgcagatttctatgagcgggacacttcgcatttgatgaggccgtttggtcctgactgtggggcgtagacttcggcatccttgccggtgttcttcaagcctttgtgccacgagagatctataacgagattgccggttagaataggggtagactgatcagatagacgagcgacgacataccgatctcaaagtaatgcttattgggcaacgcatagctcacagtcgcgacctccgaggccgcctccagtatcttctcagccatcttatacatgacgttctgaacggacgggctatcctcctctgcaaaagtcttcatagtgatggcacgggcgtcgtcgaaggccttgtcaaacatggccacattgccctgcagtgcctgcagcgttgagagagtcttccacttccacgtcgcatcgactgaggtcgacaagatccggtcccaggtctcaccgagcgtagtgaactcatcacgtataaagccatggaactgtgagccggtgctctttagcacgagcaggcctgcgaggccgctagtaatttctataccatcggcacgtgaaatgcgggcgtcaacgttacgcgtctcctcaccgtcccggtagaagctgtgtgggtgtgttttaccatcaatctccattcgcgtccaccgcttcacctctacgtgcacgttggcaacattgatgtgtgggtatgtgtccaagaaatgctgtccgaggatgcttgcgtagagctccggtgggtttaccgggtgctcctttgctttgatgtaaattgtgttcttcattgaatccgttgccactaccgggctattatctgccacggtgtatgactcctcgattttgccctctagaagcacgcacacggtcatctccgtcacattgtgtacgcctgtcgcctcatcccggtgtactttgtaaacacgcacattgtctttgccgtagcgtgctgaggataggacaggcatggtggcgatgtgattcttgcaagctgcaatgggagcaatagtactggtttaagagaaggaaggcggacagcgaggagagctgccccaacgagaccttatcttcacagctcttcgctggaaatttggtgccgattcacagctgaatgcgtgatgatgggtgaggcgcacagggagcttatcttgtacaacgtatctcagtgaaacagaacgaggtttaattctgaatcacgacagggtgacgggactacgctggcacctatgtgggagaatggttatgagtgaagctgcagatatccgttttcgattggtaagaatctgatagtcacaaatgtagaccacgaaagtaagatctagcggcgttactctttagtttatatatcagactaccctagcagcattcgttcgaaactctatctaacataaccttggctcgctgttctaggaatgtgtcgacgacgcgagaagacgatcaatgtcgtgtgcagcgccgcggagagagatcagatggggcctctgagacgtttggactagcagaggtcgcgcatctaaccggcgcgaggcgggtcgctgatctaccagctctgttcggcctgagcaatgcaaggcgtatgtcggagagctccttgaaaagtcccaatggaaggaatggaggtgcgccgaaagggtgcaagccgttcaatgcccgcaggtgggttcgcgagcaggccccggaagacgccgcttcccagtgccaacgacctgtgcccgtcaatacaatagcgccatcttaaacgttactttaggtgtcgaatttcgaacattagccatggctaatccgttgcctccgtctcaaattccgatatccggattttagaccaagttgttgcttgtccagaaagccaccatagcaagctttatggaccactagaagtccaaataacgcagattatatgttgagtatgacgatctcgccagtttcaaaagtctatgcagcttctgcagataccactcacagcaccctgacgctcgctattcaagggtcttccggtgccatccggccggcgcttcctcgtacattcatgtagggtatatcaattgagagacaccacgccacatccaaaacaacaaccaagctcttttactagtctatcaatgcatattttacctaaaattttacataccaaagtctctagagcaaccactgcactacgcgcaccatgcaactccgtcagttgctctcgactaggtatcagggcgctttacctttaggacctgagaaatgctggagtcgtcccgccactaattattgttcctccaacctatagtgtcctttcatgcagatgaccaacacgagaacgcaaagccatcaagcagcaagccatgaaccatcccggttacgatcccactgatgcatgcagtttatattgtttgggaattgacaccatcgtcaagaatgcacgtgccgtatttgggaagacattctccaatcaaacacagagctccacatcgatgggttaaggcagaacaacattgaccaaacagagagcctctacatgtgtgattcacgactgggccgcaagtaccgtctctagagatcgtgatacccggcgtcgaagtcgtcgtgtgggttgccgtcgaagtggtttcggttggagtgatcgtaactgtagtggtggtggtggtagcgccgccctgtaatctcatatggtcaatggttatgcccctttactgccggccaagctgcttttggcgatcgtgaaattcacaagagcggtttgaaagttgacttgagaatgacctacgtcgcagccactgccaaatataggttgacagccagttccgcaatagtcttcggtatttccgcaaaagttatgtctgtaatcggagtcagtatgacttttaagaatcgcaactgcctcccatttcaaagggcacaaaagtcagattgggcatcttgctcgtgggtctcaaacgatcggcgaggtcgagctagaccgcgaa

SEQ ID NO: 15659 - DNA, 933 bp, Muscodor strobelii
  misc_feature: SGI cDNA ID NO. 565191
  misc_feature: Reduced expression when VOC is produced
  misc_feature: Encodes the peptide sequence at SEQ ID NO 15660
atgctcaataaatcggctcggttccgtatcccgttgccattcatcgccgccactgtcgctaccgcaggccttgcatacgtaacagcctcttattacagctctgtgcatcaacgcgacaagcaacaacgtagcaccaccaccaccatggcgcagaataagataaagactcccttccagactctattcgctgtgcacatgacctgcgaccattgcgtcaaatccgtttcagatgctcttttcagcctcgaggggattactaaggtcgatgccaacctcaaagatcagctagtcgccgttgagggaacagctgcgccatctgccattgtcagtgccatagaagcaacgggccgagacgccatcttgcgcggatcaggggcatcaaaccaggcggctgtctgcatccttgagacgtatcatcaaaatgagaaaggcgatgatgcgttaataccggcttcggagagttcccaagcaagcgatcgtgatgtcaaaggcttagcacgtatggttcaagtatctcctacgactacgctggttgacttgactctgcgaggagttactcctggtaagtataatgcgactattcgcgaatatggcgatctcaaatacggagcaacttccactggtccggtttgggctggcggcagtgacatatcacaacctcgtgggatccttggctctttggaaatcgggaaagatggccgcggtgcggttttcctggatcactcgtcccaagtttgggaagttatcggccatgctatgatcctatcgcgtcaagacggacgcgacaacgaagtaaaaaatgatggaaatacggtactcggtgtgattgcgcgaagtgctgggatgtgggataatgataaaacagtgtgttcatgctcgggcaagaccctttgggaagagcgtacagaccaagtcaaaaagggtatgatttga

SEQ ID NO: 15660 - protein, 310 aa, Muscodor strobelii
  misc_feature: SGI Peptide ID NO. 565191
  misc_feature (60)..(121): Pfam Id: PF00403 Pfam Desc: Heavy-metal-associated domain
  misc_feature (54)..(310): NCBI GI: 46116564 Blast Desc: FG04124.1 [Gibberella zeae PH-1]
  misc_feature (54)..(310): NCBI GI: 171687122 Blast Desc: protein product [Podospora anserina] gi|170943522|emb|CAP69175.1| protein product [Podospora anserina]
  misc_feature (43)..(310): NCBI GI: 164424166 Blast Desc: NCU07851 [Neurospora crassa OR74A] gi|157070402|gb|EAA33876.2| NCU07851 [Neurospora crassa OR74A]
  misc_feature (66)..(310): NCBI GI: 261358103 Blast Desc: superoxide dismutase 1 copper chaperone [Verticillium albo-atrum VaMs.102]
  misc_feature (54)..(310): NCBI GI: 256726148 Blast Desc: [Nectria haematococca mpVI 77-13-4]
  misc_feature (54)..(310): NCBI GI: 154312338 Blast Desc: BC1G_06202 [Botryotinia fuckeliana B05.10] gi|150850165|gb|EDN25358.1| BC1G_06202 [Botryotinia fuckeliana B05.10]
  misc_feature (57)..(310): NCBI GI: 119480863 Blast Desc: superoxide dismutase copper chaperone Lys7, [Neosartorya fischeri NRRL 181] gi|119408614|gb|EAW18563.1| superoxide dismutase copper chaperone Lys7, [Neosartorya fischeri
  misc_feature (57)..(310): NCBI GI: 146322880 Blast Desc: superoxide dismutase copper chaperone Lys7 [Aspergillus fumigatus Af293] gi|129558506|gb|EAL93265.2| superoxide dismutase copper chaperone Lys7, [Aspergillus Af293]
  misc_feature (57)..(310): NCBI GI: 159129384 Blast Desc: superoxide dismutase copper chaperone Lys7, [Aspergillus fumigatus A1163]
  misc_feature (57)..(309): NCBI GI: 115395886 Blast Desc: conserved [Aspergillus terreus NIH2624] gi|114193151|gb|EAU34851.1| conserved [Aspergillus terreus NIH2624]
  misc_feature: Useful for introducing or modulating the production of volatile compounds
MLNKSARFRIPLPFIAATVATAGLAYVTASYYSSVHQRDKQQRSTTTTMAQNKIKTPFQTLFAVHMTCDHCVKSVSDALFSLEGITKVDANLKDQLVAVEGTAAPSAIVSAIEATGRDAILRGSGASNQAAVCILETYHQNEKGDDALIPASESSQASDRDVKGLARMVQVSPTTTLVDLTLRGVTPGKYNATIREYGDLKYGATSTGPVWAGGSDISQPRGILGSLEIGKDGRGAVFLDHSSQVWEVIGHAMILSRQDGRDNEVKNDGNTVLGVIARSAGMWDNDKTVCSCSGKTLWEERTDQVKKGMI

SEQ ID NO: 15661 - DNA, 5869 bp, Muscodor strobelii; identical to SEQ ID NO: 15655
  misc_feature: SGI EST ID NO. CUFF.37238.1
  misc_feature: Variant of the nucleotide sequence at SEQ ID NO 15659

SEQ ID NO: 15662 - DNA, 1560 bp, Muscodor strobelii
  misc_feature: SGI cDNA ID NO. 565192
  misc_feature: Reduced expression when VOC is produced
  misc_feature: Encodes the peptide sequence at SEQ ID NO 15663
atgtctttaaaacaggagatagaatcctgggtcacggcccttggccgatacgacaacaacgaattcgaagaggcactgagagaatttgagaacattgccgatacatctaagatcctattcaatattggcgtgattcatgcaacactgggcgaacacgagaaagctgttgaaagctaccaaagatccatcgcactggataagtaccttgcggtcgcgtacttccaacaaggcgtatcgaacttcttgctcggagatttcgaagaagccctcgccaacttcaacgatacgctgttgtacctcagaggtaacaccatgattgattatgcgcagctgggcttgcttttcaaattgtactcttgtgaggtgctcttcaatcgtggcctttgctatatatacctgcaaaataaggatgcgggcatgcaggatttgagctatgccgtgaaagagaaagttgtggaggaccacaatgtgatagacgaggcgatacgagaagaagccgagggatacaccgttttctctatacccgtcggggtggtttatcgaccgaatgaagcaaaggtgcgaaatttgaagaccaaggactatttgggcaaagctcgtctggtggccgcgtcagaccgatccaatgcttttacaggatttgctgggtctgagatcaagaatgcagggagagctgctgagaaggacgatcgtcccgcagacaatatctcatttgcagctacgaatctggtgaaacctggcctgcaaagcagaaggcaaatgtcggagccacccaatggccgcaatgctttcccccctacgccaccccctgagaatgataagcctgcgggtatgagccgaggtgcttctgttcgaaatggacctaaacctatgcctgcgaaactcaacatccctgactcgaatggacggagtaatagtcggtatgagaagacgagttccccacaaaatgatcgcagagcgcccgccagggcggcctcggaagcacgttcgcctcctcagcgaagctactcgcgagccgagcagccaaggagcagacgtaacgacgaagagagctaccctgacgacgtttatgatatgtatggaggaggaggaggtagtaataatggaaacggagggcggaggtcaggtggtagcaaacggaaccagccccgatatatcgaagaagaggaagagggcagcgactacgactcatttgatgagggcgagtttgagatggtttcgaacagacgacctgggacttcgacgactggtggctcaacccgcggaggctctagacggccggaaatccgcaaagtcagagttaaggtgcatgcagaagacgttcggttcatcatggtcggtgcagcagttgaatttcccgatctggtagaccgcgtcagggaaaagtttgggatacgtcgtcggttcaagatcaaggtgcgcgatgaagacgcacccgatgacatgatcacgatgggagaccaggacgatttggatatgattatgagcagcgtgaagcaggcagccagaaaacaaaatctggatactgggaaaatggagatttgggttcaagaattatag

SEQ ID NO: 15663 - protein, 519 aa, Muscodor strobelii
  misc_feature: SGI Peptide ID NO. 565192
  misc_feature (36)..(69): Pfam Id: PF00515 Pfam Desc: Tetratricopeptide repeat
  misc_feature (36)..(69): Pfam Id: PF07719 Pfam Desc: Tetratricopeptide repeat
  misc_feature (429)..(519): Pfam Id: PF00564 Pfam Desc: PB1 domain
  misc_feature (1)..(519): NCBI GI: 116191669 Blast Desc: CHGG_05552 [Chaetomium globosum CBS 148.51] gi|88181465|gb|EAQ88933.1| CHGG_05552 [Chaetomium globosum CBS 148.51]
  misc_feature (1)..(516): NCBI GI: 154312334 Blast Desc: BC1G_06200 [Botryotinia fuckeliana B05.10] gi|150850163|gb|EDN25356.1| BC1G_06200 [Botryotinia fuckeliana B05.10] gi|164513854|emb|CAP12326.1| p67 phox homologue
  misc_feature (1)..(518): NCBI GI: 39939920 Blast Desc: MGG_05280 [Magnaporthe grisea 70-15] gi|145010437|gb|EDJ95093.1| MGG_05280 [Magnaporthe grisea 70-15]
  misc_feature (1)..(518): NCBI GI: 256726147 Blast Desc: [Nectria haematococca mpVI 77-13-4]
  misc_feature (1)..(519): NCBI GI: 46116562 Blast Desc: FG04123.1 [Gibberella zeae PH-1]
  misc_feature (1)..(517): NCBI GI: 171687120 Blast Desc: protein product [Podospora anserina] gi|170943521|emb|CAP69174.1| protein product [Podospora anserina]
  misc_feature (1)..(519): NCBI GI: 117413993 Blast Desc: NADPH oxidase regulator NoxR [Epichloe festucae]
  misc_feature (1)..(516): NCBI GI: 156064187 Blast Desc: SS1G_00101 [Sclerotinia sclerotiorum 1980] gi|154690963|gb|EDN90701.1| SS1G_00101 [Sclerotinia sclerotiorum 1980]
  misc_feature (1)..(519): NCBI GI: 261358105 Blast Desc: neutrophil cytosol factor 2 [Verticillium albo-atrum VaMs.102]
  misc_feature (1)..(519): NCBI GI: 85109835 Blast Desc: NCU07850 [Neurospora crassa OR74A] gi|28924763|gb|EAA33875.1| conserved [Neurospora crassa OR74A]
  misc_feature: Useful for introducing or modulating the production of volatile compounds
MSLKQEIESWVTALGRYDNNEFEEALREFENIADTSKILFNIGVIHATLGEHEKAVESYQRSIALDKYLAVAYFQQGVSNFLLGDFEEALANFNDTLLYLRGNTMIDYAQLGLLFKLYSCEVLFNRGLCYIYLQNKDAGMQDLSYAVKEKVVEDHNVIDEAIREEAEGYTVFSIPVGVVYRPNEAKVRNLKTKDYLGKARLVAASDRSNAFTGFAGSEIKNAGRAAEKDDRPADNISFAATNLVKPGLQSRRQMSEPPNGRNAFPPTPPPENDKPAGMSRGASVRNGPKPMPAKLNIPDSNGRSNSRYEKTSSPQNDRRAPARAASEARSPPQRSYSRAEQPRSRRNDEESYPDDVYDMYGGGGGSNNGNGGRRSGGSKRNQPRYIEEEEEGSDYDSFDEGEFEMVSNRRPGTSTTGGSTRGGSRRPEIRKVRVKVHAEDVRFIMVGAAVEFPDLVDRVREKFGIRRRFKIKVRDEDAPDDMITMGDQDDLDMIMSSVKQAARKQNLDTGKMEIWVQEL

SEQ ID NO: 15664 - DNA, 3419 bp, Muscodor strobelii
  misc_feature: SGI EST ID NO. CUFF.37204.0
  misc_feature: Variant of the nucleotide sequence at SEQ ID NO 15662
gggatcaatgcggcttgcatgacatttgctgatcgcgaagaacaagaaccagaacagaaagtctctcgttggaggccacgacactctttggctctccaactcttcggcagtcaaccggtcttcgatcgcgaaaaggttagatgccgacacgcgcacaaacatggcggcatggatgtctgcctgtattggaagatatgtactcaagccatcatgatcaggctaaggtagcatgacaatgggctagctatgagatgacgagttaccatagacggcgcaatacacattctcaggcctatcatatgctgattttgacactattcctcttgacttgacacagtaggggctgtatgacctatcgaattttcatcctcctgtggcttgtagcaaattgtctgagccgtgtacagacagcttgcgggtatacgtgccgcacgtggtccagcttaagaatagacgcctggaaggatagcaacaaatgcaaataaaccaacagactcgcggttctgctcaaacacagagcagcaaatgcactgatctggcccccggcgctaattacgatcttgctgccatccatctagatttgaggaatcctccgtgctggcatatacttctcagccccgggaaacaggatcaagagactacttgtcactcgcatcgagcctgtgcgagcgcaagccgaggcgggtcttgacccctgcccctgccggtcctttcgaccctgagctgcatcatgatcgttttgactgccagtcccagccaagtacttacattaacccccccattcacggcattacctcagctgtacgagtacggcatgatttccagttgagtactggccctcatctgcccggttgatcaatttcgtcccgtccatccaatctctttcggcacaacaatgccttgctgagcccatcatctaccaacactgtcctttccgcctcgctcgctctcgtctccgtcgacaaaggcgctggctccattgtcatcatcatcctcgccgctaatccattcggcaccacgcgcactagggggagactatcgctgctagtcaagaaatctgggcccctctcaatccgatatatcgaccagggagtctgatcttggtgcatttctacctgcatatcccaccatcttgtggctctgcctgcatacgatcgagacgcataacgaagttctgcacatcaacctattatcatcctcgaacaatcgatccgacaccgttgatatcgattgtggacagttggacggtctttgattttatacacaaatcccagatactggaagaaggactggacttgcctgccaaaggccccatcgatccgacgagtgtaggaaacgtgaagaaagccaggagaaccgataaagcgcctctacaagtatcgttgccagtctggcaactttactttctcgtcaaagcgatagtattcaggtattgggtgctattgactaggcgcaatgtctttaaaacaggagatagaatcctgggtcacggcccttggccgatacgacaacaacgaattcgaagaggcactgagagaatttgagaacattgccgatacatctaagatcctattcaatattggcgtgattcatgcaacactgggcgaacacgagaaagctgtgagtcgacaattgattccgtcccgctacatactaataaaccatgaacaggttgaaagctaccaaagatccatcgcactggataagtaccttgcggtcgcgtacttccaacaaggcgtatcgaacttcttgctcggagatttcgaagaagccctcgccaacttcaacgatacgctgttgtacctcagaggtaacaccatgattgattatgcgcagctgggcttgcttttcaaattgtactcttgtgaggtgctcttcaatcgtggcctttgctatatatacctgcaaaataaggatgcgggcatgcaggatttgagctatgccgtgaaagagaaagttgtggaggaccacaatgtgatagacgaggcgatacgagaagaagccgaggtaggatgcaacataccattcgaaacccgcgtattctaatctcttctcagggatacaccgttttctctatacccgtcggggtggtttatcgaccgaatgaagcaaaggtgcgaaatttgaagaccaaggactatttgggcaaagctcgtctggtggccgcgtcagaccgatccaatgcttttacaggatttgctgggtctgagatcaagaatgcagggagagctgctgagaaggacgatcgtcccgcagacaatatctcatttgcagctacgaatctggtgaaacctggcctgcaaagcagaaggcaaatgtcggagccacccaatggccgcaatgctttcccccctacgccaccccctgagaatgataagcctgcgggtatgagccgaggtgcttctgttcgaaatggacctaaacctatgcctgcgaaactcaacatccctgactcgaatggacggagtaatagtcggtatgagaagacgagttccccacaaaatgatcgcagagcgcccgccagggcggcctcggaagcacgttcgcctcctcagcgaagctactcgcgagccgagcagccaaggagcagacgtaacgacgaagagagctaccctgacgacgtttatgatatgtatggaggaggaggaggtagtaataatggaaacggagggcggaggtcaggtggtagcaaacggaaccagccccgatatatcgaagaagaggaagagggcagcgactacgactcatttgatgagggcgagtttgagatggtttcgaacagacgacctgggacttcgacgactggtggctcaacccgcggaggctctagacggccggaaatccgcaaagtcagagttaaggtgcatgcagaagacgttcggttcatcatggtcggtgcagcagttgaatttcccgatctggtagaccgcgtcagggaaaagtttgggatacgtcgtcggttcaagatcaaggtgcgcgatgaagacgcacccgatgacatgatcacgatgggagaccaggacgatttggatatgattatgagcagcgtgaagcaggcagccagaaaacaaaatctggatactgggaaaatggagatttgggttcaagaattatagactttttgtttatgcattttggcggcagtaattacaacaacgatacccggcattgcaacttgagcattgcgtgatagataaataatgggcgcatggcttggtggcgagtgcgtgtctgttctgctttagcaaattttgaatgaagattcgctcgtcttatcattttctattttgacttgttctactgctatgaatacgtgtttgccaattcttgtttaggtacctatagtagtttggtgatttagtgcagctagaggtgtggactgcgccgcctagctgtcaccttggccccggcatcgaaac

SEQ ID NO: 15665 - DNA, 4008 bp, Muscodor strobelii
  misc_feature: SGI cDNA ID NO. 565193
  misc_feature: Encodes the peptide sequence at SEQ ID NO 15666
atgcgaccgccgccagcactgcagtccctggctgccgcctctctcaacccctcgctgaacccctctgccgcgccctcgcgcaccagcctcgaccgcgatggcggcctccagcccccgtcctccgcccagcccgcccgcaacctctccgcctcggccctgtcctcctacgcgccccgcggctcctcgctcaacccctcctctgtagccccgggctccttcaactctgagctgcgtagccagatggctcagtctcgcgctggttcaagggccgatatctacaacctcgagaagttggacgaggacgacgagtcggcggtcgagcagaccctcactgcgctcaaggactccttggtccgggagatgaagatcaaggagggcagcgaaaacctgctcgaggccttgaacgttaagaaggcgaaacagaccaaagagcagcgccaccgtgtcgaggtcgaactcagcgcctccaatgcgaggatcagggagctgaggcagaagatcaccgatgcgcaagcaacaaagatagtgcccagcactcccaagaagaaccgcagcgaaggtggcttgcatcaaaatggcctgcggtcgccccccagcgcatcgaggagcgctgctgggtccgagatagacgagccagcagaatcccctacctttgctctcgccgagatcttacaggctctagaggtcgaggggatgacaccagagtactatgttggacgagcaaacaatctggtggatctgttcaagagatatccaaccctgaaatacgacctcgtgtggtccatctttggagaccgcatgcaggtcatgttactaagcggcagtcgtgaggttgtagcgtcgggataccggatgctgcgatacgccatctctgatcttgcttcgctcaagaagattcgctctctcaacaccgattacatggtagtgacctcactggccaaagatcggaaagccgatgtcgagcgcgaacaagccctcaagtttgtgcgggcatttttggatgtcaaggatggtgcacgtgagatatcgcgagctctcgtgagaactattgctgcagtagctggacacgtcgaagacaggcttcgcccaatttgcgttgagacccttgcagagatcctgctccgagatcccgccctgctcattgcctcgggtggcctcccccctatctcagaggctctggctgaggggacctacaagtctccagaatcactgtcctctgcctttctctacttgctcgacagcccccagactcggagatatcttcgtgcaggatacgacttggaggttatgttcacggccttcacagacgtcctttactcgtacgaaacaaccatcaaacagaatgccaaagctatacaaactgcgctcaagtcctggtcagggcttatgacgctgtccatgttcaactttcgagccatcaggtccctggtctcaagcttgactctgccaaacaacaacattcgcgataccattctagacctgctatactcgctgcttcggatcaaaccgccttcgtgggcgacttcgtaccttgcgggacgacgcttaacaacctatgggcgagtggctactctcaaagcagcgtctaataaaggcgaagtggcctacgaagacgagagcacggagcagaattttgtcgagcattacactgccctcttactggctctcttgataaaatctggcttgatgccaaacttgttagatgttgcgcagaacgcggaagagcccatgttgaaacgcaaagcaactctgctaataggcgaatctttgaagcttgccagtcgaattctccccccctcttggagcagtgagctccagctgctcccagaactgttcactgccgctgttcgactccgggacgaggctcactacaatgccactggcattgtttatcagatcagcactgtgagtcgtacgttgcatcggtcatctacgtccggatacacgtcaagcgggttgtccagcagtcttgcagagttggcgagctcttttgaggacgcccccaaaaataacaaccctggtgccacggatgatgccacttttcgccaacttctaatcgattcgggcgttcttggccactcaaatccaataaagtggaagtgggacattgtgctcaagatcattgaaggcccgctcacaagcggaaagcgcttagaggaagccatcagagcctcgaagttcatcaagagaattgtagggttttaccgtcctttcaagtacaagttctcagaggtcccgaatacgcgcaacacacagaaatacgtccgtgtcggctgcgctttgatgcacacgcttttacagacaccggagggtatccgctatctttcagacaataagttgttgagacaaatagcagagtgtttagcacagtgtgacccaacgagcggtcttaccgctcaatacccgatgttctcaagagaccgcttaacggatacgctctgcggtggttattttccaatacttggcgttctaagtagcgaacctcaaggcttgcagatgcttgaacgatggcgtatattcaatatgatgtaccacatcgtggattttaagcagcgaccagatctcatcaaagtcatactcaccaatctcgactatagtttgcaaggccacccacgtgttcttttgtcaaaagcactcactgctggcgctaaagatatgcggattcacgctacgaatatccttcggaagtactcgactttacagcgaattgcaccgtctggtcaggttatttcagatgccaagtgggctatccagctgctagtcactcaactctacgatcccgaaattgaggtgtgcgctactgccgtcaagacacttgaaaaggcttgcaacagcaaaccgctacttgaatacattgtagaatgccggcctgctcttgatcacttgggagagattggggctccactcctccttcggtttctatccacctctatcggctatcactacctagacggactcgactatatcagtaatgaaatggatgactggtttctcggtcgcaatgacagttacgttgctctgatagaggcaagccttgctcgttctttcctcgagaatgctgatgagcaaccgaaccgcttgaccatgtatggagaggaagaagatgcagaccatgatagtcatataccgccgcatttctaccgtgaattgacacgcacgaaagaaggctgtaaactcttagaaaacaagggccattttctcgagtttgcatccaccattggagactacgggatgcaatccgacgacgccgagctgattactaaagtgaagggttgcttatgggcagtaggaaacgtcggttgcatggagttgggagctcccttcttagaatcaacgaatgtcgttggaaacatcgtggcaattgcagagtcacatgatgtaatgagccttcgtgggacagccttcttcgttctgggcctgatttctaggtcagtacatggactggagattctctcggaacacggatgggactccaacactacaccgctggggagatctttcggtctgtgcatacctgccgatctgtccaaattcttctcttacaagccctggaaacatgaggctcccgtgactatcaccctgtgcgacacacagaaaacgatacaggactcaaactcgatagacattgacgacagtgatgaatcgaacaacagaatactggagcttctggtagagatgggcaatctagtcctttacaagaaagccagaggtgaattgcatcagcttcgacagcagaaggttgccggattcaaacagccagccatgtttctaaaggttctcgggttcctagaaacacataactacagactcacggaccgacatttcatcatagagctctttgacaagagtgtcctatcccacatcgtgtatggggaaggagggagtagtgatgaagactcgagcaattctggagatgagcaacgtacagaaagacaaaggagcgttagtggcagtactcctaacattttagagaaggctgcgaacatgatctataagggttcgatctag

SEQ ID NO: 15666 - protein, 1335 aa, Muscodor strobelii
  misc_feature: SGI Peptide ID NO. 565193
  misc_feature (108)..(186): Pfam Id: PF02185 Pfam Desc: Hr1 repeat
  misc_feature (3)..(1316): NCBI GI: 39939912 Blast Desc: MGG_05284 [Magnaporthe grisea 70-15] gi|145010433|gb|EDJ95089.1| MGG_05284 [Magnaporthe grisea 70-15]
  misc_feature (1)..(1316): NCBI GI: 46116570 Blast Desc: FG04127.1 [Gibberella zeae PH-1]
  misc_feature (15)..(1200): NCBI GI: 85109843 Blast Desc: NCU07854 [Neurospora crassa OR74A] gi|28924767|gb|EAA33879.1| conserved [Neurospora crassa OR74A]
  misc_feature (27)..(1300): NCBI GI: 171687128 Blast Desc: protein product [Podospora anserina] gi|170943525|emb|CAP69178.1| protein product [Podospora anserina]
  misc_feature (27)..(1292): NCBI GI: 116191659 Blast Desc: CHGG_05547 [Chaetomium globosum CBS 148.51] gi|88181460|gb|EAQ88928.1| CHGG_05547 [Chaetomium globosum CBS 148.51]
  misc_feature (21)..(1319): NCBI GI: 261358099 Blast Desc: ste16 [Verticillium albo-atrum VaMs.102]
  misc_feature (27)..(1102): NCBI GI: 154312330 Blast Desc: BC1G_06198 [Botryotinia fuckeliana B05.10] gi|150850161|gb|EDN25354.1| BC1G_06198 [Botryotinia fuckeliana B05.10]
  misc_feature (18)..(1305): NCBI GI: 212543599 Blast Desc: cytosolic regulator Pianissimo, [Penicillium marneffei ATCC 18224] gi|210066861|gb|EEA20954.1| cytosolic regulator Pianissimo, [Penicillium marneffei ATCC 18224]
  misc_feature (22)..(1300): NCBI GI: 259479866 Blast Desc: TPA: cytosolic regulator Pianissimo, (AFU_orthologue; AFUA_2G10460) [Aspergillus nidulans FGSC A4]
  misc_feature (61)..(1305): NCBI GI: 242787209 Blast Desc: cytosolic regulator Pianissimo, [Talaromyces stipitatus ATCC 10500] gi|218721105|gb|EED20524.1| cytosolic regulator Pianissimo, [Talaromyces stipitatus ATCC 10500]
MRPPPALQSLAAASLNPSLNPSAAPSRTSLDRDGGLQPPSSAQPARNLSASALSSYAPRGSSLNPSSVAPGSFNSELRSQMAQSRAGSRADIYNLEKLDEDDESAVEQTLTALKDSLVREMKIKEGSENLLEALNVKKAKQTKEQRHRVEVELSASNARIRELRQKITDAQATKIVPSTPKKNRSEGGLHQNGLRSPPSASRSAAGSEIDEPAESPTFALAEILQALEVEGMTPEYYVGRANNLVDLFKRYPTLKYDLVWSIFGDRMQVMLLSGSREVVASGYRMLRYAISDLASLKKIRSLNTDYMVVTSLAKDRKADVEREQALKFVRAFLDVKDGAREISRALVRTIAAVAGHVEDRLRPICVETLAEILLRDPALLIASGGLPPISEALAEGTYKSPESLSSAFLYLLDSPQTRRYLRAGYDLEVMFTAFTDVLYSYETTIKQNAKAIQTALKSWSGLMTLSMFNFRAIRSLVSSLTLPNNNIRDTILDLLYSLLRIKPPSWATSYLAGRRLTTYGRVATLKAASNKGEVAYEDESTEQNFVEHYTALLLALLIKSGLMPNLLDVAQNAEEPMLKRKATLLIGESLKLASRILPPSWSSELQLLPELFTAAVRLRDEAHYNATGIVYQISTVSRTLHRSSTSGYTSSGLSSSLAELASSFEDAPKNNNPGATDDATFRQLLIDSGVLGHSNPIKWKWDIVLKIIEGPLTSGKRLEEAIRASKFIKRIVGFYRPFKYKFSEVPNTRNTQKYVRVGCALMHTLLQTPEGIRYLSDNKLLRQIAECLAQCDPTSGLTAQYPMFSRDRLTDTLCGGYFPILGVLSSEPQGLQMLERWRIFNMMYHIVDFKQRPDLIKVILTNLDYSLQGHPRVLLSKALTAGAKDMRIHATNILRKYSTLQRIAPSGQVISDAKWAIQLLVTQLYDPEIEVCATAVKTLEKACNSKPLLEYIVECRPALDHLGEIGAPLLLRFLSTSIGYHYLDGLDYISNEMDDWFLGRNDSYVALIEASLARSFLENADEQPNRLTMYGEEEDADHDSHIPPHFYRELTRTKEGCKLLENKGHFLEFASTIGDYGMQSDDAELITKVKGCLWAVGNVGCMELGAPFLESTNVVGNIVAIAESHDVMSLRGTAFFVLGLISRSVHGLEILSEHGWDSNTTPLGRSFGLCIPADLSKFFSYKPWKHEAPVTITLCDTQKTIQDSNSIDIDDSDESNNRILELLVEMGNLVLYKKARGELHQLRQQKVAGFKQPAMFLKVLGFLETHNYRLTDRHFIIELFDKSVLSHIVYGEGGSSDEDSSNSGDEQRTERQRSVSGSTPNILEKAANMIYKGSI

SEQ ID NO: 15667 - DNA, 4879 bp, Muscodor strobelii
  misc_feature: SGI EST ID NO. CUFF.37091.0
  misc_feature: Variant of the nucleotide sequence at SEQ ID NO 15665
agggggttgatgtaggtagctgcatcagttagcacggcgaggtaggcgcataccacagcacagggacctaccctgaacatcttggcgatccgactcgaagcgtgaacctgtgatcgtcacgagcttgtcacttcaggttaacctcaagccagctctttggatatcctcctcgccgttgtactactattctttcaaggcatcaatcaaaggtcggacgaacggcagagacccgcgccgctctcctctcgtgcgccgatagcagagcaggcgcaatcttgactcgaattacagtccaatacagcatcatcatcgtcatcgccgtacagctatcgtccatatctcgatccctctaaatagcttacacccgcccgcttaccttggtctagcatttgcgcttcgtctcgaacatcaatcgcgccggtggccatccgaggcagtgagcaaacatctatgcgaccgccgccagcactgcagtccctggtgggcgttgggtcggggttgccaccatgttaacaaccgctgccgctgcgtcctcccaaaagtcgccaacccccaggctgccgcctctctcaacccctcgctgaacccctctgccgcgccctcgcgcaccagcctcgaccgcgatggcggcctccagcccccgtcctccgcccagcccgcccgcaacctctccgcctcggccctgtcctcctacgcgccccgcggctcctcgctcaacccctcctctgtagccccgggctccttcaactctgagctgcgtagccagatggctcagtctcgcgctggttcaagggccgatatctacaacctcgagaagttggacgaggacgacgagtcggcggtcgagcagaccctcactgcgctcaaggactccttggtccgggagatgaagatcaaggagggcagcgaaaacctgctcgaggccttgaacgttaagaaggcgaaacagaccaaagagcagcgccaccgtgtcgaggtcgaactcagcgcctccaatgcgaggatcagggagctgaggcagaagatcaccgatgcgcaagcaacaaagatagtgcccagcactcccaagaagaaccgcagcgaaggtggcttgcatcaaaatggcctgcggtcgccccccagcgcatcgaggagcgctgctgggtccgagatagacgagccagcagaatcccctacctttgctctcgccgagatcttacaggctctagaggtcgaggggatgacaccagagtactatgttggacgagcaaacaatctggtggatctgttcaagagatatccaaccctgaaatacgacctcgtgtggtccatctttggagaccgcatgcaggtcatgttactaagcggcagtcgtgaggttgtagcgtcgggataccggatgctgcgatacgccatctctgatcttgcttcgctcaagaagattcgctctctcaacaccgattacatggtagtgacctcactggccaaagatcggaaagccgatgtcgagcgcgaacaagccctcaagtttgtgcgggcatttttggatgtcaaggatggtgcacgtgagatatcgcgagctctcgtgagaactattgctgcagtagctggacacgtcgaagacaggcttcgcccaatttgcgttgagacccttgcagagatcctgctccgagatcccgccctgctcattgcctcgggtggcctcccccctatctcagaggctctggctgaggggacctacaagtctccagaatcactgtcctctgcctttctctacttgctcgacagcccccagactcggagatatcttcgtgcaggatacgacttggaggttatgttcacggccttcacagacgtcctttactcgtacgaaacaaccatcaaacagaatgccaaagctatacaaactgcgctcaagtcctggtcagggcttatgacgctgtccatgttcaactttcgagccatcaggtccctggtctcaagcttgactctgccaaacaacaacattcgcgataccattctagacctgctatactcgctgcttcggatcaaaccgccttcgtgggcgacttcgtaccttgcgggacgacgcttaacaacctatgggcgagtggctactctcaaagcagcgtctaataaaggcgaagtggcctacgaagacgagagcacggagcagaattttgtcgagcattacactgccctcttactggctctcttgataaaatctggcttgatgccaaacttgttagatgttgcgcagaacgcggaagagcccatgttgaaacgcaaagcaactctgctaataggcgaatctttgaagcttgccagtcgaattctccccccctcttggagcagtgagctccagctgctcccagaactgttcactgccgctgttcgactccgggacgaggctcactacaatgccactggcattgtttatcagatcagcactgtgagtcgtacgttgcatcggtcatctacgtccggatacacgtcaagcgggttgtccagcagtcttgcagagttggcgagctcttttgaggacgcccccaaaaataacaaccctggtgccacggatgatgccacttttcgccaacttctaatcgattcgggcgttcttggccactcaaatccaataaagtggaagtgggacattgtgctcaagatcattgaaggcccgctcacaagcggaaagcgcttagaggaagccatcagagcctcgaagttcatcaagagaattgtagggttttaccgtcctttcaagtacaagttctcagaggtcccgaatacgcgcaacacacagaaatacgtccgtgtcggctgcgctttgatgcacacgcttttacagacaccggagggtatccgctatctttcagacaataagttgttgagacaaatagcagagtgtttagcacagtgtgacccaacgagcggtcttaccgctcaatacccgatgttctcaagagaccgcttaacggatacgctctgcggtggttattttccaatacttggcgttctaagtagcgaacctcaaggcttgcagatgcttgaacgatggcgtatattcaatatgatgtaccacatcgtggattttaagcagcgaccagatctcatcaaagtcatactcaccaatctcgactatagtttgcaaggccacccacgtgttcttttgtcaaaagcactcactgctggcgctaaagatatgcggattcacgctacgaatatccttcggaagtactcgactttacagcgaattgcaccgtctggtcaggttatttcagatgccaagtgggctatccagctgctagtcactcaactctacgatcccgaaattgaggtgtgcgctactgccgtcaagacacttgaaaaggcttgcaacagcaaaccgctacttgaatacattgtagaatgccggcctgctcttgatcacttgggagagattggggctccactcctccttcggtttctatccacctctatcggctatcactacctagacggactcgactatatcagtaatgaaatggatgactggtttctcggtcgcaatgacagttacgttgctctgatagaggcaagccttgctcgttctttcctcgagaatgctgatgagcaaccgaaccgcttgaccatgtatggagaggaagaagatgcagaccatgatagtcatataccgccgcatttctaccgtgaattgacacgcacgaaagaaggctgtaaactcttagaaaacaagggccattttctcgagtttgcatccaccattggagactacgggatgcaatccgacgacgccgagctgattactaaagtgaagggttgcttatgggcagtaggaaacgtcggttgcatggagttgggagctcccttcttagaatcaacgaatgtcgttggaaacatcgtggcaattgcagagtcacatgatgtaatgagccttcgtgggacagccttcttcgttctgggcctgatttctaggtcagtacatggactggagattctctcggaacacggatgggactccaacactacaccgctggggagatctttcggtctgtgcatacctgccgatctgtccaaattcttctcttacaagccctggaaacatgaggctcccgtgactatcaccctgtgcgacacacagaaaacgatacaggactcaaactcgatagacattgacgacagtgatgaatcgaacaacagaatactggagcttctggtagagatgggcaatctagtcctttacaagaaagccagaggtgaattgcatcagcttcgacagcagaaggttgccggattcaaacagccagccatgtttctaaaggttctcgggttcctagaaacacataactacagactcacggaccgacatttcatcatagagctctttgacaagagtgtcctatcccacatcgtgtatggggaaggagggagtagtgatgaagactcgagcaattctggagatgagcaacgtacagaaagacaaaggagcgttagtggcagtactcctaacattttagagaaggctgcgaacatgatctataagggttcgatctagccttggtgtggttggttgtacctggttttacgttcgatatgagatggtggatggaatagtccaaaacaacaatacccagatgatcaggtattacttgatatataatacggtgcccgaatagcaccaagcctaaggtacgaaacatgtttgcgtgtactatcacctgagcaatttggcgttttagggaatggcggagactcgtgcgtctgaattggttctggacaggagtttcgggcaggttcacggatgaacggcctacccacatacctataccatgaggcaagatacctgatagtcaattacaattgaattgaaaagtcattatataagacagtttcaaaaacc

SEQ ID NO: 15668 - DNA, 273 bp, Muscodor strobelii
  misc_feature: SGI cDNA ID NO. 565194
  misc_feature: Encodes the peptide sequence at SEQ ID NO 15669
atggaccaaatcgagaacgcagaccttgagagactgaacgacaaggacaagacggagctgcgacagtttctaaacaacgagaaccagaaggcgcgcgtgcaagccaatgtccactccctcaccgatatgtgcttcaagaagtgcgtcacgggcacgatcaaagatggcaagctgagcagtagcgaggaaggctgcatggcgaattgcgccgaaaggttcttcgacgtcagctcgttgacgatgaaacatctgcagaatatgcgccagggttga

SEQ ID NO: 15669 - protein, 90 aa, Muscodor strobelii
  misc_feature: SGI Peptide ID NO. 565194
  misc_feature (21)..(87): Pfam Id: PF02953 Pfam Desc: Tim10/DDP family zinc finger
  misc_feature (4)..(88): NCBI GI: 46111225 Blast Desc: FG02494.1 [Gibberella zeae PH-1] gi|90101781|sp|Q4IJW4.1|TIM8_GIBZE RecName: Full=Mitochondrial import inner membrane translocase subunit TIM8
  misc_feature (4)..(90): NCBI GI: 261360105 Blast Desc: mitochondrial import inner membrane translocase subunit TIM8 [Verticillium albo-atrum VaMs.102]
  misc_feature (4)..(88): NCBI GI: 256726217 Blast Desc: [Nectria haematococca mpVI 77-13-4]
  misc_feature (3)..(88): NCBI GI: 156064033 Blast Desc: [Sclerotinia sclerotiorum 1980] gi|154690886|gb|EDN90624.1| [Sclerotinia sclerotiorum 1980]
  misc_feature (4)..(89): NCBI GI: 116192223 Blast Desc: [Chaetomium globosum CBS 148.51] gi|88181742|gb|EAQ89210.1| [Chaetomium globosum CBS 148.51]
  misc_feature (4)..(90): NCBI GI: 164425234 Blast Desc: mitochondrial import inner membrane translocase subunit tim8 [Neurospora crassa OR74A] gi|12230196|sp|Q9Y8C0.1|TIM8_NEUCR RecName: Full=Mitochondrial
  misc_feature (4)..(89): NCBI GI: 169611797 Blast Desc: SNOG_09013 [Phaeosphaeria nodorum SN15] gi|111062085|gb|EAT83205.1| SNOG_09013 [Phaeosphaeria nodorum SN15]
  misc_feature (8)..(88): NCBI GI: 225685073 Blast Desc: mitochondrial import inner membrane translocase subunit TIM8 [Paracoccidioides brasiliensis Pb03] gi|226281402|gb|EEH36968.1| conserved [Paracoccidioides Pb01]
  misc_feature (4)..(87): NCBI GI: 171686612 Blast Desc: protein product [Podospora anserina] gi|170943267|emb|CAP68920.1| protein product [Podospora anserina]
  misc_feature (4)..(89): NCBI GI: 145614332 Blast Desc: MGG_11338 [Magnaporthe grisea 70-15] gi|145021269|gb|EDK05398.1| MGG_11338 [Magnaporthe grisea 70-15]
MDQIENADLERLNDKDKTELRQFLNNENQKARVQANVHSLTDMCFKKCVTGTIKDGKLSSSEEGCMANCAERFFDVSSLTMKHLQNMRQG

SEQ ID NO: 15670 - DNA, 1819 bp, Muscodor strobelii
  misc_feature: SGI EST ID NO. CUFF.37394.0
  misc_feature: Variant of the nucleotide sequence at SEQ ID NO 15668
ctcgaatctaagtagctctggaccgcagatgacctcaaagtcacataagtaaaagtaactctcaactacgcatttgtctttgtccaattactctctaattctaaaccgaccatcataatcggccaacaccacgcccttttccgtttcatagccacccaactccgcgaaaatggaccaaatcgagaacgcagaccttgagagactgaacgacaaggacaagacggagctgcgacagtttctaaacaacgagaaccagaaggcgcgcgtgcaagccaatgtccactccctcaccgatatgtgcttcaagaagtgcgtcacgggcacgatcaaagatggcaagctgagcagtagcgaggaaggctgcatggcgaattgcgccgaaaggttcttcgacgtcagctcgttgacgatgaaacatctgcagaatatgcgccagggttgattaggaagaggtggtcagtaattgggcactactggtcttttgagaaggaaggaaagaaagatgtatggatacatggatgcatggatacatggatacactaggcattccgtttggacgggcgtgacgacctgtaaatgtattatacggcgtttgctgctgcatctccccatagttagggttttcacggcgcgagttgtacgatcaagatatatcgatagaaatcacccaaagtcaagaaacaagcatattggtctggtggtatgagaaaatgtcatgattagattgttcataatctcatatgcctgaatcctaggcgaacgccgttctcaatgcagtaggattgttcattcggcttcgtcttttttgaaagcttatacacaatccttatcccagcaccaccactttttgcttttttttttcgttctcccactacgccaccatccacccccagagatgacaccgctcaattagacgagggcaagcttggtagcggcaatgtcgagagcatcgacatcagcagtcaatctgcagtaggccttcttcttgccgtcggggcggacgagggtgttgatcttgacgcagtcgatctcgtacagcttcttgagggccatcttgatctgggacttggtggacttgatgtcgacgaggaagacgagggtgttgttctcctcgattttcttcatggcagactcgctgttgagaggggagatgatgatcttgtgctcgtcaaggcggggctcgtggttgatggacttgcggtggtacttgggggcgcgcgagcttcagttgggttagtaaatgcgccccagcgtcgcaacgatgttcgtgtggtcttcttacagagtgagggctattgtacatgttagcagggttttcgcagagttgtctcttcattgcataaggggaacgacttactcttgggacggtggaaggtggtcgaggtgcggaccttcttggtcttgctggcggagtcacccttttagccttgtcagtctcgcttcgtcttcgtatcaatcagcgtggacaatggggttctaccttgagggcggctttggcggcggccttagcctgggcctggccctttcctggaaggcatcagcaatcgccctgtgacatgacagaactaacgcaaaatctgctactgctcgatgcgatgcggagagtcgtgcgcagtcggggggaattcgggaagtgcaggtcggagaagacaacaccgtcgcggtggacaggtcagggagtagtacctttggcggcagctttgggagccattgttgtcgagtttgccggcggttggtgaggttgtcgtcggagtggttggtgctgtcgttgggcgtgaggaatgaagtagaaaagtcacctacgaggtcgcaatttgcg

SEQ ID NO: 15671 - DNA, 456 bp, Muscodor strobelii
  misc_feature: SGI cDNA ID NO. 565195
  misc_feature: Reduced expression when VOC is produced
  misc_feature: Encodes the peptide sequence at SEQ ID NO 15672
atggctcccaaagctgccgccaaaggaaagggccaggcccaggctaaggccgccgccaaagccgccctcaagggtgactccgccagcaagaccaagaaggtccgcacctcgaccaccttccaccgtcccaagaccctcactctctcgcgcgcccccaagtaccaccgcaagtccatcaaccacgagccccgccttgacgagcacaagatcatcatctcccctctcaacagcgagtctgccatgaagaaaatcgaggagaacaacaccctcgtcttcctcgtcgacatcaagtccaccaagtcccagatcaagatggccctcaagaagctgtacgagatcgactgcgtcaagatcaacaccctcgtccgccccgacggcaagaagaaggcctactgcagattgactgctgatgtcgatgctctcgacattgccgctaccaagcttgccctcgtctaa

SEQ ID NO: 15672 - protein, 151 aa, Muscodor strobelii
  misc_feature: SGI Peptide ID NO. 565195
  misc_feature (68)..(147): Pfam Id: PF00276 Pfam Desc: Ribosomal protein L23
  misc_feature (9)..(62): Pfam Id: PF03939 Pfam Desc: Ribosomal protein L23, N-terminal domain
  misc_feature (1)..(151): NCBI GI: 119498617 Blast Desc: 60S ribosomal protein L23 [Neosartorya fischeri NRRL 181] gi|119414230|gb|EAW24169.1| 60S ribosomal protein L23 [Neosartorya fischeri NRRL 181]
  misc_feature (4)..(151): NCBI GI: 242794709 Blast Desc: 60S ribosomal protein L23 [Talaromyces stipitatus ATCC 10500] gi|218719018|gb|EED18438.1| 60S ribosomal protein L23 [Talaromyces stipitatus ATCC 10500]
  misc_feature (1)..(151): NCBI GI: 121712574 Blast Desc: 60S ribosomal protein L23 [Aspergillus clavatus NRRL 1] gi|119402051|gb|EAW12472.1| 60S ribosomal protein L23 [Aspergillus clavatus NRRL 1]
  misc_feature (1)..(151): NCBI GI: 240109371 Blast Desc: 60S ribosomal protein L23a, [Coccidioides posadasii C735 delta SOWgp]
  misc_feature (1)..(151): NCBI GI: 145253881 Blast Desc: An17g02240 [Aspergillus niger] gi|134084029|emb|CAL00567.1| protein product [Aspergillus niger]
  misc_feature (1)..(151): NCBI GI: 115438528 Blast Desc: 60S ribosomal protein L23A [Aspergillus terreus NIH2624] gi|114188904|gb|EAU30604.1| 60S ribosomal protein L23A [Aspergillus terreus NIH2624]
  misc_feature (14)..(151): NCBI GI: 70998694 Blast Desc: 60S ribosomal protein L23 [Aspergillus fumigatus Af293] gi|66851705|gb|EAL92031.1| 60S ribosomal protein L23 [Aspergillus fumigatus Af293] gi|159126197|gb|EDP51313.1| 60S L23
  misc_feature (1)..(151): NCBI GI: 119182708 Blast Desc: conserved [Coccidioides immitis RS]
  misc_feature (1)..(151): NCBI GI: 261360106 Blast Desc: 60S ribosomal protein L23a [Verticillium albo-atrum VaMs.102]
  misc_feature (1)..(151): NCBI GI: 39969149 Blast Desc: conserved [Magnaporthe grisea 70-15] gi|59803060|gb|AAX07700.1| 60S ribosomal protein L23-like protein [Magnaporthe grisea] gi|145021270|gb|EDK05399.1| conserved grisea
  misc_feature: Useful for introducing or modulating the production of volatile compounds
MAPKAAAKGKGQAQAKAAAKAALKGDSASKTKKVRTSTTFHRPKTLTLSRAPKYHRKSINHEPRLDEHKIIISPLNSESAMKKIEENNTLVFLVDIKSTKSQIKMALKKLYEIDCVKINTLVRPDGKKKAYCRLTADVDALDIAATKLALV

SEQ ID NO: 15673 - DNA, 1616 bp, Muscodor strobelii
  misc_feature: SGI EST ID NO. CUFF.37395.3
  misc_feature: Variant of the nucleotide sequence at SEQ ID NO 15671
gcgcaaattgcgacctcgtaggtgacttttctacttcattcctcacgcccaacgacagcaccaaccactccgacgacaacctcaccaaccgccggcaaactcgacaacaatggctcccaaagctgccgccaaaggaaagggccaggcccaggctaaggccgccgccaaagccgccctcaagggtgactccgccagcaagaccaagaaggtccgcacctcgaccaccttccaccgtcccaagaccctcactctctcgcgcgcccccaagtaccaccgcaagtccatcaaccacgagccccgccttgacgagcacaagatcatcatctcccctctcaacagcgagtctgccatgaagaaaatcgaggagaacaacaccctcgtcttcctcgtcgacatcaagtccaccaagtcccagatcaagatggccctcaagaagctgtacgagatcgactgcgtcaagatcaacaccctcgtccgccccgacggcaagaagaaggcctactgcagattgactgctgatgtcgatgctctcgacattgccgctaccaagcttgccctcgtctaattgagcggtgtcatctctgggggtggatggtggcgtagtgggagaacgaaaaaaaaaagcaaaaagtggtggtgctgggataaggattgtgtataagctttcaaaaaagacgaagccgaatgaacaatcctactgcattgagaacggcgttcgcctaggattcaggcatatgagattatgaacaatctaatcatgacattttctcataccaccagaccaatatgcttgtttcttgactttgggtgatttctatcgatatatcttgatcgtacaactcgcgccgtgaaaaccctaactatggggagatgcagcagcaaacgccgtataatacatttacaggtcgtcacgcccgtccaaacggaatgcctagtgtatccatgtatccatgcatccatgtatccatacatctttctttccttccttctcaaaagaccagtagtgcccaattactgaccacctcttcctaatcaaccctggcgcatattctgcagatgtttcatcgtcaacgagctgacgtcgaagaacctttcggcgcaattcgccatgcagccttcctcgctactgctcagcttgccatctttgatcgtgcccgtgacgcacttcttgaagcacatatcggtgagggagtggacatctggagatgatcgcattagctacccatatgcattattcctaggaacaaaaaacccagagaaatagaaaggggcagaactcgggtatagcgcactagcgcaatgaatgcgcgagggcagcgagagagatgaaatggtacgtactggcttgcacgcgcgccttctggttctcgttgtttagaaactgtcgcagctccgtcttgtccttgtcgttcagtctctcaaggtctgcgttctcgatttggtccattttcgcggagttgggtggctatgaaacggaaaagggcgtggtgttggccgattatgatggtcggtttagaattagagagtaattggacaaagacaaatgcgtagttgagagttacttttacttatgtgactttgaggtcatctgcggtccagagctacttagattcgag

SEQ ID NO: 15674 - DNA, 864 bp, Muscodor strobelii
  misc_feature: SGI cDNA ID NO. 565196
  misc_feature: Encodes the peptide sequence at SEQ ID NO 15675
atggctacgaagaaaaagaaattatctctcaagactctcagccaagggcgacctccgacctcacgcaagcccaagtcaatatcgcggaaggctaccaggactctcatcaacgccgttcaccaacttgagaagaaaaagtcccaggccattgccagaggggacaaagcggctgaagccacttttgatgccagcatcactgctctgggaggcattgagaaatatcaacaagcgagtctccagggacagagaggtgacaggggaggtgacagctcacgtgtgttgctggattggctcaagccagacttctctgcctcaagtatcagaccaacccgatcattacggttacttgagattggtgccttgagtaaggaaaacttgtgctctacgtgtggattttttgatgtggaaaggattgatctcaacagccagagtgagggcattctgcaacaggatttcatgcaacggcccttgcctaccaatgctaccgagctttttgatattatatctctgtctctcgttctgaactttgtccctgatgctcataccagaggtaacatgctactcaggacgttagagtttctcaagaaacctgacgcgaaacatcgatccagagtctttcccaatctgttcctcgttttgccggctccatgcgtcaccaattcgagatacatggatgaatctctgctagacagaatcatgacttctataggttatacaaaagcccaattcaaactaacgcaaaagctcgtctactacctttgggtacggacgtcgggcacgctggaccgcatcccttgtttcaccaagaccgaggttcgcacaggttcgactcggaacaatttctcaatcgtcgtccgtggatga

SEQ ID NO: 15675 - protein, 287 aa, Muscodor strobelii
  misc_feature: SGI Peptide ID NO. 565196
  misc_feature (1)..(285): NCBI GI: 171686616 Blast Desc: protein product [Podospora anserina] gi|170943269|emb|CAP68922.1| protein product [Podospora anserina]
  misc_feature (1)..(285): NCBI GI: 85109768 Blast Desc: NCU06227 [Neurospora crassa OR74A] gi|28924729|gb|EAA33842.1| conserved [Neurospora crassa OR74A]
  misc_feature (1)..(285): NCBI GI: 39969147 Blast Desc: MGG_10184 [Magnaporthe grisea 70-15] gi|145021271|gb|EDK05400.1| MGG_10184 [Magnaporthe grisea 70-15]
  misc_feature (5)..(287): NCBI GI: 256726216 Blast Desc: [Nectria haematococca mpVI 77-13-4]
  misc_feature (6)..(286): NCBI GI: 156064029 Blast Desc: SS1G_00022 [Sclerotinia sclerotiorum 1980] gi|154690884|gb|EDN90622.1| SS1G_00022 [Sclerotinia sclerotiorum 1980]
  misc_feature (6)..(286): NCBI GI: 154298858 Blast Desc: BC1G_11676 [Botryotinia fuckeliana B05.10] gi|150857581|gb|EDN32773.1| BC1G_11676 [Botryotinia fuckeliana B05.10]
  misc_feature (5)..(287): NCBI GI: 46111221 Blast Desc: FG02492.1 [Gibberella zeae PH-1]
  misc_feature (1)..(277): NCBI GI: 116192227 Blast Desc: CHGG_05831 [Chaetomium globosum CBS 148.51] gi|88181744|gb|EAQ89212.1| CHGG_05831 [Chaetomium globosum CBS 148.51]
  misc_feature (11)..(286): NCBI GI: 258571419 Blast Desc: conserved [Uncinocarpus reesii 1704] gi|237904783|gb|EEP79184.1| conserved [Uncinocarpus reesii 1704]
  misc_feature (11)..(285): NCBI GI: 240109372 Blast Desc: CPC735_028770 [Coccidioides posadasii C735 delta SOWgp]
MATKKKKLSLKTLSQGRPPTSRKPKSISRKATRTLINAVHQLEKKKSQAIARGDKAAEATFDASITALGGIEKYQQASLQGQRGDRGGDSSRVLLDWLKPDFSASSIRPTRSLRLLEIGALSKENLCSTCGFFDVERIDLNSQSEGILQQDFMQRPLPTNATELFDIISLSLVLNFVPDAHTRGNMLLRTLEFLKKPDAKHRSRVFPNLFLVLPAPCVTNSRYMDESLLDRIMTSIGYTKAQFKLTQKLVYYLWVRTSGTLDRIPCFTKTEVRTGSTRNNFSIVVRG

SEQ ID NO: 15676 - DNA, 1944 bp, Muscodor strobelii
  misc_feature: SGI EST ID NO. CUFF.37100.0
  misc_feature: Variant of the nucleotide sequence at SEQ ID NO 15674
gaaacttctgataccatttcccactaccaccttggaggatgtggcatggctgattcactagatgagaataggcttatgagaggatatggctacgaagaaaaagaaattatctctcaagactctcagccaagggcgacctccgacctcacgcaagcccaagtcaatatcgcggaaggctaccaggactctcatcaacgccgttcaccaacttgagaagaaaaagtcccaggccattgccagaggggacaaagcggctgaagccacttttgatgccagcatcactgctctgggaggcattgagaaatatcaacaagcgagtctccagggacagagaggtgacaggggaggtgacagctcacgtgtgttgctggattggctcaagccagacttctctgcctcaagtatcagaccaacccgatcattacggttacttgagattggtgccttgagtaaggaaaacttgtgctctacgtgtggattttttgatgtggaaaggattgatctcaacagccagagtgagggcattctgcaacaggatttcatgcaacggcccttgcctaccaatgctaccgagctttttgatattatatctctgtctctcgttctgaactttgtccctgatgctcataccagaggtaacatgctactcaggacgttagagtttctcaagaaacctgacgcgaaacatcgatccagagtctttcccaatctgttcctcgttttgccggctccatgcgtcaccaattcgagatacatggatgaatctctgctagacagaatcatgacttctataggttatacaaaagcccaattcaaactaacgcaaaagctcgtctactacctttgggtacggacgtcgggcacgctggaccgcatcccttgtttcaccaagaccgaggttcgcacaggttcgactcggaacaatttctcaatcgtcgtccgtggatgatcctcatgaacattggcatctagtactaggataaaacggctgctcatgcagcacttcgtagctgtgtttgaaggtattctatatgccgaatctggcgggaacttgaaataattgtgagcagtttctgtcagcagcgatgtgatatcggctggttccatgatcttcgcagcatgcttccaacctataaacagtcgctccacgatgctaccccaaattctgagtagtttggttgggacgttcgttttggccaaacaaccattccggctaccccgcagccaacaatgtttcacagtcaaggtcaggcgacatcgaagtgccggagcgtcggtccactccgatagcttgactcgtgcccttcctatttttccgcttaggcacacgactgactattgtcctcgtctccatggtgacgatgccaaccaccgccagcaatacatttgaaatacccacactttgatgcacgtcgggccctgcagcgacttggtgaggacaccatcacgggagagtaaattccagagcggcattgactccaaaggggtggaaattggaaaacatattgaatgatcgccattcttccccgtcatcttgtccttacgtcatgaacacatattcaacaccttcccgaagttaaagagagccgatgaatctatatagtaatcgctttcaccacgaggtcatgccgatgacgatctcatgcagtcgctttggctatacacgaggtatttgatgtgtttagtatttgaagccgtcgatgctcagacgagtaaaccatcgtcgcacaatggtaagttcgatgacgtataggcatgtatggagtgtaatagctccaatttcgatcaacacggccggtaatacatacgtgtacgataatgatgactgccggggatattgagcgcgtcgtgaaccaaactttcacaggtgcacggttgatcagagtcaatatttctctccacagagagaacattatgaatacaaaaagtatttctacttgagca

SEQ ID NO: 15677 - DNA, 717 bp, Muscodor strobelii
  misc_feature: SGI cDNA ID NO. 565197
  misc_feature: Encodes the peptide sequence at SEQ ID NO 15678
atgaccgccactactggtctggctgttaaggttgtcttactcgatatcgagggcacagtatgccccatctcttttgtcaaagatgtcctgtttccctatgcactgaaggcccttccgggaatgctagagaagtgggatgacccgaactttgcgcaatatagagatgcgtttcctctagagtacagatcgtctaaagatgaactagtagcacatgttcgtgatcttatggagaaggacgtcaaaatctcgtacttaaaaagtctacaagggttcatctggcaagaaggatacgcttcgggtgagctcaaagcccctttgttcccggacgttcctggtaagatggtggcctggcaccaaaagggactcatgatcatgatctattcatctggatccgtagccgctcagaaacttctgttccggcataccaatgccaaacccgcggatctgtcccctctgatctcggattggttcgatactgtgaacgctgggctgaaaacagagacaaaaagctacaggactattgcagagacacacccggagatctcaattgaccactggctctttctgagtgataatcctaaagaggtggacgctgctatcgatgccggaatgcagtctatggttgttcagcgtcctgggaatgcccctttacccaacgatgtgtcagaacgatttcggattattgaaaacttcgatgttataggcgaaacgtcatga

SEQ ID NO: 15678 - protein, 238 aa, Muscodor strobelii
  misc_feature: SGI Peptide ID NO. 565197
  misc_feature (10)..(234): NCBI GI: 171686618 Blast Desc: protein product [Podospora anserina] gi|170943270|emb|CAP68923.1| protein product [Podospora anserina]
  misc_feature (10)..(232): NCBI GI: 116192229 Blast Desc: CHGG_05832 [Chaetomium globosum CBS 148.51] gi|88181745|gb|EAQ89213.1| CHGG_05832 [Chaetomium globosum CBS 148.51]
  misc_feature (9)..(232): NCBI GI: 261360107 Blast Desc: UTR4 protein [Verticillium albo-atrum VaMs.102]
  misc_feature (29)..(232): NCBI GI: 145614334 Blast Desc: MGG_10183 [Magnaporthe grisea 70-15] gi|145021272|gb|EDK05401.1| MGG_10183 [Magnaporthe grisea 70-15]
  misc_feature (11)..(222): NCBI GI: 256725813 Blast Desc: [Nectria haematococca mpVI 77-13-4]
  misc_feature (11)..(218): NCBI GI: 46111219 Blast Desc: FG02491.1 [Gibberella zeae PH-1]
  misc_feature (19)..(236): NCBI GI: 85109770 Blast Desc: NCU06228 [Neurospora crassa OR74A] gi|28924730|gb|EAA33843.1| conserved [Neurospora crassa OR74A]
  misc_feature (12)..(234): NCBI GI: 50550877 Blast Desc: YALI0D16797p [Yarrowia lipolytica] gi|49648779|emb|CAG81102.1| YALI0D16797p [Yarrowia lipolytica]
  misc_feature (31)..(231): NCBI GI: 154290800 Blast Desc: BC1G_15439 [Botryotinia fuckeliana B05.10] gi|150847390|gb|EDN22583.1| BC1G_15439 [Botryotinia fuckeliana B05.10]
  misc_feature (31)..(238): NCBI GI: 156064017 Blast Desc: SS1G_00016 [Sclerotinia sclerotiorum 1980] gi|154690878|gb|EDN90616.1| SS1G_00016 [Sclerotinia sclerotiorum 1980]
  misc_feature (13)..(234): SWISSPROT Homolog: EC 3.1.3.77 Acireductone synthase
MTATTGLAVKVVLLDIEGTVCPISFVKDVLFPYALKALPGMLEKWDDPNFAQYRDAFPLEYRSSKDELVAHVRDLMEKDVKISYLKSLQGFIWQEGYASGELKAPLFPDVPGKMVAWHQKGLMIMIYSSGSVAAQKLLFRHTNAKPADLSPLISDWFDTVNAGLKTETKSYRTIAETHPEISIDHWLFLSDNPKEVDAAIDAGMQSMVVQRPGNAPLPNDVSERFRIIENFDVIGETS

SEQ ID NO: 15679 - DNA, 1262 bp, Muscodor strobelii
  misc_feature: SGI EST ID NO. CUFF.37104.2
  misc_feature: Variant of the nucleotide sequence at SEQ ID NO 15677
aactgcaaactcgctattgtagaaaaggaattgcccgattcaaccccgtgcatttgcgacttttgtctgttagcaaaaaaagtcaagacaggggaccacaggaacgaaggggaaaattttcttcctgagacgcgcttccagtgcaacgtctcttctcgcgacgagctggtttagccttcaccgctctcaatatcaaattcacaccatccttttctccccgaagaactgggatagttgttattaagtgccgccaattcaccgacgaaagtggatagttctgccctctcatcatgaccgccactactggtctggctgttaaggttgtcttactcgatatcgtttccctatgcactgaaggcccttccgggaatgctagagaagtgggatgacccgaactttgcgcaatatagagatgcgtttcctctagagtacagatcgtctaaagatgaactagtagcacatgttcgtgatcttatggagaaggacgtcaaaatctcgtacttaaaaagtctacaagggttcatctggcaagaaggatacgcttcgggtgagctcaaagcccctttgttcccggacgttcctggtaagatggtggcctggcaccaaaagggactcatgatcatgatctattcatctggatccgtagccgctcagaaacttctgttccggcataccaatgccaaacccgcggatctgtcccctctgatctcggattggttcgatactgtgaacgctgggctgaaaacagagacaaaaagctacaggactattgcagagacacacccggagatctcaattgaccactggctctttctgagtgataatcctaaagaggtggacgctgctatcgatgccggaatgcagtctatggttgttcagcgtcctgggaatgcccctttacccaacgatgtgtcagaacgatttcggattattgaaaacttcgatgttataggcgaaacgtcatgacttaccgagatccttagttgaagattcatcatagctaagccccataagcgagtctcccgaactaaagcaaaattcacaagctgttatctcggaaaaagtacaaagtcatagctaagaatcaaatttcgaggatcttaggccggtagtgtctatgttacttagactaaagcaagcccaattcaaagtcaaatcgtcaaacgtattttgaatgctagaagactcgttttcatgcgatcttacgacttcctcctaaacctctcatgttagccatgaggctcaatgcttaaagagctttg

SEQ ID NO: 15680 - DNA, 1938 bp, Muscodor strobelii
  misc_feature: SGI cDNA ID NO. 565198
  misc_feature: Encodes the peptide sequence at SEQ ID NO 15681
atggaatgcttgaggaacaactttcacgatggcgttttactcgatgggaggtttcagacaatttctcctctcaatcatggctcctttggaatggttttcctggccagagacttgcagacaaacgaccttgtggccgttaaatgcatgaccaaacgagctgctgcgaacgaagccggactcgaatttgctgtggacgaaagatccgaggagctcttctgtcacaagactctcggacctcatcccaacattgtcaatctcgttcactcgttcgagaccgacgcccacttgtatctcgtactagaatactgctctcgtggtgatctatacgaggctatcaggacgggctcaggccctcttgagaccgagcacgttcgccagttcatgctagagcttgtcgatgctgtttcgtatatgcattcgaaaggcatttatcaccgcgacatcaagccagagaatattttcctcactgattcgggtgccatgaaattgggtgactttggcttgggaaccactgaaaattggagctacgagacaacggttggcagcgatcgatatatgtcacctgagcagtatgattccgatggtgctgggtactctcccgctgaggcggacatctgggctattggtatctgccttctcaacatcctattctcgcgaaaccccttcaccacccccaccgaggccgatcctctgtttttggatttctctcgggataagcagtctttattcgacgtgtttccttccatgtctcaagatacgtacgaggttattgtcgaatgcatgaatatggatcctcgcaagcgatctctcgcaggcgtcaaaagcgcactacgccgtgtcgttagcttcactacactcgatgaggctctagacgatttctgcactaccgagcgcagcaacatcgccaccgccaatcgggaacctcttcgaactccttccattcaaagccctgcactcgatcaaggtgccttcccgtgggccaaagctctccatgctacaactgcagccatgccaatcagacagcttagtatcattccggacaccgaaagctacaccgaagatctgttcccgaaatcggaagggacggtggactggtttcctagctcggctttgactccatcaatttcttccgtgcttacctccaatctggcagcatccatgaactccatcaacatctcacgcgctcgagatgttcctaaaaactctggtcccaaggctgctccagttgccggttcgctcccaatcaatgtatccagacctaaacccatgcttggcgctatgtccatggcctttggtcgtcaaaaggatacaatctcgaagagctggagtgacatgtgggaagaagacgaggaagaagatgaggcagagcttgctcgtcaactccaaaacttgaaggacttcaatgctcgaacatggagccaagacagcaaagatcataccgtgtcccaactggatctggatacatccaaccaggcgcaagcgtctgatgacgagaagcctgaggctttgcccatgaaccacacaatctcaaatgacatcgatggcgacctagttgcagacggtttcttcttccatgaacccgtcgctatcaagaagccccagcagtcgcccgtttattcaccaccttcaaaacgaaatacggctgacaaatgggccgccctgggtgagcgtcgtcgtgcttacgcaccaagcccagagcccaagctatctgatccgtttgccaagtcacgacgacaattcggacacaattatggaatgggagcggggctttgggacagcaccaatcagatgaaccacattcaccaaaaatggaatcgggatggggcaccgtcgcgcggcggttgcccatggaataaaggccgagattggaattggcgtaaggagacgcgtcatgatttcggcaatgttgagtgggttggccattggcaagaggtgtaa

SEQ ID NO: 15681 - protein, 645 aa, Muscodor strobelii
  misc_feature: SGI Peptide ID NO. 565198
  misc_feature (18)..(280): Pfam Id: PF00069 Pfam Desc: Protein kinase domain
  misc_feature (18)..(168): Pfam Id: PF07714 Pfam Desc: Protein tyrosine kinase
  misc_feature (1)..(642): NCBI GI: 39969141 Blast Desc: MGG_10181 [Magnaporthe grisea 70-15] gi|145021274|gb|EDK05403.1| MGG_10181 [Magnaporthe grisea 70-15]
  misc_feature (3)..(642): NCBI GI: 85109774 Blast Desc: NCU06230 [Neurospora crassa OR74A] gi|28924732|gb|EAA33845.1| conserved [Neurospora crassa OR74A]
  misc_feature (1)..(642): NCBI GI: 256726215 Blast Desc: NECHADRAFT_70449 [Nectria haematococca mpVI 77-13-4]
  misc_feature (1)..(645): NCBI GI: 154290790 Blast Desc: BC1G_15434 [Botryotinia fuckeliana B05.10] gi|150847385|gb|EDN22578.1| BC1G_15434 [Botryotinia fuckeliana B05.10]
  misc_feature (1)..(642): NCBI GI: 171686620 Blast Desc: protein product [Podospora anserina] gi|170943271|emb|CAP68924.1| protein product [Podospora anserina]
  misc_feature (1)..(631): NCBI GI: 258572120 Blast Desc: conserved [Uncinocarpus reesii 1704] gi|237905100|gb|EEP79501.1| conserved [Uncinocarpus reesii 1704]
  misc_feature (1)..(609): NCBI GI: 240109097 Blast Desc: kinase domain containing protein [Coccidioides posadasii C735 delta SOWgp]
  misc_feature (1)..(609): NCBI GI: 119181917 Blast Desc: CIMG_06023 [Coccidioides immitis RS]
  misc_feature (1)..(613): NCBI GI: 119498465 Blast Desc: serine/threonine protein kinase, [Neosartorya fischeri NRRL 181] gi|119414154|gb|EAW24093.1| serine/threonine protein kinase, [Neosartorya fischeri NRRL 181]
  misc_feature (1)..(645): NCBI GI: 115438194 Blast Desc: conserved [Aspergillus terreus NIH2624] gi|114188818|gb|EAU30518.1| conserved [Aspergillus terreus NIH2624]
  misc_feature (18)..(325): SWISSPROT Homolog: EC 2.7.11.1 Non-specific serine/threonine protein kinase
MECLRNNFHDGVLLDGRFQTISPLNHGSFGMVFLARDLQTNDLVAVKCMTKRAAANEAGLEFAVDERSEELFCHKTLGPHPNIVNLVHSFETDAHLYLVLEYCSRGDLYEAIRTGSGPLETEHVRQFMLELVDAVSYMHSKGIYHRDIKPENIFLTDSGAMKLGDFGLGTTENWSYETTVGSDRYMSPEQYDSDGAGYSPAEADIWAIGICLLNILFSRNPFTTPTEADPLFLDFSRDKQSLFDVFPSMSQDTYEVIVECMNMDPRKRSLAGVKSALRRVVSFTTLDEALDDFCTTERSNIATANREPLRTPSIQSPALDQGAFPWAKALHATTAAMPIRQLSIIPDTESYTEDLFPKSEGTVDWFPSSALTPSISSVLTSNLAASMNSINISRARDVPKNSGPKAAPVAGSLPINVSRPKPMLGAMSMAFGRQKDTISKSWSDMWEEDEEEDEAELARQLQNLKDFNARTWSQDSKDHTVSQLDLDTSNQAQASDDEKPEALPMNHTISNDIDGDLVADGFFFHEPVAIKKPQQSPVYSPPSKRNTADKWAALGERRRAYAPSPEPKLSDPFAKSRRQFGHNYGMGAGLWDSTNQMNHIHQKWNRDGAPSRGGCPWNKGRDWNWRKETRHDFGNVEWVGHWQEV

SEQ ID NO: 15682 - DNA, 3946 bp, Muscodor strobelii
  misc_feature: SGI EST ID NO. CUFF.37118.0
  misc_feature: Variant of the nucleotide sequence at SEQ ID NO 15680
gatccagtgaatgaccaacccacctctccactgctcgcccacttgctctgcgaggtcgttcagtccccccttctgcctgtgccagagagccagcctacgcttctgctcccagcgtcagtcatcatcctgtccgttgtcttcccgatacatccatccacttcctaccgcttcttctctttatcgaactgctctacctaccatcctgctccttttcaccgacctatccctactgccctttatccttcgcatcgtcactctctgttccctttcactgcccttccacgccatctgctcaatcgaattggtccatcagctatatcggacaagaacggatccctcattgagtcatattatacgtacctaatccataccacccttaaagcctcgccttccttagagccgatgtgaggtttcccttgagcagctgtgctcttgcttcgatctgtgcattctgcgtacttcctttgtcgaaggagctcctaatcaactctccgttcgcaaagcttgccattcagcatcgctaccgccaactcaccgcctgctcaacacgtcaccttgaccttggcttctaccgacaaacttgatcaacctcgtctcttgacttagcttgtaattccaaccacgactgctgttacttgccaatcacgaacgcccaaagtcacacataatccttgcccgaccctcgagtcaagtcttggtagtcgaatatcactgacttacattccgctcgaatcacgatcacgatccttgcatcacacaagcgcccgaggacaagtctgtcagacttgatctgcctagagaagcactatcctaacatacacctctaaagacggctgtccaagtatctcatcggatgattctttagcggaagtggtctcggtgcgttgatattgcaggatcattggcattggccatacttgtatcgtaacgggaacatcaagaaacgacacaagcctgctaccatcaccaccgaagaacaacttgggcaaccagtatttcccttgaactcaaaacgaaaaaagacggatctttgaacattttttcagcgcccatagaccttattccatgtccttataacgaaatctcgccttcttttctctgacccccgggtccatcaataccactcacgattattcacttttccatttgtctacaactccaataccctcgaatgagcctctgaaaccctaacgaccggagttgtctattcctttttcatcaaacccgactacctgtatattgcatccattacacggccgccacgacctttacattattcacttttttttggttcggctacttaaaagccaaattgctttgttggagtacgaaacccgttgcttcataaaatttgtacacacaaaagacgaaaaactcatctcatttgctttcatcgatacccgcaacgaattcaacaagatcattcacgcattgtactcttgcctcagcgacaaaacgtgttcggcgaacacgaacctttcttttttccttcatcgaaattcttgtctcccattgagacagcgtcatggaatgcttgaggaacaactttcacgatggcgttttactcgatgggaggtttcagacaatttctcctctcaatcatggctcctttggaatggttttcctggccagagacttgcagacaaacgaccttgtggccgttaaatgcatgaccaaacgagctgctgcgaacgaagccggactcgaatttgctgtggacgaaagatccgaggagctcttctgtcacaagactctcggacctcatcccaacattgtcaatctcgttcactcgttcgagaccgacgcccacttgtatctcgtactagaatactgctctcgtggtgatctatacgaggctatcaggacgggctcaggccctcttgagaccgagcacgttcgccagttcatgctagagcttgtcgatgctgtttcgtatatgcattcgaaaggcatttatcaccgcgacatcaagccagagaatattttcctcactgattcgggtgccatgaaattgggtgactttggcttgggaaccactgaaaattggagctacgagacaacggttggcagcgatcgatatatgtcacctgagcagtatgattccgatggtgctgggtactctcccgctgaggcggacatctgggctattggtatctgccttctcaacatcctattctcgcgaaaccccttcaccacccccaccgaggccgatcctctgtttttggatttctctcgggataagcagtctttattcgacgtgtttccttccatgtctcaagatacgtacgaggttattgtcgaatgcatgaatatggatcctcgcaagcgatctctcgcaggcgtcaaaagcgcactacgccgtgtcgttagcttcactacactcgatgaggctctagacgatttctgcactaccgagcgcagcaacatcgccaccgccaatcgggaacctcttcgaactccttccattcaaagccctgcactcgatcaaggtgccttcccgtgggccaaagctctccatgctacaactgcagccatgccaatcagacagcttagtatcattccggacaccgaaagctacaccgaagatctgttcccgaaatcggaagggacggtggactggtttcctagctcggctttgactccatcaatttcttccgtgcttacctccaatctggcagcatccatgaactccatcaacatctcacgcgctcgagatgttcctaaaaactctggtcccaaggctgctccagttgccggttcgctcccaatcaatgtatccagacctaaacccatgcttggcgctatgtccatggcctttggtcgtcaaaaggatacaatctcgaagagctggagtgacatgtgggaagaagacgaggaagaagatgaggcagagcttgctcgtcaactccaaaacttgaaggacttcaatgctcgaacatggagccaagacagcaaagatcataccgtgtcccaactggatctggatacatccaaccaggcgcaagcgtctgatgacgagaagcctgaggctttgcccatgaaccacacaatctcaaatgacatcgatggcgacctagttgcagacggtttcttcttccatgaacccgtcgctatcaagaagccccagcagtcgcccgtttattcaccaccttcaaaacgaaatacggctgacaaatgggccgccctgggtgagcgtcgtcgtgcttacgcaccaagcccagagcccaagctatctgatccgtttgccaagtcacgacgacaattcggacacaattatggaatgggagcggggctttgggacagcaccaatcagatgaaccacattcaccaaaaatggaatcgggatggggcaccgtcgcgcggcggttgcccatggaataaaggccgagattggaattggcgtaaggagacgcgtcatgatttcggcaatgttgagtgggttggccattggcaagaggtgtaagcaccctccttgtcaatgtggtcacttgtagttgatctactcctccacgccttcacgggctcttcgtcttgagtgtctgccaaagactactttttattctgccatgtctttgttcttgatagtcggatttattttcttggggatgcattgggatgttaatgagggaggaagaggcatacaggcatgtgtggactcttcgattctttcttttggattacaactttggcactggcagcaacactcaagacgtcgtttcaccctagtggatggaattggtttcgactcgctctctaggtattagatatctccccgctactctaacaaaataccagaagttacccactcaaacaacaactatctcctgttatatatgcatgatgtatgatgcaatcgtctttaaaactccgtgtcctcttccaaaatgtcagtcagcacctgacatcgcccatacctagattaagagggaaatcagagatagcgcgc

SEQ ID NO: 15683 - DNA, 1854 bp, Muscodor strobelii
  misc_feature: SGI cDNA ID NO. 565199
  misc_feature: Encodes the peptide sequence at SEQ ID NO 15684
atggccgacgctcctccccccgccgaaggctcgtctgagacgtccaagagcgcgctcaaaaaggccgagaaagccgcaaagatggcggctgctaaagctgagaaggctgccaagcaggctgctctcccaatccagggcaagaaggacgacgacaagaagatcatcggcatcacggcctccaaagaacacaacttcagcgcctggtaccaggagcttgttatcaaggccgagcttgtcgagtactacaccgagatttctggcttcttcatccttcgacccggcgccatgtatgtctggaacacgatccgccgctggtttcaagaaaagatcgaggaattgggcgtcgaagagaccagttttcccatgttcttatctgccaagtctctggagaaagtacgtccacacatattcgagacagcgcatcagacgagagagctccgggctgaccacttatacaggagaagtgtgttcgcctattctagcaatttccgaccgagcttaattccatacgatgcattgccgccaaagatctggcatgacaaaaatactaatacgatactgatgtatagggaccacgttgaggggttcgccccagagttggcctgggtcaccaaggccggagacaaggatttggaggttccagtcgctgtgcgcccaacttctgaggcggtcatgtacccgtactacgccaaatggattcggtcacatcgagaccttcctttcagactcaaccagtggaacaacgttgttcgctgggaagccaaacagactactcctttccttcgcactcgcgagtttctgtggcaggagggtcacactgctcatttgacggaagagtcctctgccgaggaggtcatgcaaatccttgagctatacgcccagatctatgaacaactacttgcagtccctgtagtacgtggcaagaaaaccgaagccgagaagttcgccggtggtcattggacgacaacagtcgagggatacattccgaccaacggtcgtggtattcaaggcgccacatctcattgtcttggccagaacttcagtaagatgttcgatattaccgtcgaggatcccagcaagcctggagagaagacccatgtttggcaaaattcatggggcttgtccactcgtgtcattggtgtaatggtaatgctgcatagtgacgacaaaggtctcgtcatgccgccccgcgtggctcgtactcaggctattatcattcccctcggtgtgacggccaagacgagtgccgaagacaaggcggcccataccgcgaaggtcgaagacctttatgccacactgaagaaagccggtgtacgggcggacgttgatactcgcgagggatacaatccgggtttcaagtttgccgattgggaaatgaagggtgtgcccttgcgcattgagtttggccccaaggatgctgcggcaagcgtggtcagctacgcacgccgtgacacgggagagaaaggcacgcttcctctcgccgatctcgctactaaagttccggagcttctagaagatatccaaaaatcgctctacaccaaagccgaaacttccttcagagagcacagattgaccctgacagactggtccaaggttgtcccggcactggattccaagaacgttgtggtcatcccattttgtgaggcagtggcctgcgaggacagaatcaaggagttgacgaagagtgaggaacccaaggaaggggctcagaacgagaagcagccttctatgggcatgaagagcttgtgcattccgttcgaccagcccgatggactgacccctgagactaaatgtcttaatcccgagtgcaaagcattcgccaagtcctggaccatgtttggacgtagttactaa

SEQ ID NO: 15684 - protein, 617 aa, Muscodor strobelii
  misc_feature: SGI Peptide ID NO. 565199
  misc_feature (402)..(503): Pfam Id: PF03129 Pfam Desc: Anticodon binding domain
  misc_feature (529)..(617): Pfam Id: PF09180 Pfam Desc: Prolyl-tRNA synthetase, C-terminal
  misc_feature (98)..(331): Pfam Id: PF00587 Pfam Desc: tRNA synthetase class II core domain (G, H, P, S and T)
  misc_feature (192)..(331): Pfam Id: PF00587 Pfam Desc: tRNA synthetase class II core domain (G, H, P, S and T)
  misc_feature (32)..(617): NCBI GI: 39969493 Blast Desc: MGG_10357 [Magnaporthe grisea 70-15] gi|145015163|gb|EDJ99731.1| MGG_10357 [Magnaporthe grisea 70-15]
  misc_feature (9)..(617): NCBI GI: 85076319 Blast Desc: NCU04449 [Neurospora crassa OR74A] gi|28916937|gb|EAA26671.1| NCU04449 [Neurospora crassa OR74A] gi|40882172|emb|CAF05998.1| proline-tRNA ligase [Neurospora
  misc_feature (44)..(612): NCBI GI: 156049881 Blast Desc: conserved [Sclerotinia sclerotiorum 1980] gi|154693046|gb|EDN92784.1| conserved [Sclerotinia sclerotiorum 1980]
  misc_feature (9)..(617): NCBI GI: 46121741 Blast Desc: FG05249.1 [Gibberella zeae PH-1]
  misc_feature (44)..(612): NCBI GI: 154309169 Blast Desc: conserved [Botryotinia fuckeliana B05.10] gi|150852522|gb|EDN27714.1| conserved [Botryotinia fuckeliana B05.10]
  misc_feature (13)..(617): NCBI GI: 256726835 Blast Desc: [Nectria haematococca mpVI 77-13-4]
  misc_feature (11)..(617): NCBI GI: 171691298 Blast Desc: protein product [Podospora anserina] gi|170945597|emb|CAP71710.1| protein product [Podospora anserina]
  misc_feature (9)..(617): NCBI GI: 116195310 Blast Desc: conserved [Chaetomium globosum CBS 148.51] gi|88180166|gb|EAQ87634.1| conserved [Chaetomium globosum CBS 148.51]
  misc_feature (50)..(617): NCBI GI: 169762712 Blast Desc: [Aspergillus oryzae RIB40] gi|83770284|dbj|BAE60417.1| protein product [Aspergillus oryzae]
  misc_feature (23)..(617): NCBI GI: 240106309 Blast Desc: prolyl-tRNA synthetase, [Coccidioides posadasii C735 delta SOWgp]
  misc_feature (59)..(617): SWISSPROT Homolog: EC 6.1.1.17 Glutamate--tRNA ligase
  misc_feature (59)..(617): SWISSPROT Homolog: EC 6.1.1.15 Proline--tRNA ligase
MADAPPPAEGSSETSKSALKKAEKAAKMAAAKAEKAAKQAALPIQGKKDDDKKIIGITASKEHNFSAWYQELVIKAELVEYYTEISGFFILRPGAMYVWNTIRRWFQEKIEELGVEETSFPMFLSAKSLEKVRPHIFETAHQTRELRADHLYRRSVFAYSSNFRPSLIPYDALPPKIWHDKNTNTILMYRDHVEGFAPELAWVTKAGDKDLEVPVAVRPTSEAVMYPYYAKWIRSHRDLPFRLNQWNNVVRWEAKQTTPFLRTREFLWQEGHTAHLTEESSAEEVMQILELYAQIYEQLLAVPVVRGKKTEAEKFAGGHWTTTVEGYIPTNGRGIQGATSHCLGQNFSKMFDITVEDPSKPGEKTHVWQNSWGLSTRVIGVMVMLHSDDKGLVMPPRVARTQAIIIPLGVTAKTSAEDKAAHTAKVEDLYATLKKAGVRADVDTREGYNPGFKFADWEMKGVPLRIEFGPKDAAASVVSYARRDTGEKGTLPLADLATKVPELLEDIQKSLYTKAETSFREHRLTLTDWSKVVPALDSKNVVVIPFCEAVACEDRIKELTKSEEPKEGAQNEKQPSMGMKSLCIPFDQPDGLTPETKCLNPECKAFAKSWTMFGRSY

SEQ ID NO: 15685 - DNA, 3055 bp, Muscodor strobelii
  misc_feature: SGI EST ID NO. CUFF.37447.0
  misc_feature: Variant of the nucleotide sequence at SEQ ID NO 15683
ttgaggggttcgccccagagttggcctgggtcaccaaggccggagacaaggatttggaggttccagtcgctgtgcgcccaacttctgaggcggtcatgtacccgtactacgccaaatggattcggtcacatcgagaccttcctttcagactcaaccagtggaacaacgttgttcgctgggaagccaaacagactactcctttccttcgcactcgcgagtttctgtggcaggagggtcacactgctcatttgacggaagagtcctctgccgaggaggtcatgcaaatccttgagctatacgcccagatctatgaacaactacttgcagtccctgtagtacgtggcaagaaaaccgaagccgagaagttcgccggtggtcattggacgacaacagtcgagggatacattccgaccaacggtcgtggtattcaaggcgccacatctcattgtcttggccagaacttcagtaagatgttcgatattaccgtcgaggatcccagcaagcctggagagaagacccatgtttggcaaaattcatggggcttgtccactcgtgtcattggtgtaatggtaatgctgcatagtgacgacaaaggtctcgtcatgccgccccgcgtggctcgtactcaggctattatcattcccctcggtgtgacggccaagacgagtgccgaagacaaggcggcccataccgcgaaggtcgaagacctttatgccacactgaagaaagccggtgtacgggcggacgttgatactcgcgagggatacaatccgggtttcaagtttgccgattgggaaatgaagggtgtgcccttgcgcattgagtttggccccaaggatgctgcggcaagcgtggtcagctacgcacgccgtgacacgggagagaaaggcacgcttcctctcgccgatctcgctactaaagttccggagcttctagaagatatccaaaaatcgctctacaccaaagccgaaacttccttcagagagcacagattgaccctgacagactggtccaaggttgtcccggcactggattccaagaacgttgtggtcatcccattttgtgaggcagtggcctgcgaggacagaatcaaggagttgacgaagagtgaggaacccaaggaaggggctcagaacgagaagcagccttctatgggcatgaagagcttgtgcattccgttcgaccagcccgatggactgacccctgagactaaatgtcttaatcccgagtgcaaagcattcgccaagtcctggaccatgtttggacgtagttactaaagcgatcaagttgtaggggctggactatgcggtgctcacctaccgaatccaaaattgtgtcgagctagatctactttgctctactgaaagggagttttgcattcttctttcgagcggctgatctgggagaaaaactgtcaagaccaagttaacgattgctgctcagctttgaggaatgagacgccgccatggattaactctgcaacgcgtcataggtggatagcgacagcctcttgcctagagaccatgtataaaaaggattgagatgtccccgactgatacattctccgtgatcatgttcctgtgaacctgacgatagtggatatcacacgtatacattaagatgaaatttagaaaggcgaaaagtgtggtagaatttgtcatgatattgatacccaacaaactgtgcccagctcctattcaaagtaacgcctaggtggccgaccaggccatgaacaaaataagtgatacacaacctagtaaaagcaacccggctattcgacatatagtcttagtgccaatagtgctaaaccacgtatagtctggtagttattcgaaagtccaacagatcatttagtatcatcttctcgttcatggcctgtagactcccatgcaatgtaaatgacagtgctctaagattatgcattcagatcgcgcacatgacagaatttagggtcggactccatggtatatgctggaaatcagatctctacaactttcagcattctgtatttcgatgggaatttattcggcctcgattagcgaacgtggcaagaaagcccataccgtccctacgatggagatcgtaagcgacaacagcatgacagaccagcagagggcgcgctcgccgaaggcgatctcgcggccgaatagcttgaggtaaaatgcaagtggaagtctggtgaataaatgtcagttgagaacgcgagtgttaatgaattcgtatgcagggaggagaatcaggacttacgtgacacagatcgtgaagcacagcgcgctgcccatgaaagccatgatagagtcaaaggcagggaataagatactaatagctaggaaagtcagcaggacgactatcctaactgtagccttgagcaagcctctagatgtgctagaaaggcccacgagagcggactcttctgcgacaacctgctggcggagcccaaataggacctctgcggttgtaataatgggttgagcgttcaatgggaccttggttagtgggatgatggcgataaaaatcacgagaaggacattgagaacgtcggggtagccggttgtttccagaatgttcgctgtgatctcgtcacgcacgccatcgccaaacatgagtagaccgactacagctacagaggcatccactacaagctatgaagagtcagttgattggtcctaccacgatggaggaagagagcatcgtttttcagacatacagtgaaagaaaacgtataattgacagcctgacgtagcagttagtgacacgactctgaagaagcgtaatccggtgaagtacgaagcaaactcacttttgtgtacttatgcggatgacgcatatcccggtaaatctatcgagcttgtataagtttacgacctctgcaaataatgatctatgtcttctcacattcggaaaaacagagtgtccaccccaaggtgacatcagtaagccaaaagataatggtaatgtcaaccaatttgcaggaaacaggtaagttgctgctggctcaatgagcgagccggggcctgtttgtttgagcaagccatccagaatgacaatagtggca

SEQ ID NO: 15686 - DNA, 1950 bp, Muscodor strobelii
  misc_feature: SGI cDNA ID NO. 565200
  misc_feature: Reduced expression when VOC is produced
  misc_feature: Encodes the peptide sequence at SEQ ID NO 15687
atgaccggcgcaagaccgtctgggcctgcgagctgggtcgactacgcacggagagcatcgtcacctggcggccgaagcgacagcgcctcgtcgacgggagcgcacagcgtctcgttcgagaacgatcctctgctcgccgaccgtcacggccgcgaccaagacgatgcgttcccccagcggaggcggcgaaggtcgtccgtgacgcacacgctcgctgccttgaccgacattggaggcgtcaacagcatccggagccctttccacacccacgacccctccaggacggacgctgaagccggccatcgaccctccctgctccgcccgcatctcggggccacgctgtccgacagcgccgtcaccgacaccgacggtgaagcctcgtctgtaacccacgctgacgaccggctcggcgagaggaagcgccatggcagcaccgaactgcgcagaatctcctcgccctcgggctcgatgcgcagcaattccatattctcgacgccacctctgctctccgcgccacctctcttcggtagctatggctccatccagagctacagcaccatcggcgacctcgagagcgaagctagtcacgcctccatggcagaagctgccgagatgtggcgtcagcaacaagagtcgggggccaatgtccccgatggagagcggccccagatcttggtgaaagaggtcgagcaggatggcaagatcatcctcgccgtgtccggccagtcgactctgccgcagaccatagttaactcgacaaacgtgctaatcggtgtaggtcttctgagcttaccgatggggctcaaatacgctggttgggtttgcgggacgcttgccctgctgctctgtgcagctgtcacgtcctggactgcgagacttctgtccaagtgcatggacctggactccaccatcatcacattttctgatattgcatatatatcttttggcaagagagcccgtgtcgccactgccgttctctttactcttgaattactggctgcatgtgttgctctcattgtcctgttcgccgacagcctcgcagtgctttttcccggcaatctcagcctcacagaatggaaagtgatatgcaccttggttttaatacctctccaatttgcacctctggctctcctcagcgtcacgagcttcgttggagttatctgctgtttaagtattgccactattgtcattctggatggcttgctcaaacaaacaggccccggctcgctcattgagccagcagcaacttacctgtttcctgcaaattggttgacattaccattatcttttggcttactgatgtcaccttggggtggacactctgtttttccgaatatttaccgggatatgcgtcatccgcataagtacacaaaagctgtcaattatacgttttctttcactcttgtagtggatgcctctgtagctgtagtcggtctactcatgtttggcgatggcgtgcgtgacgagatcacagcgaacattctggaaacaaccggctaccccgacgttctcaatgtccttctcgtgatttttatcgccatcatcccactaaccaaggtcccattgaacgctcaacccattattacaaccgcagaggtcctatttgggctccgccagcaggttgtcgcagaagagtccgctctcgtgggcctttctagcacatctagaggcttgctcaaggctacagttaggatagtcgtcctgctgactttcctagctattagtatcttattccctgcctttgactctatcatggctttcatgggcagcgcgctgtgcttcacgatctgtgtcacacttccacttgcattttacctcaagctattcggccgcgagatcgccttcggcgagcgcgccctctgctggtctgtcatgctgttgtcgcttacgatctccatcgtagggacggtatgggctttcttgccacgttcgctaatcgaggccgaataa

SEQ ID NO: 15687 - protein, 649 aa, Muscodor strobelii
  misc_feature: SGI Peptide ID NO. 565200
  misc_feature (241)..(641): Pfam Id: PF01490 Pfam Desc: Transmembrane amino acid transporter protein
  misc_feature (23)..(648): NCBI GI: 145614300 Blast Desc: MGG_08827 [Magnaporthe grisea 70-15] gi|145021240|gb|EDK05369.1| MGG_08827 [Magnaporthe grisea 70-15]
  misc_feature (9)..(649): NCBI GI: 154298862 Blast Desc: BC1G_11678 [Botryotinia fuckeliana B05.10] gi|150857583|gb|EDN32775.1| BC1G_11678 [Botryotinia fuckeliana B05.10]
  misc_feature (8)..(649): NCBI GI: 85109776 Blast Desc: NCU06231 [Neurospora crassa OR74A] gi|28924733|gb|EAA33846.1| NCU06231 [Neurospora crassa OR74A]
  misc_feature (5)..(646): NCBI GI: 189189968 Blast Desc: conserved [Pyrenophora tritici-repentis Pt-1C-BFP] gi|187972929|gb|EDU40428.1| conserved [Pyrenophora tritici-repentis Pt-1C-BFP]
  misc_feature (60)..(649): NCBI GI: 46111235 Blast Desc: FG02499.1 [Gibberella zeae PH-1]
  misc_feature (62)..(649): NCBI GI: 256725812 Blast Desc: NECHADRAFT_43136 [Nectria haematococca mpVI 77-13-4]
  misc_feature (145)..(642): NCBI GI: 242794719 Blast Desc: transporter, [Talaromyces stipitatus ATCC 10500] gi|218719020|gb|EED18440.1| transporter, [Talaromyces stipitatus ATCC 10500]
  misc_feature (248)..(649): NCBI GI: 171686622 Blast Desc: protein product [Podospora anserina] gi|170943272|emb|CAP68925.1| protein product [Podospora anserina]
  misc_feature (61)..(648): NCBI GI: 169612615 Blast Desc: SNOG_09432 [Phaeosphaeria nodorum SN15] gi|160702548|gb|EAT83624.2| SNOG_09432 [Phaeosphaeria nodorum SN15]
  misc_feature (177)..(642): NCBI GI: 212536040 Blast Desc: transporter, [Penicillium marneffei ATCC 18224] gi|210070575|gb|EEA24665.1| transporter, [Penicillium marneffei ATCC 18224]
  misc_feature: Useful for introducing or modulating the production of volatile compounds
MTGARPSGPASWVDYARRASSPGGRSDSASSTGAHSVSFENDPLLADRHGRDQDDAFPQRRRRRSSVTHTLAALTDIGGVNSIRSPFHTHDPSRTDAEAGHRPSLLRPHLGATLSDSAVTDTDGEASSVTHADDRLGERKRHGSTELRRISSPSGSMRSNSIFSTPPLLSAPPLFGSYGSIQSYSTIGDLESEASHASMAEAAEMWRQQQESGANVPDGERPQILVKEVEQDGKIILAVSGQSTLPQTIVNSTNVLIGVGLLSLPMGLKYAGWVCGTLALLLCAAVTSWTARLLSKCMDLDSTIITFSDIAYISFGKRARVATAVLFTLELLAACVALIVLFADSLAVLFPGNLSLTEWKVICTLVLIPLQFAPLALLSVTSFVGVICCLSIATIVILDGLLKQTGPGSLIEPAATYLFPANWLTLPLSFGLLMSPWGGHSVFPNIYRDMRHPHKYTKAVNYTFSFTLVVDASVAVVGLLMFGDGVRDEITANILETTGYPDVLNVLLVIFIAIIPLTKVPLNAQPIITTAEVLFGLRQQVVAEESALVGLSSTSRGLLKATVRIVVLLTFLAISILFPAFDSIMAFMGSALCFTICVTLPLAFYLKLFGREIAFGERALCWSVMLLSLTISIVGTVWAFLPRSLIEAE

SEQ ID NO: 15688 - DNA, 7471 bp, Muscodor strobelii
  misc_feature: SGI EST ID NO. CUFF.37448.1
  misc_feature: Variant of the nucleotide sequence at SEQ ID NO 15686
cgatgggcatgaaggtttttcgaagcagctctctcaccttgttttgactagaacgacatgaaggaagacgttcgtatattatgcggtatcgcggaaactcctgggcatgaacggaaagcttgcttgtcagctatcatgggcattgtgcttgcaggaaaccgcatctcggatggtgaggagcagtactcgttgctcgccttcttagaaaggatggaaagtaaaacgatctggccaacctggtcgttacaacaggagttgaagcaaagctgggggcaggtgtgacgtacctcatgagatggtggcggagtatactacgactactccatcccgcgatacgcaaacagaacacagcctttgatcaattctactattgtcgggctattgattatgcatgtcgctactcttcgttgatatatgcctaagcataggtatgtataacacactacagtcacgttaaaagtacagatccggatcttcgagcgttcaatctaaatgagtcaatttacgcgtacctgaaggatcagtttagtgccttagtgtttttaaagtggtttcctaaatttgacaacgaagttgacgattgttgcaaagcatgaaaataatacctgatcacaatatatgagcgaaatacggtatttttccttgtatcattcatcagacagggaagacgcgagtggcatataggtacgaagaatgagctctattttaaccaaccaagccctaatgaatcagtgatatgatgctcacttctttataaagtccatctccctccggaccccgccaccagccaggcacttcgaggagcccagttcgagtaggattgaagaggagtgattcaccatcttctctcccttttccttctgcctcattaaattcgatgggtccgatccccccctcaagcataacggtcctcgataggtttcccagagcgcttcgatcaccaattcaagtttacaggaatgttcaaccaaaaattaaatgaaggtgtaatacaccaaacagatcaaggaggtcccgaagaaatctagatgttcagcgattaaatcagctttgttaaagcatgggtccgttatcgatatgctaggtagttacgagaggataacccatggatccaacgcgtcaacgcatcttcggctttcaacaagacattatatctgttttcacatctctcgatctgatggagcgactactcaacatatcagaagcaaaagctaagactattcttgtagctctctgcgctagcgactcgtcagtagaaaaccaagcgatcgaatacttagacgagatgacgaccctggagcaacgcgcgatggctacctctgagccgaataccttgaaaagaaaagcatcactgacaatcaaaatttgcgtacaatgccaagaggcattctacgaagaggagaataatgacgaagcttgcaaatatcacgacggtcggcacaatgactttgctctttttgtggataccgactgactagcgacacaggagatctggacgttgaccgtgacagcgaggtttgggcagaccatgacgagaattgccatggcataattgacagtgatgagaatcggttcgagtatcccgagggcttcatttggagttggtgtgacaaatccggtcatcgaagcggatgtacaactggtaggcacagcgcaggtaagcattcgaagtctttcttttccccacaggggaatctttggggacgattgctttgatcctcttccgagatattcaaaagtgaccttttaatatttaaatatcccaaagacaccaataattgactccgattaaattatagacagtaatcagcgtggtcggtatggaacgaagcccgggactgtcgggaattctgagagctcatctgatgatggagagcaataacgaagatcacacgaataaaagggcttgacaatggaccgacggtattacgtcctccgctagatatatattcgaaggagttgttttgttgttgatagtccctctgttgggacgctggccggagactgctattgctgtacactatcgacttcgagataaatataatacaaatcgagcaattatgctagccctatccaataggtactgcactgtgacgcggcaataatcggtgctaaagggccaaaagaactgcatgagtttgttctcatcatccatttggttaacagcgagcaaataacacagccctcgaagtttgaacaaggcgttgctctgagccgacgggaagcgaagtggagaccttgcttgtcgacaaaattttcatcaaagtccagactggtcgtctgatcgtaaagaatagaataagcgagaaatacagaatgaaatcttcagggttcttttactcaagggaggcttccaaggttcttgccgtgatgtggaagtgaagcaactggagcacagtacatctgcagcttggtctctgttctcgcgctggtggtatttattacgtttggatgggattggattccttatcgcatagatgctccaccggactctatcaaccccactcgctagcatgcagacaggcacggcagagcagggccaagtctcaattgataccaaactccatcgatgtcatcacgatctccgctgccgctgtcctaccccatccccacagcactcttcgtagtcaaagcgagccgagccgggacacactcatacatgccgttatagatattcctcaaattgcaatattactctatgcatatcaaacatacgcgccaaggtgataggcatcggacggtggcaatgggttctggtgttctgctccttacagcagcatcttatcctcatgtccatctgacgagtagctgtgtttaacgcaggacataggggccaatgtaaataattataacagcgcatatcacagagcacaaattgcaaaacagctcatgagagcttgaaccttgtcactcagaccacaaacgaccaagggcctatctatactagtgcatatcgttcgataacttgccccaccaccaccgccgctccattcctcgcagcagggaactcacacttggccttcgcagttttcaccactgctcgattgcttcccgctgtgctgattgccgctgtttctggtcggggacacgtgcatcccggtatttcacaatgaccggcgcaagaccgtctgggcctgcgagctgggtcgactacgcacggagagcatcgtcacctggcggccgaagcgacagcgcctcgtcgacgggagcgcacagcgtctcgttcgagaacgatcctctgctcgccgaccgtcacggccgcgaccaagacgatgcgttcccccagcggaggcggcgaaggtcgtccgtgacgcacacgctcgctgccttgaccgacattggaggcgtcaacagcatccggtccttcagtcgcagtttccagcgcgcggccgccttccccgagatcatcccccagcgcccatctttcgtcttcgccccggaccaggagccctttccacacccacgacccctccaggacggacgctgaagccggccatcgaccctccctgctccgcccgcatctcggggccacgctgtccgacagcgccgtcaccgacaccgacggtgaagcctcgtctgtaacccacgctgacgaccggctcggcgagaggaagcgccatggcagcaccgaactgcgcagaatctcctcgccctcgggctcgatgcgcagcaattccatattctcgacgccacctctgctctccgcgccacctctcttcggtagctatggctccatccagagctacagcaccatcggcgacctcgagagcgaagctagtcacgcctccatggcagaagctgccgagatgtggcgtcagcaacaagagtcgggggccaatgtccccgatggagagcggccccagatcttggtgaaagaggtcgagcaggatggcaagatcatcctcgccgtgtccggccagtcgactctgccgcagaccatagttaactcgacaaacgtgctaatcggtgtaggtcttctgagcttaccgatggggctcaaatacgctggttgggtttgcgggacgcttgccctgctgctctgtgcagctgtcacgtcctggactgcgagacttctgtccaagtgcatggacctggactccaccatcatcacattttctgatattgcatatatatcttttggcaagagagcccgtgtcgccactgccgttctctttactcttgaattactggctgcatgtgttgctctcattgtcctgttcgccgacagcctcgcagtgctttttcccggcaatctcagcctcacagaatggaaagtgatatgcaccttggttttaatacctctccaatttgcacctctggctctcctcagcgtcacgagcttcgttggagttatctgctgtttaagtattgccactattgtcattctggatggcttgctcaaacaaacaggccccggctcgctcattgagccagcagcaacttacctgtttcctgcaaattggttgacattaccattatcttttggcttactgatgtcaccttggggtggacactctgtttttccgaatatttaccgggatatgcgtcatccgcataagtacacaaaagctgtcaattatacgttttctttcactcttgtagtggatgcctctgtagctgtagtcggtctactcatgtttggcgatggcgtgcgtgacgagatcacagcgaacattctggaaacaaccggctaccccgacgttctcaatgtccttctcgtgatttttatcgccatcatcccactaaccaaggtcccattgaacgctcaacccattattacaaccgcagaggtcctatttgggctccgccagcaggttgtcgcagaagagtccgctctcgtgggcctttctagcacatctagaggcttgctcaaggctacagttaggatagtcgtcctgctgactttcctagctattagtatcttattccctgcctttgactctatcatggctttcatgggcagcgcgctgtgcttcacgatctgtgtcacacttccacttgcattttacctcaagctattcggccgcgagatcgccttcggcgagcgcgccctctgctggtctgtcatgctgttgtcgcttacgatctccatcgtagggacggtatgggctttcttgccacgttcgctaatcgaggccgaataaattcccatcgaaatacagaatgctgaaagttgtagagatctgatttccagcatataccatggagtccgaccctaaattctgtcatgtgcgcgatctgaatgcataatcttagagcactgtcatttacattgcatgggagtctacaggccatgaacgagaagatgatactaaatgatctgttggactttcgaataactaccagactatacgtggtttagcactattggcactaagactatatgtcgaatagccgggttgcttttactaggttgtgtatcacttattttgttcatggcctggtcggccacctaggcgttactttgaataggagctgggcacagtttgttgggtatcaatatcatgacaaattctaccacacttttcgcctttctaaatttcatcttaatgtatacgtgtgatatccactatcgtcaggttcacaggaacatgatcacggagaatgtatcagtcggggacatctcaatcctttttatacatggtctctaggcaagaggctgtcgctatccacctatgacgcgttgcagagttaatccatggcggcgtctcattcctcaaagctgagcagcaatcgttaacttggtcttgacagtttttctcccagatcagccgctcgaaagaagaatgcaaaactccctttcagtagagcaaagtagatctagctcgacacaattttggattcggtaggtgagcaccgcatagtccagcccctacaacttgatcgctttagtaactacgtccaaacatggtccaggacttggcgaatgctttgcactcgggattaagacatttagtctcaggggtcagtccatcgggctattagaagtatctgtgtcagctggaatccgaagagtaaggatatttatataacatacctggtcgaacggaatgcacaagctcttcatgcccatagaaggctgcttctcgttctgagccccttccttgggttcctcactcttcgtcaactccttgattctgtcctcgcaggccactgcctcacaaaatgggatgaccacaacgttcttggaatccagtgccgggacaaccttggaccagtctgtcagggtcaatctgtgctctctgaaggaagtttcggctttggtgtagagcgatttttggatatcttctagaagctccggaactttagtagcgagatcggcgagaggaagcgtgcctttctctcccgtgtcacggcgtgcgtagctgaccacgcttgccgcagcatccttggggccaaactcaatgcgcaagggcacacccttcatttcccaatcggcaaacttgaaacccggattgctacttgagcgttagtattcaccccagcatagagaatgaattcataaacccgggaatttctgtcacgtactatccctcgcgagtatcaacgtccgcccgtacaccggctttcttcagtgtggcataaaggtcttcgaccttcgcggtatgggccgccttgtcttcggcactcgtcttggccgtcacaccgaggggaatgataatagcctgagtacgagccacgcggggcggcatgacgagacctttgtcgtcactatgcagcattaccattacaccaatgacacgagtggacaagcccctttcaaatggactgattagcacaacgactagaagcgcagatttgtggcattgatgaattaccatgaattttgccaaacatgggtcttctctccaggcttgctgggatcctcgacggtaatatcgaacatcttactgaagttctggccaagacaactgcaattattagatattgaagcgtgggagtgattgcgagtacgcactgagatgtggcgccttgaataccacgaccgttggtcggaatgtatccctcgactgttgtcgtccaatgaccaccggcgaacttctcggcttcggttttcctacaagtaacgtcaacaacaacgtctcgttgagtaatgagtaggcagcccctgagtcaggggtaattaatacttacttgccacgtactacagggactgcaagtagttgctacgagatactttaacgacacgctcatactatttccaccagggcgttgttcttacttcatagatctgggcgtatagctcaaggatttgcatgacctcctcggcagaggactcttccgtcaaatgagcactatcaagagtcagttacggatcaagctaaacatgtgtagagacatacgtgtgaccctcctgccacagaaactcgcgagtgcgaaggaaaggagtagtctgtttggcttcccagcgaacaacgttgttccactggttgagtctgaaaggaaggtctcgatgtgaccgaatccctat

SEQ ID NO: 15689 - DNA, 756 bp, Muscodor strobelii
  misc_feature: SGI cDNA ID NO. 565201
  misc_feature: Encodes the peptide sequence at SEQ ID NO 15690
atgcataaaatcctcagttgccaggcccacttgctctactctgataaagaacttaatttcgctctatgggctagcatcaagcaagagatctattacgcaattctacaccagcagccagcttctgtatacttggatggctgcaatattgatcgctccatcacagaggccgatgagcagatttggctactcagaataattctgcatcttcttgacatcctagaattctgtttcggcaccagtcagaataagaagtctactaagtctacatacagtgcgcttgtcgaatactccgcagcgtgggagcgcgccatccctgaatcttttaaccccttatttacgaaattgcccaagacacgatatgatttcccggagatcacgtttttgaacgatcttgccatgtcgtcgtggcaatactatcatcttgcccggatgcttctcacagcacataaccctaatgtgcctaagatagggcacaactaccttgctattctgtcctatccgtatcgaaaatctattgataacgacatgaaggaagacgttcgtatattatgcggtatcgcggaaactcctgggcatgaacggaaagcttgcttgtcagctatcatgggcattgtgcttgcaggaaaccgcatctcggatggtgaggagcagtactcgttgctcgccttcttagaaaggatggaaagtaaaacgatctggccaacctggtcgttgtttaattggactgtggtgactgtctctgagtatgaatcgtaa

SEQ ID NO: 15690 - protein, 251 aa, Muscodor strobelii
  misc_feature: SGI Peptide ID NO. 565201
  misc_feature (21)..(237): NCBI GI: 46118333 Blast Desc: FG04701.1 [Gibberella zeae PH-1]
  misc_feature (21)..(235): NCBI GI: 256719857 Blast Desc: NECHADRAFT_56680 [Nectria haematococca mpVI 77-13-4]
  misc_feature (21)..(245): NCBI GI: 67523847 Blast Desc: AN2379.2 [Aspergillus nidulans FGSC A4] gi|40745334|gb|EAA64490.1| AN2379.2 [Aspergillus nidulans FGSC A4]
  misc_feature (22)..(235): NCBI GI: 256721531 Blast Desc: NECHADRAFT_39653 [Nectria haematococca mpVI 77-13-4]
  misc_feature (21)..(235): NCBI GI: 256724984 Blast Desc: NECHADRAFT_34701 [Nectria haematococca mpVI 77-13-4]
  misc_feature (9)..(238): NCBI GI: 169774507 Blast Desc: [Aspergillus oryzae RIB40] gi|83769584|dbj|BAE59719.1| protein product [Aspergillus oryzae]
  misc_feature (9)..(238): NCBI GI: 238496939 Blast Desc: conserved [Aspergillus flavus NRRL3357] gi|220694585|gb|EED50929.1| conserved [Aspergillus flavus NRRL3357]
  misc_feature (5)..(228): NCBI GI: 145250006 Blast Desc: An14g07190 [Aspergillus niger] gi|134082027|emb|CAK46712.1| protein product [Aspergillus niger]
  misc_feature (23)..(220): NCBI GI: 189195028 Blast Desc: conserved [Pyrenophora tritici-repentis Pt-1C-BFP] gi|187979731|gb|EDU46357.1| conserved [Pyrenophora tritici-repentis Pt-1C-BFP]
  misc_feature (21)..(237): NCBI GI: 256733548 Blast Desc: NECHADRAFT_35855 [Nectria haematococca mpVI 77-13-4]
MHKILSCQAHLLYSDKELNFALWASIKQEIYYAILHQQPASVYLDGCNIDRSITEADEQIWLLRIILHLLDILEFCFGTSQNKKSTKSTYSALVEYSAAWERAIPESFNPLFTKLPKTRYDFPEITFLNDLAMSSWQYYHLARMLLTAHNPNVPKIGHNYLAILSYPYRKSIDNDMKEDVRILCGIAETPGHERKACLSAIMGIVLAGNRISDGEEQYSLLAFLERMESKTIWPTWSLFNWTVVTVSEYES

SEQ ID NO: 15691 - DNA, 7471 bp, Muscodor strobelii; identical to SEQ ID NO: 15688
  misc_feature: SGI EST ID NO. CUFF.37448.1
  misc_feature: Variant of the nucleotide sequence at SEQ ID NO 15689

SEQ ID NO: 15692 - DNA, 1590 bp, Muscodor strobelii
  misc_feature: SGI cDNA ID NO. 565202
  misc_feature: Encodes the peptide sequence at SEQ ID NO 15693
atgcttgatccagcttcgtcttcgactttgaggggttggcattatgcgacgggcctcgcagtattcttgtttgtttatttcttcgtctaccccgtgatcgtatatttcagagacgcaaaaggactgcggaaatttgaaaatttcagcaccttctcgggaatctacaatctgcctttcatgatattggctcacggaggtgctcgatcaacatatctcggcaagttgcaccagacgaaccctattctacgcactggtcccaacactctgtcattcggcagcgttcgcgctatcaaagatatatatggtcataatacaccctgtctcaaggacgactcctatatcctgactgctggctcggattaccatcttgcggacgtcgttgatcggggagaacatgcccgtaagcgcaaagttctagcttcggcctatgcaataaagcatttagaagcatgggaattcaaggttacggacaaagtggagagattgttcaagaaattcgaccaatgctgcactgatcctcttccagagggtcagctgtaccctgatctcaaagatgtcaacctcgactatcgccaatggacaaattacttcactcttgacgctattaccgacatcggtctgtctcaaagtcttggacttcttgatagaggaagtgatcgggtcaccgcactgcggccggacggctcggcctacgagtgtaacattcgacaagcactttaccctacggctcgaaagcagtcatatctcatatggacttatgactggtacaaagtgctgaacaaaatttgcgacatcattcctttctatcggcgcatgtctgaatcagcagtgtgctgggaaggaatcgtccggttttgtgctagcaggagattcaaggcatatcaagccggagagcccatggacgatttcttccatgccctaatggaaagcaagaaaggagagaagaataatctgccatggggcgaggtcgtggccgaaatcaacattatgatgaacgcaggtagtgtgacaaccgccattgctgtcaccaatgtgctttatcagctgctcaagcatcctgaaactatgactaaactccgcgaagaacttgatgtcgctctagattcaaatgacacaatcgcgccctatgaaaaagtcaagcgcttgccttatttgcgagcctgtctggatgaatccctgcgtttgcaacctccaacaccacacggtctaccgcgcgtaacaccccctgaaggtatgcgtatcatggacgcttacgtgccaggaaatacgacggtcagcatctctgcactagtggctcaccgcgacgagtccgtgttcccagatgctcgcaagtacattccagagcgttggttaggagaggcagggaaagctttacaaagtagttttcttgctttctccgcaggggctcgaggatgtataggacgcaatatttcttacctggagcaaagcgtactcattgcctcggtggtgaaaaattacgatttcgcacttccgaaaggatttgaactgcaaagggaggagactatgaaccatatactcggagagatgcccgttaagatctggaggcggcagtccaaggtgaccgattga

SEQ ID NO: 15693 - protein, 529 aa, Muscodor strobelii
  misc_feature: SGI Peptide ID NO. 565202
  misc_feature (51)..(522): Pfam Id: PF00067 Pfam Desc: Cytochrome P450
  misc_feature (302)..(500): Pfam Id: PF00067 Pfam Desc: Cytochrome P450
  misc_feature (6)..(523): NCBI GI: 256721502 Blast Desc: NECHADRAFT_39694 [Nectria haematococca mpVI 77-13-4]
  misc_feature (15)..(525): NCBI GI: 71000892 Blast Desc: cytochrome P450 monooxygenase [Aspergillus fumigatus Af293] gi|66852765|gb|EAL93089.1| cytochrome P450 monooxygenase, [Aspergillus fumigatus Af293] gi|159129224|gb|EDP54338.1| P450
  misc_feature (15)..(524): NCBI GI: 119480555 Blast Desc: benzoate 4-monooxygenase cytochrome P450 [Neosartorya fischeri NRRL 181] gi|119408460|gb|EAW18409.1| benzoate 4-monooxygenase cytochrome P450 [Neosartorya fischeri NRRL 181]
  misc_feature (15)..(524): NCBI GI: 169784018 Blast Desc: [Aspergillus oryzae RIB40] gi|238493855|ref|XP_002378164.1| cytochrome P450 monooxygenase, [Aspergillus flavus NRRL3357] gi|83775215|dbj|BAE65338.1| protein
  misc_feature (15)..(529): NCBI GI: 145235954 Blast Desc: protein product [Aspergillus niger] gi|134075073|emb|CAK39085.1| protein product [Aspergillus niger]
  misc_feature (15)..(524): NCBI GI: 259480004 Blast Desc: TPA: cytochrome P450, (Eurofung) [Aspergillus nidulans FGSC A4]
  misc_feature (29)..(523): NCBI GI: 255955207 Blast Desc: Pc21g13380 [Penicillium chrysogenum Wisconsin 54-1255] gi|211590067|emb|CAP96235.1| Pc21g13380 [Penicillium chrysogenum Wisconsin 54-1255]
  misc_feature (15)..(524): NCBI GI: 169779543 Blast Desc: [Aspergillus oryzae RIB40] gi|83772975|dbj|BAE63103.1| protein product [Aspergillus oryzae]
  misc_feature (15)..(491): NCBI GI: 67539334 Blast Desc: AN5837.2 [Aspergillus nidulans FGSC A4] gi|40739156|gb|EAA58346.1| AN5837.2 [Aspergillus nidulans FGSC A4]
  misc_feature (60)..(523): NCBI GI: 238500205 Blast Desc: cytochrome P450, [Aspergillus flavus NRRL3357] gi|220693090|gb|EED49436.1| cytochrome P450, [Aspergillus flavus NRRL3357]
  misc_feature (39)..(524): SWISSPROT Homolog: EC 1.14.13.12 Benzoate 4-monooxygenase
MLDPASSSTLRGWHYATGLAVFLFVYFFVYPVIVYFRDAKGLRKFENFSTFSGIYNLPFMILAHGGARSTYLGKLHQTNPILRTGPNTLSFGSVRAIKDIYGHNTPCLKDDSYILTAGSDYHLADVVDRGEHARKRKVLASAYAIKHLEAWEFKVTDKVERLFKKFDQCCTDPLPEGQLYPDLKDVNLDYRQWTNYFTLDAITDIGLSQSLGLLDRGSDRVTALRPDGSAYECNIRQALYPTARKQSYLIWTYDWYKVLNKICDIIPFYRRMSESAVCWEGIVRFCASRRFKAYQAGEPMDDFFHALMESKKGEKNNLPWGEVVAEINIMMNAGSVTTAIAVTNVLYQLLKHPETMTKLREELDVALDSNDTIAPYEKVKRLPYLRACLDESLRLQPPTPHGLPRVTPPEGMRIMDAYVPGNTTVSISALVAHRDESVFPDARKYIPERWLGEAGKALQSSFLAFSAGARGCIGRNISYLEQSVLIASVVKNYDFALPKGFELQREETMNHILGEMPVKIWRRQSKVTD

SEQ ID NO: 15694 - DNA, 633 bp, Muscodor strobelii
  misc_feature: SGI cDNA ID NO. 565203
  misc_feature: Encodes the peptide sequence at SEQ ID NO 15695
atgtcattcgcatctgcaatatccaatcttccggaccgtgctattgcctatcagagtgaggtcgttaatatgttgatcccaatcctggatggcccaattgaatgtctcgatgagaacgtactcgtcgcaatagtattgcttcgcggtgctgaagaggtttcagatgtggatcttggtacacatctgttcggtagtgcacagcttctgaagggcgcttcagatttcgccgcttcgggcggcttaggcgaagcagcaagttggactgtccttcgacagagcacatacccctcgttcacgaagtcgcaaccattggtaatagatctggactgctataagaagtcgagcgtattttctggtaccgatgcaacatctctagcccaccaagccacattcttatgtggtcaagctttagcatatgcatttgggactggcgaaggcactccgagaagagatccagccgaatgggacgttcttcgtgagcagctggacgcgtggtttagatctagacctaaagaactatgtgctttttgggtcgatgggttgctatcccaagaaaattctggaagcaaatcggcgttcccctgcgcttggctgccgcgaccagctcacggtaattttgcatcggtcttctaa

SEQ ID NO: 15695 - protein, 210 aa, Muscodor strobelii
  misc_feature: SGI Peptide ID NO. 565203
  misc_feature (5)..(200): NCBI GI: 256721501 Blast Desc: NECHADRAFT_79789 [Nectria haematococca mpVI 77-13-4]
  misc_feature (14)..(201): NCBI GI: 70992141 Blast Desc: conserved [Aspergillus fumigatus Af293] gi|66848552|gb|EAL88881.1| conserved [Aspergillus fumigatus Af293] gi|159124488|gb|EDP49606.1| conserved [Aspergillus A1163]
  misc_feature (14)..(201): NCBI GI: 169772757 Blast Desc: [Aspergillus oryzae RIB40] gi|83768708|dbj|BAE58845.1| protein product [Aspergillus oryzae]
  misc_feature (14)..(201): NCBI GI: 67542053 Blast Desc: AN7190.2 [Aspergillus nidulans FGSC A4] gi|40742252|gb|EAA61442.1| AN7190.2 [Aspergillus nidulans FGSC A4]
  misc_feature (14)..(201): NCBI GI: 259483476 Blast Desc: TPA: Zn(II)2Cys6 transcription factor (Eurofung) [Aspergillus nidulans FGSC A4]
  misc_feature (7)..(202): NCBI GI: 115399060 Blast Desc: conserved [Aspergillus terreus NIH2624] gi|114192002|gb|EAU33702.1| conserved [Aspergillus terreus NIH2624]
  misc_feature (14)..(201): NCBI GI: 238490666 Blast Desc: conserved [Aspergillus flavus NRRL3357] gi|220696983|gb|EED53324.1| conserved [Aspergillus flavus NRRL3357]
  misc_feature (14)..(201): NCBI GI: 119471320 Blast Desc: NFIA_056090 [Neosartorya fischeri NRRL 181] gi|119406309|gb|EAW16260.1| conserved [Neosartorya fischeri NRRL 181]
  misc_feature (14)..(203): NCBI GI: 255946461 Blast Desc: Pc20g15240 [Penicillium chrysogenum Wisconsin 54-1255] gi|211588733|emb|CAP86853.1| Pc20g15240 [Penicillium chrysogenum Wisconsin 54-1255]
  misc_feature (14)..(204): NCBI GI: 238501778 Blast Desc: conserved [Aspergillus flavus NRRL3357] gi|220692360|gb|EED48707.1| conserved [Aspergillus flavus NRRL3357]
MSFASAISNLPDRAIAYQSEVVNMLIPILDGPIECLDENVLVAIVLLRGAEEVSDVDLGTHLFGSAQLLKGASDFAASGGLGEAASWTVLRQSTYPSFTKSQPLVIDLDCYKKSSVFSGTDATSLAHQATFLCGQALAYAFGTGEGTPRRDPAEWDVLREQLDAWFRSRPKELCAFWVDGLLSQENSGSKSAFPCAWLPRPAHGNFASVF

SEQ ID NO: 15696 - DNA, 1635 bp, Muscodor strobelii
  misc_feature: SGI cDNA ID NO. 565204
  misc_feature: Encodes the peptide sequence at SEQ ID NO 15697
atggctggaaataagaccgtccaaaacgagacagcaaatcatatgttaaaaacagcatgtccttctcccatcaaggatgacgaggttgtcgtgggcttcgagcatgtcgataaagtctctgaggaggcggctctcgccaactcaattgaggacaccaagccctcaaatagagtggtatgtgtagaaaggtggatgatcgtactcactgtggctatgggaggattcctttttggttacgataccggctacatttctgctgtactagtgaacattaaaaatgaccttggccacgaccttaattcctccgaacaagagcttgtgacagcaatcacttcggccggcgctttaatcggtgccctggttgcaggactgccagccgataaattcggccgtaaatttggaatctatgtcggatgtgctcttttcatcgctggttctgttttacaagccgccgcatactccgtgccacaattcacaattggtcgtttcgtcgtcggattgggagtcggttctgcagcgatgattgtacctctctacatcggagagatttcgatagcaaaatatcgtggccgcgctgtagccttgaataacgtgagcgtgacgctaggccagctcgtagcggctgcgttaggagcgggattcacctatgttgagaatggttggagataccatgtcgcactcggtggtctccctccatttctcctctgttttcttcttatcagttgtcccgaaagccctcggttactcattatgcataaaaagcatgacgaggcgaagatagctctatttcagctatttcctaacgctagcgaagctcaaatacagtcgaaggtcgaccatatcgcattttcgatcgacactgagagccacatgacatcgtcgctatggcagcaatacaaactactacacaccgttcctgggaacttccgggccctttttatcgtgtgcagtgtcatggctatctcgcagctttccggattcaacactcttctctattattccgccacccttttcagtctcgttggcttctctaatccgacggctgtcgggattacggttgctgctgccaattttgttttcaacattgtcaacttagctttgatcgacaagatgggaagacgtctgcttctgttaatcaatgtcctcgtgatgtcgtttgcaatggctgtagttgccattgccttccactggatcccagtgaatggtgatctcgaattagtaggtgcatcaagcagttgggcacctatcgtggtactagtttctatcatcatattcgttgctgcttattcctcaggtgttgctacaatcgcatggattggggtggaattactcccaatagaggttcgtgcactgggcactatgctgaacactgttacttgctgggcgacaaacataattgtctcttcaacatttctatcactgctcaaaggagctacacccagtggaggcttcggttactacgctggcttgtgctttatcggttggttgttgattcttttctgtttcccagaggtcaagggaatgccccttgaagaaatcagacatattttcgaacatggctttggcgtcaggaaagcagccgccctccagaaagagattgctgctcaacatcgcaatcaggctatgacagtatag

SEQ ID NO: 15697 - protein, 544 aa, Muscodor strobelii
  misc_feature: SGI Peptide ID NO. 565204
  misc_feature (70)..(468): Pfam Id: PF07690 Pfam Desc: Major Facilitator Superfamily
  misc_feature (66)..(517): Pfam Id: PF00083 Pfam Desc: Sugar (and other) transporter
  misc_feature (34)..(538): NCBI GI: 256721530 Blast Desc: NECHADRAFT_93166 [Nectria haematococca mpVI 77-13-4]
  misc_feature (45)..(540): NCBI GI: 119480553 Blast Desc: myo-inositol transporter [Neosartorya fischeri NRRL 181] gi|119408459|gb|EAW18408.1| myo-inositol transporter [Neosartorya fischeri NRRL 181]
  misc_feature (35)..(540): NCBI GI: 71000890 Blast Desc: myo-inositol transporter [Aspergillus fumigatus Af293] gi|66852764|gb|EAL93088.1| myo-inositol transporter [Aspergillus fumigatus Af293] gi|159129223|gb|EDP54337.1| myo-inositol A1163]
  misc_feature (35)..(522): NCBI GI: 145235952 Blast Desc: protein product [Aspergillus niger] gi|134075072|emb|CAK39084.1| protein product [Aspergillus niger]
  misc_feature (34)..(541): NCBI GI: 169762480 Blast Desc: [Aspergillus oryzae RIB40] gi|83770168|dbj|BAE60301.1| protein product [Aspergillus oryzae]
  misc_feature (34)..(541): NCBI GI: 238488267 Blast Desc: myo-inositol transporter [Aspergillus flavus NRRL3357] gi|220697759|gb|EED54099.1| myo-inositol transporter [Aspergillus flavus NRRL3357]
  misc_feature (21)..(543): NCBI GI: 238493853 Blast Desc: MFS transporter, [Aspergillus flavus NRRL3357] gi|220696657|gb|EED52999.1| MFS transporter, [Aspergillus flavus NRRL3357]
  misc_feature (33)..(543): NCBI GI: 169784016 Blast Desc: [Aspergillus oryzae RIB40] gi|83775214|dbj|BAE65337.1| protein product [Aspergillus oryzae]
  misc_feature (32)..(540): NCBI GI: 256734058 Blast Desc: [Nectria haematococca mpVI 77-13-4]
  misc_feature (25)..(532): NCBI GI: 255939910 Blast Desc: Pc16g03650 [Penicillium chrysogenum Wisconsin 54-1255] gi|211585347|emb|CAP93035.1| Pc16g03650 [Penicillium chrysogenum Wisconsin 54-1255]
MAGNKTVQNETANHMLKTACPSPIKDDEVVVGFEHVDKVSEEAALANSIEDTKPSNRVVCVERWMIVLTVAMGGFLFGYDTGYISAVLVNIKNDLGHDLNSSEQELVTAITSAGALIGALVAGLPADKFGRKFGIYVGCALFIAGSVLQAAAYSVPQFTIGRFVVGLGVGSAAMIVPLYIGEISIAKYRGRAVALNNVSVTLGQLVAAALGAGFTYVENGWRYHVALGGLPPFLLCFLLISCPESPRLLIMHKKHDEAKIALFQLFPNASEAQIQSKVDHIAFSIDTESHMTSSLWQQYKLLHTVPGNFRALFIVCSVMAISQLSGFNTLLYYSATLFSLVGFSNPTAVGITVAAANFVFNIVNLALIDKMGRRLLLLINVLVMSFAMAVVAIAFHWIPVNGDLELVGASSSWAPIVVLVSIIIFVAAYSSGVATIAWIGVELLPIEVRALGTMLNTVTCWATNIIVSSTFLSLLKGATPSGGFGYYAGLCFIGWLLILFCFPEVKGMPLEEIRHIFEHGFGVRKAAALQKEIAAQHRNQAMTV

SEQ ID NO: 15698 - DNA, 1008 bp, Muscodor strobelii
  misc_feature: SGI cDNA ID NO. 565205
  misc_feature: Reduced expression when VOC is produced
  misc_feature: Encodes the peptide sequence at SEQ ID NO 15699
atgtggaacgtaggacaactagatccggcatacaatgactctgtcactcaacatcttcatgtgacatcttcagagtgcaaaccatcaacgatagcacaagagacgttttacacgactcgagcactttcggcaagtagccatgctggcgctcagggctactacacggctactttgcctgtgggcggaactatcgagactctttccactatccagaatcagccacggtcgttttacagagcaaatcagaacaaaatctattcgaccaacgagtacggctccacggacgggaatcaaagatcgtcgagcaatgcttcgtttatcacatcgagggctggttcatacgattcgtcgttcccgcaatctgtgaccccagaatcaggaatcagcagtcaggtcgacgcgtatagttacatgtattcccatggtcaggagcctgctggtttgataccaacaccacctacactctcaccaacggcaggcccacaacatcatcattcgaagaagtccaagtcctcctcgcgtcaacgcaagacaagacagcagcaccaatgtttttctcccgagagtatgaccgcatctacggcaggtaacagatctaaactacggagtgcgtctcggacctcgaaaaacacccatcacaatcccccagcatctgccgaggagcgcaaaagtcgcgagacgcacaataacgtagaaaaacagtaccgaaatcgactgaacgcacacttcgagagtcttctgagtgccctgccagagagcatgcagagcggtgaaggtgaagaaggaggcgactgcggactggactcgacagatcggcgagtgagcaaagctgaagttcttgatatggcccggagacatatcaaggcgctggagcgagaatgcaccgttcttgagaccgaaagagacgagcttcgggagaacatggagaagcttcgttggctgttcggccgatgcgaaggaggtaccggcgaagggtcggcgtttaccggctccaatgctctgccataa

SEQ ID NO: 15699 - protein, 335 aa, Muscodor strobelii
  misc_feature: SGI Peptide ID NO. 565205
  misc_feature (224)..(291): Pfam Id: PF00010 Pfam Desc: Helix-loop-helix DNA-binding domain
  misc_feature (191)..(312): NCBI GI: 164428885 Blast Desc: NCU00144 [Neurospora crassa OR74A] gi|157072323|gb|EAA26961.2| [Neurospora crassa OR74A]
  misc_feature (191)..(312): NCBI GI: 256725805 Blast Desc: NECHADRAFT_81884 [Nectria haematococca mpVI 77-13-4]
  misc_feature (189)..(299): NCBI GI: 74654406 Blast Desc: FUSC3_FUSCU RecName: Full=Allergen Fus c 3; AltName: Allergen=Fus c 3 gi|25361513|gb|AAN73248.1| helix-loop-helix protein [Fusarium culmorum]
  misc_feature (189)..(296): NCBI GI: 46111269 Blast Desc: FG02516.1 [Gibberella zeae PH-1]
  misc_feature (162)..(311): NCBI GI: 171691406 Blast Desc: protein product [Podospora anserina] gi|170945651|emb|CAP71764.1| protein product [Podospora anserina]
  misc_feature (192)..(312): NCBI GI: 171686584 Blast Desc: protein product [Podospora anserina] gi|170943253|emb|CAP68906.1| protein product [Podospora anserina]
  misc_feature (199)..(295): NCBI GI: 256723158 Blast Desc: NECHADRAFT_81231 [Nectria haematococca mpVI 77-13-4]
  misc_feature (166)..(294): NCBI GI: 46116386 Blast Desc: FG04035.1 [Gibberella zeae PH-1]
  misc_feature (199)..(305): NCBI GI: 171691408 Blast Desc: protein product [Podospora anserina] gi|170945652|emb|CAP71765.1| protein product [Podospora anserina]
  misc_feature (217)..(306): NCBI GI: 164429376 Blast Desc: NCU11295 [Neurospora crassa OR74A] gi|157073456|gb|EDO65443.1| [Neurospora crassa OR74A]
  misc_feature: Useful for introducing or modulating the production of volatile compounds
MWNVGQLDPAYNDSVTQHLHVTSSECKPSTIAQETFYTTRALSASSHAGAQGYYTATLPVGGTIETLSTIQNQPRSFYRANQNKIYSTNEYGSTDGNQRSSSNASFITSRAGSYDSSFPQSVTPESGISSQVDAYSYMYSHGQEPAGLIPTPPTLSPTAGPQHHHSKKSKSSSRQRKTRQQHQCFSPESMTASTAGNRSKLRSASRTSKNTHHNPPASAEERKSRETHNNVEKQYRNRLNAHFESLLSALPESMQSGEGEEGGDCGLDSTDRRVSKAEVLDMARRHIKALERECTVLETERDELRENMEKLRWLFGRCEGGTGEGSAFTGSNALP

SEQ ID NO: 15700 - DNA, 2055 bp, Muscodor strobelii
  misc_feature: SGI cDNA ID NO. 565206
  misc_feature: Reduced expression when VOC is produced
  misc_feature: Encodes the peptide sequence at SEQ ID NO 15701
atgcccatcataccggccactgacgccggcatcgacgacctggcctgggcctggcgggtactcgtcgatggcaacagtaccgatgatggttccggacaccacggcagtcccagtctgggcaactggagctctctgatcggtatcgtcaccgccattgtcggaaatatcctcatcgccctcgctctgaacgtgcagcgctattcccacatccagctgcacaagcgccgcgtcgaggcccgccatcgtgcccaggaagccatgcgccgtgtccagaacggtggccacaacggctatggtgcagccgacttccatcccgccgatgcacccgacgctgacgccgacgccgacgacgatgacgcccatgacgccgaagaccatccgcttgcgcgctcctttcagtctagcgggtccaactggaccgaatcgtcggcggatgagcccaaggtcgcatcgacttatctcaagtccccgtcctggtggataggacaggtgctgatgagcgtaggtgagatgggcaactttttagcctacggctttgcgcccgcgtccatcgtgtcgcccttgggcgtcgtagctctgatcgcaaactgcgttatcgcccctctgttttttggcgagcatttccgcaagcgggatttctggggcgtcatcattgccgtcgcgggggctgttactgtggtcttgagcgcaaaaggcgaagagacaaagttgaaccctcacgacgtgtgggacgctatcaccaccatggaattcgagatctatatgggcgttaccatcttctttatcatcatcctcatgtgggcgagtccccggtatggccacagaactatactcatcgacctgggcctagttggtctcttcggtggatatacagctctgaccacgaaaggcgtttcttctatgctgtcctcaactcttctcaaagctttcacgaccccagtcacgtacgcattgatactgatcctcgtcgtgactgcggtcatgcaagtccgatatgtgaataaggcattacaatccttcgattcgacccaggtcattcccattcagttcgtgctcttcaccttatcggtcatcatcggcagcgctgttctgtaccgggacttcgagcgcactacagcagagcaagccgccaaattcgtcggcggttgcctgctaacattttttggagtgtttttaattaccagcggtcgccacaggcacgacgaagacgaccagttacccgacgacgaggatatagaagaaacaatcgggctgagggatcaggaaggctctgagagcaatcctgatcacgccagacaatcctcggcggtaccagcatcgacatcccggagatcgtcccggacaagcatttcgcgtggttccaagccgtttcgtgatctgccatctagtggcacattgcctacgttgacaaatagaaggcctgattcggctgttatgaacttctctgaaccggccgaatcgtcaccgctgctctacggaaatcaggagcgactcgttcatcctggtctcccaccaacagtctcggtggatagtgtgcccacgatccattctgtggctgtctccgaacccttgcagtctaatcctccaaacccttcgccattacacccactgaccccacgcactccttctacagcctctcgacctcatagccaccatttctctaatgctttcatttcgccatcaccactatcgtccatcagcgccgtggttgcagataagctactcagaggcgaagacagccctattggtagaaggaggtcggtcagaagaaggcctacactccggtccagtctgtttgtctcgcaagacgaggccgaccgtgccggcgcatctgatccgctccttgttcgaagtgtaggaggcgagcaagttcctaaccacggagacgaagagccctcagatgaccattacccggttcggacacgagctcgcagccttagtaacacttttaaagacatattcagtgggcggatgacaagatcaagagtaaactcaaatcccgagcccaatagcaacccagaaagcctgtcaagcggacgctctgacaacggatga

SEQ ID NO: 15701 - protein, 684 aa, Muscodor strobelii
  misc_feature: SGI Peptide ID NO. 565206
  misc_feature (40)..(406): Pfam Id: PF05653 Pfam Desc: Domain of function (DUF803)
  misc_feature (153)..(406): Pfam Id: PF05653 Pfam Desc: Domain of function (DUF803)
  misc_feature (33)..(665): NCBI GI: 46111263 Blast Desc: FG02513.1 [Gibberella zeae PH-1]
  misc_feature (38)..(612): NCBI GI: 256726206 Blast Desc: NECHADRAFT_104817 [Nectria haematococca mpVI 77-13-4]
  misc_feature (39)..(522): NCBI GI: 171686966 Blast Desc: protein product [Podospora anserina] gi|170943444|emb|CAP69097.1| protein product [Podospora anserina]
  misc_feature (14)..(422): NCBI GI: 116191837 Blast Desc: CHGG_05636 [Chaetomium globosum CBS 148.51] gi|88181549|gb|EAQ89017.1| CHGG_05636 [Chaetomium globosum CBS 148.51]
  misc_feature (41)..(683): NCBI GI: 145614328 Blast Desc: MGG_10187 [Magnaporthe grisea 70-15] gi|145021267|gb|EDK05396.1| MGG_10187 [Magnaporthe grisea 70-15]
  misc_feature (25)..(418): NCBI GI: 261360124 Blast Desc: conserved [Verticillium albo-atrum VaMs.102]
  misc_feature (35)..(664): NCBI GI: 156037396 Blast Desc: SS1G_12409 [Sclerotinia sclerotiorum 1980] gi|154697820|gb|EDN97558.1| SS1G_12409 [Sclerotinia sclerotiorum 1980]
  misc_feature (5)..(606): NCBI GI: 85109473 Blast Desc: NCU06218 [Neurospora crassa OR74A] gi|28924578|gb|EAA33698.1| [Neurospora crassa OR74A]
  misc_feature (25)..(591): NCBI GI: 67523525 Blast Desc: AN2218.2 [Aspergillus nidulans FGSC A4] gi|40744719|gb|EAA63875.1| AN2218.2 [Aspergillus nidulans FGSC A4] gi|259487603|tpe|CBF86404.1| TPA: DUF803 domain membrane FGSC
  misc_feature (1)..(590): NCBI GI: 242818154 Blast Desc: DUF803 domain membrane protein [Talaromyces stipitatus ATCC 10500] gi|218713528|gb|EED12952.1| DUF803 domain membrane protein [Talaromyces stipitatus ATCC 10500]
  misc_feature: Useful for introducing or modulating the production of volatile compounds
MPIIPATDAGIDDLAWAWRVLVDGNSTDDGSGHHGSPSLGNWSSLIGIVTAIVGNILIALALNVQRYSHIQLHKRRVEARHRAQEAMRRVQNGGHNGYGAADFHPADAPDADADADDDDAHDAEDHPLARSFQSSGSNWTESSADEPKVASTYLKSPSWWIGQVLMSVGEMGNFLAYGFAPASIVSPLGVVALIANCVIAPLFFGEHFRKRDFWGVIIAVAGAVTVVLSAKGEETKLNPHDVWDAITTMEFEIYMGVTIFFIIILMWASPRYGHRTILIDLGLVGLFGGYTALTTKGVSSMLSSTLLKAFTTPVTYALILILVVTAVMQVRYVNKALQSFDSTQVIPIQFVLFTLSVIIGSAVLYRDFERTTAEQAAKFVGGCLLTFFGVFLITSGRHRHDEDDQLPDDEDIEETIGLRDQEGSESNPDHARQSSAVPASTSRRSSRTSISRGSKPFRDLPSSGTLPTLTNRRPDSAVMNFSEPAESSPLLYGNQERLVHPGLPPTVSVDSVPTIHSVAVSEPLQSNPPNPSPLHPLTPRTPSTASRPHSHHFSNAFISPSPLSSISAVVADKLLRGEDSPIGRRRSVRRRPTLRSSLFVSQDEADRAGASDPLLVRSVGGEQVPNHGDEEPSDDHYPVRTRARSLSNTFKDIFSGRMTRSRVNSNPEPNSNPESLSSGRSDNG

SEQ ID NO: 15702 - DNA, 2938 bp, Muscodor strobelii
  misc_feature: SGI EST ID NO. CUFF.37255.0
  misc_feature: Variant of the nucleotide sequence at SEQ ID NO 15700
cccgcccaattattcccatcatttccaatatcccatcattccgttgcattgcaacgtcgccaacaagccgggtcaacaggtcttcgcaacaaagaacctcatcactgtgttacatcgcccttccgtctcggccaactcgcgtagataagagcgcagatgctccagcagacacccgcaaataatcgactcttttgcgccgtgccttagccattcttgcctcaagctgcggttgcacaagccgttgcaagctgcctccgaggcactcgttgctcggttcgagccgactcaacgcccacaggacccccacgctgccgacatccagacgatcgctttggtccgtggtggttaacccccgactcctaactcgacgtttcttactctcgctgccccggcgagcggccagcccgctctccgtcgagatatatttcctggataccgacacgcatatgaggcctttgcgtcatgcccatcataccggccactgacgccggcatcgacgacctggcctgggcctggcgggtactcgtcgatggcaacagtaccgatgatggttccggacaccacggcagtcccagtctgggcaactggagctctctgatcggtatcgtcaccgccattgtcggaaatatcctcatcgccctcgctctgaacgtgcagcgctattcccacatccagctgcacaagcgccgcgtcgaggcccgccatcgtgcccaggaagccatgcgccgtgtccagaacggtggccacaacggctatggtgcagccgacttccatcccgccgatgcacccgacgctgacgccgacgccgacgacgatgacgcccatgacgccgaagaccatccgcttgcgcgctcctttcagtctagcgggtccaactggaccgaatcgtcggcggatgagcccaaggtcgcatcgacttatctcaagtccccgtcctggtggataggacaggtgctgatgagcgtaggtgagatgggcaactttttagcctacggctttgcgcccgcgtccatcgtgtcgcccttgggcgtcgtagctctgatcgcaaactgcgttatcgcccctctgttttttggcgagcatttccgcaagcgggatttctggggcgtcatcattgccgtcgcgggggctgttactgtggtcttgagcgcaaaaggcgaagagacaaagttgaaccctcacgacgtgtgggacgctatcaccaccatggaattcgagatctatatgggcgttaccatcttctttatcatcatcctcatgtgggcgagtccccggtatggccacagaactatactcatcgacctgggcctagttggtctcttcggtggatatacagctctgaccacgaaaggcgtttcttctatgctgtcctcaactcttctcaaagctttcacgaccccagtcacgtacgcattgatactgatcctcgtcgtgactgcggtcatgcaagtccgatatgtgaataaggcattacaatccttcgattcgacccaggtcattcccattcagttcgtgctcttcaccttatcggtcatcatcggcagcgctgttctgtaccgggacttcgagcgcactacagcagagcaagccgccaaattcgtcggcggttgcctgctaacattttttggagtgtttttaattaccagcggtcgccacaggcacgacgaagacgaccagttacccgacgacgaggatatagaagaaacaatcgggctgagggatcaggaaggctctgagagcaatcctgatcacgccagacaatcctcggcggtaccagcatcgacatcccggagatcgtcccggacaagcatttcgcgtggttccaagccgtttcgtgatctgccatctagtggcacattgcctacgttgacaaatagaaggcctgattcggctgttatgaacttctctgaaccggccgaatcgtcaccgctgctctacggaaatcaggagcgactcgttcatcctggtctcccaccaacagtctcggtggatagtgtgcccacgatccattctgtggctgtctccgaacccttgcagtctaatcctccaaacccttcgccattacacccactgaccccacgcactccttctacagcctctcgacctcatagccaccatttctctaatgctttcatttcgccatcaccactatcgtccatcagcgccgtggttgcagataagctactcagaggcgaagacagccctattggtagaaggaggtcggtcagaagaaggcctacactccggtccagtctgtttgtctcgcaagacgaggccgaccgtgccggcgcatctgatccgctccttgttcgaagtgtaggaggcgagcaagttcctaaccacggagacgaagagccctcagatgaccattacccggttcggacacgagctcgcagccttagtaacacttttaaagacatattcagtgggcggatgacaagatcaagagtaaactcaaatcccgagcccaatagcaacccagaaagcctgtcaagcggacgctctgacaacggatgaaacattcaccgaaaaacaaagttgaacacgaacgaaatagcgtacagcccgaagatgttgctattaccacttttgcattaggcgttatttgcattggataggagtttcttggttgttgaggcatttccgcgtcggctaagcttgcacgaaagccgtccttataccctgttttcgatatcgaaagactgggatccagtctcgcatagaactccccgtacttactaatcccaagatatacccttctgtccatgacttcacttagctctaaatcgacatgctagtgacatagacaagaacaacccctgtagacacatgacaggcaatgctgtaggggacgttgatgtcgatgaaagcgcgcacaaagcatccaagcgatacatcattttaggcattgtagtataattgattcctttgaaacaag

SEQ ID NO: 15703 - DNA, 1773 bp, Muscodor strobelii
  misc_feature: SGI cDNA ID NO. 565207
  misc_feature: Reduced expression when VOC is produced
  misc_feature: Encodes the peptide sequence at SEQ ID NO 15704
atgcgcggccgcaacggcgacggcgacgatgacgatgacgtccaggtcgaagagccagaattggccgccgacgaccccatgcgcgccttcctacctgctgcgttcgggaagaagtcaaaggaggccgacattgcccagcagatggacagaagcaggagagtagtcggctcgggacccccacagcccaagccctccaaccactcgagctgccgccccgatggcgacgacgacgacgacgacagctcgcagcaggactctgacgacgactctgacgactctgacgaggacgagtaccccacctcgcacgagatggtcatcaagacccacgaccgccccgtcacatctgtctcgctcgatccagccggcggccgtttgatatccggctccaccgactgcaccgtcaagcttcacgacttcgcctccatgaccccgaccaccattcgcgccttcaagagcgtcgatcccttcgagggcaaggcctcggccgccaactccgagacgcatcccatcaaccgcgtccagttcaatcccatcgccggcggtgtcttcctctgcgtatcggcccacccccaggccaagatcatgtcgagggacggcgacgtgctggccgagtttgtcaagggcgacatgtatctgcgcgacatgaaccataccaagggtcacgtctccgaggtcacgactggaacctggcaccccaccgacaagaatgtctgcgtcaccgcaggcaccgacagcaccctacgcatatgggacatcaacaacaagcgcagccagaaggacgtcatagtcttcaagtctcgcgccgctggtaccgccggaagaagtcgcatgacggctgtcgcctggggcagccctgcgcaagggggcaacaacatcctcgtctcagctgctctcgacggcacacttgtcatgtggagcggaaacggtcccttttcacggcctgccgctgagattcgagatgcgcatcaaccaaatacctggaccggaggcatcgacatcagcgccgatggccgcatggtggtaacgaggggtggcgataacctcatcaagctatgggacacgcgcaagtttaaggagcccctagtcagcgttgagcatctatcgacatcagatgagtacccaatgaccaatatcagatatgggcccaacgcgaccagcatcatcacaggcgcaaagacgggacagctacatatcctcaacccagggaatctgcaaactgaatacaccacccctatcacgccaggttcatccttgattactgtcgactggcaccccaagatcaatcagatcatcactgggtccgcgaatggagaaacacacgttctctacaacccgaccatgtcccagagaggcgcggtagacgtcatgtctcgagctcccaagaggcggcacatcgacgacaaccccgaatttaccacggatacatcacttggcatatcaggggactctatcgtgacacctggtgcgctcggcgcgatagataggaaaggagctatggcgtcaagcagaaccaaggatcccaggcggccgcaggtgccgcagcagacaccattcatgcgtagtcagccggatgagaagcacatcagcgaaacgatcccgctgagtcggatgttgcatgaagatccgcgggaagcgctgctcaagtatgcaaatgtggcgaaggaagatccgatgttcaccaacgcgtggaaagcaacgcagcctgtcacgcactatgccgatgtgagcgatgaggaggaggaagggccggataagaagaaggccaagagatga

SEQ ID NO: 15704 - protein, 590 aa, Muscodor strobelii
  misc_feature: SGI Peptide ID NO. 565207
  misc_feature (100)..(138): Pfam Id: PF00400 Pfam Desc: WD domain, G-beta repeat
  misc_feature (212)..(251): Pfam Id: PF00400 Pfam Desc: WD domain, G-beta repeat
  misc_feature (11)..(590): NCBI GI: 46125859 Blast Desc: FG07307.1 [Gibberella zeae PH-1]
  misc_feature (10)..(590): NCBI GI: 154293201 Blast Desc: BC1G_14583 [Botryotinia fuckeliana B05.10] gi|150845623|gb|EDN20816.1| BC1G_14583 [Botryotinia fuckeliana B05.10]
  misc_feature (10)..(590): NCBI GI: 39976969 Blast Desc: MGG_06387 [Magnaporthe grisea 70-15] gi|145016205|gb|EDK00695.1| MGG_06387 [Magnaporthe grisea 70-15]
  misc_feature (17)..(590): NCBI GI: 261360348 Blast Desc: WD repeat-containing protein [Verticillium albo-atrum VaMs.102]
  misc_feature (10)..(590): NCBI GI: 156037394 Blast Desc: SS1G_12408 [Sclerotinia sclerotiorum 1980] gi|154697819|gb|EDN97557.1| SS1G_12408 [Sclerotinia sclerotiorum 1980]
  misc_feature (10)..(590): NCBI GI: 85083493 Blast Desc: NCU06489 [Neurospora crassa OR74A] gi|28918215|gb|EAA27893.1| NCU06489 [Neurospora crassa OR74A]
  misc_feature (10)..(590): NCBI GI: 116192039 Blast Desc: CHGG_05737 [Chaetomium globosum CBS 148.51] gi|88181650|gb|EAQ89118.1| CHGG_05737 [Chaetomium globosum CBS 148.51]
  misc_feature (24)..(590): NCBI GI: 119182095 Blast Desc: CIMG_06101 [Coccidioides immitis RS]
  misc_feature (24)..(590): NCBI GI: 119479893 Blast Desc: WD repeat protein [Neosartorya fischeri NRRL 181] gi|119408129|gb|EAW18078.1| WD repeat protein [Neosartorya fischeri NRRL 181]
  misc_feature (24)..(590): NCBI GI: 258571938 Blast Desc: 26S protease regulatory subunit 4 [Uncinocarpus reesii 1704] gi|237905042|gb|EEP79443.1| 26S protease regulatory subunit 4 [Uncinocarpus reesii 1704]
  misc_feature: Useful for introducing or modulating the production of volatile compounds
MRGRNGDGDDDDDVQVEEPELAADDPMRAFLPAAFGKKSKEADIAQQMDRSRRVVGSGPPQPKPSNHSSCRPDGDDDDDDSSQQDSDDDSDDSDEDEYPTSHEMVIKTHDRPVTSVSLDPAGGRLISGSTDCTVKLHDFASMTPTTIRAFKSVDPFEGKASAANSETHPINRVQFNPIAGGVFLCVSAHPQAKIMSRDGDVLAEFVKGDMYLRDMNHTKGHVSEVTTGTWHPTDKNVCVTAGTDSTLRIWDINNKRSQKDVIVFKSRAAGTAGRSRMTAVAWGSPAQGGNNILVSAALDGTLVMWSGNGPFSRPAAEIRDAHQPNTWTGGIDISADGRMVVTRGGDNLIKLWDTRKFKEPLVSVEHLSTSDEYPMTNIRYGPNATSIITGAKTGQLHILNPGNLQTEYTTPITPGSSLITVDWHPKINQIITGSANGETHVLYNPTMSQRGAVDVMSRAPKRRHIDDNPEFTTDTSLGISGDSIVTPGALGAIDRKGAMASSRTKDPRRPQVPQQTPFMRSQPDEKHISETIPLSRMLHEDPREALLKYANVAKEDPMFTNAWKATQPVTHYADVSDEEEEGPDKKKAKR

SEQ ID NO: 15705 - DNA, 2918 bp, Muscodor strobelii
  misc_feature: SGI EST ID NO. CUFF.37207.0
  misc_feature: Variant of the nucleotide sequence at SEQ ID NO 15703
ggggcagcaacttttacaatgtaatttcgcatgtggccagaggcacctatcttagatattactgtgaacaaagtaatgaatgtcccctatattaatagagttgatgatttgaccagtttgggtacatgtatttgattctctgtgagtacatgtatatagagacaaagacgtcgagacaccaattaaggagcgaagagcttattcaggcggcattacgtcgtcatgcagtcggctatgctttgcgttgtgctgtacttagactgagactgcctgcgattggaatcgtcttgaatcttaattaaaatccgtaacgcacctaggtacatgtaggtagcttaaggctgtagtacaggcaggcatttgactcccgggtattcttcccaggcacctggctgtaccaagctgcgtgtaggttatggactactaggaggcaggcgcttcagctttagctcgaaaacgcaacaacgttctcgaggattggatacatgcgttttccatccacatacgcggagccaaccgccagcatcgtgtaatttccgcactactcaagcgccaagtcacccagatcaccgcagcctcacttgggcttccatatcacgatgcgcggccgcaacggcgacggcgacgatgacgatgacgtccaggtcgaagagccagaattggccgccgacgaccccatgcgcgccttcctacctgctgcgttcgggaagaagtcaaaggaggccgacattgcccagcagatggacagaagcaggagagtagtcggctcgggacccccacagcccaagccctccaaccactcgagctgccgccccgatggcgacgacgacgacgacgacagctcgcagcaggactctgacgacgactctgacgactctgacgaggacgagtaccccacctcgcacgagatggtcatcaagacccacgaccgccccgtcacatctgtctcgctcgatccagccggcggccgtttgatatccggctccaccgactgcaccgtcaagcttcacgacttcgcctccatgaccccgaccaccattcgcgccttcaagagcgtcgatcccttcgagggcaaggcctcggccgccaactccgagacgcatcccatcaaccgcgtccagttcaatcccatcgccggcggtgtcttcctctgcgtatcggcccacccccaggccaagatcatgtcgagggacggcgacgtgctggccgagtttgtcaagggcgacatgtatctgcgcgacatgaaccataccaagggtcacgtctccgaggtcacgactggaacctggcaccccaccgacaagaatgtctgcgtcaccgcaggcaccgacagcaccctacgcatatgggacatcaacaacaagcgcagccagaaggacgtcatagtcttcaagtctcgcgccgctggtaccgccggaagaagtcgcatgacggctgtcgcctggggcagccctgcgcaagggggcaacaacatcctcgtctcagctgctctcgacggcacacttgtcatgtggagcggaaacggtcccttttcacggcctgccgctgagattcgagatgcgcatcaaccaaatacctggaccggaggcatcgacatcagcgccgatggccgcatggtggtaacgaggggtggcgataacctcatcaagctatgggacacgcgcaagtttaaggagcccctagtcagcgttgagcatctatcgacatcagatgagtacccaatgaccaatatcagatatgggcccaacgcgaccagcatcatcacaggcgcaaagacgggacagctacatatcctcaacccagggaatctgcaaactgaatacaccacccctatcacgccaggttcatccttgattactgtcgactggcaccccaagatcaatcagatcatcactgggtccgcgaatggagaaacacacgttctctacaacccgaccatgtcccagagaggcgcggtagacgtcatgtctcgagctcccaagaggcggcacatcgacgacaaccccgaatttaccacggatacatcacttggcatatcaggggactctatcgtgacacctggtgcgctcggcgcgatagataggaaaggagctatggcgtcaagcagaaccaaggatcccaggcggccgcaggtgccgcagcagacaccattcatgcgtagtcagccggatgagaagcacatcagcgaaacgatcccgctgagtcggatgttgcatgaagatccgcgggaagcgctgctcaagtatgcaaatgtggcgaaggaagatccgatgttcaccaacgcgtggaaagcaacgcagcctgtcacgcactatgccgatgtgagcgatgaggaggaggaagggccggataagaagaaggccaagagatgatgattcactacgtcaataggagatgagagatcgaaggttgagttagtggtcattgcatactgcactgtgaactaacattgctcatcccagaagaacaagcaataaaccgaccctcgatggctgtgcagtaacttgaaccccaaattatgggtaaagccataaaagccatgaacgatgcagcgggctcactctcgggctggtaggtagatggtaagaaggccccatcgcaaaatcccgactctggtggccatctggtcgttgattgaacatatgcgatatctattaccacttatggatgtgtccattgccttaatatgtcacccagtatacaggcatgtctctcgacagtagactcgccgtatgtagtccagagattagagatacctttcggttggccaatcctctgctgccgtagataccctacataccatgcttgctacactcacagcaatggagctgctagatactgaaaatagatatcatatgcccttgaacaatgtttatcgcaaaaagtcacactactagtttctgcatatacttgagttg

SEQ ID NO: 15706 - DNA, 4206 bp, Muscodor strobelii
  misc_feature: SGI cDNA ID NO. 565208
  misc_feature: Encodes the peptide sequence at SEQ ID NO 15707
atggcctctgttcagcatccccaggctgttcagcctcccgggcctacgcccttcagtcaagcccagatccaagaagtttacacgaaattctcacagatgaagagacaaggtgttccgcagaatgatcccgaattcatgaaaatgggccagatactcgccaagtttcagcgtcaacaacaacaacaccggaacatggccaatgtccaagtgaatggcgcctcgtctgctgctgcgacacagtccaactcgttacccaacggcaccgcagtgtcctcagccgccggcctgactggccagaccaacacctcgtctccctcgaccgcccacgctcccacagctttctctccccagcaagtcgccaaattgaagctgcatattacgaccttcaagctcgtcagtaaaaatgcgggtgtcccataccacatgcagcaaggtctctctgcccatcaacgtcagaggagatttgcagtcgtggaacagaatgcgcaagcctcatcaaccccagcgaccgctgcgcctgcgaacgcagactctgccaagtctgcttctgctccggcgaacggagacgtcgagaacgacacttcggctgagcccaagaccaagacctacaagactatgaagtctccttacgaaaccggtcttgtccgcaaagacatcacttatttcgaccacggtcaacgcaaacatcgcctgattgtcccgagtatcttcccaaccggcgtggatttcgaacaattaaggcatgagcgagaaattgttgtcttcaatcgcatgggggctcgctatgccgagctcaaggcgctacccggcaatattgcacactgggacacgacccaagagactgttgaggccgatgacaccgtgaaaaggaaggccatcatcgagctgaaggcgctgggtctgtacgcgaagcagagagccttgcgtgagaaggttggaaggtctatgatgcattacgacaacctcgcaatgactacgaatcgcagtcaataccgtcgaacgaagaagcaaagcgtgcgcgaggctagaatcacggagaaactcgagaagcagcagcgagatgctcgcgagaatcgcgaaaagaagaagcacactgacttccttcaagccgtccatcatcacagatccgaaatccaccacgccggctcatcgggcaggagcagatcaggaaggggtggtcgaggctgccaagctcatcattcgaatatcgagaaagaggaacaaagacggattgagcgaaccgcgaagcaacgtctgcaagctctcaaagccaacgacgaagaagcttacctcaaacttcttgatcaggccaaggatactcgtatcacgcacttgctcaagcaaaccgatggtttcttgcaccagctcgcttcctctgtcaaggctcagcagcgtcaagctgcggaacgctatggagacgattctggtgtcctccccgaggaagaaagtgagctcgaagaagaggacgaggaagctggtcgtaagattgattattacgctgttgctcatcgcgtcagggaagaggtcactgaacaggccaacatacttgtcggcggtaccctcaaagagtaccagatcaagggcttgcaatggatgatttcgttatacaacaataacctcaatggtatcctagctgacgaaatgggtctcggcaaaaccattcaaaccatcagtctcatcacctatctcatcgagcgcaaaatgcagcagggcccatatctcgtcattgttcctctcagtaccctgaccaattggaatctcgaattcgagaaatgggcaccctcagtctcccgtgttgtttataaagggcctcctaacgcgcgaaaacagcagcaggagaaaatacgccaggggacattccaggtacttctgacgacatacgagtatatcatcaaggatcgaccgatcctgagcaagatcaaatggttccacatgatcatcgacgaaggtcaccgtatgaaaaacacgcaatccaagcttagtgcaactatttctcagtactacagcacgcgtttccgcttgattctgactggtaccccgttgcaaaataacctggctgaactgtgggccatgctcaacttcgttctaccaaccatcttcaaatctgtgaagactttcgacgaatggttcaatacgcctttcgccaatacgggcggacaagacaaaatggaactgaatgaagaagaacagatcctggtcattcgtcgtcttcacaaggttctacgacccttcctcctgcgtcgcctgaagaaagacgtggagaaagacctaccagacaaaaccgagaaggtaatcaagtgcaagttctcggcattgcaaactcgcctttacaagcaaatggttacgcaccagaagattgctgttagcgacggcaaaggtggcaaggcgggtgttcgtggtctgagcaatatgatcatgcaactccgaaagctttgcaatcatccgtttgttttcgacgaagttgagaatcaaatgaacccgatgaacaccagcaacgatctgttgtggcgcaccgctggcaaatttgagctgttagatcgaattctgccgaagtacaaagctactgggcatcgtgttctcatgttcttccagatgacagccattatggatattatggaagactttcttcggttccgtggactgatgtatatgcgcttggatggtaccaccaaatccgaagacagatccgaccttctcaagactttcaacgcccccgattccccgtatttcatgttcttgctctccactcgtgctggtggtcttggtctcaatttgcagactgcagatacggtcatcatttatgattcagattggaatccccatcaagatcttcaggctcaagatcgtgcgcatcgtattggccagaaaaatgaagtacgtattctgcgtctcatcagctccaactcggttgaggaaaagatccttgagcgagcgaggtataagctagacatggacgggaaagttatccaggctggtcgctttgacaacaaatcttcagaaacggatcgtgacgcaatgctccgaaccctcctcgaatctgcagatatgaccgagtcaggcgaacaggatgagatggacgacgaagagctgaatcttctactggctcgaagcgatgacgagattgctgtattccagcagatcgatgaagagcgggccagagatcccatctatggaacgcttccgggatctaagcgtgtaccccgccttatggcggagaacgagctccccgaaatctatctgaatgaaggtgacccagaaccagaggagccggaagaagttctcggccgtggtgctcgtgaacgtacacgcgtgaagtacgacgacggtctgacagaagagcaatggctcatggctgttgatgatgacgacgattcgccagaggccgcagcagccaggaaacaagccaggaagaataaacgcgagtccaataagttgcggaggatggcagctttcaacgcatcgagcgcaaactctccaaccgccagtcgcgcaagcactgaagaagctgaaacccctccaaagaaacgcggtcgtaaacctgggagcaagaacgagaaacgtagagccgaggaggatgatgttggagagccaccggccaaaaagcaacgcgggcccaagggacgcgtgaaacctatggcactcgactccagagtacctgcagaagtgcggcccgtccttcagaagacccttcggaccttattcgagggtttgatgactctgacggttgacttcgaagaccccgaacagagtgatggcccagagaagcgacttattattgggcccttcgtcaagttgccgtctaagcgcgactatggcgattattacgtgcttatcaaaagccctatctgtatgaaccaaatccaggcgaagatcaagaaggaggagtacaatagcatcagtgatatgcgcagagatatcacgttgatgtgcaataactgcagaacgtataatgaagacggaagtctgctttacgctgatgccaatgttatggagaaattcttcaacgacaaagctcaagaggagactaacgagcatccagagctcttggacttagaagagtctgtgaccaaggacagctcggcagctccaacaaccagtaccggaacaccacaaccctcaacaaatgctacgaggattcgactggtgagcaacggtgccagtcaagtcaacggtagtactggaggaggtttgagcgacgtcgagtga

SEQ ID NO: 15707 - protein, 1401 aa, Muscodor strobelii
  misc_feature: SGI Peptide ID NO. 565208
  misc_feature (1237)..(1329): Pfam Id: PF00439 Pfam Desc: Bromodomain
  misc_feature (875)..(954): Pfam Id: PF00271 Pfam Desc: Helicase conserved C-terminal domain
  misc_feature (352)..(424): Pfam Id: PF07529 Pfam Desc: HSA
  misc_feature (524)..(818): Pfam Id: PF00176 Pfam Desc: SNF2 family N-terminal domain
  misc_feature (1255)..(1329): Pfam Id: PF00439 Pfam Desc: Bromodomain
  misc_feature (1)..(1401): NCBI GI: 256732760 Blast Desc: chromatin remodeling complex SWI/SNF, component SWI2 and related ATPase [Nectria haematococca mpVI 77-13-4]
  misc_feature (1)..(1401): NCBI GI: 46125857 Blast Desc: FG07306.1 [Gibberella zeae PH-1]
  misc_feature (5)..(1401): NCBI GI: 145608774 Blast Desc: MGG_06388 [Magnaporthe grisea 70-15] gi|145016204|gb|EDK00694.1| MGG_06388 [Magnaporthe grisea 70-15]
  misc_feature (1)..(1334): NCBI GI: 171686770 Blast Desc: protein product [Podospora anserina] gi|170943346|emb|CAP68999.1| protein product [Podospora anserina]
  misc_feature (2)..(1390): NCBI GI: 85083489 Blast Desc: SNF2-family ATP dependent chromatin remodeling factor snf21 [Neurospora crassa OR74A] gi|28918214|gb|EAA27892.1| SNF2-family ATP dependent chromatin remodeling factor snf21
  misc_feature (1)..(1382): NCBI GI: 261360349 Blast Desc: SNF2 family ATP-dependent chromatin-remodeling factor snf21 [Verticillium albo-atrum VaMs.102]
  misc_feature (22)..(1384): NCBI GI: 156051220 Blast Desc: SS1G_07017 [Sclerotinia sclerotiorum 1980] gi|154704795|gb|EDO04534.1| SS1G_07017 [Sclerotinia sclerotiorum 1980]
  misc_feature (2)..(1384): NCBI GI: 154299240 Blast Desc: BC1G_11798 [Botryotinia fuckeliana B05.10] gi|150857501|gb|EDN32693.1| BC1G_11798 [Botryotinia fuckeliana B05.10]
  misc_feature (15)..(1401): NCBI GI: 159126264 Blast Desc: RSC complex subunit (Sth1), [Aspergillus fumigatus A1163]
  misc_feature (15)..(1401): NCBI GI: 70998556 Blast Desc: RSC complex subunit (Sth1) [Aspergillus fumigatus Af293] gi|66851636|gb|EAL91962.1| RSC complex subunit (Sth1), [Aspergillus fumigatus Af293]
MASVQHPQAVQPPGPTPFSQAQIQEVYTKFSQMKRQGVPQNDPEFMKMGQILAKFQRQQQQHRNMANVQVNGASSAAATQSNSLPNGTAVSSAAGLTGQTNTSSPSTAHAPTAFSPQQVAKLKLHITTFKLVSKNAGVPYHMQQGLSAHQRQRRFAVVEQNAQASSTPATAAPANADSAKSASAPANGDVENDTSAEPKTKTYKTMKSPYETGLVRKDITYFDHGQRKHRLIVPSIFPTGVDFEQLRHEREIVVFNRMGARYAELKALPGNIAHWDTTQETVEADDTVKRKAIIELKALGLYAKQRALREKVGRSMMHYDNLAMTTNRSQYRRTKKQSVREARITEKLEKQQRDARENREKKKHTDFLQAVHHHRSEIHHAGSSGRSRSGRGGRGCQAHHSNIEKEEQRRIERTAKQRLQALKANDEEAYLKLLDQAKDTRITHLLKQTDGFLHQLASSVKAQQRQAAERYGDDSGVLPEEESELEEEDEEAGRKIDYYAVAHRVREEVTEQANILVGGTLKEYQIKGLQWMISLYNNNLNGILADEMGLGKTIQTISLITYLIERKMQQGPYLVIVPLSTLTNWNLEFEKWAPSVSRVVYKGPPNARKQQQEKIRQGTFQVLLTTYEYIIKDRPILSKIKWFHMIIDEGHRMKNTQSKLSATISQYYSTRFRLILTGTPLQNNLAELWAMLNFVLPTIFKSVKTFDEWFNTPFANTGGQDKMELNEEEQILVIRRLHKVLRPFLLRRLKKDVEKDLPDKTEKVIKCKFSALQTRLYKQMVTHQKIAVSDGKGGKAGVRGLSNMIMQLRKLCNHPFVFDEVENQMNPMNTSNDLLWRTAGKFELLDRILPKYKATGHRVLMFFQMTAIMDIMEDFLRFRGLMYMRLDGTTKSEDRSDLLKTFNAPDSPYFMFLLSTRAGGLGLNLQTADTVIIYDSDWNPHQDLQAQDRAHRIGQKNEVRILRLISSNSVEEKILERARYKLDMDGKVIQAGRFDNKSSETDRDAMLRTLLESADMTESGEQDEMDDEELNLLLARSDDEIAVFQQIDEERARDPIYGTLPGSKRVPRLMAENELPEIYLNEGDPEPEEPEEVLGRGARERTRVKYDDGLTEEQWLMAVDDDDDSPEAAAARKQARKNKRESNKLRRMAAFNASSANSPTASRASTEEAETPPKKRGRKPGSKNEKRRAEEDDVGEPPAKKQRGPKGRVKPMALDSRVPAEVRPVLQKTLRTLFEGLMTLTVDFEDPEQSDGPEKRLIIGPFVKLPSKRDYGDYYVLIKSPICMNQIQAKIKKEEYNSISDMRRDITLMCNNCRTYNEDGSLLYADANVMEKFFNDKAQEETNEHPELLDLEESVTKDSSAAPTTSTGTPQPSTNATRIRLVSNGASQVNGSTGGGLSDVE

SEQ ID NO: 15708 - DNA, 5333 bp, Muscodor strobelii
  misc_feature: SGI EST ID NO. CUFF.37287.0
  misc_feature: Variant of the nucleotide sequence at SEQ ID NO 15706
tctcaatcaacccatctctgtccacgccatcgatcgcgcatccaagacccgagccgcatcgcccatccgctcgtggacgacgacggccatcccaactcacctgtttcttttctcttgcaacctttttggcgcaccctcgcgcccgtctgccacccctaacttgcgggaggcttttttcctctgtgctctgcgcccgcagccactgcctcgcctgcactcacttttgcaagcagcgaccgcgcgccatccccggcaggagaagggcccttcgcccatccccatcccccaccacccaccaccaacatctccttaacctcccagcaagacatctcgttgtcttgctcggcacgtctggtcttgtcgccctctcgcgcactcgaccgttgtccacctcttttgtacacttagcctcgccccaacagcgttgcctaccagggctcgcgcgcatacccgcgtctccaactttcccatcgccgacgcgacaacttgtcttccacgcgacctctgcccttctcagccctcgcattgcctgtcgtcgcattgtcttgccacttgcttgacactgcctggccattatagctgccaattgatgtcgtcgccccgagacatgactatttcgtgataccatcccggctgaagacagagcctcgtatcatacacgcaccgtctatctcgacgacctctctcgacgactcttccaccatggcctctgttcagcatccccaggctgttcagcctcccgggcctacgcccttcagtcaagcccagatccaagaagtttacacgaaattctcacagatgaagagacaaggtgttccgcagaatgatcccgaattcatgaaaatgggccagatactcgccaagtttcagcgtcaacaacaacaacaccggaacatggccaatgtccaagtgaatggcgcctcgtctgctgctgcgacacagtccaactcgttacccaacggcaccgcagtgtcctcagccgccggcctgactggccagaccaacacctcgtctccctcgaccgcccacgctcccacagctttctctccccagcaagtcgccaaattgaagctgcatattacgaccttcaagctcgtcagtaaaaatgcgggtgtcccataccacatgcagcaaggtctctctgcccatcaacgtcagaggagatttgcagtcgtggaacagaatgcgcaagcctcatcaaccccagcgaccgctgcgcctgcgaacgcagactctgccaagtctgcttctgctccggcgaacggagacgtcgagaacgacacttcggctgagcccaagaccaagacctacaagactatgaagtctccttacgaaaccggtcttgtccgcaaagacatcacttatttcgaccacggtcaacgcaaacatcgcctgattgtcccgagtatcttcccaaccggcgtggatttcgaacaattaaggcatgagcgagaaattgttgtcttcaatcgcatgggggctcgctatgccgagctcaaggcgctacccggcaatattgcacactgggacacgacccaagagactgttgaggccgatgacaccgtgaaaaggaaggccatcatcgagctgaaggcgctgggtctgtacgcgaagcagagagccttgcgtgagaaggttggaaggtctatgatgcattacgacaacctcgcaatgactacgaatcgcagtcaataccgtcgaacgaagaagcaaagcgtgcgcgaggctagaatcacggagaaactcgagaagcagcagcgagatgctcgcgagaatcgcgaaaagaagaagcacactgacttccttcaagccgtccatcatcacagatccgaaatccaccacgccggctcatcgggcaggagcagatcaggaaggggtggtcgaggctgccaagctcatcattcgaatatcgagaaagaggaacaaagacggattgagcgaaccgcgaagcaacgtctgcaagctctcaaagccaacgacgaagaagcttacctcaaacttcttgatcaggccaaggatactcgtatcacgcacttgctcaagcaaaccgatggtttcttgcaccagctcgcttcctctgtcaaggctcagcagcgtcaagctgcggaacgctatggagacgattctggtgtcctccccgaggaagaaagtgagctcgaagaagaggacgaggaagctggtcgtaagattgattattacgctgttgctcatcgcgtcagggaagaggtcactgaacaggccaacatacttgtcggcggtaccctcaaagagtaccagatcaagggcttgcaatggatgatttcgttatacaacaataacctcaatggtatcctagctgacgaaatgggtctcggcaaaaccattcaaaccatcagtctcatcacctatctcatcgagcgcaaaatgcagcagggcccatatctcgtcattgttcctctcagtaccctgaccaattggaatctcgaattcgagaaatgggcaccctcagtctcccgtgttgtttataaagggcctcctaacgcgcgaaaacagcagcaggagaaaatacgccaggggacattccaggtacttctgacgacatacgagtatatcatcaaggatcgaccgatcctgagcaagatcaaatggttccacatgatcatcgacgaaggtcaccgtatgaaaaacacgcaatccaagcttagtgcaactatttctcagtactacagcacgcgtttccgcttgattctgactggtaccccgttgcaaaataacctggctgaactgtgggccatgctcaacttcgttctaccaaccatcttcaaatctgtgaagactttcgacgaatggttcaatacgcctttcgccaatacgggcggacaagacaaaatggaactgaatgaagaagaacagatcctggtcattcgtcgtcttcacaaggttctacgacccttcctcctgcgtcgcctgaagaaagacgtggagaaagacctaccagacaaaaccgagaaggtaatcaagtgcaagttctcggcattgcaaactcgcctttacaagcaaatggttacgcaccagaagattgctgttagcgacggcaaaggtggcaaggcgggtgttcgtggtctgagcaatatgatcatgcaactccgaaagctttgcaatcatccgtttgttttcgacgaagttgagaatcaaatgaacccgatgaacaccagcaacgatctgttgtggcgcaccgctggcaaatttgagctgttagatcgaattctgccgaagtacaaagctactgggcatcgtgttctcatgttcttccagatgacagccattatggatattatggaagactttcttcggttccgtggactgatgtatatgcgcttggatggtaccaccaaatccgaagacagatccgaccttctcaagactttcaacgcccccgattccccgtatttcatgttcttgctctccactcgtgctggtggtcttggtctcaatttgcagactgcagatacggtcatcatttatgattcagattggaatccccatcaagatcttcaggctcaagatcgtgcgcatcgtattggccagaaaaatgaagtacgtattctgcgtctcatcagctccaactcggttgaggaaaagatccttgagcgagcgaggtataagctagacatggacgggaaagttatccaggctggtcgctttgacaacaaatcttcagaaacggatcgtgacgcaatgctccgaaccctcctcgaatctgcagatatgaccgagtcaggcgaacaggatgagatggacgacgaagagctgaatcttctactggctcgaagcgatgacgagattgctgtattccagcagatcgatgaagagcgggccagagatcccatctatggaacgcttccgggatctaagcgtgtaccccgccttatggcggagaacgagctccccgaaatctatctgaatgaaggtgacccagaaccagaggagccggaagaagttctcggccgtggtgctcgtgaacgtacacgcgtgaagtacgacgacggtctgacagaagagcaatggctcatggctgttgatgatgacgacgattcgccagaggccgcagcagccaggaaacaagccaggaagaataaacgcgagtccaataagttgcggaggatggcagctttcaacgcatcgagcgcaaactctccaaccgccagtcgcgcaagcactgaagaagctgaaacccctccaaagaaacgcggtcgtaaacctgggagcaagaacgagaaacgtagagccgaggaggatgatgttggagagccaccggccaaaaagcaacgcgggcccaagggacgcgtgaaacctatggcactcgactccagagtacctgcagaagtgcggcccgtccttcagaagacccttcggaccttattcgagggtttgatgactctgacggttgacttcgaagaccccgaacagagtgatggcccagagaagcgacttattattgggcccttcgtcaagttgccgtctaagcgcgactatggcgattattacgtgcttatcaaaagccctatctgtatgaaccaaatccaggcgaagatcaagaaggaggagtacaatagcatcagtgatatgcgcagagatatcacgttgatgtgcaataactgcagaacgtataatgaagacggaagtctgctttacgctgatgccaatgttatggagaaattcttcaacgacaaagctcaagaggagactaacgagcatccagagctcttggacttagaagagtctgtgaccaaggacagctcggcagctccaacaaccagtaccggaacaccacaaccctcaacaaatgctacgaggattcgactggtgagcaacggtgccagtcaagtcaacggtagtactggaggaggtttgagcgacgtcgagtgatttgtcattctcacaacacgtcgtcttttcgggagctattcgccaaggttcccatttgtcttcaatcttcgagctatgtattcatctgcgctgtacaacagaatatccagcgcgaacatccttctccggttggtgcttggcaggcgttcaatggtcttttacagggaaataaactgggagcggacaaaaggctacgagtgtatgcaggaagcggtgactctagccgcaaggcagacagcaatacccaggttgaagtcgtcggtgcgcagagtgtcacgcctgagagatggaaatggtggaaatgtgtccagtttccaaaagcatgcttgggtttcggcaccaccatggatttgtagtattgcgataaatagacccaatacgttggtgtaatatgcctaaatctactattatcacatagatgctaa

SEQ ID NO: 15709 - DNA, 1128 bp, Muscodor strobelii
  misc_feature: SGI cDNA ID NO. 565209
  misc_feature: Elevated expression when VOC is produced
  misc_feature: Encodes the peptide sequence at SEQ ID NO 15710
atgaccgcatggggtctcgtaagcactttcctcgggttcacagaatcgctcgcaggacttatcgtcgcacgccttttactcggattatttgaaggtgggctactcggcggcattatcgtgtatctggcgatgttctaccgccgccatcaaatgcttcgacgcattggatatttttattgtgctgcaccgctcagtggcgcatttggaggtctgttggccacgggcttagcaaagattcattacggtggatacaatagatggccttggattttcttcatcgaagggatcgtaactacgctattcggattcgtctgctttttcttcatgcctcatacccccgccgatgccaaatttcttacggaagaggaacgcgctttagcacttgctcgtatgaaggatgatagtcatggcgcaactcagtcttccgatgtaaacttggagaaattcgactggcattgggttcggatggcatttgccgcgccgcaactgtggctgtcctgtctcagttggttcttcctccttattccactttacagcttctcattgtttcttccgactatcatcaagggactaggataccaagatacgacggcacagctgttcaccgttcctccgaacgtagccgctgtattctccgtcttgataatcacaagaatctcagatagcatcaaggcgagaggacctttaatgctcgtttgttgtatcgttgctatcgcaggctatatcatgctattggccacaaagaacgactcggtcaattatggcggaacgtttttagtagctattggcgtctttccgcaatcggcattaattatgggctggttgtcgaataacctggcacctcattacgtgcgtgcaacgggaatcggctttctcattgccttcgccaattcttcggcattcatatcaacattcatatatcttgcgaaagacgcgccggactaccgactgggacacagcatctctctcgctgccgtggtattctgctttgtgctcgttggtgtccaaatcgtttatctttcgtgggagaacagaaagcgagcgagaggtgatcgggacaatagactcactgaaggcaaaacggaaaggcttgggtatctgcacccatcgttccgatacactatatga

SEQ ID NO: 15710 - protein, 375 aa, Muscodor strobelii
  misc_feature: SGI Peptide ID NO. 565209
  misc_feature (2)..(304): Pfam Id: PF07690 Pfam Desc: Major Facilitator Superfamily
  misc_feature (1)..(304): Pfam Id: PF07690 Pfam Desc: Major Facilitator Superfamily
  misc_feature (1)..(375): NCBI GI: 169601990 Blast Desc: SNOG_03872 [Phaeosphaeria nodorum SN15] gi|160706052|gb|EAT89077.2| SNOG_03872 [Phaeosphaeria nodorum SN15]
  misc_feature (4)..(375): NCBI GI: 156037870 Blast Desc: SS1G_12649 [Sclerotinia sclerotiorum 1980] gi|154698057|gb|EDN97795.1| SS1G_12649 [Sclerotinia sclerotiorum 1980]
  misc_feature (1)..(375): NCBI GI: 171680982 Blast Desc: protein product [Podospora anserina] gi|170940449|emb|CAP65676.1| protein product [Podospora anserina]
  misc_feature (1)..(312): NCBI GI: 145607730 Blast Desc: MGG_10112 [Magnaporthe grisea 70-15] gi|145015249|gb|EDJ99785.1| MGG_10112 [Magnaporthe grisea 70-15]
  misc_feature (3)..(372): NCBI GI: 169617888 Blast Desc: SNOG_12126 [Phaeosphaeria nodorum SN15] gi|160703508|gb|EAT80538.2| SNOG_12126 [Phaeosphaeria nodorum SN15]
  misc_feature (4)..(354): NCBI GI: 242822113 Blast Desc: MFS transporter, [Talaromyces stipitatus ATCC 10500] gi|218712738|gb|EED12163.1| MFS transporter, [Talaromyces stipitatus ATCC 10500]
  misc_feature (1)..(349): NCBI GI: 169859925 Blast Desc: CC1G_06186 [Coprinopsis cinerea okayama7#130] gi|116502275|gb|EAU85170.1| CC1G_06186 [Coprinopsis cinerea okayama7#130]
  misc_feature (4)..(354): NCBI GI: 212546917 Blast Desc: MFS transporter, [Penicillium marneffei ATCC 18224] gi|210065132|gb|EEA19227.1| MFS transporter, [Penicillium marneffei ATCC 18224]
  misc_feature (1)..(374): NCBI GI: 189200763 Blast Desc: conserved [Pyrenophora tritici-repentis Pt-1C-BFP] gi|187983817|gb|EDU49305.1| conserved [Pyrenophora tritici-repentis Pt-1C-BFP]
  misc_feature (4)..(354): NCBI GI: 255938562 Blast Desc: Pc14g00570 [Penicillium chrysogenum Wisconsin 54-1255] gi|211584672|emb|CAP74198.1| Pc14g00570 [Penicillium chrysogenum Wisconsin 54-1255]
  misc_feature: Useful for introducing or modulating the production of volatile compounds
MTAWGLVSTFLGFTESLAGLIVARLLLGLFEGGLLGGIIVYLAMFYRRHQMLRRIGYFYCAAPLSGAFGGLLATGLAKIHYGGYNRWPWIFFIEGIVTTLFGFVCFFFMPHTPADAKFLTEEERALALARMKDDSHGATQSSDVNLEKFDWHWVRMAFAAPQLWLSCLSWFFLLIPLYSFSLFLPTIIKGLGYQDTTAQLFTVPPNVAAVFSVLIITRISDSIKARGPLMLVCCIVAIAGYIMLLATKNDSVNYGGTFLVAIGVFPQSALIMGWLSNNLAPHYVRATGIGFLIAFANSSAFISTFIYLAKDAPDYRLGHSISLAAVVFCFVLVGVQIVYLSWENRKRARGDRDNRLTEGKTERLGYLHPSFRYTI

SEQ ID NO: 15711 - DNA, 1633 bp, Muscodor strobelii
  misc_feature: SGI EST ID NO. CUFF.37214.0
  misc_feature: Variant of the nucleotide sequence at SEQ ID NO 15709
taccaagtaattggatcgtcaagcatgtaaaagccggcatatatctaccagcgatcatgaccgcatggggtctcgtaagcactttcctcgggttcacagaatcgctcgcaggacttatcgtcgcacgccttttactcggattatttgaaggtgggctactcggcggcattatcgtgtatctggcgatgttctaccgccgccatcaaatgcttcgacgcattggatatttttattgtgctgcaccgctcagtggcgcatttggaggtctgttggccacgggcttagcaaagattcattacggtggatacaatagatggccttggattttcttcatcgaagggatcgtaactacgctattcggattcgtctgctttttcttcatgcctcatacccccgccgatgccaaatttcttacggaagaggaacgcgctttagcacttgctcgtatgaaggatgatagtcatggcgcaactcagtcttccgatgtaaacttggagaaattcgactggcattgggttcggatggcatttgccgcgccgcaactgtggctgtcctgtctcagttggttcttcctccttattccactttacagcttctcattgtttcttccgactatcatcaagggactaggataccaagatacgacggcacagctgttcaccgttcctccgaacgtagccgctgtattctccgtcttgataatcacaagaatctcagatagcatcaaggcgagaggacctttaatgctcgtttgttgtatcgttgctatcgcaggctatatcatgctattggccacaaagaacgactcggtcaattatggcggaacgtttttagtagctattggcgtctttccgcaatcggcattaattatgggctggttgtcgaataacctggcacctcattacgtgcgtgcaacgggaatcggctttctcattgccttcgccaattcttcggcattcatatcaacattcatatatcttgcgaaagacgcgccggactaccgactgggacacagcatctctctcgctgccgtggtattctgctttgtgctcgttggtgtccaaatcgtttatctttcgtgggagaacagaaagcgagcgagaggtgatcgggacaatagactcactgaaggcaaaacggaaaggcttgggtatctgcacccatcgttccgatacactatatgagtcattcagtgtagagattttgtttggaatctccagggcgtgagactatataaagatctatcctgatctgagggggaacttatagcctacaatctccctcggcttcgtacgctcagactcgcaaatttcggctacatcaaattggagtttcaccatgggaggcgggataaagaataccacgtttcttgtcattacgacgtcttatctagcaccatgatacacttatagcacattaagatgcgcaattatgtgctccagcctagctaagtccctggattcagttactggggtatcgacggatggacggtcccagtgattcacagtgtgtacttttggaaagctgagggaggtttctcagtcttccacattctcatattgtaatgagatctaacgctctttcatggcatgatgatcacaccaatctatggaacacaatattacatttctag

SEQ ID NO: 15712 - DNA, 1320 bp, Muscodor strobelii
  misc_feature: SGI cDNA ID NO. 565210
  misc_feature: Encodes the peptide sequence at SEQ ID NO 15713
atggctctccgaacaatcgcacatcgaacgcttcactccccaattttactaagtttcgaaccaaatcatgaagctctccgaagtctagaaattttcacaagcccggcacgcttggtacggcgtactgcaacaagaagacatttgcagacgctgcattacagtacggaaagaaagcacttaccacttgatgggaccacagtcataagtctggagcaagctatcgctggtccattttgtacccggcagctcgcagatctaggcgcaagggtgatcaaggtcgaacggccaggcgtgggagattttgcgcgggcttatgacacacgtgtgaacggactagcttctcacttcgtgtggacaaatcgatcgaaagaaagcatagctctggatctaaaacaaccaaaagatcttgatgtgctgaagaaattggtaagcaaagccgatgtcctcgtgcagaatttggcgcctggtgctgcaggcagattgggtgtgtcatatgagaaactctgcgctgagtacccgagattaatcgtgtgcgatatttctggctatggcgataccggcccgtgccataagaaagcctacgacttacttgttcaaagtgaagctggcatgctctcaattactggtaccgagacagagcctgcaaaggtaggcatctccattgccgatattgcctctggcatgtatgcctactctggtgtgctggcggctttgatgaaacgcgaaaaaactggcaaaggatcaagagtggacatttcgatgctggaggccatgactgaatggatgggttttccaatgtattacgcatttcagggacaatcgcgaccaaagccagtgggcgcgtctcacgcagcagtttatccttacggtcccttcgagacaggtggcaatgggtctgtaatgcttgctgttcaaaatgagagagaatgggtcaagctatgcgtcgaagtacttgagaagccagaacttgcctcggattcccgtttcatcaataattccctgcgatcagagaatcggaaagagctcaagcaaataatgtgcctggcatttgccgatctatcagcagaagaggtactcatccgtctagacaaagcgaagatagcgaatgcttcagttaaggatatgataggtttatgggctcatgagcagttacaagcacgtggtcgatggactgaagtcgagacatcaaaaggaacaattcctgcactgctcccgcccggtatttcaaatgtagatgacacggtgatgggaaagatacccgacgtcggggagcatacaaaggccatcctcgccgagctaggtgtagatgtagacgaatga

SEQ ID NO: 15713 - protein, 439 aa, Muscodor strobelii
  misc_feature: SGI Peptide ID NO. 565210
  misc_feature (126)..(313): Pfam Id: PF02515 Pfam Desc: CoA-transferase family III
  misc_feature (37)..(434): NCBI GI: 259489753 Blast Desc: TPA: CAIB/BAIF family enzyme (AFU_orthologue; AFUA_7G06520) [Aspergillus nidulans FGSC A4]
  misc_feature (52)..(434): NCBI GI: 256726750 Blast Desc: NECHADRAFT_33279 [Nectria haematococca mpVI 77-13-4]
  misc_feature (46)..(436): NCBI GI: 145237042 Blast Desc: An07g00760 [Aspergillus niger] gi|134075633|emb|CAK39299.1| protein product [Aspergillus niger]
  misc_feature (43)..(435): NCBI GI: 115399776 Blast Desc: ATEG_06299 [Aspergillus terreus NIH2624] gi|114191143|gb|EAU32843.1| ATEG_06299 [Aspergillus terreus NIH2624]
  misc_feature (61)..(436): NCBI GI: 169766164 Blast Desc: [Aspergillus oryzae RIB40] gi|83765408|dbj|BAE55551.1| protein product [Aspergillus oryzae]
  misc_feature (61)..(436): NCBI GI: 238482841 Blast Desc: CAIB/BAIF family enzyme [Aspergillus flavus NRRL3357] gi|220700709|gb|EED57047.1| CAIB/BAIF family enzyme [Aspergillus flavus NRRL3357]
  misc_feature (43)..(435): NCBI GI: 255939352 Blast Desc: Pc16g00210 [Penicillium chrysogenum Wisconsin 54-1255] gi|211585068|emb|CAP92691.1| Pc16g00210 [Penicillium chrysogenum Wisconsin 54-1255]
  misc_feature (40)..(438): NCBI GI: 119483150 Blast Desc: alpha methylacyl-CoA racemase [Neosartorya fischeri NRRL 181] gi|119409758|gb|EAW19706.1| alpha methylacyl-CoA racemase [Neosartorya fischeri NRRL 181]
  misc_feature (56)..(438): NCBI GI: 70986738 Blast Desc: CAIB/BAIF family enzyme [Aspergillus fumigatus Af293] gi|66846488|gb|EAL86820.1| CAIB/BAIF family enzyme [Aspergillus fumigatus Af293] gi|159123371|gb|EDP48491.1| CAIB/BAIF family
  misc_feature (55)..(434): NCBI GI: 146282066 Blast Desc: CAIB/BAIF family protein [Pseudomonas stutzeri A1501] gi|145570271|gb|ABP79377.1| CAIB/BAIF-family enzyme [Pseudomonas stutzeri A1501]
  misc_feature (61)..(436): SWISSPROT Homolog: EC 2.8.3.16 Formyl-CoA transferase
MALRTIAHRTLHSPILLSFEPNHEALRSLEIFTSPARLVRRTATRRHLQTLHYSTERKHLPLDGTTVISLEQAIAGPFCTRQLADLGARVIKVERPGVGDFARAYDTRVNGLASHFVWTNRSKESIALDLKQPKDLDVLKKLVSKADVLVQNLAPGAAGRLGVSYEKLCAEYPRLIVCDISGYGDTGPCHKKAYDLLVQSEAGMLSITGTETEPAKVGISIADIASGMYAYSGVLAALMKREKTGKGSRVDISMLEAMTEWMGFPMYYAFQGQSRPKPVGASHAAVYPYGPFETGGNGSVMLAVQNEREWVKLCVEVLEKPELASDSRFINNSLRSENRKELKQIMCLAFADLSAEEVLIRLDKAKIANASVKDMIGLWAHEQLQARGRWTEVETSKGTIPALLPPGISNVDDTVMGKIPDVGEHTKAILAELGVDVDE

SEQ ID NO: 15714 - DNA, 870 bp, Muscodor strobelii
  misc_feature: SGI EST ID NO. CUFF.37223.1
  misc_feature: Variant of the nucleotide sequence at SEQ ID NO 15712
ttcaaagtgaagctggcatgctctcaattactggtaccgagacagagcctgcaaaggtaggcatctccattgccgatattgcctctggcatgtatgcctactctggtgtgctggcggctttgatgaaacgcgaaaaaactggcaaaggatcaagagtggacatttcgatgctggaggccatgactgaatggatgggttttccaatgtattacgcatttcagggacaatcgcgaccaaagccagtgggcgcgtctcacgcagcagtttatccttacggtcccttcgagacaggtggcaatgggtctgtaatgcttgctgttcaaaatgagagagaatgggtcaagctatgcgtcgaagtacttgagaagccagaacttgcctcggattcccgtttcatcaataattccctgcgatcagagaatcggaaagagctcaagcaaataatgtgcctggcatttgccgatctatcagcagaagaggtactcatccgtctagacaaagcgaagatagcgaatgcttcagttaaggatatgataggtttatgggctcatgagcagttacaagcacgtggtcgatggactgaagtcgagacatcaaaaggaacaattcctgcactgctcccgcccggtatttcaaatgtagatgacacggtgatgggaaagatacccgacgtcggggagcatacaaaggccatcctcgccgagctaggtgtagatgtagacgaatgaaacggcacataggtcagatcatcgacctgaaaagatttggccgttgccgagacaattcagcaatattcgcttagaagccgacattatttcggtgataatgagatactgtgacaccataactagggtgccttctgaacaggca

SEQ ID NO: 15715 - DNA, 1047 bp, Muscodor strobelii
  misc_feature: SGI cDNA ID NO. 565211
  misc_feature: Encodes the peptide sequence at SEQ ID NO 15716
atgtctttgacaggcttcactgagaaccagctaactgtccgagaagcggtcacatccgtgtgttcgaactttccgaacacgtattggcaggaacatgatcaaaaagaagaagaccctaaagagttccacgccgcgttggctaaggacggatggctaggtattgctctaccggaatcgttggggggctcgggactgggtatttcagaagcaacgatgatgatgcaggctatcacagagtctggtgcaggaatggccggagcgcaggccatccatgcaaatgtctatgccacacagccgcttgctaaattcggcacaaaggagcagttaaaagcaattccggtcgccagaaagatgatgttactcgcgcgcacaacacctctagaggatgtcaaaaagccaagcgaaggtctctcccttttctgcattgatctcgacagagacgctccgggcctcgagttgcgaaagattaagaagatgggcggcagagctgttgatgcaaatgagatcttcttcgacaattaccgaatacctggtgatacactgattggaaacgaaaatcagggattcaagatcatcttgcatggcatgaatgcagaacgatgcttgttagcgggagaagcgctcggtcttggatatgcagcactgactaaagcttccacatacgcgcgagaacgagtggtcttccagcgacctatcggcatgaaccagggcattgcgcatcctttggccgacgcttatatgaagcttgaagcagcaaaacttgcaacatatcatgcggcgcggctctacgatgaaagcaaggaggacaaatccattaagcaagaagatatcggtactgcggcgaacaccgcaaagtatttggcagcagaagcagcttttaccagttgtgaaagagctgtgctgacattgggagggatgggttacgcaatggaatacgatgtcgagcgctggctaagagaatgcttggtgcctcgcattgcacctttattaggaaatcaagcccccatgatcattaacagcgtagagaacatggtacatttccattag

SEQ ID NO: 15716 - protein, 348 aa, Muscodor strobelii
  misc_feature: SGI Peptide ID NO. 565211
  misc_feature (186)..(345): Pfam Id: PF00441 Pfam Desc: Acyl-CoA dehydrogenase, C-terminal domain
  misc_feature (201)..(332): Pfam Id: PF08028 Pfam Desc: Acyl-CoA dehydrogenase, C-terminal domain
  misc_feature (186)..(327): Pfam Id: PF00441 Pfam Desc: Acyl-CoA dehydrogenase, C-terminal domain
  misc_feature (201)..(319): Pfam Id: PF08028 Pfam Desc: Acyl-CoA dehydrogenase, C-terminal domain
  misc_feature (28)..(108): Pfam Id: PF02771 Pfam Desc: Acyl-CoA dehydrogenase, N-terminal domain
  misc_feature (1)..(345): NCBI GI: 46138871 Blast Desc: FG10950.1 [Gibberella zeae PH-1]
  misc_feature (1)..(345): NCBI GI: 171684241 Blast Desc: protein product [Podospora anserina] gi|170942081|emb|CAP67733.1| protein product [Podospora anserina]
  misc_feature (1)..(345): NCBI GI: 115399778 Blast Desc: conserved [Aspergillus terreus NIH2624] gi|114191144|gb|EAU32844.1| conserved [Aspergillus terreus NIH2624]
  misc_feature (1)..(345): NCBI GI: 255950794 Blast Desc: Pc22g22700 [Penicillium chrysogenum Wisconsin 54-1255] gi|211593181|emb|CAP99558.1| Pc22g22700 [Penicillium chrysogenum Wisconsin 54-1255]
  misc_feature (1)..(345): NCBI GI: 70986740 Blast Desc: acyl-CoA dehydrogenase [Aspergillus fumigatus Af293] gi|66846489|gb|EAL86821.1| acyl-CoA dehydrogenase, [Aspergillus fumigatus Af293] gi|159123370|gb|EDP48490.1| acyl-CoA fumigatus
  misc_feature (1)..(345): NCBI GI: 119483148 Blast Desc: acyl-CoA dehydrogenase, [Neosartorya fischeri NRRL 181] gi|119409757|gb|EAW19705.1| acyl-CoA dehydrogenase, [Neosartorya fischeri NRRL 181]
  misc_feature (1)..(345): NCBI GI: 169766162 Blast Desc: [Aspergillus oryzae RIB40] gi|238482839|ref|XP_002372658.1| acyl-CoA dehydrogenase, [Aspergillus flavus NRRL3357] gi|83765407|dbj|BAE55550.1| protein
  misc_feature (1)..(345): NCBI GI: 145249220 Blast Desc: An14g03240 [Aspergillus niger] gi|134081627|emb|CAK46561.1| protein product [Aspergillus niger]
  misc_feature (1)..(347): NCBI GI: 242777315 Blast Desc: acyl-CoA dehydrogenase, [Talaromyces stipitatus ATCC 10500] gi|218722628|gb|EED22046.1| acyl-CoA dehydrogenase, [Talaromyces stipitatus ATCC 10500]
  misc_feature (1)..(347): NCBI GI: 212533105 Blast Desc: acyl-CoA dehydrogenase, [Penicillium marneffei ATCC 18224] gi|210072073|gb|EEA26162.1| acyl-CoA dehydrogenase, [Penicillium marneffei ATCC 18224]
  misc_feature (113)..(327): SWISSPROT Homolog: EC 1.3.99.10 Isovaleryl-CoA dehydrogenase
  misc_feature: Useful for introducing or modulating the production of volatile compounds
  misc_feature: Useful for fungicidal and/or biocontrol applications
MSLTGFTENQLTVREAVTSVCSNFPNTYWQEHDQKEEDPKEFHAALAKDGWLGIALPESLGGSGLGISEATMMMQAITESGAGMAGAQAIHANVYATQPLAKFGTKEQLKAIPVARKMMLLARTTPLEDVKKPSEGLSLFCIDLDRDAPGLELRKIKKMGGRAVDANEIFFDNYRIPGDTLIGNENQGFKIILHGMNAERCLLAGEALGLGYAALTKASTYARERVVFQRPIGMNQGIAHPLADAYMKLEAAKLATYHAARLYDESKEDKSIKQEDIGTAANTAKYLAAEAAFTSCERAVLTLGGMGYAMEYDVERWLRECLVPRIAPLLGNQAPMIINSVENMVHFH

SEQ ID NO: 15717 - DNA, 2592 bp, Muscodor strobelii
  misc_feature: SGI EST ID NO. CUFF.37229.0
  misc_feature: Variant of the nucleotide sequence at SEQ ID NO 15715
cgcttttccatgaatcagtcgttgtcattgaaggcaaactagtgttgcgaagtcatataagtcgatactttttaattccagaagactacgagatcaaaatcactcaatatttcatggtaacaaagatgtctaaagtattgatacgtcaacttaggcctcggccagccgttacagtacctgcaggcggacgcgttttcccaactacattaaggcgaaatatcatgtctttgacaggcttcactgagaaccagctaactgtccgagaagcggtcacatccgtgtgttcgaactttccgaacacgtattggcaggaacatgatcaaaaagaagaagaccctaaagagttccacgccgcgttggctaaggacggatggctaggtattgctctaccggaatcgttggggggctcgggactgggtatttcagaagcaacgatgatgatgcaggctatcacagagtctggtgcaggaatggccggagcgcaggccatccatgcaaatgtctatgccacacagccgcttgctaaattcggcacaaaggagcagttaaaagcaattccgcaagatcatttctggcgaatggcgtacatgctttggcgtcaccgagccgaacacaggactcgacactcttcgtcttcgcacgatagcaaaaaaagaacccgatggttcatatagtgtgacggggcagaaaatctggataacgtgcgctcaggtcgccagaaagatgatgttactcgcgcgcacaacacctctagaggatgtcaaaaagccaagcgaaggtctctcccttttctgcattgatctcgacagagacgctccgggcctcgagttgcgaaagattaagaagatgggcggcagagctgttgatgcaaatgagatcttcttcgacaattaccgaatacctggtgatacactgattggaaacgaaaatcagggattcaagatcatcttgcatggcatgaatgcagaacgatgcttgttagcgggagaagcgctcggtcttggatatgcagcactgactaaagcttccacatacgcgcgagaacgagtggtcttccagcgacctatcggcatgaaccagggcattgcgcatcctttggccgacgcttatatgaagcttgaagcagcaaaacttgcaacatatcatgcggcgcggctctacgatgaaagcaaggaggacaaatccattaagcaagaagatatcggtactgcggcgaacaccgcaaagtatttggcagcagaagcagcttttaccagttgtgaaagagctgtgctgacattgggagggatgggttacgcaatggaatacgatgtcgagcgctggctaagagaatgcttggtgcctcgcattgcacctgtaagtcgggaaatgattatgaattatatctcggagaaggttctccgactgccacgtagttattaggaaatcaagcccccatgatcattaacagcgtagagaacatggtacatttccattagaatctagagagcttttggagcacccgttcatgatttaaactacattggtgtacagtattggctacctattacatatgctctaccaagtagttggtccgaacgtctgaccttctgggagaacaacctgtattgctttcgcttgataatccaaagtagtcgtgacaacagtatttccccaccattcaggcgggtctatcccattgtatgtgaaggcgaagaagatgaatagtgtactcagcgctaaaccaaggtcgagtccagcagaagtcagataatttaacctactccaccacttagaatggcgcttcttaataactaactggaagacatagccaacaatgccccatgaaagatagtttagaggagtggcgggcggcatggatcctgcgcctccaaatatcaagggagccatgaggtatttgataggtgatcgtgggtatcgctttgcggcaaagtagatagcgacaggtgtcaaagcaccgataacaaagaatgcgagcagcccagagtatatctgaccaggcgaaaacatacgcgccggtccgatcaggccccagatcactgacgcagaaaagaatactcggccgcctggacacgtgaagcgttgtggttgcgtgagatcgcagatcccgtcgatgttgttaagtgcaaaattcagcacggcaacttgtacaaaacatgatacagtagtcgcaactacctgcgcccaaaacatggttctcggcggaatcttcatgtaatgtccaaatttcaagtctcccacgaatctgagtgcctgagacatcgtaatgaacccgtatgtcttgaaaagcatcagcgcaaggggtctgcctggctgtatatagccataaatgaattccgtgagaacattcagaccaatttgttggttcgtgacagcttctatgatgccgatgggcaacgagaagacgaacgaaatgaagacagcgagtaagaacgcccaccacgttaaatttgttgggtaataaagaacggtgaacaggctcaaaaccaacacaaccaggaatagagcaatgtaccaccatgacggcgcctctttatatttccgcatcaatttcatatggatatcaggtttctcatttgagctgttctgata

SEQ ID NO: 15718 - DNA, 2421 bp, Muscodor strobelii
  misc_feature: SGI cDNA ID NO. 565212
  misc_feature: Encodes the peptide sequence at SEQ ID NO 15719
atggttaggattaagctaaccgatggcgcacgcgcatctaacgatgctgcttctccgatactccatggcgacagcagtgaggcccatgagttgtcagattgggcccagcctgatcctcataacgataacgactacaatgaaggcgaagaacatgaacgtttgatcgatcctaatttccccgaagatgatgacctagagctttctgagatagtgccagggagaggcgcttcttttgatagcgaaagtgcagcaaaatctagtgaagaggactctccatacgaagaggttagggccgcagtacgcaatttcgacgaagatttgccttgtagtacaatccgagcatggacaataggcttattcttaacactagtcggcgcctccgtgaacacactcttctcgctacgctcgccctcaatcggcattggcccattggtggctcagattatagcttgggttatgggacgcgcatgggagagtttcatgcccgaaaagcagatcaatatttttggaactaaacatgatctgaatcctgggccattcaatacaaaggaacatggtgtcatcgtagtcatggcaggtgtatcctttgctgtggcttacgccaccgacattctacttgctcaacttgtcttctataagcagaactttggtattctattccaaatattgctagtcgtatctactcaatcattggggtatggcatagcgggcatcatgcgaaaattcctagtatacccagcttctatgatatggccgggtaccctagtgtcagttgcgttgatgaacgcgatgtacgaaacacatcatgtcaaagacccaagcatcgttggaggcaacatgtcaagatataagtggtttggcctagtcactgctgtatccggcatctattatttcattcccggattctttgcccagtttttgagtgtcacagccttcgtaacatggctatggccgcaaagtccggtgataaatcaactatttggtggaaataccgggctatctctcatcccgctcacgttcgactggacacaagtttctggctacattggctcccctctgattcctccgtggcatgccatagcgaataccctaatcggcgtcgtatcgttcttcgttatcctcgcgtcattcttccactatacgggggcttggtactcagtgtatctaccgatgaacgatgcttcaacatatgataatacaggcagttcttatgacgtctcccgcgtcctaacagccgatttcctattggatgaaactgcctaccaagcttactcaccactgttcattagcaccactttcgccttagcctatggactctcctttgccgctattactgctttgattgtccacactttcctctactatcgtgagccaatatgggctcagtatcagaacagctcaaatgagaaacctgatatccatatgaaattgatgcggaaatataaagaggcgccgtcatggtggtacattgctctattcctggttgtgttggttttgagcctgttcaccgttctttattacccaacaaatttaacgtggtgggcgttcttactcgctgtcttcatttcgttcgtcttctcgttgcccatcggcatcatagaagctgtcacgaaccaacaaattggtctgaatgttctcacggaattcatttatggctatatacagccaggcagaccccttgcgctgatgcttttcaagacatacgggttcattacgatgtctcaggcactcagattcgtgggagacttgaaatttggacattacatgaagattccgccgagaaccatgttttgggcgcaggtagttgcgactactgtatcatgttttgtacaagttgccgtgctgaattttgcacttaacaacatcgacgggatctgcgatctcacgcaaccacaacgcttcacgtgtccaggcggccgagtattcttttctgcgtcagtgatctggggcctgatcggaccggcgcgtatgttttcgcctggtcagatatactctgggctgctcgcattctttgttatcggtgctttgacacctgtcgctatctactttgccgcaaagcgatacccacgatcacctatcaaatacctcatggctcccttgatatttggaggcgcaggatccatgccgcccgccactcctctaaactatctttcatggggcattgttggctatgtcttccagttagttattaagaagcgccattctaagtggtggagtaggttaaattatctgacttctgctggactcgaccttggtttagcgctgagtacactattcatcttcttcgccttcacatacaatgggatagacccgcctgaatggtggggaaatactgttgtcacgactactttggattatcaagcgaaagcaatacaggttgttctcccagaaggtcagacgttcggaccaactacttggtag

SEQ ID NO: 15719 - protein, 806 aa, Muscodor strobelii
  misc_feature: SGI Peptide ID NO. 565212
  misc_feature (109)..(764): Pfam Id: PF03169 Pfam Desc: OPT oligopeptide transporter protein
  misc_feature (29)..(806): NCBI GI: 145614314 Blast Desc: MGG_10200 [Magnaporthe grisea 70-15] gi|145021252|gb|EDK05381.1| MGG_10200 [Magnaporthe grisea 70-15]
  misc_feature (55)..(806): NCBI GI: 256733252 Blast Desc: [Nectria haematococca mpVI 77-13-4]
  misc_feature (29)..(806): NCBI GI: 46125699 Blast Desc: FG07227.1 [Gibberella zeae PH-1]
  misc_feature (47)..(794): NCBI GI: 154294136 Blast Desc: BC1G_14138 [Botryotinia fuckeliana B05.10] gi|150845075|gb|EDN20268.1| BC1G_14138 [Botryotinia fuckeliana B05.10]
  misc_feature (29)..(792): NCBI GI: 261360211 Blast Desc: sexual differentiation process protein isp4 [Verticillium albo-atrum VaMs.102]
  misc_feature (11)..(806): NCBI GI: 171686750 Blast Desc: protein product [Podospora anserina] gi|170943336|emb|CAP68989.1| protein product [Podospora anserina]
  misc_feature (29)..(806): NCBI GI: 71002356 Blast Desc: small oligopeptide transporter, OPT family [Aspergillus fumigatus Af293] gi|66853497|gb|EAL93821.1| small oligopeptide transporter, OPT family [Aspergillus fumigatus small
  misc_feature (29)..(806): NCBI GI: 119481919 Blast Desc: small oligopeptide transporter, OPT family [Neosartorya fischeri NRRL 181] gi|119409142|gb|EAW19091.1| small oligopeptide transporter, OPT family [Neosartorya fischeri NRRL
  misc_feature (29)..(806): NCBI GI: 121716448 Blast Desc: small oligopeptide transporter, OPT family [Aspergillus clavatus NRRL 1] gi|119403968|gb|EAW14385.1| small oligopeptide transporter, OPT family [Aspergillus clavatus NRRL
  misc_feature (33)..(806): NCBI GI: 238488721 Blast Desc: small oligopeptide transporter, OPT family [Aspergillus flavus NRRL3357] gi|220697986|gb|EED54326.1| small oligopeptide transporter, OPT family [Aspergillus flavus
MVRIKLTDGARASNDAASPILHGDSSEAHELSDWAQPDPHNDNDYNEGEEHERLIDPNFPEDDDLELSEIVPGRGASFDSESAAKSSEEDSPYEEVRAAVRNFDEDLPCSTIRAWTIGLFLTLVGASVNTLFSLRSPSIGIGPLVAQIIAWVMGRAWESFMPEKQINIFGTKHDLNPGPFNTKEHGVIVVMAGVSFAVAYATDILLAQLVFYKQNFGILFQILLVVSTQSLGYGIAGIMRKFLVYPASMIWPGTLVSVALMNAMYETHHVKDPSIVGGNMSRYKWFGLVTAVSGIYYFIPGFFAQFLSVTAFVTWLWPQSPVINQLFGGNTGLSLIPLTFDWTQVSGYIGSPLIPPWHAIANTLIGVVSFFVILASFFHYTGAWYSVYLPMNDASTYDNTGSSYDVSRVLTADFLLDETAYQAYSPLFISTTFALAYGLSFAAITALIVHTFLYYREPIWAQYQNSSNEKPDIHMKLMRKYKEAPSWWYIALFLVVLVLSLFTVLYYPTNLTWWAFLLAVFISFVFSLPIGIIEAVTNQQIGLNVLTEFIYGYIQPGRPLALMLFKTYGFITMSQALRFVGDLKFGHYMKIPPRTMFWAQVVATTVSCFVQVAVLNFALNNIDGICDLTQPQRFTCPGGRVFFSASVIWGLIGPARMFSPGQIYSGLLAFFVIGALTPVAIYFAAKRYPRSPIKYLMAPLIFGGAGSMPPATPLNYLSWGIVGYVFQLVIKKRHSKWWSRLNYLTSAGLDLGLALSTLFIFFAFTYNGIDPPEWWGNTVVTTTLDYQAKAIQVVLPEGQTFGPTTW

SEQ ID NO: 15720 - DNA, 1946 bp, Muscodor strobelii
  misc_feature: SGI EST ID NO. CUFF.37233.0
  misc_feature: Variant of the nucleotide sequence at SEQ ID NO 15718
cgcgataagagaatctatttccaggtgaggtaggtcgatgggtgctgcaggtacctatccacacaacttgctagtctaggtacatgctgacacgaaagccccaagaacacctcaaaccttagctcgcgcttgctcattgaccacgcgtactcttttgctattctttctctcctcatctccagcttcttcttttcatcaatcaattgttttatattgagcttatatttgcatatcctaatatacgtacatcagtcaccaattgttttcgaacatgtattaatggatggattgttgctggtgacatagcatagtgatgacggtgatagactcattgcaagcaacctaggaccagagccgaacgtcgttgagcatttggactccacctaggttggctcagcttgcacgttatagatgaagttggaccgcaacaacaaaggacggttcattaatcgcgctgtcctgtagacctgtgccagcaccggctgctgcaactgcattgatcatccatatttcgaattcatatccgttagtggaactcgcgccatactttttccaattgatgaatgtgacttgcgggaagcagtcaagcccgtctaaggctgtcctccacgcccacaccggcagcgatggttaggattaagctaaccgatggcgcacgcgcatctaacgatgctgcttctccgatactccatggcgacagcagtgaggcccatgagttgtcagattgggcccagcctgatcctcataacgataacgactacaatgaaggcgaagaacatgaacgtttgatcgatcctaatttccccgaagatgatgacctagagctttctgagatagtgccagggagaggcgcttcttttgatagcgaaagtgcagcaaaatctagtgaagaggactctccatacgaagaggttagggccgcagtacgcaatttcgacgaagatttgccttgtagtacaatccgagcatggacaataggcttattcttaacactagtcggcgcctccgtgaacacactcttctcgctacgctcgccctcaatcggcattggcccattggtggctcagattatagcttgggttatgggacgcgcatgggagagtttcatgcccgaaaagcagatcaatatttttggaactaaacatgatctgaatcctgggccattcaatacaaaggaacatggtgtcatcgtagtcatggcaggtgtatcctttgctgtggcttacgccaccgacattctacttgctcaacttgtcttctataagcagaactttggtattctattccaaatattgctagtcgtatctactcaatcattggggtatggcatagcgggcatcatgcgaaaattcctagtatacccagcttctatgatatggccgggtaccctagtgtcagttgcgttgatgaacgcgatgtacgaaacacatcatgtcaaagacccaagcatcgttggaggcaacatgtcaagatataagtggtttggcctagtcactgctgtatccggcatctattatttcattcccggattctttgcccagtttttgagtgtcacagccttcgtaacatggctatggccgcaaagtccggtgataaatcaactatttggtggaaataccgggctatctctcatcccgctcacgttcgactggacacaagtttctggctacattggctcccctctgattcctccgtggcatgccatagcgaataccctaatcggcgtcgtatcgttcttcgttatcctcgcgtcattcttccactatacgggggcttggtactcagtgtatctaccgatgaacgatgcttcaacatatgataatacaggcagttcttatgacgtctcccgcgtcctaacagccgatttcctattggatgaaactgcctaccaagcttactcaccactgttcattagcaccactttcgccttagcctatggactctcc

SEQ ID NO: 15721 - DNA, 1296 bp, Muscodor strobelii
  misc_feature: SGI cDNA ID NO. 565213
  misc_feature: Encodes the peptide sequence at SEQ ID NO 15722
atgcgccgagttgttgttactgggcttggcgccatcacaccccttggggtgggcgttcgaaacacctggaataggctcattgctgggcattctggcatatcgagcactgtcgaatttcatcctcaacaacgatggcgcgaactgactagcacagtagctggtatagtgcccaagaatacaagcaacgctcccgagattggcctttggcgatcaaacgattggctatgcgctgcagatcaacggcgcatgtctctgttctcacagtatgccgtcgctgcagctgaaatggctcttgaggatgcggcttggaagcctcagaaggagtctgacttgcaggacacaggtgtgtgtctaggaagcggaatcggtaacctagacgagttgtatagcactagtcttgccttcgagagcggcggatataagaaggtctcgccgctattcgtgcccaagatactcatcaatttggcagctggccatatctcgatgaagtacggcttccaaggacccaatcatgccgctacaacggcttgtacgactggcgcgcactctataggcgatgcatcacgcttcatagcgtttggcgacgcgaatgtcatggtagcaggtggtgccgagtcttgtattcatccccttacgtttgccggattcggaagatcacgttcgctctcaactactttcaacggtgacccatcctcaagctgccgaccctttgatcggcaaagagacggatttgtcgtctctgagggagcagccgtgctagttcttgaagaattgcaacacgcaaaagcccgtggtgcacacatttatgcagagttaaaaggatatggccttagcggtgatgcataccacatgacggctccacgagaggacggtgccggccctattcttgccatgaaaagggctttgaagaacgccggaattaaacctcatcaagttgactatgttaacgctcacgcgactggaacagcaattggagacgctgcggaggcgtcggctatacgctctgtcatgatgggcgaggaaggacatgatcaagagagccaggtcactgtgagcagcaccaagggttcgataggccaccttcttggggctgcgggtgcagttgaagctgtcttctcgattttggcgataagtgagaacactgtaccgccaacgatgaatctagaagacccagacatcaagcccaagttcaatctggttccacttcaggcccagcgaaagccagtcaatatcaccatgtcaaatagcttcggctttggaggaaccaatgcgaccttagtattctccaaacactaa

SEQ ID NO: 15722 - protein, 431 aa, Muscodor strobelii
  misc_feature: SGI Peptide ID NO. 565213
  misc_feature (2)..(261): Pfam Id: PF00109 Pfam Desc: Beta-ketoacyl synthase, N-terminal domain
  misc_feature (269)..(389): Pfam Id: PF02801 Pfam Desc: Beta-ketoacyl synthase, C-terminal domain
  misc_feature (81)..(261): Pfam Id: PF00109 Pfam Desc: Beta-ketoacyl synthase, N-terminal domain
  misc_feature (2)..(34): Pfam Id: PF00109 Pfam Desc: Beta-ketoacyl synthase, N-terminal domain
  misc_feature (1)..(430): NCBI GI: 85075673 Blast Desc: 3-oxoacyl-[acyl-carrier-protein]-synthase [Neurospora crassa OR74A] gi|28916814|gb|EAA26563.1| 3-oxoacyl-[acyl-carrier-protein]-synthase [Neurospora crassa
  misc_feature (1)..(430): NCBI GI: 256732798 Blast Desc: [Nectria haematococca mpVI 77-13-4]
  misc_feature (1)..(431): NCBI GI: 46125697 Blast Desc: FG07226.1 [Gibberella zeae PH-1]
  misc_feature (4)..(431): NCBI GI: 261360210 Blast Desc: 3-oxoacyl-[acyl-carrier-protein] synthase [Verticillium albo-atrum VaMs.102]
  misc_feature (1)..(430): NCBI GI: 2522482 Blast Desc: 3-oxoacyl-[acyl-carrier-protein]-synthase [Neurospora crassa]
  misc_feature (1)..(431): NCBI GI: 154300175 Blast Desc: BC1G_10463 [Botryotinia fuckeliana B05.10] gi|150856752|gb|EDN31944.1| BC1G_10463 [Botryotinia fuckeliana B05.10]
  misc_feature (1)..(430): NCBI GI: 171686752 Blast Desc: protein product [Podospora anserina] gi|170943337|emb|CAP68990.1| protein product [Podospora anserina]
  misc_feature (1)..(431): NCBI GI: 145234364 Blast Desc: An02g14220 [Aspergillus niger] gi|134057499|emb|CAK48853.1| protein product [Aspergillus niger]
  misc_feature (1)..(430): NCBI GI: 145614312 Blast Desc: MGG_10202 [Magnaporthe grisea 70-15] gi|145021251|gb|EDK05380.1| MGG_10202 [Magnaporthe grisea 70-15]
  misc_feature (1)..(431): NCBI GI: 154274043 Blast Desc: HCAG_07295 [Ajellomyces capsulatus NAm1] gi|150415481|gb|EDN10834.1| HCAG_07295 [Ajellomyces capsulatus NAm1]
  misc_feature (1)..(430): SWISSPROT Homolog: EC 2.3.1.41 Beta-ketoacyl-acyl-carrier-protein synthase I
  misc_feature: Useful for fungicidal and/or biocontrol applications
MRRVVVTGLGAITPLGVGVRNTWNRLIAGHSGISSTVEFHPQQRWRELTSTVAGIVPKNTSNAPEIGLWRSNDWLCAADQRRMSLFSQYAVAAAEMALEDAAWKPQKESDLQDTGVCLGSGIGNLDELYSTSLAFESGGYKKVSPLFVPKILINLAAGHISMKYGFQGPNHAATTACTTGAHSIGDASRFIAFGDANVMVAGGAESCIHPLTFAGFGRSRSLSTTFNGDPSSSCRPFDRQRDGFVVSEGAAVLVLEELQHAKARGAHIYAELKGYGLSGDAYHMTAPREDGAGPILAMKRALKNAGIKPHQVDYVNAHATGTAIGDAAEASAIRSVMMGEEGHDQESQVTVSSTKGSIGHLLGAAGAVEAVFSILAISENTVPPTMNLEDPDIKPKFNLVPLQAQRKPVNITMSNSFGFGGTNATLVFSKH

SEQ ID NO: 15723 - DNA, 4025 bp, Muscodor strobelii
  misc_feature: SGI EST ID NO. CUFF.37321.1
  misc_feature: Variant of the nucleotide sequence at SEQ ID NO 15721
gtgattctcaaccatcaactgtatcgataatctggtaattgagcaacctaacgcttcgtgtattacttatctctaccaaatgacaagtaatacgtctaccatgctgcctttagaactcaccctggtggtggcagcaacccgatcaatgggtattggccgggccggcactctgccatggacgggactgaaaaaggagatggcatatttcgctcgagtgacaaagcggtccgcctcgtctgataatcaatttcaaaatataaacgccgtgatcatgggccgaaaaacgtgggacagcataccacccaaattcaggcctcttaaaggccgattaaacattgtcatcagtcgctctcatacagagcctccagtaaaaagcgtcgataccaacacggaagctgtgaaggtatcgtctttagagcaggccattgagtatctcaaatcaggttctgctgctccacctacggggaaggtttttgtcataggcggcgcacaaatatacggcgccgcactccagctggaagaggctagaagggtgctgcttacaagagtcatgagcgatttcgagtgcgacacattctttccgctcaaactatctgaaagtccatcagacattgaggatgagagtggtaaatgggtcagaaaatctaatgctgagctcgatgactggactggggaacaggtgccggaggggatacaagaggagaaccaaacacaatacgagttccaaatgtgggaaagagttgattgatagcatgctgtttgcgcatcataatacatgttctatagaccaactgtgatgatcgtatctgggttgacgtaccacatacaattctctgagcagacattatcacccgatccagcgtacagtcgccttgtgttttccgaccagtccagtcatacaattataatatacatttgagattttacacagcgacctccgtaggaggctctgtaggagaggtttggtttggtggtgccaattgaccctcaagttcacgtgttggctgatcgactacggcaaactcattctttgcaggccatctgagtgctgccgcagcttggctgtacagaccctcatcaggcatctggtcaagcatcttgagacagaggcgcatccaactaacaatagcggccaaagaacgcacatcgacgtcttcgcggcctttgaatacgttgcgccagacggctgaggctagcacggcatcgtttttggccaatccctcgtcgtaggcggcaatgacgccccgccactgcacgaataagtccttgaggtaacgatgtcgcaaggcgcgggacgtaatgccgtggttcgcatccatacgctcttctgcgtcgaagaagtaatggtctactaattgcgcctgccaggatcgtgctgcatctcgctcgaggttccgagttcgtgcaaatatcagatacatattcagcatcgttatttgcgaccatgtactgaaggtaggagggagaccgaaatctgaataggacatgtcagctcatttatcctttgcttgtaagccgagcggcagagctgggctcggcagtctcgagttgagaaaaagagcgcatacctttgtgccacatggtactgccttctcctatgtgctcgccttcctctgtcttcgggattgtatcggccgcgatatgtaccggatctatcttgtacatggcttgtttagaacaggcttcgtagatctctttggtcgcggctacaactcggtacggctcagttgagctttggacaactcgaccgagaacatctttagtgttctttatgagacctgactgaagtgtcgtcgatcgaaagccgcgtttgtgttcatgcgatctgggagtggcagcgatccgactggatagctgaagtgatgtagctgtacttttcgcagcactgtagaggtcggcggggatggggccatttcgccgtgctagtagcgaaagctgccttctgcaactattgcatgccatgtctaccgggatccgcacgtagatatataagtgttggaaacgggcagcattggaaggtctcgcaacgagactgcgccaggtaggaaaagatttggttcacgtcattggagatgagcgcgtcactcattagaagggaaaaaaagggtttggcacctgcaggtgagagcttcggccctgtggatcactagcaagggttaggtcgagcctgggttcagaagcttggcgaattttccccttctagatctagatatttcactgtggactcgtgcaagaagaactttgatataattttaacaacacacaactcgccatgtcatcacaacgacgcgttattctaaaatcgtgagaaacggtccgaggtggagggttatggcatacaatgcgccgagttgttgttactgggcttggcgccatcacaccccttggggtgggcgttcgaaacacctggaataggctcattgctgggcattctggcatatcgagcactgtcgaatttcatcctcaacaacgatggcgcgaactgactagcacagtagctggtatagtgcccaagaatacaagcaacgctcccgagattggcctttggcgatcaaacgattggctatgcgctgcagatcaacggcgcatgtctctgttctcacagtatgccgtcgctgcagctgaaatggctcttgaggatgcggcttggaagcctcagaaggagtctgacttgcaggacacaggtgtgtgtctaggaagcggaatcggtaacctagacgagttgtatagcactagtcttgccttcgagagcggcggatataagaaggtctcgccgctattcgtgcccaagatactcatcaatttggcagctggccatatctcgatgaagtacggcttccaaggacccaatcatgccgctacaacggcttgtacgactggcgcgcactctataggcgatgcatcacgcttcatagcgtttggcgacgcgaatgtcatggtagcaggtggtgccgagtcttgtattcatccccttacgtttgccggattcggaagatcacgttcgctctcaactactttcaacggtgacccatcctcaagctgccgaccctttgatcggcaaagagacggatttgtcgtctctgagggagcagccgtgctagttcttgaagaattgcaacacgcaaaagcccgtggtgcacacatttatgcagagttaaaaggatatggccttagcggtgatgcataccacatgacggctccacgagaggacggtgccggccctattcttgccatgaaaagggctttgaagaacgccggaattaaacctcatcaagttgactatgttaacgctcacgcgactggaacagcaattggagacgctgcggaggcgtcggctatacgctctgtcatgatgggcgaggaaggacatgatcaagagagccaggtcactgtgagcagcaccaagggttcgataggccaccttcttggggctgcgggtgcagttgaagctgtcttctcgattttggcgataagtgagaacactgtaccgccaacgatgaatctagaagacccagacatcaagcccaagttcaatctggttccacttcaggcccagcgaaagccagtcaatatcaccatgtcaaatagcttcggctttggaggaaccaatgcgaccttagtattctccaaacactaatagggctgcattcagtggctaatcgaagaatgatttttcacggcgtgtataatacgtatcatcatcttcgtactgtaccatataggagtcgctcgtaaaacactaacacagagatgaactattcgattccataaagtcacaacctggaaggagcaagaacccatccctgagcaatgtataattagttacgataatgtacgataaaggtaccactcaatgagctagtggaacttgcaagatttgtttatgcaatttggcagggcatcttgtaccgctcatcggtttgaagtaatgttcagatcaacgtctagactggtgcctacggatagaagggttacattcagcaccaaatgtgcacatcatgcagctcaacagtttctcctatctg

SEQ ID NO: 15724 - DNA, 648 bp, Muscodor strobelii
  misc_feature: SGI cDNA ID NO. 565214
  misc_feature: Encodes the peptide sequence at SEQ ID NO 15725
atgtacaagatagatccggtacatatcgcggccgatacaatcccgaagacagaggaaggcgagcacataggagaaggcagtaccatgtggcacaaagatttcggtctccctcctaccttcagtacatggtcgcaaataacgatgctgaatatgtatctgatatttgcacgaactcggaacctcgagcgagatgcagcacgatcctggcaggcgcaattagtagaccattacttcttcgacgcagaagagcgtatggatgcgaaccacggcattacgtcccgcgccttgcgacatcgttacctcaaggacttattcgtgcagtggcggggcgtcattgccgcctacgacgagggattggccaaaaacgatgccgtgctagcctcagccgtctggcgcaacgtattcaaaggccgcgaagacgtcgatgtgcgttctttggccgctattgttagttggatgcgcctctgtctcaagatgcttgaccagatgcctgatgagggtctgtacagccaagctgcggcagcactcagatggcctgcaaagaatgagtttgccgtagtcgatcagccaacacgtgaacttgagggtcaattggcaccaccaaaccaaacctctcctacagagcctcctacggaggtcgctgtgtaa

SEQ ID NO: 15725 - protein, 215 aa, Muscodor strobelii
  misc_feature: SGI Peptide ID NO. 565214
  misc_feature (32)..(184): Pfam Id: PF03981 Pfam Desc: Ubiquinol-cytochrome C chaperone
  misc_feature (32)..(165): Pfam Id: PF03981 Pfam Desc: Ubiquinol-cytochrome C chaperone
  misc_feature (2)..(198): NCBI GI: 39969185 Blast Desc: MGG_10203 [Magnaporthe grisea 70-15] gi|145021250|gb|EDK05379.1| MGG_10203 [Magnaporthe grisea 70-15]
  misc_feature (2)..(197): NCBI GI: 85075677 Blast Desc: NCU00057 [Neurospora crassa OR74A] gi|28916815|gb|EAA26564.1| conserved [Neurospora crassa OR74A]
  misc_feature (11)..(196): NCBI GI: 261360209 Blast Desc: CBP3 [Verticillium albo-atrum VaMs.102]
  misc_feature (2)..(205): NCBI GI: 116192101 Blast Desc: CHGG_05768 [Chaetomium globosum CBS 148.51] gi|88181681|gb|EAQ89149.1| CHGG_05768 [Chaetomium globosum CBS 148.51]
  misc_feature (2)..(212): NCBI GI: 256732799 Blast Desc: [Nectria haematococca mpVI 77-13-4]
  misc_feature (2)..(197): NCBI GI: 46125695 Blast Desc: FG07225.1 [Gibberella zeae PH-1]
  misc_feature (2)..(149): NCBI GI: 156048154 Blast Desc: SS1G_08808 [Sclerotinia sclerotiorum 1980] gi|154693205|gb|EDN92943.1| SS1G_08808 [Sclerotinia sclerotiorum 1980]
  misc_feature (2)..(162): NCBI GI: 255935893 Blast Desc: Pc13g05390 [Penicillium chrysogenum Wisconsin 54-1255] gi|211583593|emb|CAP91608.1| Pc13g05390 [Penicillium chrysogenum Wisconsin 54-1255]
  misc_feature (2)..(168): NCBI GI: 240272949 Blast Desc: CBP3 protein [Ajellomyces capsulatus H143]
  misc_feature (2)..(173): NCBI GI: 238837701 Blast Desc: ubiquinol cytochrome-c reductase assembly protein Cbp3 [Microsporum canis CBS 113480]
MYKIDPVHIAADTIPKTEEGEHIGEGSTMWHKDFGLPPTFSTWSQITMLNMYLIFARTRNLERDAARSWQAQLVDHYFFDAEERMDANHGITSRALRHRYLKDLFVQWRGVIAAYDEGLAKNDAVLASAVWRNVFKGREDVDVRSLAAIVSWMRLCLKMLDQMPDEGLYSQAAAALRWPAKNEFAVVDQPTRELEGQLAPPNQTSPTEPPTEVAV

SEQ ID NO: 15726 - DNA, 2698 bp, Muscodor strobelii
  misc_feature: SGI EST ID NO. CUFF.37320.2
  misc_feature: Variant of the nucleotide sequence at SEQ ID NO 15724
gctatacaactcgtctaggttaccgattccgcttcctagacacacacctgtgtcctgcaagtcagactccttctgaggcttccaagccgcatcctcaagagccatttcagctgcagcgacggcatactgtgagaacagagacatgcgccgttgatctgcagcgcatagccaatcgtttgatcgccaaaggccaatctcgggagcgttgcttgtattcttgggcactataccagctactgtgctagtcagttcgcgccatcgttgttgaggatgaaattcgacagtgctcgatatgccagaatgcccagcaatgagcctattccaggtgtttcgaacgcccaccccaaggggtgtgatggcgccaagcccagtaacaacaactcggcgcattgtatgccataaccctccacctcggaccgtttctcacgattttagaataacgcgtcgttgtgatgacatggcgagttgtgtgttgttaaaattatatcaaagttcttcttgcacgagtccacagtgaaatatctagatctagaaggggaaaattcgccaagcttctgaacccaggctcgacctaacccttgctagtgatccacagggccgaagctctcacctgcaggtgccaaaccctttttttcccttctaatgagtgacgcgctcatctccaatgacgtgaaccaaatcttttcctacctggcgcagtctcgttgcgagaccttccaatgctgcccgtttccaacacttatatatctacgtgcggatcccggtagacatggcatgcaatagttgcagaaggcagctttcgctactagcacggcgaaatggccccatccccgccgacctctacagtgctgcgaaaagtacagctacatcacttcagctatccagtcggatcgctgccactcccagatcgcatgaacacaaacgcggctttcgatcgacgacacttcagtcaggtctcataaagaacactaaagatgttctcggtcgagttgtccaaagctcaactgagccgtaccgagttgtagccgcgaccaaagagatctacgaagcctgttctaaacaagccatgtacaagatagatccggtacatatcgcggccgatacaatcccgaagacagaggaaggcgagcacataggagaaggcagtaccatgtggcacaaagatttcggtctccctcctaccttcagtacatggtcgcaaataacgatgctgaatatgtatctgatatttgcacgaactcggaacctcgagcgagatgcagcacgatcctggcaggcgcaattagtagaccattacttcttcgacgcagaagagcgtatggatgcgaaccacggcattacgtcccgcgccttgcgacatcgttacctcaaggacttattcgtgcagtggcggggcgtcattgccgcctacgacgagggattggccaaaaacgatgccgtgctagcctcagccgtctggcgcaacgtattcaaaggccgcgaagacgtcgatgtgcgttctttggccgctattgttagttggatgcgcctctgtctcaagatgcttgaccagatgcctgatgagggtctgtacagccaagctgcggcagcactcagatggcctgcaaagaatgagtttgccgtagtcgatcagccaacacgtgaacttgagggtcaattggcaccaccaaaccaaacctctcctacagagcctcctacggaggtcgctgtgtaaaatctcaaatgtatattataattgtatgactggactggtcggaaaacacaaggcgactgtacgctggatcgggtgataatgtctgctcagagaattgtatgtggtacgtcaacccagatacgatcatcacagttggtctatagaacatgtattatgatgcgcaaacagcatgctatcaatcaactctttcccacatttggaactcgtattgtgtttggttctcctcttgtatcccctccggcacctgttccccagtccagtcatcgagctcagcattagattttctgacccatttaccactctcatcctcaatgtctgatggactttcagatagtttgagcggaaagaatgtgtcgcactcgaaatcgctcatgactcttgtaagcagcacccttctagcctcttccagctggagtgcggcgccgtatatttgtgcgccgcctatgacaaaaaccttccccgtaggtggagcagcagaacctgatttgagatactcaatggcctgctctaaagacgataccttcacagcttccgtgttggtatcgacgctttttactggaggctctgtatgagagcgactgatgacaatgtttaatcggcctttaagaggcctgaatttgggtggtatgctgtcccacgtttttcggcccatgatcacggcgtttatattttgaaattgattatcctaccagatgtcagtgtttagataatagcacttgagcgtatctccgaagaaggacagcttacagacgaggcggaccgctttgtcactcgagcgaaatatgccatctcctttttcagtcccgtccatggcagagtgccggcccggccaatacccattgatcgggttgctgccaccaccagggtgagttctaaaggcagcatggtagacgtattacttgtcatttggtagagataagtaatacacgaagcgttaggttgctcaattaccagattatcgatacagttgatggttgagaatca

SEQ ID NO: 15727 - DNA, 648 bp, Muscodor strobelii
  misc_feature: SGI cDNA ID NO. 565215
  misc_feature: Encodes the peptide sequence at SEQ ID NO 15728
atgctgcctttagaactcaccctggtggtggcagcaacccgatcaatgggtattggccgggccggcactctgccatggacgggactgaaaaaggagatggcatatttcgctcgagtgacaaagcggtccgcctcgtctgataatcaatttcaaaatataaacgccgtgatcatgggccgaaaaacgtgggacagcataccacccaaattcaggcctcttaaaggccgattaaacattgtcatcagtcgctctcatacagagcctccagtaaaaagcgtcgataccaacacggaagctgtgaaggtatcgtctttagagcaggccattgagtatctcaaatcaggttctgctgctccacctacggggaaggtttttgtcataggcggcgcacaaatatacggcgccgcactccagctggaagaggctagaagggtgctgcttacaagagtcatgagcgatttcgagtgcgacacattctttccgctcaaactatctgaaagtccatcagacattgaggatgagagtggtaaatgggtcagaaaatctaatgctgagctcgatgactggactggggaacaggtgccggaggggatacaagaggagaaccaaacacaatacgagttccaaatgtgggaaagagttgattga

SEQ ID NO: 15728 - protein, 215 aa, Muscodor strobelii
  misc_feature: SGI Peptide ID NO. 565215
  misc_feature (5)..(213): Pfam Id: PF00186 Pfam Desc: Dihydrofolate reductase
  misc_feature (1)..(213): NCBI GI: 164428794 Blast Desc: NCU00058 [Neurospora crassa OR74A] gi|157072283|gb|EAA26565.2| conserved [Neurospora crassa OR74A]
  misc_feature (1)..(215): NCBI GI: 256733253 Blast Desc: [Nectria haematococca mpVI 77-13-4]
  misc_feature (5)..(215): NCBI GI: 171686756 Blast Desc: protein product [Podospora anserina] gi|170943339|emb|CAP68992.1| protein product [Podospora anserina]
  misc_feature (1)..(215): NCBI GI: 156048144 Blast Desc: SS1G_08803 [Sclerotinia sclerotiorum 1980] gi|154693200|gb|EDN92938.1| SS1G_08803 [Sclerotinia sclerotiorum 1980]
  misc_feature (1)..(213): NCBI GI: 46125665 Blast Desc: FG07210.1 [Gibberella zeae PH-1]
  misc_feature (6)..(214): NCBI GI: 169621285 Blast Desc: SNOG_13852 [Phaeosphaeria nodorum SN15] gi|160704220|gb|EAT78876.2| SNOG_13852 [Phaeosphaeria nodorum SN15]
  misc_feature (4)..(215): NCBI GI: 261360216 Blast Desc: dihydrofolate reductase [Verticillium albo-atrum VaMs.102]
  misc_feature (3)..(213): NCBI GI: 189206668 Blast Desc: dihydrofolate reductase [Pyrenophora tritici-repentis Pt-1C-BFP] gi|187975761|gb|EDU42387.1| dihydrofolate reductase [Pyrenophora tritici-repentis Pt-1C-BFP]
  misc_feature (6)..(213): NCBI GI: 118998 Blast Desc: dihydrofolate reductase [Pyrenophora tritici-repentis Pt-1C-BFP] gi|187975761|gb|EDU42387.1| dihydrofolate reductase [Pyrenophora tritici-repentis Pt-1C-BFP]
  misc_feature (6)..(213): NCBI GI: 42543914 Blast Desc: dihydrofolate reductase [Pyrenophora tritici-repentis Pt-1C-BFP] gi|187975761|gb|EDU42387.1| dihydrofolate reductase [Pyrenophora tritici-repentis Pt-1C-BFP]
  misc_feature (6)..(213): SWISSPROT Homolog: EC 1.5.1.3 Dihydrofolate reductase
MLPLELTLVVAATRSMGIGRAGTLPWTGLKKEMAYFARVTKRSASSDNQFQNINAVIMGRKTWDSIPPKFRPLKGRLNIVISRSHTEPPVKSVDTNTEAVKVSSLEQAIEYLKSGSAAPPTGKVFVIGGAQIYGAALQLEEARRVLLTRVMSDFECDTFFPLKLSESPSDIEDESGKWVRKSNAELDDWTGEQVPEGIQEENQTQYEFQMWERVD

SEQ ID NO: 15729 - DNA, 4025 bp, Muscodor strobelii; identical to SEQ ID NO: 15723
  misc_feature: SGI EST ID NO. CUFF.37321.1
  misc_feature: Variant of the nucleotide sequence at SEQ ID NO 15727

SEQ ID NO: 15730 - DNA, 882 bp, Muscodor strobelii
  misc_feature: SGI cDNA ID NO. 565216
  misc_feature: Encodes the peptide sequence at SEQ ID NO 15731
atggcagcggaaccgatgccactcacagatggagaaaaggacttcttcgttcagcatggataccttaaacttacaaactgtttcacccctgaacaggccaaagaggtctgtgagggtgtatggacgcgtttaggaatggacccaaccgacaaggtaacttggacgaggcaacgaacaaacatgccttcgcatcgtgtatttgacgcttccaagttctcgcctaaagcatggtcagcaatatgcgaactatgcggaggcgaagagcgcattgcaccgaaatctaaagaatggcgcgacgggttgattgtaaatctcggaactcctggtcccgagcaagcattacttgtcatcccgcttttcacggacatcgttcccggtggtggtggaacaatgatctgtccacctggcattgacctgattgcgaattggctgtataaaaatccacaaggcgtatcgccatggatggtgcctagagaccatgaggaattcaagaaagagaaaaatcttgagttctatcgccaactcattgctcatgtaaaggaagaagaattcgtagaggccacaggaaatgtgggcgacgtgtacttacttcatccccttatggtacactcggcaaccaccaatccactgcgcaaagttaggatgattacaaatccgcctgtcttcttgcgagaaccacatcgtctcgaccgagacgacgacaactacagcccggttgaaaagaaaacgagacgtagcatcggcgaagaaaagctgaaagggtggaaaatacagggacccagggaagctgtcattccagaacgtgtacggatccaggaggcgatgaagcaggaggaattaaaacgcatcgaggagcagaggaagcctactatcgttgtgtga

SEQ ID NO: 15731 - protein, 293 aa, Muscodor strobelii
  misc_feature: SGI Peptide ID NO. 565216
  misc_feature (13)..(288): NCBI GI: 164425090 Blast Desc: NCU06490 [Neurospora crassa OR74A] gi|157070785|gb|EAA27894.2| conserved [Neurospora crassa OR74A]
  misc_feature (8)..(285): NCBI GI: 116192037 Blast Desc: CHGG_05736 [Chaetomium globosum CBS 148.51] gi|88181649|gb|EAQ89117.1| CHGG_05736 [Chaetomium globosum CBS 148.51]
  misc_feature (8)..(288): NCBI GI: 39976967 Blast Desc: MGG_06386 [Magnaporthe grisea 70-15] gi|145016206|gb|EDK00696.1| MGG_06386 [Magnaporthe grisea 70-15]
  misc_feature (2)..(283): NCBI GI: 169618130 Blast Desc: SNOG_12252 [Phaeosphaeria nodorum SN15] gi|111059544|gb|EAT80664.1| SNOG_12252 [Phaeosphaeria nodorum SN15]
  misc_feature (8)..(288): NCBI GI: 171686774 Blast Desc: protein product [Podospora anserina] gi|170943348|emb|CAP69001.1| protein product [Podospora anserina]
  misc_feature (2)..(290): NCBI GI: 189200723 Blast Desc: conserved [Pyrenophora tritici-repentis Pt-1C-BFP] gi|187983797|gb|EDU49285.1| conserved [Pyrenophora tritici-repentis Pt-1C-BFP]
  misc_feature (8)..(285): NCBI GI: 67903224 Blast Desc: AN8599.2 [Aspergillus nidulans FGSC A4] gi|40741443|gb|EAA60633.1| AN8599.2 [Aspergillus nidulans FGSC A4] gi|259483187|tpe|CBF78360.1| TPA: conserved [Aspergillus FGSC
  misc_feature (8)..(283): NCBI GI: 212544808 Blast Desc: conserved [Penicillium marneffei ATCC 18224] gi|212544810|ref|XP_002152559.1| conserved [Penicillium marneffei ATCC 18224] gi|210065527|gb|EEA19621.1| conserved [Penicillium
  misc_feature (8)..(283): NCBI GI: 242813916 Blast Desc: conserved [Talaromyces stipitatus ATCC 10500] gi|218714603|gb|EED14026.1| conserved [Talaromyces stipitatus ATCC 10500]
  misc_feature (6)..(289): NCBI GI: 159122682 Blast Desc: conserved [Aspergillus fumigatus A1163]
MAAEPMPLTDGEKDFFVQHGYLKLTNCFTPEQAKEVCEGVWTRLGMDPTDKVTWTRQRTNMPSHRVFDASKFSPKAWSAICELCGGEERIAPKSKEWRDGLIVNLGTPGPEQALLVIPLFTDIVPGGGGTMICPPGIDLIANWLYKNPQGVSPWMVPRDHEEFKKEKNLEFYRQLIAHVKEEEFVEATGNVGDVYLLHPLMVHSATTNPLRKVRMITNPPVFLREPHRLDRDDDNYSPVEKKTRRSIGEEKLKGWKIQGPREAVIPERVRIQEAMKQEELKRIEEQRKPTIVV

SEQ ID NO: 15732 - DNA, 791 bp, Muscodor strobelii
  misc_feature: SGI EST ID NO. CUFF.37243.0
  misc_feature: Variant of the nucleotide sequence at SEQ ID NO 15730
taacagcagactgacatgagcccacacactagaaggagaaggacaacaagtttcgccgcatgatctcccaggttggcacgtcgacggcgacttcttcgtacactatctcgatagtcccgagcaagcattacttgtcatcccgcttttcacggacatcgttcccggtggtggtggaacaatgatctgtccacctggcattgacctgattgcgaattggctgtataaaaatccacaaggcgtatcgccatggatggtgcctagagaccatgaggaattcaagaaagagaaaaatcttgagttctatcgccaactcattgctcatgtaaaggaagaagaattcgtagaggccacaggaaatgtgggcgacgtgtacttacttcatccccttatggtacactcggcaaccaccaatccactgcgcaaagttaggatgattacaaatccgcctgtcttcttgcgagaaccacatcgtctcgaccgagacgacgacaactacagcccggttgaaaagaaaacgagacgtagcatcggcgaagaaaagctgaaagggtggaaaatacagggacccagggaagctgtcattccagaacgtgtacggatccaggaggcgatgaagcaggaggaattaaaacgcatcgaggagcagaggaagcctactatcgttgtgtgataggccatgtgccctaggcatttgacgagaagagttgtatactactttatttcccaagatactacgcttcaattaaacttattccaactcgaaagtaaagtaagaaatatttgcgttgata

SEQ ID NO: 15733 - DNA, 990 bp, Muscodor strobelii
  misc_feature: SGI cDNA ID NO. 565217
  misc_feature: Encodes the peptide sequence at SEQ ID NO 15734
atgggcggacagtccaagtatctaactggcgactcagccgctatcgatgcatttctggatcaatttgatatgttcttgtttgactgcgatggcgtattatggtccggggatcatctctttgagggtaccgtagagaccttggaactattaagatccaaaggtaagatcctgataagcacggatgccttgaagatacttcaactcagcttactaaataaaccaaaaggcaagaaggtcgtttttgttacaaacaactccaccaagtccaggcaagactatcagaagaagttgacgggtatgggaataccaagcaatatcgaggagatatttgcatcagcgtactcatccgcgatctacatatcgcggatcttgaagctcccagcgccgaagaacaaagtcttcgtgctcggggagagtggtatcgagactgaactgcgaactgagaacatcccgttcattgggggtacagatccagccctgcgccgagatataacaccagaagattttgcaggacttgccgacggatccctcctagatcccgatgttggtattgtgcttgctggtcttgactttcacattaactacctgaagctatccatggcattccagtacctgcaacgcggcgccatatttcttgccactaacctcgatagtacgctacctatgagtcacacattcttccctggcgcaggctcttgctctattcctcttgtttacatgacgggcgaaaaacctaccgccctaggaaagccctctcaggctatgatggacgcaatcgaagggaaatttgagctcaaccgtacgcgcacttgcatgattggggatcgtcttgacactgatattcagttcggaattcaaggaaagctcggtggcacacttgcagttctcaccggagtatctaaaaaggagcaatgggaaggcggagatgccgaattcgtccctgcgtactatgttgaccggctgagtgacctccgaggcgggagctcgtaa

SEQ ID NO: 15734 - protein, 329 aa, Muscodor strobelii
  misc_feature: SGI Peptide ID NO. 565217
  misc_feature (22)..(297): Pfam Id: PF00702 Pfam Desc: haloacid dehalogenase-like hydrolase
  misc_feature (6)..(326): NCBI GI: 154290287 Blast Desc: BC1G_15715 [Botryotinia fuckeliana B05.10] gi|150847819|gb|EDN23012.1| BC1G_15715 [Botryotinia fuckeliana B05.10]
  misc_feature (6)..(324): NCBI GI: 171686686 Blast Desc: protein product [Podospora anserina] gi|170943304|emb|CAP68957.1| protein product [Podospora anserina]
  misc_feature (3)..(328): NCBI GI: 85083924 Blast Desc: 4-nitrophenylphosphatase [Neurospora crassa OR74A] gi|28918300|gb|EAA27976.1| 4-nitrophenylphosphatase [Neurospora crassa OR74A]
  misc_feature (4)..(329): NCBI GI: 116192161 Blast Desc: CHGG_05798 [Chaetomium globosum CBS 148.51] gi|88181711|gb|EAQ89179.1| CHGG_05798 [Chaetomium globosum CBS 148.51]
  misc_feature (6)..(326): NCBI GI: 156051564 Blast Desc: SS1G_07189 [Sclerotinia sclerotiorum 1980] gi|154704967|gb|EDO04706.1| SS1G_07189 [Sclerotinia sclerotiorum 1980]
  misc_feature (4)..(326): NCBI GI: 189201812 Blast Desc: 4-nitrophenylphosphatase [Pyrenophora tritici-repentis Pt-1C-BFP] gi|187984341|gb|EDU49829.1| 4-nitrophenylphosphatase [Pyrenophora tritici-repentis Pt-1C-BFP]
  misc_feature (5)..(325): NCBI GI: 261360321 Blast Desc: 4-nitrophenylphosphatase [Verticillium albo-atrum VaMs.102]
  misc_feature (6)..(327): NCBI GI: 242822506 Blast Desc: 4-nitrophenylphosphatase [Talaromyces stipitatus ATCC 10500] gi|218712821|gb|EED12246.1| 4-nitrophenylphosphatase [Talaromyces stipitatus ATCC 10500]
  misc_feature (1)..(310): NCBI GI: 46124681 Blast Desc: FG06718.1 [Gibberella zeae PH-1]
  misc_feature (6)..(329): NCBI GI: 212546727 Blast Desc: 4-nitrophenylphosphatase [Penicillium marneffei ATCC 18224] gi|210065037|gb|EEA19132.1| 4-nitrophenylphosphatase [Penicillium marneffei ATCC 18224]
  misc_feature (18)..(324): SWISSPROT Homolog: EC 3.1.3.41 4-nitrophenylphosphatase
MGGQSKYLTGDSAAIDAFLDQFDMFLFDCDGVLWSGDHLFEGTVETLELLRSKGKILISTDALKILQLSLLNKPKGKKVVFVTNNSTKSRQDYQKKLTGMGIPSNIEEIFASAYSSAIYISRILKLPAPKNKVFVLGESGIETELRTENIPFIGGTDPALRRDITPEDFAGLADGSLLDPDVGIVLAGLDFHINYLKLSMAFQYLQRGAIFLATNLDSTLPMSHTFFPGAGSCSIPLVYMTGEKPTALGKPSQAMMDAIEGKFELNRTRTCMIGDRLDTDIQFGIQGKLGGTLAVLTGVSKKEQWEGGDAEFVPAYYVDRLSDLRGGSS

SEQ ID NO: 15735 - DNA, 1253 bp, Muscodor strobelii
  misc_feature: SGI EST ID NO. CUFF.37249.0
  misc_feature: Variant of the nucleotide sequence at SEQ ID NO 15733
cgaaaagcctcatgagcattgcaaacactccctaaattgcactcacattagcacgcgagataattcaatacgacagcattcacattcccattagtagctgttaccctttacaaatatagtcaagtcaccctaagatttaagacgacatgggcggacagtccaagtatctaactggcgactcagccgctatcgatgcatttctggatcaatttgatatgttcttgtttgactgcgatggcgtattatggtccggggatcatctctttgagggtaccgtagagaccttggaactattaagatccaaaggcaagaaggtcgtttttgttacaaacaactccaccaagtccaggcaagactatcagaagaagttgacgggtatgggaataccaagcaatatcgaggagatatttgcatcagcgtactcatccgcgatctacatatcgcggatcttgaagctcccagcgccgaagaacaaagtcttcgtgctcggggagagtggtatcgagactgaactgcgaactgagaacatcccgttcattgggggtacagatccagccctgcgccgagatataacaccagaagattttgcaggacttgccgacggatccctcctagatcccgatgttggtattgtgcttgctggtcttgactttcacattaactacctgaagctatccatggcattccagtacctgcaacgcggcgccatatttcttgccactaacctcgatagtacgctacctatgagtcacacattcttccctggcgcaggctcttgctctattcctcttgtttacatgacgggcgaaaaacctaccgccctaggaaagccctctcaggctatgatggacgcaatcgaagggaaatttgagctcaaccgtacgcgcacttgcatgattggggatcgtcttgacactgatattcagttcggaattcaaggaaagctcggtggcacacttgcagttctcaccggagtatctaaaaaggagcaatgggaaggcggagatgccgaattcgtccctgcgtactatgttgaccggctgagtgacctccgaggcgggagctcgtaaatgtctcacgaatcatgtacaatgatgagctagatccgtattctcgccatcaacggtcaaaggaggatctattttagcgcaagcacaactatagaactgggttagagagttagagacaccgtttctatagatagatcggctaaaaccccaatcgagaatcttccgtcacttacaatgccatca

SEQ ID NO: 15736 - DNA, 924 bp, Muscodor strobelii
  misc_feature: SGI cDNA ID NO. 565218
  misc_feature: Encodes the peptide sequence at SEQ ID NO 15737
atgggcggacagtccaagtatctaactggcgactcagccgctatcgatgcatttctggatcaatttgatatgttcttgtttgactgcgatggcgtattatggtccggggatcatctctttgagggtaccgtagagaccttggaactattaagatccaaaggcaagaaggtcgtttttgttacaaacaactccaccaagtccaggcaagactatcagaagaagttgacgggtatgggaataccaagcaatatcgaggagatatttgcatcagcgtactcatccgcgatctacatatcgcggatcttgaagctcccagcgccgaagaacaaagtcttcgtgctcggggagagtggtatcgagactgaactgcgaactgagaacatcccgttcattgggggtacagatccagccctgcgccgagatataacaccagaagattttgcaggacttgccgacggatccctcctagatcccgatgttggtattgtgcttgctggtcttgactttcacattaactacctgaagctatccatggcattccagtacctgcaacgcggcgccatatttcttgccactaacctcgatagtacgctacctatgagtcacacattcttccctggcgcaggctcttgctctattcctcttgtttacatgacgggcgaaaaacctaccgccctaggaaagccctctcaggctatgatggacgcaatcgaagggaaatttgagctcaaccgtacgcgcacttgcatgattggggatcgtcttgacactgatattcagttcggaattcaaggaaagctcggtggcacacttgcagttctcaccggagtatctaaaaaggagcaatgggaaggcggagatgccgaattcgtccctgcgtactatgttgaccggctgagtgacctccgaggcgggagctcgtaa

SEQ ID NO: 15737 - protein, 307 aa, Muscodor strobelii
  misc_feature: SGI Peptide ID NO. 565218
  misc_feature (22)..(275): Pfam Id: PF00702 Pfam Desc: haloacid dehalogenase-like hydrolase
  misc_feature (6)..(304): NCBI GI: 154290287 Blast Desc: BC1G_15715 [Botryotinia fuckeliana B05.10] gi|150847819|gb|EDN23012.1| BC1G_15715 [Botryotinia fuckeliana B05.10]
  misc_feature (6)..(302): NCBI GI: 171686686 Blast Desc: protein product [Podospora anserina] gi|170943304|emb|CAP68957.1| protein product [Podospora anserina]
  misc_feature (3)..(306): NCBI GI: 85083924 Blast Desc: 4-nitrophenylphosphatase [Neurospora crassa OR74A] gi|28918300|gb|EAA27976.1| 4-nitrophenylphosphatase [Neurospora crassa OR74A]
  misc_feature (4)..(307): NCBI GI: 116192161 Blast Desc: CHGG_05798 [Chaetomium globosum CBS 148.51] gi|88181711|gb|EAQ89179.1| CHGG_05798 [Chaetomium globosum CBS 148.51]
  misc_feature (6)..(304): NCBI GI: 156051564 Blast Desc: SS1G_07189 [Sclerotinia sclerotiorum 1980] gi|154704967|gb|EDO04706.1| SS1G_07189 [Sclerotinia sclerotiorum 1980]
  misc_feature (4)..(304): NCBI GI: 189201812 Blast Desc: 4-nitrophenylphosphatase [Pyrenophora tritici-repentis Pt-1C-BFP] gi|187984341|gb|EDU49829.1| 4-nitrophenylphosphatase [Pyrenophora tritici-repentis Pt-1C-BFP]
  misc_feature (5)..(303): NCBI GI: 261360321 Blast Desc: 4-nitrophenylphosphatase [Verticillium albo-atrum VaMs.102]
  misc_feature (6)..(305): NCBI GI: 242822506 Blast Desc: 4-nitrophenylphosphatase [Talaromyces stipitatus ATCC 10500] gi|218712821|gb|EED12246.1| 4-nitrophenylphosphatase [Talaromyces stipitatus ATCC 10500]
  misc_feature (1)..(288): NCBI GI: 46124681 Blast Desc: FG06718.1 [Gibberella zeae PH-1]
  misc_feature (6)..(307): NCBI GI: 212546727 Blast Desc: 4-nitrophenylphosphatase [Penicillium marneffei ATCC 18224] gi|210065037|gb|EEA19132.1| 4-nitrophenylphosphatase [Penicillium marneffei ATCC 18224]
  misc_feature (18)..(302): SWISSPROT Homolog: EC 3.1.3.41 4-nitrophenylphosphatase
MGGQSKYLTGDSAAIDAFLDQFDMFLFDCDGVLWSGDHLFEGTVETLELLRSKGKKVVFVTNNSTKSRQDYQKKLTGMGIPSNIEEIFASAYSSAIYISRILKLPAPKNKVFVLGESGIETELRTENIPFIGGTDPALRRDITPEDFAGLADGSLLDPDVGIVLAGLDFHINYLKLSMAFQYLQRGAIFLATNLDSTLPMSHTFFPGAGSCSIPLVYMTGEKPTALGKPSQAMMDAIEGKFELNRTRTCMIGDRLDTDIQFGIQGKLGGTLAVLTGVSKKEQWEGGDAEFVPAYYVDRLSDLRGGSS

SEQ ID NO: 15738 - DNA, 1253 bp, Muscodor strobelii; identical to SEQ ID NO: 15735
  misc_feature: SGI EST ID NO. CUFF.37249.0
  misc_feature: Variant of the nucleotide sequence at SEQ ID NO 15736

SEQ ID NO: 15739 - DNA, 786 bp, Muscodor strobelii
  misc_feature: SGI cDNA ID NO. 565219
  misc_feature: Encodes the peptide sequence at SEQ ID NO 15740
atgcctggcaagcagccaaatctgttcgcgttcgacgaagtcagcgcccttgcgccagctttgcgatcctacatcgtgtcgtgccagaacgccggcctcacacgtcacgacgtcttcaaggtcggcgtgtctggaggttcgctccccaagacgctcgcttcggccctgcttgccgagcccagatcagatgatgatgtggttcagtttggcaagtgggagatcttctttgccgacgagagagctgtgcccctagaccacgacgacagcaactacgcgctcgttaagaaggagctcctcgacaagatccccgccgccttgggccagcccaccgtgcaccccatcgacgtccaacacctcaacgacacacaggagctggccgaccaatacgagaagacgctggtcgcctccttcgccaagggcgactctgtcaagttgcccatcttcgacctgctcctgctgggctctggccccgacggccacacctgcagcttattcccgggccacccgcttctccgcgagacagacgcctgggtcgcccccatcgaagactcgcccaagccgccacctaagcgcatcaccctcaccctccccgtcgtcacacatgcagtaaagatcgcctttgtcgccacgggggccggcaagaaggagattatgaaggagatattcgaggctggaaacggcctaccttgtgccctcgtcaacgaggctgccggcgaccgtgtcagctggttcacggacactgccgcagttgaaggcgtacagtttcctcgccgtgggtttctatga

SEQ ID NO: 15740 - protein, 261 aa, Muscodor strobelii
  misc_feature: SGI Peptide ID NO. 565219
  misc_feature (1)..(261): NCBI GI: 156051562 Blast Desc: SS1G_07188 [Sclerotinia sclerotiorum 1980] gi|154704966|gb|EDO04705.1| SS1G_07188 [Sclerotinia sclerotiorum 1980]
  misc_feature (3)..(260): NCBI GI: 116192163 Blast Desc: conserved [Chaetomium globosum CBS 148.51] gi|88181712|gb|EAQ89180.1| conserved [Chaetomium globosum CBS 148.51]
  misc_feature (3)..(260): NCBI GI: 39969075 Blast Desc: MGG_10148 [Magnaporthe grisea 70-15] gi|145021295|gb|EDK05424.1| MGG_10148 [Magnaporthe grisea 70-15]
  misc_feature (1)..(261): NCBI GI: 256733179 Blast Desc: [Nectria haematococca mpVI 77-13-4]
  misc_feature (3)..(260): NCBI GI: 85083919 Blast Desc: NCU00087 [Neurospora crassa OR74A] gi|28918299|gb|EAA27975.1| NCU00087 [Neurospora crassa OR74A]
  misc_feature (1)..(261): NCBI GI: 46125307 Blast Desc: FG07031.1 [Gibberella zeae PH-1]
  misc_feature (1)..(261): NCBI GI: 145229265 Blast Desc: An01g05150 [Aspergillus niger] gi|134055043|emb|CAK37049.1| protein product [Aspergillus niger]
  misc_feature (1)..(261): NCBI GI: 146322386 Blast Desc: 6-phosphogluconolactonase [Aspergillus fumigatus Af293] gi|129556991|gb|EBA27329.1| 6-phosphogluconolactonase, [Aspergillus fumigatus Af293]
  misc_feature (1)..(261): NCBI GI: 159130526 Blast Desc: 6-phosphogluconolactonase, [Aspergillus fumigatus A1163]
  misc_feature (5)..(261): NCBI GI: 239609427 Blast Desc: 6-phosphogluconolactonase [Ajellomyces dermatitidis ER-3]
  misc_feature (7)..(254): SWISSPROT Homolog: EC 3.1.1.31 6-phosphogluconolactonase
MPGKQPNLFAFDEVSALAPALRSYIVSCQNAGLTRHDVFKVGVSGGSLPKTLASALLAEPRSDDDVVQFGKWEIFFADERAVPLDHDDSNYALVKKELLDKIPAALGQPTVHPIDVQHLNDTQELADQYEKTLVASFAKGDSVKLPIFDLLLLGSGPDGHTCSLFPGHPLLRETDAWVAPIEDSPKPPPKRITLTLPVVTHAVKIAFVATGAGKKEIMKEIFEAGNGLPCALVNEAAGDRVSWFTDTAAVEGVQFPRRGFL

SEQ ID NO: 15741 - DNA, 2821 bp, Muscodor strobelii
  misc_feature: SGI EST ID NO. CUFF.37354.0
  misc_feature: Variant of the nucleotide sequence at SEQ ID NO 15739
ggttgatgatgtaaagcttggtacttgtgatgcagcaggtgacagaaaccccaaatacctactgcctcaaatcaataagcaatgctgctctcacctcagcaggactgcacgccgttgccacagctgtacagtagtagtagtgttcattcgcggatatgctcatttctgtggtcagatagacgatcacaaccccgccagaccaattaattgacacacttctctcacaccaccgtcaccactaaactttttgcccctcttccttccttccttctgcacacttgccccgccatcgaagctcccctaggtaacgatttcaagccttgcgagacacactagtgtacatcgtgcctttctaatttcgtaacgccttgtgcacactgagtccgtccctcctactatcaaactcatattgattcgtctctgcaaagaccgcagtcgcgatgcctggcaagcagccaaatctgttcgcgttcgacgaagtcagcgcccttgcgccagctttgcgatcctacatcgtgtcgtgccagaacgccggcctcacacgtcacgacgtcttcaaggtcggcgtgtctggaggttcgctccccaagacgctcgcttcggccctgcttgccgagcccagatcagatgatgatgtggttcagtttggcaagtgggagatcttctttgccgacgagagagctgtgcccctagaccacgacgacagcaactacgcgctcgttaagaaggagctcctcgacaagatccccgccgccttgggccagcccaccgtgcaccccatcgacgtccaacacctcaacgacacacaggagctggccgaccaatacgagaagacgctggtcgcctccttcgccaagggcgactctgtcaagttgcccatcttcgacctgctcctgctgggctctggccccgacggccacacctgcagcttattcccgggccacccgcttctccgcgagacagacgcctgggtcgcccccatcgaagactcgcccaagccgccacctaagcgcatcaccctcaccctccccgtcgtcacacatgcagtaaagatcgcctttgtcgccacgggggccggcaagaaggagattatgaaggagatattcgaggctggaaacggcctaccttgtgccctcgtcaacgaggctgccggcgaccgtgtcagctggttcacggacactgccgcagttgaaggcgtacagtttcctcgccgtgggtttctatgagccatgagcacagcgactccagcttaagtcggcaatgggagactcgttccaacaattattcgccactcgatcggctcagtagacaccaccaatcccgacaatctcgattacatgataagctatggggtgctggatatgtctgtagtctgccagtcagatgcaccatcgctcttcattttttatcttccccattacaccgcctgaatggacctcatcggccatgttcatgatgcattacgaaatcgcgacaatcagagatagatttgtttatgctttgcccctcgttttgtaactacgccgaagttcctcattaatttgcaggaccacgcgacgattacatcaggacgacagtgatggtgccgctaccgtctcgtccttaacatcatgcgcggataccgcgtacaagcactgcaaagtgcgcaataagatagagcaaaatgaaaatatcaccaaatgactttaagttgacaataaatgctttccctatctgaacatgttgaaatgctcgtaaaccttaaagtgaatgcctgcgatcaatctctcaaaactgacgagttcttgcctggcatcgtgaacacgcatagaataacagcacactccactctccctgcaaaacaaagtgtgtcctcttattcttctattcccggcgtagtaagtcaccctttcccaatgagctatgcttctctaagctatattctaccttttctcagtcaagcagcgactgagctacttctaacaaacaggactttccatgggacagaaactctcctcaacaagtacttaatctaatagcgaaaggagagaatggaaaagaacataattctctgtcagtagcaatatcatgtgacttcatactacgctcttcgcctttatctaaatggggcgaagtggtcacatgttccagtagtcatggaagccaccagtcgcattgataatatcacctttcgagcttcttctctcgtatgaaaagcgacgatgcaacggcaagtactgcaaagcctgcagcgggtgcaaatgcccactgcgtagccacagcatagcatttgcggacgataacagccacatcaggatcgaggcgtctgatataatcaagacttaatcgaacaccctcctcgatttcttgagcacgatccgcgccgcctagttcacgagctagattgacacgcagcatttgctgcagtgtcgccgttgtaacgcctattcctaggttcgtaccaagagtcctaaagagatacgagcaagcgattacgactggcatatcggctggtgttgcattggcaatcatcgcaaccagacccgttgtcaatgctagtgggtgtcaggtccaaatgcgtcgaggcttccaggaggatgagcttgacctacagatactgactccaaattgaagtatagagaggccgacggcaacaacaagtgcagatcggaatcccgctccgaccgccattggtatgccaccgagaaacatgatcacatagccgcacactgtgagccagtagtagcgaccaacacgctttatcatgaaacctccgctgagtgatcccgcaagaccacagaaagtcgaaggcactatataatctcgattagtaacataactg

SEQ ID NO: 15742 - DNA, 486 bp, Muscodor strobelii
  misc_feature: SGI cDNA ID NO. 565220
  misc_feature: Encodes the peptide sequence at SEQ ID NO 15743
atgtcagagatgggcgctgccccccatcagacggccgacgagcccgaggatgccgctgatctcgccggcggcgaccacgatggcgatgcgccttcgcctgtcgcatcttcggccccgcctgtcgcgccctctcttccgcctgtcgcatctgtctcatctgccataccccgacttcgacgattgcttccaaatagcggtatgaagtatgcgaaagacaaccgactcatagaacgtaatgatggcaaggacgcaaagatcatgaaggctttgcagaaagctggagtgcccatgacaagacagggcgtacgagcagcgattgagtatatgttccgcaaagccatacgcactgtcctcaagtatcgcagacgtaacgttgagttgttcagatgtctcgacgtgttgagaggacagcttggatgggaggatatgacacattgggatttctgcgacttttttgtcgatctcgtcgtggcacggcgtcgctag

SEQ ID NO: 15743 - protein, 161 aa, Muscodor strobelii
  misc_feature: SGI Peptide ID NO. 565220
MSEMGAAPHQTADEPEDAADLAGGDHDGDAPSPVASSAPPVAPSLPPVASVSSAIPRLRRLLPNSGMKYAKDNRLIERNDGKDAKIMKALQKAGVPMTRQGVRAAIEYMFRKAIRTVLKYRRRNVELFRCLDVLRGQLGWEDMTHWDFCDFFVDLVVARRR

SEQ ID NO: 15744 - DNA, 1174 bp, Muscodor strobelii
  misc_feature: SGI EST ID NO. CUFF.37263.0
  misc_feature: Variant of the nucleotide sequence at SEQ ID NO 15742
ccacagccaatgacaatgtcagagatgggcgctgccccccatcagacggccgacgagcccgaggatgccgctgatctcgccggcggcgaccacgatggcgatgcgccttcgcctgtcgcatcttcggccccgcctgtcgcgccctctcttccgcctgtcgcatctgtctcatctgccataccccgacttcgacgattgcttccaaatagcggtatgaagtatgcgaaagacaaccgactcatagaacgtaatgatggcaaggacgcaaagatcatgaaggctttgcagaaagctggagtgcccatgacaagacagggcgtacgagcagcgattgagtatatgttccgcaaagccatacgcactgtcctcaagtatcgcagacgtaacgttgagttgttcagatgtctcgacgtgttgagaggacagcttggatgggaggatatgacacattgggatttctgcgacttttttgtcgatctcgtcgtggcacggcgtcgctaggagctgacgccacattttcaagatctgacgcactctgtcggcatggtccaggcgattgtggacttccgacttgccgttcgcgacggcataccaaatcacaatgcctcacggtcctaccaggaaagtgagataccgtcctggatcgcagacagatactcccgggagtaccaccgcatgcaccatgtcatcttggtcccattgggattccgtcttccccaatggcccggtatttctcgagtatcacgacagatcactgtcccccatcgtcctggtccgctccggacagctccttgaagctcccgatctcccgtcagtgtctccaagaatacatgtacgtgccgaaaagatgaatactgtaactagtcgatcaagttccagctaacgaagctctctagtccgacatcgagtatactgtgctttttctttaacttctttgtcgcaccgttcgccaaccctcttctcgtatgggcttctggatcgaggtagttgacaagaaagatgttggtatattggacgaaagctactatgtgaggaatattgagagaggcgtccactgggaggactgcgatgtgggtcgaggataggacattgattggtttctttaaagtgtaatttagtatacagatgtcaacaggatgtcctgtctttcttttgtaaacaactaagatcctcg

SEQ ID NO: 15745 - DNA, 2538 bp, Muscodor strobelii
  misc_feature: SGI cDNA ID NO. 565221
  misc_feature: Encodes the peptide sequence at SEQ ID NO 15746
atggattccgaagacggggagttgttcgtgaagcaactggccgccttcgtgcgcacgcacgagaaagccctcgccaatgccttgcagatgcgaagacagcctcgacatggccctagccagagcgtttcgtcgatccaaacagtacctcagtctccaacatcgatccccgaacgcccctcaacctctgcctcgacatcgagcgccctagccaacgccctgtccctcggccccctcacttttgcatcccacagttccaagtcgacacgcctcgctctcacaccccaccatctcttctatctcctgtctcggttcgaggacataggcgtcaatgtaggaccgatgaaagtgcgcttggagaacctccatgacagcaccacatccgccaattatgtctcgttcctgagcccctcccaacgcaccaagagccgtggctcagatgcaggctcgataagatctgtctccagcatccgaagtgtcatgtctgggatgtctgccttgtggaacagcttcggcattggctctagcatagccgctgcccgtaacgagaagcagaaggctcttgctcaggcagatctgaagtacctctattctgccttcaccaagattccatgtctgcgcctcgctccagattggcgtgcaaagctgatccgtggctacgaggaattcccctttgattccgccgtccctctctacgtgttcaagaatcttcaagcactcgagatcagtggcattgacttccgccaattctttggttgggatcgtctagccgaacagattcgttctttgacggtcaagaatgcgagcatcgaagatgtagcagacattctgatcgacatcgtcctggacgacatggacaagaggcgccgtcgctcagccaaagcacagcagacacccactggagcctatgcgcacgcttcaagccccaagcgtagccccacggcgtcagagctgcataggcatagcctcatgcctcctactcccgaccgtcggaacacagttgcagacttagccgttgggtcgatagggaacgagtcggcagagagcttgtcgcctagtggcagccggcgagcctctgtagctccgatcgacacagaagagtcaggttcccctgttcagtcgggacggccgcgtagtcattccccaagccgcccgatcagctctcggcaccactctgcgaataccagaggtgttcataaagtcaagcgctccggctcaggcagttcacactccagcctgtccgactcgtggcacaacccaagagggagtgcttccaatctacttgccatgggaattcttcctccatcaaagtggcgatttctcaagcatctgagtctcgctgacaacagtttgacagcagtgtcggcgacaagcttgacacctctatctcttaccctcaactcccttgatctgtcctcaaacctcttcactcagattccagatagcttggcaactctgacagctctccgagcgctcaatctctcacattgtatgattgattctctacattccctgctgcggaatcccctgccagctatcagcgctctcaaccttcgtgccaatcgactttcatctattgctggaatcgaaaagctctatcccctagagcgacttgatctgcgcgataatcgcatgacagaccctatggaattggcacgactcactggcatcccagagcttcgtgaaatttgggtggaagggaacccatttacacggactcatcgggattatcgtgtcactattttcaatctgttccgacagactcctgggttcaccgaagatattatcattgacgcttcaggtccaacttatgcggaaaagcgatatctcgtgcaacgagttgaagtaccagccgttcccgtcgttaagcctccagttccggaggtacccgctgtcgacgtgagcaaaccagcagttgttaatgatggtccaagacagccggcagtcttacgcaaagagcgaccggctcgcccaaccccgaaagcggttacaagcgaaatcaatacatcttccactaggcgacgtcggacgccaaagcgtcgcatcgttgacttagcgattaaggatcgcgacggtgctacgtcgaccgagccagttggttctgacgacgttgcttccacagacaacgctacccctgtctccccaccagattcttaccgtatatctcatcctcctgagaaacaagacctacctcccaaagttctaggagaactaaccccgtcaaccacactcaatccaccggaagtgccacgaatcgacactaattgtgttctgaagccgacggtacagccaggcaaagcagagccgcgcaaaaactggaacgacatggaagactgggatgccagtggagaaatctaccggcaaaagatcgaggccctcagagacaaagttggcaatggttatctaacggctctgaacgaagaaaactgggagccttctcctgttttcatagcaacggacttcagtccaccctcgtcgatccacggcagtccggcgacatcccgtatgcccagcgcccaggctattcagccactcagctaa

SEQ ID NO: 15746 - protein, 845 aa, Muscodor strobelii
  misc_feature: SGI Peptide ID NO. 565221
  misc_feature (1)..(841): NCBI GI: 116192079 Blast Desc: CHGG_05757 [Chaetomium globosum CBS 148.51] gi|88181670|gb|EAQ89138.1| CHGG_05757 [Chaetomium globosum CBS 148.51]
  misc_feature (1)..(842): NCBI GI: 85078371 Blast Desc: NCU00046 [Neurospora crassa OR74A] gi|28917207|gb|EAA26921.1| conserved [Neurospora crassa OR74A]
  misc_feature (1)..(844): NCBI GI: 171686762 Blast Desc: protein product [Podospora anserina] gi|170943342|emb|CAP68995.1| protein product [Podospora anserina]
  misc_feature (1)..(842): NCBI GI: 256733250 Blast Desc: [Nectria haematococca mpVI 77-13-4]
  misc_feature (1)..(844): NCBI GI: 39969177 Blast Desc: MGG_10199 [Magnaporthe grisea 70-15] gi|145021253|gb|EDK05382.1| MGG_10199 [Magnaporthe grisea 70-15]
  misc_feature (1)..(824): NCBI GI: 46125707 Blast Desc: FG07231.1 [Gibberella zeae PH-1]
  misc_feature (114)..(810): NCBI GI: 156037716 Blast Desc: SS1G_12572 [Sclerotinia sclerotiorum 1980] gi|154697980|gb|EDN97718.1| SS1G_12572 [Sclerotinia sclerotiorum 1980]
  misc_feature (1)..(841): NCBI GI: 261188348 Blast Desc: leucine Rich Repeat domain-containing protein [Ajellomyces dermatitidis SLH14081] gi|239593189|gb|EEQ75770.1| leucine Rich Repeat domain-containing protein [Ajellomyces
  misc_feature (1)..(841): NCBI GI: 239609333 Blast Desc: leucine Rich Repeat domain-containing protein [Ajellomyces dermatitidis ER-3]
  misc_feature (1)..(810): NCBI GI: 169594890 Blast Desc: SNOG_00175 [Phaeosphaeria nodorum SN15] gi|160700963|gb|EAT91670.2| SNOG_00175 [Phaeosphaeria nodorum SN15]
MDSEDGELFVKQLAAFVRTHEKALANALQMRRQPRHGPSQSVSSIQTVPQSPTSIPERPSTSASTSSALANALSLGPLTFASHSSKSTRLALTPHHLFYLLSRFEDIGVNVGPMKVRLENLHDSTTSANYVSFLSPSQRTKSRGSDAGSIRSVSSIRSVMSGMSALWNSFGIGSSIAAARNEKQKALAQADLKYLYSAFTKIPCLRLAPDWRAKLIRGYEEFPFDSAVPLYVFKNLQALEISGIDFRQFFGWDRLAEQIRSLTVKNASIEDVADILIDIVLDDMDKRRRRSAKAQQTPTGAYAHASSPKRSPTASELHRHSLMPPTPDRRNTVADLAVGSIGNESAESLSPSGSRRASVAPIDTEESGSPVQSGRPRSHSPSRPISSRHHSANTRGVHKVKRSGSGSSHSSLSDSWHNPRGSASNLLAMGILPPSKWRFLKHLSLADNSLTAVSATSLTPLSLTLNSLDLSSNLFTQIPDSLATLTALRALNLSHCMIDSLHSLLRNPLPAISALNLRANRLSSIAGIEKLYPLERLDLRDNRMTDPMELARLTGIPELREIWVEGNPFTRTHRDYRVTIFNLFRQTPGFTEDIIIDASGPTYAEKRYLVQRVEVPAVPVVKPPVPEVPAVDVSKPAVVNDGPRQPAVLRKERPARPTPKAVTSEINTSSTRRRRTPKRRIVDLAIKDRDGATSTEPVGSDDVASTDNATPVSPPDSYRISHPPEKQDLPPKVLGELTPSTTLNPPEVPRIDTNCVLKPTVQPGKAEPRKNWNDMEDWDASGEIYRQKIEALRDKVGNGYLTALNEENWEPSPVFIATDFSPPSSIHGSPATSRMPSAQAIQPLS

SEQ ID NO: 15747 - DNA, 3458 bp, Muscodor strobelii
  misc_feature: SGI EST ID NO. CUFF.37358.1
  misc_feature: Variant of the nucleotide sequence at SEQ ID NO 15745
ctcctatcttctctggtgttcaacacgacgagatactcccaccacgtcgtcgtgggtgttgagagcgattcgtcggggtttggctcagcctcgtctttgctcggttttctttggtcaagagctgctcctctctctccccctcacgctctcttgctccagtctcgccagtctggcttgtgcctgcgcgcctacgacgcagctgcaaaacaattttctatcggtggtcgactagacgcaacccaggttccttgggtccaaagtctagtattctagcgtacggaaggaaattcgcatagcagcaatcgaaatatttctgctctggaggtcctcgtgagaatttgtctcttgatcggtccggcgtatctcctaccttacccctcgacttcctccatgtatacatcagtttgaagtatggattccgaagacggggagttgttcgtgaagcaactggccgccttcgtgcgcacgcacgagaaagccctcgccaatgccttgcagatgcgaagacagcctcgacatggccctagccagagcgtttcgtcgatccaaacagtacctcagtctccaacatcgatccccgaacgcccctcaacctctgcctcgacatcgagcgccctagccaacgccctgtccctcggccccctcacttttgcatcccacagttccaagtcgacacgcctcgctctcacaccccaccatctcttctatctcctgtctcggttcgaggacataggcgtcaatgtaggaccgatgaaagtgcgcttggagaacctccatgacagcaccacatccgccaattatgtctcgttcctgagcccctcccaacgcaccaagagccgtggctcagatgcaggctcgataagatctgtctccagcatccgaagtgtcatgtctgggatgtctgccttgtggaacagcttcggcattggctctagcatagccgctgcccgtaacgagaagcagaaggctcttgctcaggcagatctgaagtacctctattctgccttcaccaagattccatgtctgcgcctcgctccagattggcgtgcaaagctgatccgtggctacgaggaattcccctttgattccgccgtccctctctacgtgttcaagaatcttcaagcactcgagatcagtggcattgacttccgccaattctttggttgggatcgtctagccgaacagattcgttctttgacggtcaagaatgcgagcatcgaagatgtagcagacattctgatcgacatcgtcctggacgacatggacaagaggcgccgtcgctcagccaaagcacagcagacacccactggagcctatgcgcacgcttcaagccccaagcgtagccccacggcgtcagagctgcataggcatagcctcatgcctcctactcccgaccgtcggaacacagttgcagacttagccgttgggtcgatagggaacgagtcggcagagagcttgtcgcctagtggcagccggcgagcctctgtagctccgatcgacacagaagagtcaggttcccctgttcagtcgggacggccgcgtagtcattccccaagccgcccgatcagctctcggcaccactctgcgaataccagaggtgttcataaagtcaagcgctccggctcaggcagttcacactccagcctgtccgactcgtggcacaacccaagagggagtgcttccaatctacttgccatgggaattcttcctccatcaaagtggcgatttctcaagcatctgagtctcgctgacaacagtttgacagcagtgtcggcgacaagcttgacacctctatctcttaccctcaactcccttgatctgtcctcaaacctcttcactcagattccagatagcttggcaactctgacagctctccgagcgctcaatctctcacattgtatgattgattctctacattccctgctgcggaatcccctgccagctatcagcgctctcaaccttcgtgccaatcgactttcatctattgctggaatcgaaaagctctatcccctagagcgacttgatctgcgcgataatcgcatgacagaccctatggaattggcacgactcactggcatcccagagcttcgtgaaatttgggtggaagggaacccatttacacggactcatcgggattatcgtgtcactattttcaatctgttccgacagactcctgggttcaccgaagatattatcattgacgcttcaggtccaacttatgcggaaaagcgatatctcgtgcaacgagttgaagtaccagccgttcccgtcgttaagcctccagttccggaggtacccgctgtcgacgtgagcaaaccagcagttgttaatgatggtccaagacagccggcagtcttacgcaaagagcgaccggctcgcccaaccccgaaagcggttacaagcgaaatcaatacatcttccactaggcgacgtcggacgccaaagcgtcgcatcgttgacttagcgattaaggatcgcgacggtgctacgtcgaccgagccagttggttctgacgacgttgcttccacagacaacgctacccctgtctccccaccagattcttaccgtatatctcatcctcctgagaaacaagacctacctcccaaagttctaggagaactaaccccgtcaaccacactcaatccaccggaagtgccacgaatcgacactaattgtgttctgaagccgacggtacagccaggcaaagcagagccgcgcaaaaactggaacgacatggaagactgggatgccagtggagaaatctaccggcaaaagatcgaggccctcagagacaaagttggcaatggttatctaacggctctgaacgaagaaaactgggagccttctcctgttttcatagcaacggacttcagtccaccctcgtcgatccacggcagtccggcgacatcccgtatgcccagcgcccaggctattcagccactcagctaatgacctgcagcaagcgctgaccccgtcatatatctttgtacggttaggatgacgcggagcgcagctcgagctatggcctgagttgttcatcttgatgcagtggtagatacttgaccatcttcccattgttgcatcgcattattttcgtcatgtttgattatttgttggagcatagcgtttggcgttacaaaggaggggatggcatcatcgattcaacgtatcccaacgtatacccgtattgtatgtctataggaaggatagcctcgatgctgagcattcttaggcgggaccccgcctcatgttcagtttgtggcatatggataactgaggtgtgtgggaagcaggcgttcttttgcatttacatggtctcatagctagagagatgttcgcctctcaggcggagagcaaaagaaaatgatacactctgtatattgccgtccctcaaaggcgtgaatatgtccatactcgaagtgttcttttctcacagaggtgagactagtgatcgtgga

SEQ ID NO: 15748 - DNA, 3567 bp, Muscodor strobelii
  misc_feature: SGI cDNA ID NO. 565222
  misc_feature: Encodes the peptide sequence at SEQ ID NO 15749
atggctcccagccccagaacccctcgcacgtcgacctcgacccgccagcgctcccgtccctccgagtctgccagtggtgtgcgccgccctcgcaccgccagcatagtcgccgccacagagccgccccccaagcgacgtcgctacgccccggccagtaccgccagcagcaccaggtcccagaacaagcatgacgacgaccacatggactccacagccccggctaccaccaccacccgctctcgtccccgccccagcctctctcacgcgcacaacaacgcaccctccccctctctcttacctccccgacgcgagcgcagcacccgcatccggacctccacgcgtatcgaccacgacgacgagatgcagatcagctctgctgctgccgttgccgcggctgtccagcagagcgaaggctacaagccccgagaggagagaggctgggaagagttccatcccaacctagatatcgatgccaccttaatcctcttccatgcagacgacgttgacggtactgccaaatctaaagtcggcactccatcgggcaagtccatgctgggagacttcaacgatatgggcagtccttccaaggaccccagtcatgcatcgacttcttacgcgcctggctctcagccaaacggtaccttacaagcttctgacagcatctcggcgaccactcccacgagacagcgaagtgttcgacagtctctatacgcaacgcgcccaaccgcccagcccgctctcaacaccccgactccgcttcccattcacggtcagaacaaccgagagagactagatctcaaactgccttcttacaggaagacggaccgtattctacacttcgagagcaaagagtttggccagctgcgctacgtcgataaggccatgatgaacattggctaccaagagagcgataactacattcgtcccgagcgccgtctgatcaaggccggcgacgggagcatcgaggaggaagcggaatatgcagccgccattaaggctgacggcgagccgggacgtcaacctcctaacatcttgggacgtgtcgagtacgatatggacgagcacgatgatgagtggcttgtcgaggagaacgtgaaccggcacaccagcaactggaatgatgtgacgcgcgaggtctttgagatcgcagtcaccaaaatcgagaaagagtggtatggtatagagaagaggatcccgaaaccaaacccgaaaccgccacagacacatagaccccgatcgagctcagctgcggccgttaatggcgagccacagcccggcgaggagcaggatagtaagtgcgcgatatgcgacgacggagactgcgaaaacacgaacgccatcgtcttttgtgatggctgcgatctggcagtccaccaagaatgctacggtgttcccttcatccctgagggacagtggctttgccgtaaatgccagcttattggacgtggcgtcccgacttgcatcttctgcccaaactcggatggcgctttcaaacagacctatgactccaaatgggctcatctaatctgtgcaatgtggattccagaggttaccatcggcaaccccacctttcaggagccgttcatggacgtagacaaggtccccaagagccgatggaagctgacctgctatatctgcaaccagcagatgggtgcctgcattcagtgtggtaacaaatcctgctatcaagcttttcatgtgacttgcgctcgtcgcgctcgtctgttcctacgaatgaagaacagctccggcgccctcgatgtcatggacggtagtaccaatctgaaagcgctatgtgacaagcattgtccatccgaatacgccaaggagaacgatgtagttcgtgctactaagagagccaaaaagttctacaagaagaccatgagtggtcgaatatgggccaacagccaggcgaaagctttggccctggcagctacgcataaacacgcagtcactgagcatccgccggacgagtcgcagatgacaggagcaaagctttccgccgccatgggggacaagaaaggccaaccaggaaagtcgatctggaaattaccgtctggtgccccggttatcccacaagcagtcttcgagattgtcgaagcctctctgcaacggttccccttcctcaagcgcaaggagtttgtcagtaatgtctgtaggtattggaccctcaagcgagagatgcgtagaggggccgctcttctgaagagacttcagctccaaatggagaccttctcgtctatggagttaacccgtcgcaattttgcggctatgggtcccagtggtaaagcgcggctaacaaggaggattgactttgctgagaaactcctgaaagacatggatcaattgaaatcgctatcccaggagaccgtggaccgggaacaaaacaagcttgatgcggctgaaatagaacgagattttgttgacacatgctacttccccatacacaaacttcttcctccgataattgaaaagaccatcactctcgataagaacttattccaggacggtctcacagcgctctcgacacaaatagaccgcagattttacacgatcacgctggcctttgctcgcgacctttgcgacgttatcaacaaagggattaacacggaaccagacatgcctgctgaagcaccggcaaatcatctccctggtccccccatgcctgcaaaatgcgactactcagactatcgagatcgtaagaagctcggcaagaggattctcaaggctgttcaaccacagcttgaagcggctctgcgtctagaatccgaggcaaaacataactctttcgatgacctgaagcaagagctggaagccatgattgaaacgagtcttgaatatcgtccgaagacttatgtggaagatatgaacccagaaggcgaaccaagtcaggatgtcatcatggttgattcgtccacgacatcaattcccctagccggatccaaggatagtgatccaaatattgaagatgaaaatgacgacgttgccatggtggatgcggaggacgtccaggctaccacggacggtaatattgaggttgacacgtccaatcttggaactggcggagccgaagtcacacctactcctaccgctgtagtcgcggaggcgctgaacgaagctgcagagacgaaaccggatgtgtcttccgcaagcggcatggattctatgaatacgccaccagccacaaatggctacatatcggctccacctacaacgcaagtggctccccctacgcctccgcagtccaacggtagtctcggtggacggccacctacggacgcgctcaccgagggaggcgtggtctggtacctgcaagagtttgaacccgagggcacatccgcagttcaggagcagtggaacggaagagacgcggtgcgtagccttagtgaggagctcactgagattgatgacgatgagctcaaggggctcagcgtcgaagtcaacgagagcattacggcctcacccgcagacagtgccgccccagccggcgatggcgccaacgcagcaagccctacgaagaaggcaagcaagtctaagaaacgtaaggtgacctatcgcagacggtga

SEQ ID NO: 15749 - protein, 1188 aa, Muscodor strobelii
  misc_feature: SGI Peptide ID NO. 565222
  misc_feature (432)..(480): Pfam Id: PF00628 Pfam Desc: PHD-finger
  misc_feature (432)..(478): Pfam Id: PF00628 Pfam Desc: PHD-finger
  misc_feature (1)..(1182): NCBI GI: 171686764 Blast Desc: protein product [Podospora anserina] gi|170943343|emb|CAP68996.1| protein product [Podospora anserina]
  misc_feature (1)..(1160): NCBI GI: 39969171 Blast Desc: MGG_10196 [Magnaporthe grisea 70-15] gi|145021257|gb|EDK05386.1| MGG_10196 [Magnaporthe grisea 70-15]
  misc_feature (1)..(1188): NCBI GI: 46125709 Blast Desc: FG07232.1 [Gibberella zeae PH-1]
  misc_feature (1)..(1177): NCBI GI: 85078366 Blast Desc: NCU00045 [Neurospora crassa OR74A] gi|28917206|gb|EAA26920.1| conserved [Neurospora crassa OR74A]
  misc_feature (39)..(1153): NCBI GI: 256733249 Blast Desc: [Nectria haematococca mpVI 77-13-4]
  misc_feature (1)..(1188): NCBI GI: 261360220 Blast Desc: peregrin [Verticillium albo-atrum VaMs.102]
  misc_feature (87)..(995): NCBI GI: 116192077 Blast Desc: CHGG_05756 [Chaetomium globosum CBS 148.51] gi|88181669|gb|EAQ89137.1| CHGG_05756 [Chaetomium globosum CBS 148.51]
  misc_feature (136)..(1182): NCBI GI: 156051452 Blast Desc: SS1G_07133 [Sclerotinia sclerotiorum 1980] gi|154704911|gb|EDO04650.1| SS1G_07133 [Sclerotinia sclerotiorum 1980]
  misc_feature (1)..(1187): NCBI GI: 239609511 Blast Desc: PHD finger domain-containing protein [Ajellomyces dermatitidis ER-3]
  misc_feature (1)..(1187): NCBI GI: 261196576 Blast Desc: PHD finger domain-containing protein [Ajellomyces dermatitidis SLH14081] gi|239595936|gb|EEQ78517.1| PHD finger domain-containing protein [Ajellomyces dermatitidis SLH14081]
MAPSPRTPRTSTSTRQRSRPSESASGVRRPRTASIVAATEPPPKRRRYAPASTASSTRSQNKHDDDHMDSTAPATTTTRSRPRPSLSHAHNNAPSPSLLPPRRERSTRIRTSTRIDHDDEMQISSAAAVAAAVQQSEGYKPREERGWEEFHPNLDIDATLILFHADDVDGTAKSKVGTPSGKSMLGDFNDMGSPSKDPSHASTSYAPGSQPNGTLQASDSISATTPTRQRSVRQSLYATRPTAQPALNTPTPLPIHGQNNRERLDLKLPSYRKTDRILHFESKEFGQLRYVDKAMMNIGYQESDNYIRPERRLIKAGDGSIEEEAEYAAAIKADGEPGRQPPNILGRVEYDMDEHDDEWLVEENVNRHTSNWNDVTREVFEIAVTKIEKEWYGIEKRIPKPNPKPPQTHRPRSSSAAAVNGEPQPGEEQDSKCAICDDGDCENTNAIVFCDGCDLAVHQECYGVPFIPEGQWLCRKCQLIGRGVPTCIFCPNSDGAFKQTYDSKWAHLICAMWIPEVTIGNPTFQEPFMDVDKVPKSRWKLTCYICNQQMGACIQCGNKSCYQAFHVTCARRARLFLRMKNSSGALDVMDGSTNLKALCDKHCPSEYAKENDVVRATKRAKKFYKKTMSGRIWANSQAKALALAATHKHAVTEHPPDESQMTGAKLSAAMGDKKGQPGKSIWKLPSGAPVIPQAVFEIVEASLQRFPFLKRKEFVSNVCRYWTLKREMRRGAALLKRLQLQMETFSSMELTRRNFAAMGPSGKARLTRRIDFAEKLLKDMDQLKSLSQETVDREQNKLDAAEIERDFVDTCYFPIHKLLPPIIEKTITLDKNLFQDGLTALSTQIDRRFYTITLAFARDLCDVINKGINTEPDMPAEAPANHLPGPPMPAKCDYSDYRDRKKLGKRILKAVQPQLEAALRLESEAKHNSFDDLKQELEAMIETSLEYRPKTYVEDMNPEGEPSQDVIMVDSSTTSIPLAGSKDSDPNIEDENDDVAMVDAEDVQATTDGNIEVDTSNLGTGGAEVTPTPTAVVAEALNEAAETKPDVSSASGMDSMNTPPATNGYISAPPTTQVAPPTPPQSNGSLGGRPPTDALTEGGVVWYLQEFEPEGTSAVQEQWNGRDAVRSLSEELTEIDDDELKGLSVEVNESITASPADSAAPAGDGANAASPTKKASKSKKRKVTYRRR

SEQ ID NO: 15750 - DNA, 4439 bp, Muscodor strobelii
  misc_feature: SGI EST ID NO. CUFF.37302.0
  misc_feature: Variant of the nucleotide sequence at SEQ ID NO 15748
tgcttggcagcagacgcggtggagacgtcacgtccagatcgagacaggtggggaagaccacttacataatcaggagccgaactgaggctgtggcgccgcagcagcttcacgcctttgcaacttcagtccacgtcgtgctgcaccgcgtccgcactctcgcattccaacgccagcctggacacaacacctgctcccatcgactgctgccgccctgccgtcgcaccatccccagagcaactggcaattcgctttgcacctcgtcaaatgcctctttgcagctgttgtccgccggtcgagcccctcgcatcccttgcgacgcgctagatcccccctccagatatcccacatatctgccccagatctggcctcaacttcacattccagtccgcccacagccgtggcgcccttgcacaccatggctcccagccccagaacccctcgcacgtcgacctcgacccgccagcgctcccgtccctccgagtctgccagtggtgtgcgccgccctcgcaccgccagcatagtcgccgccacagagccgccccccaagcgacgtcgctacgccccggccagtaccgccagcagcaccaggtcccagaacaagcatgacgacgaccacatggactccacagccccggctaccaccaccacccgctctcgtccccgccccagcctctctcacgcgcacaacaacgcaccctccccctctctcttacctccccgacgcgagcgcagcacccgcatccggacctccacgcgtatcgaccacgacgacgagatgcagatcagctctgctgctgccgttgccgcggctgtccagcagagcgaaggctacaagccccgagaggagagaggctgggaagagttccatcccaacctagatatcgatgccaccttaatcctcttccatgcagacgacgttgacggtactgccaaatctaaagtcggcactccatcgggcaagtccatgctgggagacttcaacgatatgggcagtccttccaaggaccccagtcatgcatcgacttcttacgcgcctggctctcagccaaacggtaccttacaagcttctgacagcatctcggcgaccactcccacgagacagcgaagtgttcgacagtctctatacgcaacgcgcccaaccgcccagcccgctctcaacaccccgactccgcttcccattcacggtcagaacaaccgagagagactagatctcaaactgccttcttacaggaagacggaccgtattctacacttcgagagcaaagagtttggccagctgcgctacgtcgataaggccatgatgaacattggctaccaagagagcgataactacattcgtcccgagcgccgtctgatcaaggccggcgacgggagcatcgaggaggaagcggaatatgcagccgccattaaggctgacggcgagccgggacgtcaacctcctaacatcttgggacgtgtcgagtacgatatggacgagcacgatgatgagtggcttgtcgaggagaacgtgaaccggcacaccagcaactggaatgatgtgacgcgcgaggtctttgagatcgcagtcaccaaaatcgagaaagagtggtatggtatagagaagaggatcccgaaaccaaacccgaaaccgccacagacacatagaccccgatcgagctcagctgcggccgttaatggcgagccacagcccggcgaggagcaggatagtaagtgcgcgatatgcgacgacggagactgcgaaaacacgaacgccatcgtcttttgtgatggctgcgatctggcagtccaccaagaatgctacggtgttcccttcatccctgagggacagtggctttgccgtaaatgccagcttattggacgtggcgtcccgacttgcatcttctgcccaaactcggatggcgctttcaaacagacctatgactccaaatgggctcatctaatctgtgcaatgtggattccagaggttaccatcggcaaccccacctttcaggagccgttcatggacgtagacaaggtccccaagagccgatggaagctgacctgctatatctgcaaccagcagatgggtgcctgcattcagtgtggtaacaaatcctgctatcaagcttttcatgtgacttgcgctcgtcgcgctcgtctgttcctacgaatgaagaacagctccggcgccctcgatgtcatggacggtagtaccaatctgaaagcgctatgtgacaagcattgtccatccgaatacgccaaggagaacgatgtagttcgtgctactaagagagccaaaaagttctacaagaagaccatgagtggtcgaatatgggccaacagccaggcgaaagctttggccctggcagctacgcataaacacgcagtcactgagcatccgccggacgagtcgcagatgacaggagcaaagctttccgccgccatgggggacaagaaaggccaaccaggaaagtcgatctggaaattaccgtctggtgccccggttatcccacaagcagtcttcgagattgtcgaagcctctctgcaacggttccccttcctcaagcgcaaggagtttgtcagtaatgtctgtaggtattggaccctcaagcgagagatgcgtagaggggccgctcttctgaagagacttcagctccaaatggagaccttctcgtctatggagttaacccgtcgcaattttgcggctatgggtcccagtggtaaagcgcggctaacaaggaggattgactttgctgagaaactcctgaaagacatggatcaattgaaatcgctatcccaggagaccgtggaccgggaacaaaacaagcttgatgcggctgaaatagaacgagattttgttgacacatgctacttccccatacacaaacttcttcctccgataattgaaaagaccatcactctcgataagaacttattccaggacggtctcacagcgctctcgacacaaatagaccgcagattttacacgatcacgctggcctttgctcgcgacctttgcgacgttatcaacaaagggattaacacggaaccagacatgcctgctgaagcaccggcaaatcatctccctggtccccccatgcctgcaaaatgcgactactcagactatcgagatcgtaagaagctcggcaagaggattctcaaggctgttcaaccacagcttgaagcggctctgcgtctagaatccgaggcaaaacataactctttcgatgacctgaagcaagagctggaagccatgattgaaacgagtcttgaatatcgtccgaagacttatgtggaagatatgaacccagaaggcgaaccaagtcaggatgtcatcatggttgattcgtccacgacatcaattcccctagccggatccaaggatagtgatccaaatattgaagatgaaaatgacgacgttgccatggtggatgcggaggacgtccaggctaccacggacggtaatattgaggttgacacgtccaatcttggaactggcggagccgaagtcacacctactcctaccgctgtagtcgcggaggcgctgaacgaagctgcagagacgaaaccggatgtgtcttccgcaagcggcatggattctatgaatacgccaccagccacaaatggctacatatcggctccacctacaacgcaagtggctccccctacgcctccgcagtccaacggtagtctcggtggacggccacctacggacgcgctcaccgagggaggcgtggtctggtacctgcaagagtttgaacccgagggcacatccgcagttcaggagcagtggaacggaagagacgcggtgcgtagccttagtgaggagctcactgagattgatgacgatgagctcaaggggctcagcgtcgaagtcaacgagagcattacggcctcacccgcagacagtgccgccccagccggcgatggcgccaacgcagcaagccctacgaagaaggcaagcaagtctaagaaacgtaaggtgacctatcgcagacggtgattgctagacaggacatatttggcgacagaggatcgtcggcgttcttgtactatagtttcgtgaggcgctatagccagtgctttgcgccttgtatctttatttctgatcaaatgctatacatttgatttcgcctggagcaatccggccgtgggcttaacctgcagacagagcttcgtttggcgttccgggagcatcggctatatgaggcttgctttttaaatcgctgatatggaagttgcttcgccgatttttttttttcctgatcgccgagcgggatatatgggcaatggacggcgttgtttgaggagttgctttaaaggtggtacttctgtatggaagcaatgggctcgccgttgcacttagctgtttcaaggcgccagacctgggtgtacaatggcgtttcactacgataatcacagagcttaggttcatagcaaatatatgggtttaaggaagt

SEQ ID NO: 15751 - DNA, 1365 bp, Muscodor strobelii
  misc_feature: SGI cDNA ID NO. 565223
  misc_feature: Encodes the peptide sequence at SEQ ID NO 15752
atgccccccaagaaaatttcgtttcgaagactgtggtctgggaaaaaggatagggccaatgaatacgagcagattggcgattcgtccactcgtcgtgaaaacaatctcgacgagcttgccaaagctgcctcaaagctcaacataaaagctgaggatgttgttattgccgtaatgggcgtcaccgggactggaaagagctcgtttatcggtaagctgacaggctttggagttaaggttggtcacgatcttgcttcatgcacctatgatatcggtatccatgctttcgagtatgatggccgcaagaggatctatttgatagacacgcccggcttcgatgatggcatgtataaaaacatcctgcgcgatgctgcgtattccaaccatatcaagttggccgggatcatctacctgcatcgcattacagacaaccgaatgactggctctgcggctaagaatctacagatgttccaacttctgtgtggtagcagtagcatgtccaacgtagtgcttgcgacaacgatgtgggataagctaaaggatcccaagagcagagaagacggccggaaactcgaaaaacaactccgggaaatctactggaagcccatgctactagacggcagcaagacgttcaggcattctgccacccgtgagtcggcgctgcagatcattgatcacatcatggatcttcgctcagatgccgtcctcgacatacagaggcagattgtggtcgagaagcgaacacttgatcagacacctgcgggacaagaagtacagcgggaactcttcgaacagaagcgccgccacgagaaggacctcaaagaagttcaacaaagcctcgaccttgccttgcagcaaggcaaaaaggagcttgccgatgccctgtcgaagctggaaaaagagaaacaggagcagttgcaatcatccgctaaggaaactaaagcactcaaggctgattttgagaagctacgacaagagcaggaggctaagtacgccgagaccattaagaaacttgaagccgagaacaaggtcatgagagaagaggaggagaggaggtctaaggaaatgagcgccatattacaatcacagaagaacttcgagacctccatcaccaatttgtcagaaagtcgtcgcaagcaacatgacgagtggaggggagacttccaaaatatggttaaggatgcatcagaccatgggaaaatccaggctgagctgcgaaagcgcgaaattgctgtcgccaatagatctaccgccgtatcttttctgcaaacaattgtcggtggcggtattgctgctgcaggggcttacacagggaatacaatgttaattgcagctgggacagcagttgttggtcgagcgtggggttga

SEQ ID NO: 15752 - protein, 454 aa, Muscodor strobelii
  misc_feature: SGI Peptide ID NO. 565223
  misc_feature (28)..(340): NCBI GI: 116206562 Blast Desc: CHGG_02574 [Chaetomium globosum CBS 148.51] gi|88183171|gb|EAQ90639.1| CHGG_02574 [Chaetomium globosum CBS 148.51]
  misc_feature (52)..(447): NCBI GI: 256728210 Blast Desc: NECHADRAFT_54135 [Nectria haematococca mpVI 77-13-4]
  misc_feature (49)..(352): NCBI GI: 256735682 Blast Desc: NECHADRAFT_75781 [Nectria haematococca mpVI 77-13-4]
  misc_feature (48)..(331): NCBI GI: 116206564 Blast Desc: CHGG_02575 [Chaetomium globosum CBS 148.51] gi|88183172|gb|EAQ90640.1| CHGG_02575 [Chaetomium globosum CBS 148.51]
  misc_feature (49)..(392): NCBI GI: 189198139 Blast Desc: conserved [Pyrenophora tritici-repentis Pt-1C-BFP] gi|187981355|gb|EDU47981.1| conserved [Pyrenophora tritici-repentis Pt-1C-BFP]
  misc_feature (44)..(325): NCBI GI: 226289324 Blast Desc: conserved [Paracoccidioides brasiliensis Pb18]
  misc_feature (47)..(346): NCBI GI: 189196544 Blast Desc: conserved [Pyrenophora tritici-repentis Pt-1C-BFP] gi|187980489|gb|EDU47115.1| conserved [Pyrenophora tritici-repentis Pt-1C-BFP]
  misc_feature (2)..(330): NCBI GI: 169769100 Blast Desc: [Aspergillus oryzae RIB40] gi|238501534|ref|XP_002382001.1| conserved [Aspergillus flavus NRRL3357] gi|83766878|dbj|BAE57018.1| protein product oryzae]
  misc_feature (44)..(325): NCBI GI: 225682139 Blast Desc: conserved [Paracoccidioides brasiliensis Pb03]
  misc_feature (52)..(396): NCBI GI: 169864282 Blast Desc: CC1G_12375 [Coprinopsis cinerea okayama7#130] gi|116500172|gb|EAU83067.1| CC1G_12375 [Coprinopsis cinerea okayama7#130]
MPPKKISFRRLWSGKKDRANEYEQIGDSSTRRENNLDELAKAASKLNIKAEDVVIAVMGVTGTGKSSFIGKLTGFGVKVGHDLASCTYDIGIHAFEYDGRKRIYLIDTPGFDDGMYKNILRDAAYSNHIKLAGIIYLHRITDNRMTGSAAKNLQMFQLLCGSSSMSNVVLATTMWDKLKDPKSREDGRKLEKQLREIYWKPMLLDGSKTFRHSATRESALQIIDHIMDLRSDAVLDIQRQIVVEKRTLDQTPAGQEVQRELFEQKRRHEKDLKEVQQSLDLALQQGKKELADALSKLEKEKQEQLQSSAKETKALKADFEKLRQEQEAKYAETIKKLEAENKVMREEEERRSKEMSAILQSQKNFETSITNLSESRRKQHDEWRGDFQNMVKDASDHGKIQAELRKREIAVANRSTAVSFLQTIVGGGIAAAGAYTGNTMLIAAGTAVVGRAWG

SEQ ID NO: 15753 - DNA, 975 bp, Muscodor strobelii
  misc_feature: SGI cDNA ID NO. 565224
  misc_feature: Encodes the peptide sequence at SEQ ID NO 15754
atggcagaccagcacgacgtggatctcgactccatcatcgatcgtcttctcgaagtccgcggcagccggcccggcaagcaggtccagctgctcgagaccgagattcgatacctctgcaccaaggccagagagatcttcatcagccagccaatcctgctcgagttggaggctcctatcaagatctgtggtgatattcacggacagtactacgatctcctgcgtctcttcgaatatggcggctttccccctgaggccaactaccttttcctaggcgactatgtcgatcgtggaaagcagtccctcgagaccatctgcctcctgctcgcctacaagatcaagtaccccgagaacttcttcgtgctaagaggcaaccacgaatgcgcctccatcaaccgcatctacggcttctacgacgaatgcaagcgccgctacaacatcaagttatggaagacgttcaccgactgcttcaactgcttgcccattgctgccatcatcgatgagaagatcttcaccatgcacggtggtttgagtcccgacctcaactccatggagcagattcgccgtgtcatgcgacccactgacatccccgactgcggtctgctgtgtgacctgctgtggtccgaccccgacaaggatatcaccggttggagcgagaacgaccgtggtgtctccttcacctttggacccgacgtcgtttctcgattcttgcagaagcatgacatggatctgatctgccgcgcccaccaggtcgtggaggatggctacgaattcttctcgaagcgtcaacttgtcactcttttcagcgcacccaactactgcggagaattcgacaatgcaggagccatgatgagcgtcgacgagagtctcctgtgctctttccagattctcaagcccgctgagaagaaacaaaagtacgtgtatggcggcctcggaggcagcagttccgcagctcccagaaagcaatccaaaccctaa

SEQ ID NO: 15754 - protein, 324 aa, Muscodor strobelii
  misc_feature: SGI Peptide ID NO. 565224
  misc_feature (57)..(252): Pfam Id: PF00149 Pfam Desc: Calcineurin-like phosphoesterase
  misc_feature (1)..(323): NCBI GI: 171686802 Blast Desc: protein product [Podospora anserina] gi|170943362|emb|CAP69015.1| protein product [Podospora anserina]
  misc_feature (1)..(323): NCBI GI: 116192073 Blast Desc: serine/threonine protein phosphatase PP1 [Chaetomium globosum CBS 148.51] gi|88181667|gb|EAQ89135.1| serine/threonine protein phosphatase PP1 [Chaetomium globosum CBS 148.51]
  misc_feature (1)..(323): NCBI GI: 240111136 Blast Desc: serine/threonine protein phosphatase PP1, [Coccidioides posadasii C735 delta SOWgp]
  misc_feature (1)..(323): NCBI GI: 58339149 Blast Desc: protein phosphatase type 1b [Coccidioides posadasii] gi|58339153|gb|AAW70559.1| protein phosphatase type 1b [Coccidioides posadasii]
  misc_feature (1)..(323): NCBI GI: 238839918 Blast Desc: serine/threonine-protein phosphatase PP1 [Microsporum canis CBS 113480]
  misc_feature (1)..(323): NCBI GI: 258565867 Blast Desc: serine/threonine-protein phosphatase PP1 [Uncinocarpus reesii 1704] gi|237907379|gb|EEP81780.1| serine/threonine-protein phosphatase PP1 [Uncinocarpus reesii 1704]
  misc_feature (1)..(323): NCBI GI: 226282296 Blast Desc: serine/threonine-protein phosphatase PP1 [Paracoccidioides brasiliensis Pb01]
  misc_feature (1)..(324): NCBI GI: 39969169 Blast Desc: serine/threonine protein phosphatase type 1 [Magnaporthe grisea 70-15] gi|145021258|gb|EDK05387.1| serine/threonine protein phosphatase type 1 [Magnaporthe grisea
  misc_feature (1)..(323): NCBI GI: 261188346 Blast Desc: serine/threonine-protein phosphatase [Ajellomyces dermatitidis SLH14081] gi|239593188|gb|EEQ75769.1| serine/threonine-protein phosphatase [Ajellomyces dermatitidis
  misc_feature (1)..(323): NCBI GI: 67516257 Blast Desc: PP1_EMENI SERINE/THREONINE PROTEIN PHOSPHATASE PP1 [Aspergillus nidulans FGSC A4] gi|130707|sp|P20654.1|PP1_EMENI RecName: Full=Serine/threonine-protein phosphatase PP1 1 PROTEIN
  misc_feature (1)..(323): SWISSPROT Homolog: EC 3.1.3.16 Phosphoprotein phosphatase
MADQHDVDLDSIIDRLLEVRGSRPGKQVQLLETEIRYLCTKAREIFISQPILLELEAPIKICGDIHGQYYDLLRLFEYGGFPPEANYLFLGDYVDRGKQSLETICLLLAYKIKYPENFFVLRGNHECASINRIYGFYDECKRRYNIKLWKTFTDCFNCLPIAAIIDEKIFTMHGGLSPDLNSMEQIRRVMRPTDIPDCGLLCDLLWSDPDKDITGWSENDRGVSFTFGPDVVSRFLQKHDMDLICRAHQVVEDGYEFFSKRQLVTLFSAPNYCGEFDNAGAMMSVDESLLCSFQILKPAEKKQKYVYGGLGGSSSAAPRKQSKP

SEQ ID NO: 15755 - DNA, 2394 bp, Muscodor strobelii
  misc_feature: SGI EST ID NO. CUFF.37521.0
  misc_feature: Variant of the nucleotide sequence at SEQ ID NO 15753
gagacttgcagccaacagggcagtcccgtccccatctacgcagccgccctcgttccctctccctctccgtgagaccccgcgaaacaccaacggcgatccagctctcctgtctctgcatcatccctcctgtcgttttcctgtcgccatcaacttttttgttgcactcctgtctacgttcatcgtttgtgcatgcgagtctgtgtccctgcgctgttgacctcgactgtccgacacgtctagagtaagagtgaagaagccgaaaaaatcttttgtctattgttttgagcgccagcggagtctccctgcgcctgcctcaaccccccgtcccctgcctcagccaccggcacactgctccgtagacaccacacgtgcaaacaacgacgacgacgaagccgacgacagacaccatctgtccatcgcgcctcctaaaagacgaacagtgtaggcaatttctcagtctcctcacttatcctctccgcgcctctgctcccatcctcgccgcccgtcctttgacctctgccctgctcgacgtccacccgtaacggccacctggtcgagtgcgaagcaacatcattaccatcaccttgccctcgcgccatcccacgctgacacggcatctctgcagtgctatcttctctacgatatagcattctttgccgcattctgtacattgcgacctgcgcgattgccctgtccatcgcgagcactcgacggccgacacggcatcattcaaccaccccggcgacgatccattgtgccctcgtgcatcccatcttgatctgcctgcgcgcacgcctcatccggtctgcctcgacgagctgcgtaattgaagcacgagcgtgggcgccgacgcttcctctgccgctgagatcacttcatccccaggaagtgcatcagaatctgatatcgggctttactaccaaagtttcccacccgacatccccctcctcgctgcctttatctcagtaattctcgacttccccgcagccctcctggctggtaaggcacctctgtacgatggcagaccagcacgacgtggatctcgactccatcatcgatcgtcttctcgaagtccgcggcagccggcccggcaagcaggtccagctgctcgagaccgagattcgatacctctgcaccaaggccagagagatcttcatcagccagccaatcctgctcgagttggaggctcctatcaagatctgtggtgatattcacggacagtactacgatctcctgcgtctcttcgaatatggcggctttccccctgaggccaactaccttttcctaggcgactatgtcgatcgtggaaagcagtccctcgagaccatctgcctcctgctcgcctacaagatcaagtaccccgagaacttcttcgtgctaagaggcaaccacgaatgcgcctccatcaaccgcatctacggcttctacgacgaatgcaagcgccgctacaacatcaagttatggaagacgttcaccgactgcttcaactgcttgcccattgctgccatcatcgatgagaagatcttcaccatgcacggtggtttgagtcccgacctcaactccatggagcagattcgccgtgtcatgcgacccactgacatccccgactgcggtctgctgtgtgacctgctgtggtccgaccccgacaaggatatcaccggttggagcgagaacgaccgtggtgtctccttcacctttggacccgacgtcgtttctcgattcttgcagaagcatgacatggatctgatctgccgcgcccaccaggtcgtggaggatggctacgaattcttctcgaagcgtcaacttgtcactcttttcagcgcacccaactactgcggagaattcgacaatgcaggagccatgatgagcgtcgacgagagtctcctgtgctctttccagattctcaagcccgctgagaagaaacaaaagttcggccgccgatgagcttctcccacagcattttgcccgatctccagctccgccaccggctccttcaactgacgacggtctcctacgcgacgacgaccaacgagctaacttgcagtacgatgatccctaccgctacgcgcaccctgatttacgccgacgacttgcgtaccaccgacgatggccgatgatgcataagaggggtaacgaccgtgtcaatgatgaacgatggtgttataacaagaaaagaaataaaatccagttttcttcatttggaatgggcgtagagcgtcttctgtctgtcggccggctatgcagcctgcccgtggtgaaggatgtgaaaaaggagaacgctctagacggttaattgtttcactccccctacttcgtaggctcttatgaatcccacacacatggcttccttctttctaaaggtaccaatagcacactgaatgacttgacttcgta

SEQ ID NO: 15756 - DNA, 489 bp, Muscodor strobelii
  misc_feature: SGI cDNA ID NO. 565225
  misc_feature: Encodes the peptide sequence at SEQ ID NO 15757
atggcagacagcaactcatctcagatgtcagcctcatgtcaagcccctctgcctcgtgtcactattcggttttgcactcagtgtaaatggatgttgagagctgcttatttcgcacaagagctcctctccacattctcgacatcattgggcgaggtagcattacagccggcaactggtgggatattcgttgttgagatattctactctcccgccacatcttcatatcaaactccgatcacgccgcagagccgcgtactctgggaccgaaaagcagatggcggattcccggagactaaggagttgaagcggcgagttcgcgatgtgattgagccaggaagagacttggggcatgtggatcgggattatcctaaagggggccaggcacaacagagcagtggagaggagaaccaagacaaaatcaaggcggctgggaggaaggatatagatacgggtacaagggctggagaggtttgtgaggattgtaagtga

SEQ ID NO: 15757 - protein, 162 aa, Muscodor strobelii
  misc_feature: SGI Peptide ID NO. 565225
  misc_feature (9)..(123): Pfam Id: PF05169 Pfam Desc: Selenoprotein W-related family
  misc_feature (17)..(124): NCBI GI: 39969167 Blast Desc: MGG_10194 [Magnaporthe grisea 70-15] gi|145021259|gb|EDK05388.1| MGG_10194 [Magnaporthe grisea 70-15]
  misc_feature (14)..(162): NCBI GI: 46125713 Blast Desc: FG07234.1 [Gibberella zeae PH-1]
  misc_feature (6)..(132): NCBI GI: 261360222 Blast Desc: selenoprotein W family protein [Verticillium albo-atrum VaMs.102]
  misc_feature (12)..(127): NCBI GI: 116192071 Blast Desc: CHGG_05753 [Chaetomium globosum CBS 148.51] gi|88181666|gb|EAQ89134.1| CHGG_05753 [Chaetomium globosum CBS 148.51]
  misc_feature (17)..(162): NCBI GI: 256732795 Blast Desc: NECHADRAFT_79352 [Nectria haematococca mpVI 77-13-4]
  misc_feature (10)..(138): NCBI GI: 240111164 Blast Desc: CPC735_069990 [Coccidioides posadasii C735 delta SOWgp]
  misc_feature (11)..(162): NCBI GI: 169770965 Blast Desc: [Aspergillus oryzae RIB40] gi|238486546|ref|XP_002374511.1| selenoprotein domain protein [Aspergillus flavus NRRL3357] gi|83767811|dbj|BAE57950.1| protein
  misc_feature (1)..(162): NCBI GI: 238843527 Blast Desc: selenoprotein domain-containing protein [Microsporum canis CBS 113480]
  misc_feature (17)..(162): NCBI GI: 115388481 Blast Desc: ATEG_02568 [Aspergillus terreus NIH2624] gi|114195830|gb|EAU37530.1| ATEG_02568 [Aspergillus terreus NIH2624]
  misc_feature (3)..(161): NCBI GI: 259486345 Blast Desc: TPA: selenoprotein domain protein (AFU_orthologue; AFUA_1G05220) [Aspergillus nidulans FGSC A4]
MADSNSSQMSASCQAPLPRVTIRFCTQCKWMLRAAYFAQELLSTFSTSLGEVALQPATGGIFVVEIFYSPATSSYQTPITPQSRVLWDRKADGGFPETKELKRRVRDVIEPGRDLGHVDRDYPKGGQAQQSSGEENQDKIKAAGRKDIDTGTRAGEVCEDCK

SEQ ID NO: 15758 - DNA, 1099 bp, Muscodor strobelii
  misc_feature: SGI EST ID NO. CUFF.37343.0
  misc_feature: Variant of the nucleotide sequence at SEQ ID NO 15756
cgaggattaaacatcctgatgtaagacatatatttacaacaaacttaagagtcaccaatgagttgatatctattgtctgaatcaaccaatatccagagtagagtcgacaaattaaaaaaagctgacacaacctcggttccgccgcaccccgctcaaacatggcagacagcaactcatctcagatgtcagcctcatgtcaagcccctctgcctcgtgtcactattcggttttgcactcagtgtaaatggatgttgagagctgcttatttcgcacaagagctcctctccacattctcgacatcattgggcgaggtagcattacagccggcaactggtgggatattcgttgttgagatattctactctcccgccacatcttcatatcaaactccgatcacgccgcagagccgcgtactctgggaccgaaaagcagatggcggattcccggagactaaggagttgaagcggcgagttcgcgatgtgattgagccaggaagagacttggggcatgtggatcgggattatcctaaagggggccaggcacaacagagcagtggagaggagaaccaagacaaaatcaaggcggctgggaggaaggatatagatacgggtacaagggctggagaggtttgtgaggattgtaagtgatatggcagaacccgatttcaggatgggcgcgcgaagtcctatagcacagtcgagctatcgagacagacacgtatcaactgtgtgcttcatttaaatatgggcacatagttacgtcggtagacattactatgtgatcatctaacggagaattccatctgcgaagaaatacgaattttggcgagtatcttagaaatgcgtggattgggtgacgatgatttttttcggcgacaagatgccttaatgattgagacaaaaattcacatttactagaagactaggttgcccccctattatgtttaactagaatgcatgatcggatgctcagggaggcgagccagtaggcttttgtatatactgagcgatgactaaatgccgggcttcatatttctatcttaagtttgatttggttttccgccgttcctcgcaaggcacagactgaggtttcatgccgg

SEQ ID NO: 15759 - DNA, 282 bp, Muscodor strobelii
  misc_feature: SGI cDNA ID NO. 565226
  misc_feature: Encodes the peptide sequence at SEQ ID NO 15760
atgcccaactacacttccagagatgtcggcgatccgtcgcagatcaagaagaacaagcagtcaatggccgaccttaagttgcggcgcttgacagagctgaacagcaggctgcgggaggatctggagagagaacgtattcccgtgtcacaagcagctaagagcataattgcatactgcaacagcacgagggactacatggtaccgtccgtatggggtgccgtaccaaagggcgaggatccctacgcccctcagcagagcggcggctgctgcgtaatcatgtag

SEQ ID NO: 15760 - protein, 93 aa, Muscodor strobelii
  misc_feature: SGI Peptide ID NO. 565226
  misc_feature (27)..(83): Pfam Id: PF00631 Pfam Desc: GGL domain
  misc_feature (27)..(59): Pfam Id: PF00631 Pfam Desc: GGL domain
  misc_feature (1)..(93): NCBI GI: 46125715 Blast Desc: FG07235.1 [Gibberella zeae PH-1] gi|216408347|gb|ACJ72865.1| G protein gamma subunit [Gibberella moniliformis]
  misc_feature (1)..(93): NCBI GI: 145614320 Blast Desc: MGG_10193 [Magnaporthe grisea 70-15] gi|86611487|gb|ABD14415.1| G-protein gamma subunit [Magnaporthe grisea] gi|145021260|gb|EDK05389.1| MGG_10193 [Magnaporthe grisea
  misc_feature (1)..(93): NCBI GI: 261360223 Blast Desc: guanine nucleotide-binding protein subunit gamma [Verticillium albo-atrum VaMs.102]
  misc_feature (1)..(93): NCBI GI: 171686812 Blast Desc: protein product [Podospora anserina] gi|170943367|emb|CAP69020.1| protein product [Podospora anserina]
  misc_feature (1)..(93): NCBI GI: 254265836 Blast Desc: G protein gamma subunit [Acremonium chrysogenum]
  misc_feature (1)..(93): NCBI GI: 164428776 Blast Desc: G-protein gamma subunit [Neurospora crassa OR74A] gi|161789045|sp|Q7RWT0.2|GBG_NEUCR RecName: Full=Guanine nucleotide-binding protein subunit gamma G protein gamma subunit
  misc_feature (1)..(93): NCBI GI: 116192069 Blast Desc: guanine nucleotide-binding protein gamma subunit [Chaetomium globosum CBS 148.51] gi|88181665|gb|EAQ89133.1| guanine nucleotide-binding protein gamma subunit [Chaetomium CBS
  misc_feature (1)..(93): NCBI GI: 154291022 Blast Desc: BC1G_15399 [Botryotinia fuckeliana B05.10] gi|150847128|gb|EDN22321.1| BC1G_15399 [Botryotinia fuckeliana B05.10]
  misc_feature (1)..(93): NCBI GI: 156037706 Blast Desc: guanine nucleotide-binding protein gamma subunit [Sclerotinia sclerotiorum 1980] gi|154697975|gb|EDN97713.1| guanine nucleotide-binding protein gamma subunit [Sclerotinia
  misc_feature (1)..(93): NCBI GI: 242803069 Blast Desc: G-protein complex gamma subunit GpgA [Talaromyces stipitatus ATCC 10500] gi|218717444|gb|EED16865.1| G-protein complex gamma subunit GpgA [Talaromyces stipitatus ATCC 10500]
MPNYTSRDVGDPSQIKKNKQSMADLKLRRLTELNSRLREDLERERIPVSQAAKSIIAYCNSTRDYMVPSVWGAVPKGEDPYAPQQSGGCCVIM

SEQ ID NO: 15761 - DNA, 1104 bp, Muscodor strobelii
  misc_feature: SGI EST ID NO. CUFF.37516.0
  misc_feature: Variant of the nucleotide sequence at SEQ ID NO 15759
atccgcccgggctcatttcccattctctcttctactgtcaccctatccgacgacgacaatccaccacggttccgtgatctgttcacgcgttgcgccctttctgcagtcgatcctcggtgccttcgagctatctctgctgcccgtcgcatggcgagcttcatcatctgaacgcgcaatatccccagtgctatcagagacaccaacgcttctatcgacgactctcagcgcaccactcctttctccattcaatctccactcaacgatcaacgcaccatatcttgaatggccaagatgcccaactacacttccagagatgtcggcgatccgtcgcagatcaagaagaacaagcagtcaatggccgaccttaagttgcggcgcttgacagagctgaacagcaggctgcgggaggatctggagagagaacgtattcccgtgtcacaagcagctaagagcataattgcatactgcaacagcacgagggactacatggtaccgtccgtatggggtgccgtaccaaagggcgaggatccctacgcccctcagcagagcggcggctgctgcgtaatcatgtagggggcggcagctccaagatagcccgggccatcgagatccgggtgggtgagcaaacgtgctccacggacggaccactgcgacaatgatgttgaagagaccagactccttggaaacccagcttcacgacgagagaacatgggttcgccagtctgctatccgccattctgcatactccgcgacggatgaaaaggaaaagcaggacatgggagaagaaagggcagaaagggaaagaaaaaaggagaaattttaatcgatgcaaaaaagctacagtgcacagttccgacaatcgacacactgagggcacattttacgaccatcaacggcttccatgtttcatgctcaggcgctgccaggtccgacagttgcaactaagaagacgaggggaatgaggggtggagtcttcggcatgtactaattattcgcttacgacatgtattctgttgttcagtttcctttgtcccgactatcgtcttcgacgatatagatatcgcttttttaagatatcccatttcaagttcattttacaccgtc

SEQ ID NO: 15762 - DNA, 3075 bp, Muscodor strobelii
  misc_feature: SGI cDNA ID NO. 565227
  misc_feature: Reduced expression when VOC is produced
  misc_feature: Encodes the peptide sequence at SEQ ID NO 15763
atgccgccgcctccgcaccagaagccggagaacgtgctgaagcgcgcacacgagctgatcggtgtcaaccagacgcccgccgccctcaccctcctgcacgaccacatcacgtccaagcgctcccgcaatgtccccatcgcgtccctcgagcccgttatgctcctgctcgtcgagctgtccgtcgagcagaagaagggcaagctagctaaggacgcactctactcgtacaagaacatcgctcagaacacaaacatcgccaccatcgagctggtcctcaagaagttcatcgagcttgccgccgagaaagtcaccgccgcccagaagaaggccgacgaggtccaggagtccctcgaggccaccactaccaccaatgtcgacgatctcgaggccaccgagacgcccgagtctatccttctcgccaccgtctccggcgagcagtcccgagaccgcaccgagcgcgccgtcgtcaccccctggctcaagttcctgtgggaagcctaccgcaccgtcctcgatatcttgcgtaacaatgccaggctcgaacttctctaccagagcacggccatgcaggccttcgacttctgtctcaagtaccagcgcaagaccgagttccgccgcctttgcgagctcctccgcaaccatgttcagaccgccgccaagtattctagtcagatgcacgccatcaacctgaacgacccagacacactgcagcgacatcttgagactcgtttccaacagctcaatgtcgctgtagagctcgagctgtggcaggaggctttccgaagtgttgaggatatccacactctccttaacctcagcaagcgcccgcccaagaacatcatgatggccaactactacgagaaactcaccaggatcttcctagtcggcgagaactaccttttccatgctgccgcgtggtctcgatactacaacctactccgccagtcagccgtcctcgtcgcgtctggccagggcaagaagtctgacaacccttctgcgactgaggccgatctccagaaggctgcatcctttgtcctgctatccgctctctccatccctgtcatcagcacaaccagatcccgcggcgccatggtagacttcgatgaggctcgcaagaataagaactcccgcctcactcacttgttaggcatgtccgccgctcccactcgcgctgtcctcttccgcgatgctcactccaagtcgctcttgagtcgcgcgcgccccgagatccgcgatctttacatattctcgaagttgacttccaccctctatccatctgccagaagatctctcctatccttaccaagattggcactgactccgagatggagaaaaagcctagccaaattccctgaacccttccagatcacacgcggaaccattgaaaagttcatcatgaacggaaacaagaagggcgatctctccatccgcatggatcatgccacgggcgtcctcaatttcgacaaagatgttttcgcctcttcaaaacctgttcatgctggttcagctgcaggttccgcggaaagtcagaccggaacagtccagagactgcagagcacaccgtctgagattgttcgctcgcagctttcgcgactcgctacaaccctccacaccacttgcttctacatagatcctactttcaggcaggcacagaaagatgcgcgtgatgccgctctggcgcgagctaaggccggcgccgaccaagagcagcgtgacaccctcgcacgaaaggttatcattgagaagcgcaaggcagaagcatccgagctgcaagccaagcgagacaaagagaaggccaggcaaaagcgacttcaagaacaagctttggcagaggccgaagaacgtcgtctcgcacaggaacagaaggagcgcgaggagaagcgtctcaaagacgaacgggatcgcgttcgtaaggaagagctcaagaaacagatcgccgatctcaagctgggtgccggtacagttgatattgatgtcgaaaatctcaatgatattgatattcgagccatgaagcttgctcagctcgagcgtgagaagaacgatatcaaggaaagacttcgtgttactggaaagcgtatcgatcatctcgagcgtgctttcagaaaggaggaagtcaagaaactcggcgaagactatgcggcacagcgagatcgcgaccaggctgcttacgagaagacgaaggaagagacccttgcagagtccaaagaaaaacacaaagagagcgttgagctcaaacatcgtcttacccgtctcatgccacattacgagtcctacagaaagtctctccacgaccgtcgtcgtgatgaatttgagacacgccaacgggctgctgagcgtgagctggagaagcagattgccgctcgcaagaaggaatatcgggaacgcaaactacgggagaaacgtgagaaggaagagaaggaacgagcactgagagaggccgaagaacgtgcccagagagaaaaggaagagcaggagaggcgtgcagagcagaaacgagcagagatggcccagctcaaagagaagcgagagaaggaacgtcaagagagtctcgaaaaggctgccctgcaacagagaagagaagaggaagccatggctcggaggcaagcagagaaagaggcaactcgcctaccccgtcgcgacccagtcgccatggaccgttcagactccaaccctcgcacgggaggaggcccgccacgtctcaaccttaccggcggcaagccatcatggcgtgatcgtgaagcagctaagggtacctcacaagctaccgacaccaacggttccgctgctcctgctcctgctcctgctcctgtttcgcgtcctacacctccacctatggatcgttcagactcgaacagccgtgctggaggaccaccacgccttaacctatcgggcggcaagccctcgtggcgtgaccgtgaagctgcaaaggcggcatcaggcggcgcggctccccctcctgcagaatcagcaaccaagaagactgaggcgcccgcacaaccgccggctgaacctctaaaaccttccggggcgcctgggaaatgggtacctcgacacctgcgggataatcagggttag

SEQ ID NO: 15763 - protein, 1024 aa, Muscodor strobelii
  misc_feature: SGI Peptide ID NO. 565227
  misc_feature (1)..(1021): NCBI GI: 256733247 Blast Desc: NECHADRAFT_79351 [Nectria haematococca mpVI 77-13-4]
  misc_feature (1)..(1024): NCBI GI: 39969163 Blast Desc: MGG_10192 [Magnaporthe grisea 70-15] gi|229488236|sp|A4RM69.1|EIF3A_MAGGR RecName: Full=Eukaryotic translation initiation factor 3 subunit A; Short=eIF3a; AltName:
  misc_feature (1)..(1020): NCBI GI: 46125719 Blast Desc: FG07237.1 [Gibberella zeae PH-1]
  misc_feature (1)..(1022): NCBI GI: 116192067 Blast Desc: CHGG_05751 [Chaetomium globosum CBS 148.51] gi|121786445|sp|Q2H6G4.1|EIF3A_CHAGB RecName: Full=Eukaryotic translation initiation factor 3 subunit A; Short=eIF3a; AltName:
  misc_feature (2)..(1022): NCBI GI: 171686814 Blast Desc: protein product [Podospora anserina] gi|170943368|emb|CAP69021.1| protein product [Podospora anserina]
  misc_feature (1)..(1020): NCBI GI: 156037708 Blast Desc: SS1G_12568 [Sclerotinia sclerotiorum 1980] gi|154697976|gb|EDN97714.1| SS1G_12568 [Sclerotinia sclerotiorum 1980]
  misc_feature (53)..(1022): NCBI GI: 164428774 Blast Desc: NCU00040 [Neurospora crassa OR74A] gi|238685474|sp|Q7RWT1.2|EIF3A_NEUCR RecName: Full=Eukaryotic translation initiation factor 3 subunit A; Short=eIF3a; AltName:
  misc_feature (1)..(1017): NCBI GI: 258565933 Blast Desc: conserved [Uncinocarpus reesii 1704] gi|237907412|gb|EEP81813.1| conserved [Uncinocarpus reesii 1704]
  misc_feature (1)..(1023): NCBI GI: 238843529 Blast Desc: translation initiation factor eIF3a [Microsporum canis CBS 113480]
  misc_feature (1)..(1023): NCBI GI: 242803064 Blast Desc: eukaryotic translation initiation factor 3 subunit EifCa, [Talaromyces stipitatus ATCC 10500] gi|218717443|gb|EED16864.1| eukaryotic translation initiation 3
  misc_feature: Useful for introducing or modulating the production of volatile compounds
MPPPPHQKPENVLKRAHELIGVNQTPAALTLLHDHITSKRSRNVPIASLEPVMLLLVELSVEQKKGKLAKDALYSYKNIAQNTNIATIELVLKKFIELAAEKVTAAQKKADEVQESLEATTTTNVDDLEATETPESILLATVSGEQSRDRTERAVVTPWLKFLWEAYRTVLDILRNNARLELLYQSTAMQAFDFCLKYQRKTEFRRLCELLRNHVQTAAKYSSQMHAINLNDPDTLQRHLETRFQQLNVAVELELWQEAFRSVEDIHTLLNLSKRPPKNIMMANYYEKLTRIFLVGENYLFHAAAWSRYYNLLRQSAVLVASGQGKKSDNPSATEADLQKAASFVLLSALSIPVISTTRSRGAMVDFDEARKNKNSRLTHLLGMSAAPTRAVLFRDAHSKSLLSRARPEIRDLYIFSKLTSTLYPSARRSLLSLPRLALTPRWRKSLAKFPEPFQITRGTIEKFIMNGNKKGDLSIRMDHATGVLNFDKDVFASSKPVHAGSAAGSAESQTGTVQRLQSTPSEIVRSQLSRLATTLHTTCFYIDPTFRQAQKDARDAALARAKAGADQEQRDTLARKVIIEKRKAEASELQAKRDKEKARQKRLQEQALAEAEERRLAQEQKEREEKRLKDERDRVRKEELKKQIADLKLGAGTVDIDVENLNDIDIRAMKLAQLEREKNDIKERLRVTGKRIDHLERAFRKEEVKKLGEDYAAQRDRDQAAYEKTKEETLAESKEKHKESVELKHRLTRLMPHYESYRKSLHDRRRDEFETRQRAAERELEKQIAARKKEYRERKLREKREKEEKERALREAEERAQREKEEQERRAEQKRAEMAQLKEKREKERQESLEKAALQQRREEEAMARRQAEKEATRLPRRDPVAMDRSDSNPRTGGGPPRLNLTGGKPSWRDREAAKGTSQATDTNGSAAPAPAPAPVSRPTPPPMDRSDSNSRAGGPPRLNLSGGKPSWRDREAAKAASGGAAPPPAESATKKTEAPAQPPAEPLKPSGAPGKWVPRHLRDNQG

SEQ ID NO: 15764 - DNA, 1011 bp, Muscodor strobelii
  misc_feature: SGI cDNA ID NO. 565228
  misc_feature: Elevated expression when VOC is produced
  misc_feature: Encodes the peptide sequence at SEQ ID NO 15765
atgtcttttgtttcaagatcgccatttcaattatctggtcgttatgccgaccgtaataagtgggaagtcgtgaacggtccaggcgactcacgcccaactggtcgccaggtagtcgaggatgagaatctcgtgggtgcttgggagggcaaggttgtattgattacgggtgtgtcttcgggtatcggtgttgagactgcgcgtgtacttggtgccacagtatatggcgcagcaaggaacctagataaagctcgagaagctctaggctcagagctcattgatagcggacgggtaaagctgcttcatattgatcagacggatctctcgagtgtccgcgcttgtgcagatgagtttaaaaagcagagtagggtgctgaatatcatcgttaataacgcagcggtgatgaacacaccggagagtcgtacgaaagatggctttgagttgcaattcggaactaaccacttgtctcattttctgctattctacctactcaaagatatcttgttagcgagttcgacgccagagttccattcccgggttgtcagtgtttcgtcggcaggtcactgctacagcccgttgaaacttgataatctcaactttgaaggagagtacaacgggtggctagcttatggatctagcaagacggcgaatatttacatgacgaatatgatcgaaagactttatggagagaaaggtttgcatgggtatagtgttcatcgtccgaatctgcagaaacactcacaggcagagatggacgccgttagccaggatgagaaattcaaacgttacatcagtagcacggagcaggcctgtgcaacgaccgtatacggtgcagtatcgagtgagcttgaaggaaaagggggcctgtatctagaaggtgcttcaaccactgtccttccggttccaaaagattcgaaggatgctttcgaatatggatatgctgagtgggcgtttgataaggagaaggaagagaagctgtggagtctgagcaaggagatgataaaggttggatga

SEQ ID NO: 15765 - protein, 336 aa, Muscodor strobelii
  misc_feature: SGI Peptide ID NO. 565228
  misc_feature (50)..(197): Pfam Id: PF00106 Pfam Desc: short chain dehydrogenase
  misc_feature (50)..(133): Pfam Id: PF00106 Pfam Desc: short chain dehydrogenase
  misc_feature (1)..(309): NCBI GI: 121706330 Blast Desc: short-chain dehydrogenase [Aspergillus clavatus NRRL 1] gi|119399574|gb|EAW10002.1| short-chain dehydrogenase [Aspergillus clavatus NRRL 1]
  misc_feature (1)..(335): NCBI GI: 256727248 Blast Desc: NECHADRAFT_75922 [Nectria haematococca mpVI 77-13-4]
  misc_feature (14)..(335): NCBI GI: 169773903 Blast Desc: [Aspergillus oryzae RIB40] gi|238491930|ref|XP_002377202.1| short-chain dehydrogenase/reductase, [Aspergillus flavus NRRL3357] protein
  misc_feature (11)..(333): NCBI GI: 145236972 Blast Desc: An07g00400 [Aspergillus niger] gi|134075598|emb|CAK39264.1| protein product [Aspergillus niger]
  misc_feature (11)..(332): NCBI GI: 154311572 Blast Desc: BC1G_06245 [Botryotinia fuckeliana B05.10] gi|150850756|gb|EDN25949.1| BC1G_06245 [Botryotinia fuckeliana B05.10]
  misc_feature (11)..(333): NCBI GI: 145234937 Blast Desc: An03g02180 [Aspergillus niger] gi|134057793|emb|CAK38188.1| protein product [Aspergillus niger]
  misc_feature (22)..(335): NCBI GI: 256720430 Blast Desc: NECHADRAFT_94811 [Nectria haematococca mpVI 77-13-4]
  misc_feature (11)..(333): NCBI GI: 256734856 Blast Desc: NECHADRAFT_75545 [Nectria haematococca mpVI 77-13-4]
  misc_feature (14)..(333): NCBI GI: 169607923 Blast Desc: SNOG_07026 [Phaeosphaeria nodorum SN15] gi|111064557|gb|EAT85677.1| SNOG_07026 [Phaeosphaeria nodorum SN15]
  misc_feature (29)..(329): NCBI GI: 169786113 Blast Desc: [Aspergillus oryzae RIB40] gi|83776265|dbj|BAE66384.1| protein product [Aspergillus oryzae]
  misc_feature (52)..(238): SWISSPROT Homolog: EC 1.3.1.33 Protochlorophyllide reductase
  misc_feature: Useful for introducing or modulating the production of volatile compounds
MSFVSRSPFQLSGRYADRNKWEVVNGPGDSRPTGRQVVEDENLVGAWEGKVVLITGVSSGIGVETARVLGATVYGAARNLDKAREALGSELIDSGRVKLLHIDQTDLSSVRACADEFKKQSRVLNIIVNNAAVMNTPESRTKDGFELQFGTNHLSHFLLFYLLKDILLASSTPEFHSRVVSVSSAGHCYSPLKLDNLNFEGEYNGWLAYGSSKTANIYMTNMIERLYGEKGLHGYSVHRPNLQKHSQAEMDAVSQDEKFKRYISSTEQACATTVYGAVSSELEGKGGLYLEGASTTVLPVPKDSKDAFEYGYAEWAFDKEKEEKLWSLSKEMIKVG

SEQ ID NO: 15766 - DNA, 1627 bp, Muscodor strobelii
  misc_feature: SGI EST ID NO. CUFF.37388.1
  misc_feature: Variant of the nucleotide sequence at SEQ ID NO 15764
tgcggatggtgttggccgctattcagacagcacggagatataagtagttcatataaagcatgaatctttgaataagacaattgtcttcgagtactacactctgtgctcggtcttctgaaacatatcgcttatttgcttgagcccgggtcttatatctctatttctcgtttaccatttacgtaaatcggcgtcttggatatgtcttttgtttcaagatcgccatttcaattatctggtcgttatgccgaccgtaataagtgggaagtcgtgaacggtccaggcgactcacgcccaactggtcgccaggtagtcgaggatgagaatctcgtgggtgcttgggagggcaaggttgtattgattacgggtgtgtcttcgggtatcggtgttgagactgcgcgtgtacttggtatgttgggttcaaatgaatttgcgaaatccaaggctaatcgtttgcttagtcagtggtctctctccacagccaaaatcaagggttgatattgacatgttgtttaggcatcgacaggtgccacagtatatggcgcagcaaggaacctagataaagctcgagaagctctaggctcagagctcattgatagcggacgggtaaagctgcttcatattgatcagacggatctctcgagtgtccgcgcttgtgcagatgagtttaaaaagcagagtagggtgctgaatatcatcgttaataacgcagcggtgatgaacacaccggagagtcgtacgaaagatggctttgagttgcaattcggaactaaccacttgtctcattttctgctattctacctactcaaagatatcttgttagcgagttcgacgccagagttccattcccgggttgtcagtgtttcgtcggcaggtcactgctacagcccgttgaaacttgataatctcaactttgaaggagagtacaacgggtggctagcttatggatctagcaagacggcgaatatttacatgacgaatatgatcgaaagactttatggagagaaaggtttgcatgggtatagtgttcatcgtacgtagtattatcctaatctcgatagaataaatgattaactcacagagctgacaccacatatttaatctaacagcgggatcattcatcagtccgaatctgcagaaacactcacaggcagagatggacgccgttagccaggatgagaaattcaaacgttacatcagtagcacggagcaggcctgtgcaacgaccgtatacggtgcagtatcgagtgagcttgaaggaaaagggggcctgtatctagaaggtgcttcaaccactgtccttccggttccaaaagattcgaaggatgctttcgaatatggatatgctgagtgggcgtttgataaggagaaggaagagaagctgtggagtctgagcaaggagatgataaaggttggatgatagcactcttccagctaatgagcacgagagatctccctatcttgtgcttcttgcaggaatattcaacccctagtagctaggacgattccatgtttgttattctcgcaaaaagtttcccataccatgtgcatcaaatgctttgtaaacattgatttacatgccagttactctgctgcacggtccagggtgcctgtgatagctagtactctg

SEQ ID NO: 15767 - DNA, 654 bp, Muscodor strobelii
  misc_feature: SGI cDNA ID NO. 565229
  misc_feature: Elevated expression when VOC is produced
  misc_feature: Encodes the peptide sequence at SEQ ID NO 15768
atgacgacccaactagaagagctcacggcgctctcagagaaacgactaggttctttcccccaagaggtcatcaaaccaatcgacgatgctcatgatcagttcatgtcgacattcgacccatctaagaccattcaggtgggcgacaaacttccatcgttcctcatgacagacgcaacgggcaaggaggtcgacagtgcctcactcctcgccaaaggtccgctcttgatcaccttctaccgcggagagtggtgccccttctgcaatattgctatcggtttcctgcagaagcacctgcccgagttccaggcgcgcggtgttacccttgtggctatcacaccagagttgccaaatcagaacatgacgacggccgagaagcacgctctacagttcccggtattgacagatcttcacaacaagttcgcgaagcagctcaacatcgtatatgaccagtcgagcgctaagccactgcacaataaggtcggcattgatctcaatgctagaaatggtgacgactcttgggaggtgcccatccctgcttctctcttagttgattcaagtggtgtagtgcgaaatgcgcacattgaccctaatttcaggactgggagacttgaccctaagttggctttggagtgggtggatgctttgcagaagtag

SEQ ID NO: 15768 - protein, 217 aa, Muscodor strobelii
  misc_feature: SGI Peptide ID NO. 565229
  misc_feature (45)..(215): Pfam Id: PF08534 Pfam Desc: Redoxin
  misc_feature (46)..(192): Pfam Id: PF00578 Pfam Desc: AhpC/TSA family
  misc_feature (45)..(153): Pfam Id: PF08534 Pfam Desc: Redoxin
  misc_feature (1)..(216): NCBI GI: 256733700 Blast Desc: NECHADRAFT_78070 [Nectria haematococca mpVI 77-13-4]
  misc_feature (7)..(215): NCBI GI: 242797260 Blast Desc: bacterioferritin comigratory protein, [Talaromyces stipitatus ATCC 10500] gi|218719562|gb|EED18982.1| bacterioferritin comigratory protein, [Talaromyces stipitatus
  misc_feature (7)..(216): NCBI GI: 158337295 Blast Desc: redoxin domain-containing protein [Acaryochloris marina MBIC11017] gi|158307536|gb|ABW29153.1| redoxin domain protein, AhpC/TSA family [Acaryochloris marina MBIC11017]
  misc_feature (15)..(216): NCBI GI: 154317258 Blast Desc: BC1G_03531 [Botryotinia fuckeliana B05.10] gi|150844948|gb|EDN20141.1| BC1G_03531 [Botryotinia fuckeliana B05.10]
  misc_feature (43)..(215): NCBI GI: 254424561 Blast Desc: Redoxin superfamily [Synechococcus sp. PCC 7335] gi|196192050|gb|EDX87014.1| Redoxin superfamily [Synechococcus sp. PCC 7335]
  misc_feature (4)..(217): NCBI GI: 225872918 Blast Desc: antioxidant, AhpC/TSA family [Acidobacterium capsulatum ATCC 51196] gi|225792475|gb|ACO32565.1| antioxidant, AhpC/TSA family [Acidobacterium capsulatum ATCC 51196]
  misc_feature (3)..(217): NCBI GI: 254411035 Blast Desc: Redoxin superfamily [Microcoleus chthonoplastes PCC 7420] gi|196182390|gb|EDX77376.1| Redoxin superfamily [Microcoleus chthonoplastes PCC 7420]
  misc_feature (1)..(199): NCBI GI: 163798058 Blast Desc: Redoxin [alpha proteobacterium BAL199] gi|159176654|gb|EDP61228.1| Redoxin [alpha proteobacterium BAL199]
  misc_feature (39)..(206): NCBI GI: 213962970 Blast Desc: redoxin [Capnocytophaga sputigena Capno] gi|213954311|gb|EEB65634.1| redoxin [Capnocytophaga sputigena Capno]
  misc_feature (7)..(217): NCBI GI: 119472823 Blast Desc: ATW7_08319 [Alteromonadales bacterium TW-7] gi|119444718|gb|EAW26024.1| ATW7_08319 [Alteromonadales bacterium TW-7]
  misc_feature: Useful for introducing or modulating the production of volatile compounds
MTTQLEELTALSEKRLGSFPQEVIKPIDDAHDQFMSTFDPSKTIQVGDKLPSFLMTDATGKEVDSASLLAKGPLLITFYRGEWCPFCNIAIGFLQKHLPEFQARGVTLVAITPELPNQNMTTAEKHALQFPVLTDLHNKFAKQLNIVYDQSSAKPLHNKVGIDLNARNGDDSWEVPIPASLLVDSSGVVRNAHIDPNFRTGRLDPKLALEWVDALQK

SEQ ID NO: 15769 - DNA, 1083 bp, Muscodor strobelii
  misc_feature: SGI EST ID NO. CUFF.37370.0
  misc_feature: Variant of the nucleotide sequence at SEQ ID NO 15767
aagacagccacaatgctgtctcagcacgggcagatgcagcctccgcctacaatacaacccctagctgcgatgacaaaactcttctactgaaactagaagggcagagttcacaacacccaggcaacgacatccgtggcgcgacaggaacagattgtagaaccaaagacttcggtcgtgtgggatattgagaaagatataaaataagtcaatatccatgtgaagattaagggtgttttccatcagcaatagacaacaattcaccacattagctctccaacttgcaccttatttagtgatataccaatcaatcaacatgacgacccaactagaagagctcacggcgctctcagagaaacgactaggttctttcccccaagaggtcatcaaaccaatcgacgatgctcatgatcagttcatgtcgacattcgacccatctaagaccattcaggtgggcgacaaacttccatcgttcctcatgacagacgcaacgggcaaggaggtcgacagtgcctcactcctcgccaaaggtccgctcttgatcaccttctaccgcggagagtggtgccccttctgcaatattgctatcggtttcctgcagaagcacctgcccgagttccaggcgcgcggtgttacccttgtggctatcacaccagagttgccaaatcagaacatgacgacggccgagaagcacgctctacagttcccggtattgacagatcttcacaacaagttcgcgaagcagctcaacatcgtatatgaccagtcgagcgctaagccactgcacaataaggtcggcattgatctcaatgctagaaatggtgacgactcttgggaggtgcccatccctgcttctctcttagttgattcaagtggtgtagtgcgaaatgcgcacattgaccctaatttcaggactgggagacttgaccctaagttggctttggagtgggtggatgctttgcagaagtagagttagtgcgactgtcgagatagacttcgaattggtcaacaaatgttgagatatctgtaacctatatcctcaattagccatgcgaactatagaagcatcgaagtctctaaccggca

SEQ ID NO: 15770 - DNA, 651 bp, Muscodor strobelii
  misc_feature: SGI cDNA ID NO. 565231
  misc_feature: Encodes the peptide sequence at SEQ ID NO 15771
atgtcttccgcacctggagagaatttcgagccgcgccagacggccacaagcgaggattatacgccagatccctctaaatcgcttcctctcgatgggcctcgccaacgactagtcgatgatatcatcgcactatatagctgtaagcccacagttgagcgtgtgcggcgctacacggcagattgtgtctacgatgaccagtttgtctacgccaatgaccgcttcaagatggctggccagtggtttgctctgccaaagttgttcaaagagagcaccaacaacggttaccaaatcattaaaaatgaccgtgacttcattcagttcaagaatgatcagagttggactttcaagctcatcccgaagacggcacgcatcactggccttgttagcttgagtcttgaccctgatactgtggataaggacttcatccaggtgaagtatcacaaagatcaagctaatgacaaggattactcacacgagggcgtgggtttctcgttcaagaagtggcaggctgatcaggttgcaaagcacatggacagtcccgaggtcaaagaattcgaagctgataaaaacgccgcgaaagagcctgtgcgtaaatacggaactggaacggaagaaggcaaagctcctaaagaggactttacgcagaagtga

SEQ ID NO: 15771 - protein, 216 aa, Muscodor strobelii
  misc_feature: SGI Peptide ID NO. 565231
  misc_feature (2)..(215): NCBI GI: 189208476 Blast Desc: conserved [Pyrenophora tritici-repentis Pt-1C-BFP] gi|187976664|gb|EDU43290.1| conserved [Pyrenophora tritici-repentis Pt-1C-BFP]
  misc_feature (2)..(213): NCBI GI: 154295277 Blast Desc: BC1G_13452 [Botryotinia fuckeliana B05.10] gi|150844179|gb|EDN19372.1| BC1G_13452 [Botryotinia fuckeliana B05.10]
  misc_feature (19)..(167): NCBI GI: 242210822 Blast Desc: [Postia placenta Mad-698-R] gi|220729662|gb|EED83532.1| [Postia placenta Mad-698-R]
  misc_feature (19)..(167): NCBI GI: 242221625 Blast Desc: [Postia placenta Mad-698-R] gi|220724187|gb|EED78250.1| [Postia placenta Mad-698-R]
  misc_feature (76)..(174): NCBI GI: 238586765 Blast Desc: MPER_09325 [Moniliophthora perniciosa FA553] gi|215455710|gb|EEB92200.1| MPER_09325 [Moniliophthora perniciosa FA553]
  misc_feature (2)..(105): NCBI GI: 156051052 Blast Desc: [Sclerotinia sclerotiorum 1980] gi|154704711|gb|EDO04450.1| [Sclerotinia sclerotiorum 1980]
  misc_feature (7)..(181): NCBI GI: 169623610 Blast Desc: SNOG_15049 [Phaeosphaeria nodorum SN15] gi|111056472|gb|EAT77592.1| SNOG_15049 [Phaeosphaeria nodorum SN15]
  misc_feature (11)..(181): NCBI GI: 145248193 Blast Desc: An13g02070 [Aspergillus niger] gi|134081094|emb|CAK41606.1| protein product [Aspergillus niger]
  misc_feature (2)..(174): NCBI GI: 154297499 Blast Desc: BC1G_12346 [Botryotinia fuckeliana B05.10] gi|150858542|gb|EDN33734.1| BC1G_12346 [Botryotinia fuckeliana B05.10]
  misc_feature (69)..(167): NCBI GI: 242221623 Blast Desc: [Postia placenta Mad-698-R] gi|220724186|gb|EED78249.1| [Postia placenta Mad-698-R]
MSSAPGENFEPRQTATSEDYTPDPSKSLPLDGPRQRLVDDIIALYSCKPTVERVRRYTADCVYDDQFVYANDRFKMAGQWFALPKLFKESTNNGYQIIKNDRDFIQFKNDQSWTFKLIPKTARITGLVSLSLDPDTVDKDFIQVKYHKDQANDKDYSHEGVGFSFKKWQADQVAKHMDSPEVKEFEADKNAAKEPVRKYGTGTEEGKAPKEDFTQK

SEQ ID NO: 15772 - DNA, 422 bp, Muscodor strobelii
  misc_feature: SGI EST ID NO. CUFF.37382.0
  misc_feature: Variant of the nucleotide sequence at SEQ ID NO 15770
cgcacctggagagaatttcgagccgcgccagacggccacaagcgaggattatacgccagatccctctaaatcgcttcctctcgatgggcctcgccaacgactagtcgatgatatcatcgcactatatagctgtaagcccacagttgagcgtgtgcggcgctacacggcagattgtgtctacgatgaccagtttgtctacgccaatgaccgcttcaagatggctggccagtggtttgctctgccaaagttgttcaaagagagcaccaacaacggttaccaaatcattaaaaatgaccgtgacttcattcagttcaagaatgatcagagttggactttcaagctcatcccgaagacggcacgcatcactggccttgttagcttgagtcttgaccctgatactgtggataaggacttcatccagg

SEQ ID NO: 15773 - DNA, 1152 bp, Muscodor strobelii
  misc_feature: SGI cDNA ID NO. 565232
  misc_feature: Encodes the peptide sequence at SEQ ID NO 15774
atgacggaaacactcttacccgcgttccccaaccaaccgacaccactcttaagctatggcttgccgttcacagaagccgtgctcaaacacatacattctacgtatccctcagaaagattatatataatctgttccgcgtctttagcaaggaacacatcacatctcgatgccctaagacaagcggtcgggccaaatttggctgagttgcgcgtgggaatgcgaccacactcacattgggccgatatcctcgaagtcgttgaagatgcaaggcactataatgcggattgtatcatcacgcttggcgctgggagtctaacagatgcagcgaaggtcgtctcgcttgcgctagcaaactccataaaaaccgaatcagaactggaaaccctcctcccagacagctcatcagcacgttcccacgtctcaccctcccaaatccccataatcagcatccccacctctctctcaggcggcgagtactcctccttcgccggcgcaactcgcgacagtgacgggcgaaagtacatgttccgccgcccagagatcaaaggcccaactcttgtaatcctggacctcatagtagccatgacgacaccagacagcatatggctaagctccggcgtccgagcactagaccattgtatcgagacactctgtgctctacgtagcaacgaagccgcagacgaaaccgcacgcaacgggttgaagaaactaatccccggtcttctccacgccaaatcaaaccgcggcgatcaagaagcaactttcgactgtttcctgggcagcgtatatgccatgggcgcagcggtgtccggcgtcccactcggtgcgtctcacggtatcggaagccagctcgggcctgtcggcgtcggacatggtgagacgagctgtatactaaatcctgcggtttgcaagtataactacaggaaaaaggcaaacatcgagcgtcaagacgctgcggctcaacttctgtgggaggatccggctgcagtggccatatttgaggaaaaggggttaagcagagaaatttcagatctaggggatctcatggacgctattatctgcgctttggacatgcctagatcactaaagcaattcggtgtcaaagaggaccagttggatgagattgcggataatagcttgaagcatatctag

SEQ ID NO: 15774 - protein, 383 aa, Muscodor strobelii
  misc_feature: SGI Peptide ID NO. 565232
  misc_feature (36)..(383): Pfam Id: PF00465 Pfam Desc: Iron-containing alcohol dehydrogenase
  misc_feature (1)..(380): NCBI GI: 121702427 Blast Desc: Fe-containing alcohol dehydrogenase, [Aspergillus clavatus NRRL 1] gi|119397621|gb|EAW08052.1| Fe-containing alcohol dehydrogenase, [Aspergillus clavatus NRRL 1]
  misc_feature (3)..(380): NCBI GI: 169769054 Blast Desc: [Aspergillus oryzae RIB40] gi|238501484|ref|XP_002381976.1| Fe-containing alcohol dehydrogenase, [Aspergillus flavus NRRL3357] protein product
  misc_feature (4)..(381): NCBI GI: 242766777 Blast Desc: Fe-containing alcohol dehydrogenase, [Talaromyces stipitatus ATCC 10500] gi|218724434|gb|EED23851.1| Fe-containing alcohol dehydrogenase, [Talaromyces stipitatus ATCC 10500]
  misc_feature (3)..(380): NCBI GI: 255935173 Blast Desc: Pc13g01680 [Penicillium chrysogenum Wisconsin 54-1255] gi|211583233|emb|CAP91237.1| Pc13g01680 [Penicillium chrysogenum Wisconsin 54-1255]
  misc_feature (1)..(381): NCBI GI: 212528306 Blast Desc: Fe-containing alcohol dehydrogenase, [Penicillium marneffei ATCC 18224] gi|210073708|gb|EEA27795.1| Fe-containing alcohol dehydrogenase, [Penicillium marneffei ATCC 18224]
  misc_feature (1)..(380): NCBI GI: 119496423 Blast Desc: Fe-containing alcohol dehydrogenase, [Neosartorya fischeri NRRL 181] gi|119413147|gb|EAW23088.1| Fe-containing alcohol dehydrogenase, [Neosartorya fischeri NRRL 181]
  misc_feature (3)..(383): NCBI GI: 256727325 Blast Desc: NECHADRAFT_76085 [Nectria haematococca mpVI 77-13-4]
  misc_feature (1)..(380): NCBI GI: 70991160 Blast Desc: Fe-containing alcohol dehydrogenase [Aspergillus fumigatus Af293] gi|66848061|gb|EAL88391.1| Fe-containing alcohol dehydrogenase, [Aspergillus fumigatus Af293]
  misc_feature (3)..(380): NCBI GI: 67538128 Blast Desc: AN5234.2 [Aspergillus nidulans FGSC A4] gi|40743225|gb|EAA62415.1| AN5234.2 [Aspergillus nidulans FGSC A4] gi|259484695|tpe|CBF81137.1| TPA: Fe-containing alcohol FGSC
  misc_feature (1)..(380): NCBI GI: 159130903 Blast Desc: Fe-containing alcohol dehydrogenase, [Aspergillus fumigatus A1163]
  misc_feature (54)..(383): SWISSPROT Homolog: EC 1.1.1.244 Methanol dehydrogenase
MTETLLPAFPNQPTPLLSYGLPFTEAVLKHIHSTYPSERLYIICSASLARNTSHLDALRQAVGPNLAELRVGMRPHSHWADILEVVEDARHYNADCIITLGAGSLTDAAKVVSLALANSIKTESELETLLPDSSSARSHVSPSQIPIISIPTSLSGGEYSSFAGATRDSDGRKYMFRRPEIKGPTLVILDLIVAMTTPDSIWLSSGVRALDHCIETLCALRSNEAADETARNGLKKLIPGLLHAKSNRGDQEATFDCFLGSVYAMGAAVSGVPLGASHGIGSQLGPVGVGHGETSCILNPAVCKYNYRKKANIERQDAAAQLLWEDPAAVAIFEEKGLSREISDLGDLMDAIICALDMPRSLKQFGVKEDQLDEIADNSLKHI

SEQ ID NO: 15775 - DNA, 1659 bp, Muscodor strobelii
  misc_feature: SGI EST ID NO. CUFF.37407.0
  misc_feature: Variant of the nucleotide sequence at SEQ ID NO 15773
gtcgacaacaatcgtaacgtttaatgttccaactaatcatcacatcttggtatatcatctctagtagccattacttgcacctttcagcatgacggaaacactcttacccgcgttccccaaccaaccgacaccactcttaagctatggcttgccgttcacagaagccgtgctcaaacacatacattctacgtatccctcagaaagattatatataatctgttccgcgtctttagcaaggaacacatcacatctcgatgccctaagacaagcggtcgggccaaatttggctgagttgcgcgtgggaatgcgaccacactcacattgggccgatatcctcgaagtcgttgaagatgcaaggcactataatgcggattgtatcatcacgcttggcgctgggagtctaacagatgcagcgaaggtcgtctcgcttgcgctagcaaactccataaaaaccgaatcagaactggaaaccctcctcccagacagctcatcagcacgttcccacgtctcaccctcccaaatccccataatcagcatccccacctctctctcaggcggcgagtactcctccttcgccggcgcaactcgcgacagtgacgggcgaaagtacatgttccgccgcccagagatcaaaggcccaactcttgtaatcctggacctcatagtagccatgacgacaccagacagcatatggctaagctccggcgtccgagcactagaccattgtatcgagacactctgtgctctacgtagcaacgaagccgcagacgaaaccgcacgcaacgggttgaagaaactaatccccggtcttctccacgccaaatcaaaccgcggcgatcaagaagcaactttcgactgtttcctgggcagcgtatatgccatgggcgcagcggtgtccggcgtcccactcggtgcgtctcacggtatcggaagccagctcgggcctgtcggcgtcggacatggtgagacgagctgtatactaaatcctgcggtttgcaagtataactacaggaaaaaggcaaacatcgagcgtcaagacgctgcggctcaacttctgtgggaggatccggctgcagtggccatatttgaggaaaaggggttaagcagagaaatttcagatctaggggatctcatggacgctattatctgcgctttggacatgcctagatcactaaagcaattcggtgtcaaagaggaccagttggatgagattgcggataatagcttgaagcatatctaggtgcaatccaatccagcaccgctggataaagagggtgtactcgagatcttgagaatggttctggatgagccttagttatcatgtaggctctcggagcatcgcaaaagaacaactagccacggaaagcagagggacctatgtcaagtatctcgctttcatgtaggtacagacctgtttgatcataattatcacattatcatgttatcacatcatctcgttatggtcatgtctgtcgccgtgtagaccaaacatgcgcacctagtttctagcccccgcgagaatgattatttcctgaggctgtctagacgggcttgtaggtcatcgtctgcagtatcgccgcctccactcggcccgccaatggcctgagccactctgttctcaggcaccttatctgactgtaagccggttggagtttcgcc

SEQ ID NO: 15776 - DNA, 678 bp, Muscodor strobelii
  misc_feature: SGI cDNA ID NO. 565233
  misc_feature: Encodes the peptide sequence at SEQ ID NO 15777
atgaacatcctcgaatgggctttcggcaagcgcatgacgcccgccgagcgtctgcgcaagaaccagcgactcctcgacaaagctatccgcgagatcgaccagcagaaagtcaagctagaacgacaggagaagcagctcgtcacccagatcaagcagagcgcccagaagggccagatgggcgccgccaagatacaagccaaggacctcgttcgcaccagaagatacattgacaaattctacggtctcaagagcaacctacagaaaatatccttgcgcctccaaacacaccggaccaatgagcaaatgatgcaggccatgaagggcgccaccatggctctcggcagtatgaaccgcaccatgaacctgcccgccctacagcgcatcgctatggagtttgagcgcgagaacgacatcatggaccagaggcaggagatgatggacgacgtcatggatgacgccatggatgtcggcatagaagaggaaggcgacgaggtcgtcgaacaagtgttggaggagatcggagtcgacctcaaccaagcctttggcgaaactccaaccggcttacagtcagataaggtgcctgagaacagagtggctcaggccattggcgggccgagtggaggcggcgatactgcagacgatgacctacaagcccgtctagacagcctcaggaaataa

SEQ ID NO: 15777 - protein, 225 aa, Muscodor strobelii
  misc_feature: SGI Peptide ID NO. 565233
  misc_feature (20)..(189): Pfam Id: PF03357 Pfam Desc: Snf7
  misc_feature (1)..(225): NCBI GI: 171686108 Blast Desc: protein product [Podospora anserina] gi|170943015|emb|CAP68668.1| protein product [Podospora anserina]
  misc_feature (3)..(224): NCBI GI: 39940064 Blast Desc: MGG_05208 [Magnaporthe grisea 70-15] gi|145010522|gb|EDJ95178.1| MGG_05208 [Magnaporthe grisea 70-15]
  misc_feature (1)..(225): NCBI GI: 116207636 Blast Desc: CHGG_03111 [Chaetomium globosum CBS 148.51] gi|88183708|gb|EAQ91176.1| CHGG_03111 [Chaetomium globosum CBS 148.51]
  misc_feature (1)..(225): NCBI GI: 85081324 Blast Desc: NCU00435 [Neurospora crassa OR74A] gi|28917773|gb|EAA27463.1| NCU00435 [Neurospora crassa OR74A] gi|40882145|emb|CAF05972.1| class E vacuolar-protein sorting and
  misc_feature (1)..(225): NCBI GI: 256726142 Blast Desc: NECHADRAFT_70285 [Nectria haematococca mpVI 77-13-4]
  misc_feature (1)..(225): NCBI GI: 46116540 Blast Desc: FG04112.1 [Gibberella zeae PH-1]
  misc_feature (1)..(225): NCBI GI: 212529918 Blast Desc: SNF7 family protein [Penicillium marneffei ATCC 18224] gi|210074514|gb|EEA28601.1| SNF7 family protein [Penicillium marneffei ATCC 18224]
  misc_feature (1)..(225): NCBI GI: 119478326 Blast Desc: SNF7 family protein [Neosartorya fischeri NRRL 181] gi|119407499|gb|EAW17448.1| SNF7 family protein [Neosartorya fischeri NRRL 181]
  misc_feature (1)..(225): NCBI GI: 146324203 Blast Desc: SNF7 family protein [Aspergillus fumigatus Af293] gi|129558017|gb|EAL91275.2| SNF7 family protein [Aspergillus fumigatus Af293]
  misc_feature (1)..(225): NCBI GI: 225561643 Blast Desc: SNF7 family protein [Ajellomyces capsulatus G186AR]
MNILEWAFGKRMTPAERLRKNQRLLDKAIREIDQQKVKLERQEKQLVTQIKQSAQKGQMGAAKIQAKDLVRTRRYIDKFYGLKSNLQKISLRLQTHRTNEQMMQAMKGATMALGSMNRTMNLPALQRIAMEFERENDIMDQRQEMMDDVMDDAMDVGIEEEGDEVVEQVLEEIGVDLNQAFGETPTGLQSDKVPENRVAQAIGGPSGGGDTADDDLQARLDSLRK

SEQ ID NO: 15778 - DNA, 2008 bp, Muscodor strobelii
  misc_feature: SGI EST ID NO. CUFF.37408.2
  misc_feature: Variant of the nucleotide sequence at SEQ ID NO 15776
ggcggctccaacttgcttcatcactcctaacagtcgccccaagacaccgaacagacgacggcctacggaacaggcacccgaatcagttggcacttctcaaatccctagacgcccacgatcgctctcctacccgaatctaccgcattggctaaacaattgcatctcgccgtcaacaaccactgccaccatgaacatcctcgaatgggctttcggcaagcgcatgacgcccgccgagcgtctgcgcaagaaccagcgactcctcgacaaagctatccgcgagatcgaccagcagaaagtcaagctagaacgacaggagaagcagctcgtcacccagatcaagcagagcgcccagaagggccagatgggcgccgccaagatacaagccaaggacctcgttcgcaccagaagatacattgacaaattctacggtctcaagagcaacctacagaaaatatccttgcgcctccaaacacaccggaccaatgagcaaatgatgcaggccatgaagggcgccaccatggctctcggcagtatgaaccgcaccatgaacctgcccgccctacagcgcatcgctatggagtttgagcgcgagaacgacatcatggaccagaggcaggagatgatggacgacgtcatggatgacgccatggatgtcggcatagaagaggaaggcgacgaggtcgtcgaacaagtgttggaggagatcggagtcgacctcaaccaagcctttggcgaaactccaaccggcttacagtcagataaggtgcctgagaacagagtggctcaggccattggcgggccgagtggaggcggcgatactgcagacgatgacctacaagcccgtctagacagcctcaggaaataatcattctcgcgggggctagaaactaggtgcgcatgtttggtctacacggcgacagacatgaccataacgagatgatgtgataacatgataatgtgataattatgatcaaacaggtctgtacctacatgaaagcgagatacttgacataggtccctctgctttccgtggctagttgttcttttgcgatgctccgagagcctacatgataactaaggctcatccagaaccattctcaagatctcgagtacaccctctttatccagcggtgctggattggattgcacctagatatgcttcaagctattatccgcaatctcatccaactggtcctctttgacaccgaattgctttagtgatctaggcatgtccaaagcgcagataatagcgtccatgagatcccctagatctgaaatttctctgcttaaccccttttcctcaaatatggccactgcagccggatcctcccacagaagttgagccgcagcgtcttgacgctcgatgtttgcctttttcctgtagttatacttgcaaaccgcaggatttagtatacagctcgtctcaccatgtccgacgccgacaggcccgagctggcttccgataccgtgagacgcaccgagtgggacgccggacaccgctgcgcccatggcatatacgctgcccaggaaacagtcgaaagttgcttcttgatcgccgcggtttgatttggcgtggagaagaccggggattagtttcttcaacccgttgcgtgcggtttcgtctgcggcttcgttgctacgtagagcacagagtgtctcgatacaatggtctagtgctcggacgccggagcttagccatatgctgtctggtgtcgtcatggctactatgaggtccaggattacaagagttgggcctttgatctctgggcggcggaacatgtactttcgcccgtcactgtcgcgagttgcgccggcgaaggaggagtactcgccgcctgagagagaggtggggatgctgattatggggatttgggagggtgagacgtgggaacgtgctgatgagctgtctgggaggagggtttccagttctgattcggtttttatggagtttgctagcgcctggggaagtcaggttttatgtaataatatattgtgcttgagagaccaa

SEQ ID NO: 15779 - DNA, 2643 bp, Muscodor strobelii
  misc_feature: SGI cDNA ID NO. 565234
  misc_feature: Reduced expression when VOC is produced
  misc_feature: Encodes the peptide sequence at SEQ ID NO 15780
atgagccaggaatacttcccgcccgcgtcgtccagtggcaagcccgtcgaccccgacgctcgcgacgacaacgacgcactcgcgcccgcgcccgctggagcgcgactcggctacatgaccgtcggcaacggctcgacatccatccacgccgcccgccttcagtccatcatcgacacggattccggttacggcggaagcatggctggcgacgagccctcctcctccaagctgccgcttggctcgcccaggaccgatcccaccatcgccggcgatatgctgctgccccatcatccctccggaaaccacgacgccgaccagcgccaccaggcctctgtggtctcccagctgtggtacaatcaacagcgggtcgccctcggccgctccatcaatcgcgttgtcgacatgctcggcggccttcaggagatgaacgtcacttggccagcccattacccctcggtccaacgcaccgatatggcctcgtctgagcgcccttcttcgcgacccggcctgcagcatgccttctccatggctggcgaagctgctcaacacccgcctcatcccctgcgacgctcgatgaccactttctcagatcatcagtcagccgaagccgaatcgagtaaagaagccgagaacaaagcaaacgccgaggttccccgattgatatcgccccagatcgcacaggagttctcagtcttgaaactcgatctcaagctgggatctttgcaccagacggagctcgtccattccctcgagaagagttccgttgcgtcgctgctggatggcaagatccgcacgagcatcaaacatttgatctcgctgcgggagcggattgacgatacgtccagcaaagtcctcgtcaccggcgacttgaatgctggaaagtctaccttctgcaatgccctgttacgacgcaaagtcctgcccgaagaccagcagccttgtacgagtattttctgcgaggtgctggatgcgagagagaatggtggaatggaagaagtccacgcggttcacaaagatgccatctacaaccgacatgacgaatcaacctacgatgtgttctcgctacacgaactcgaaaagatcgttctcgacaatacgacttatatgcagtgcaaagtctacgtcaaggatattcggacggttaatgaatcgctgctcaataacggcgtcgtcgacatcgccttgattgacgcccctggtcttaactccgataccactaagactacggccatcttcgctcgccaagaagaaattgatgttgttgtttttgttgtctctgccgctaatcatttcactcaatcggccaaggaatttatctgggctgcggccgctgaaaaagcctacattttcatggttgtcaacggtttcgatatgattcgcgacaaggaacggtgccagaagatgattctggaccaggtgcgggggcggggcgggggcgatgacccaggcgacgatcccaaagggaagggcaaagaaaaggagaagatagaagacttcgaggcactcgagcagtctttgagaagatttgttctggagaaacgagcacggtctaagcttgctcctgctaagacatatttgatgaatattcttaacgatgtaaacgttctagctactgtcaacacagaagtcgcgcagacggagcttgatcgtgtgacaaacgatcttgcagagcttgaaccacagttagagtcgtcaaagaaggcaaaggcggaagtcggtgatgagatcgaccagactatcgaggccacatgcaaggatatctacgatcataccaggactgccctcaactctgccattgagcacgctggtgacagtactctgggtgtgccataccctggtctatttggcgttttcgattttgcggatgacctgaaagaggcgatgctcaacgaagtatcctctgctgtcacatcttgcgaagagaacgcccgcgcgaaaacggttaccggtgtcagcgcgatcaagcaactcggcatactccacctgggtgatgagtttgttgacctcaatttccgtccagatgtcatgttccgtcgacgtcgcgatttgctagcaaaggaaatcgatcttcccaccgaactttgggatctcatcgattggtccactctcatgcaacggcaggaaaaggtagccggtacgggtatggctttgacggtggcaaccgctgtgggaggacgactcattggtggtatgggctggatggaccatgcactcagtgctgctaagatcgtgggcaacgacaacctaaggaagctgattgttccagccattgcaattgcagtgatgtctgccgctgcatatgttcttcagcagatcccacagtcgttgcctcatcgcttgtccactaagctctctacccaacttgcatccatcgactatgttcattcgaacagcacgcgtattgctagttcggtacgcaaggttctccggttccctgcggacaacctccgcgttgggcttacccgctcggtcgagaaactcggtgccaagcgggacgagacgatgaagacacggacggaaagtgaagttgctctcaagtactttagcaatctggtacgcagcagtgctcaccaacgcacactagtgacggatgtagatctcgacgcccatccacaggcggcggccaacatgaacatttcttga

SEQ ID NO: 15780 - protein, 880 aa, Muscodor strobelii
  misc_feature: SGI Peptide ID NO. 565234
  misc_feature (1)..(875): NCBI GI: 165975383 Blast Desc: GTPase FZO1 [Podospora anserina]
  misc_feature (1)..(875): NCBI GI: 171686110 Blast Desc: protein product [Podospora anserina] gi|170943016|emb|CAP68669.1| protein product [Podospora anserina]
  misc_feature (29)..(869): NCBI GI: 145249542 Blast Desc: An14g04870 [Aspergillus niger] gi|134081792|emb|CAK42048.1| protein product [Aspergillus niger]
  misc_feature (1)..(869): NCBI GI: 159126960 Blast Desc: conserved [Aspergillus fumigatus A1163]
  misc_feature (1)..(869): NCBI GI: 119478328 Blast Desc: transmembrane GTPase Fzo1, [Neosartorya fischeri NRRL 181] gi|119407500|gb|EAW17449.1| transmembrane GTPase Fzo1, [Neosartorya fischeri NRRL 181]
  misc_feature (1)..(869): NCBI GI: 146324201 Blast Desc: transmembrane GTPase Fzo1 [Aspergillus fumigatus Af293] gi|129558018|gb|EBA27429.1| transmembrane GTPase Fzo1, [Aspergillus fumigatus Af293]
  misc_feature (1)..(869): NCBI GI: 121714014 Blast Desc: conserved [Aspergillus clavatus NRRL 1] gi|119402771|gb|EAW13192.1| conserved [Aspergillus clavatus NRRL 1]
  misc_feature (12)..(864): NCBI GI: 169615258 Blast Desc: SNOG_10786 [Phaeosphaeria nodorum SN15] gi|160702922|gb|EAT82180.2| SNOG_10786 [Phaeosphaeria nodorum SN15]
  misc_feature (1)..(869): NCBI GI: 212529916 Blast Desc: transmembrane GTPase Fzo1, [Penicillium marneffei ATCC 18224] gi|210074513|gb|EEA28600.1| transmembrane GTPase Fzo1, [Penicillium marneffei ATCC 18224]
  misc_feature (37)..(877): NCBI GI: 189207865 Blast Desc: mitochondrial fusion GTPase protein [Pyrenophora tritici-repentis Pt-1C-BFP] gi|187976359|gb|EDU42985.1| mitochondrial fusion GTPase protein [Pyrenophora tritici-repentis
  misc_feature: Useful for introducing or modulating the production of volatile compounds
MSQEYFPPASSSGKPVDPDARDDNDALAPAPAGARLGYMTVGNGSTSIHAARLQSIIDTDSGYGGSMAGDEPSSSKLPLGSPRTDPTIAGDMLLPHHPSGNHDADQRHQASVVSQLWYNQQRVALGRSINRVVDMLGGLQEMNVTWPAHYPSVQRTDMASSERPSSRPGLQHAFSMAGEAAQHPPHPLRRSMTTFSDHQSAEAESSKEAENKANAEVPRLISPQIAQEFSVLKLDLKLGSLHQTELVHSLEKSSVASLLDGKIRTSIKHLISLRERIDDTSSKVLVTGDLNAGKSTFCNALLRRKVLPEDQQPCTSIFCEVLDARENGGMEEVHAVHKDAIYNRHDESTYDVFSLHELEKIVLDNTTYMQCKVYVKDIRTVNESLLNNGVVDIALIDAPGLNSDTTKTTAIFARQEEIDVVVFVVSAANHFTQSAKEFIWAAAAEKAYIFMVVNGFDMIRDKERCQKMILDQVRGRGGGDDPGDDPKGKGKEKEKIEDFEALEQSLRRFVLEKRARSKLAPAKTYLMNILNDVNVLATVNTEVAQTELDRVTNDLAELEPQLESSKKAKAEVGDEIDQTIEATCKDIYDHTRTALNSAIEHAGDSTLGVPYPGLFGVFDFADDLKEAMLNEVSSAVTSCEENARAKTVTGVSAIKQLGILHLGDEFVDLNFRPDVMFRRRRDLLAKEIDLPTELWDLIDWSTLMQRQEKVAGTGMALTVATAVGGRLIGGMGWMDHALSAAKIVGNDNLRKLIVPAIAIAVMSAAAYVLQQIPQSLPHRLSTKLSTQLASIDYVHSNSTRIASSVRKVLRFPADNLRVGLTRSVEKLGAKRDETMKTRTESEVALKYFSNLVRSSAHQRTLVTDVDLDAHPQAAANMNIS

SEQ ID NO: 15781 - DNA, 3323 bp, Muscodor strobelii
  misc_feature: SGI EST ID NO. CUFF.37391.0
  misc_feature: Variant of the nucleotide sequence at SEQ ID NO 15779
catcgcatcaccgttttttcttcgccgcccgacacctcggatcgtcaacctcaaccgccgccctttccagactgtccaccaacgcccacagccgagctttattcgacatatgcgccccgcctaatcctataatctatcgcgttctcattgccatccattgcagccaattcctacgactacactaatcccatggaccccgatctctgcaatttgccatgagccaggaatacttcccgcccgcgtcgtccagtggcaagcccgtcgaccccgacgctcgcgacgacaacgacgcactcgcgcccgcgcccgctggagcgcgactcggctacatgaccgtcggcaacggctcgacatccatccacgccgcccgccttcagtccatcatcgacacggattccggttacggcggaagcatggctggcgacgagccctcctcctccaagctgccgcttggctcgcccaggaccgatcccaccatcgccggcgatatgctgctgccccatcatccctccggaaaccacgacgccgaccagcgccaccaggcctctgtggtctcccagctgtggtacaatcaacagcgggtcgccctcggccgctccatcaatcgcgttgtcgacatgctcggcggccttcaggagatgaacgtcacttggccagcccattacccctcggtccaacgcaccgatatggcctcgtctgagcgcccttcttcgcgacccggcctgcagcatgccttctccatggctggcgaagctgctcaacacccgcctcatcccctgcgacgctcgatgaccactttctcagatcatcagtcagccgaagccgaatcgagtaaagaagccgagaacaaagcaaacgccgaggttccccgattgatatcgccccagatcgcacaggagttctcagtcttgaaactcgatctcaagctgggatctttgcaccagacggagctcgtccattccctcgagaagagttccgttgcgtcgctgctggatggcaagatccgcacgagcatcaaacatttgatctcgctgcgggagcggattgacgatacgtccagcaaagtcctcgtcaccggcgacttgaatgctggaaagtctaccttctgcaatgccctgttacgacgcaaagtcctgcccgaagaccagcagccttgtacgagtattttctgcgaggtgctggatgcgagagagaatggtggaatggaagaagtccacgcggttcacaaagatgccatctacaaccgacatgacgaatcaacctacgatgtgttctcgctacacgaactcgaaaagatcgttctcgacaatacgacttatatgcagtgcaaagtctacgtcaaggatattcggacggttaatgaatcgctgctcaataacggcgtcgtcgacatcgccttgattgacgcccctggtcttaactccgataccactaagactacggccatcttcgctcgccaagaagaaattgatgttgttgtttttgttgtctctgccgctaatcatttcactcaatcggccaaggaatttatctgggctgcggccgctgaaaaagcctacattttcatggttgtcaacggtttcgatatgattcgcgacaaggaacggtgccagaagatgattctggaccaggtgtatggcttaagccctcgcaccttcaaagagtccagtgaattagttcatttcgtttcgagcaatgctatccccacgggaccacgccccgacgctccaggcgggggcggggcgggggcgatgacccaggcgacgatcccaaagggaagggcaaagaaaaggagaagatagaagacttcgaggcactcgagcagtctttgagaagatttgttctggagaaacgagcacggtctaagcttgctcctgctaagacatatttgatgaatattcttaacgatgtaaacgttctagctactgtcaacacagaagtcgcgcagacggagcttgatcgtgtgacaaacgatcttgcagagcttgaaccacagttagagtcgtcaaagaaggcaaaggcggaagtcggtgatgagatcgaccagactatcgaggccacatgcaaggatatctacgatcataccaggactgccctcaactctgccattgagcacgctggtgacagtactctgggtgtgccataccctggtctatttggcgttttcgattttgcggatgacctgaaagaggcgatgctcaacgaagtatcctctgctgtcacatcttgcgaagagaacgcccgcgcgaaaacggttaccggtgtcagcgcgatcaagcaactcggcatactccacctgggtgatgagtttgttgacctcaatttccgtccagatgtcatgttccgtcgacgtcgcgatttgctagcaaaggaaatcgatcttcccaccgaactttgggatctcatcgattggtccactctcatgcaacggcaggaaaaggtagccggtacgggtatggctttgacggtggcaaccgctgtgggaggacgactcattggtggtatgggctggatggaccatgcactcagtgctgctaagatcgtgggcaacgacaacctaaggaagctgattgttccagccattgcaattgcagtgatgtctgccgctgcatatgttcttcagcagatcccacagtcgttgcctcatcgcttgtccactaagctctctacccaacttgcatccatcgactatgttcattcgaacagcacgcgtattgctagttcggtacgcaaggttctccggttccctgcggacaacctccgcgttgggcttacccgctcggtcgagaaactcggtgccaagcgggacgagacgatgaagacacggacggaaagtgaagttgctctcaagtactttagcaatctggtacgcagcagtgctcaccaacgcacactagtgacggatgtagatctcgacgcccatccacaggcggcggccaacatgaacatttcttgagttgacgagcgttgtaacggttgtaacgagtaatagcattgggtggcgtaagggggttggttgttaaaataataccactttgttcatctttgcttcgcttgtatctttggtatggcactctccctataagactgttggaaaaacacacagcatggtctagtgtacctcgtatctaggagtgctattctagtagctactatagtgtctcccctctccagctcaggctctaaattgaaatgggaacctcaactcgttaggatattccgaatgaacgtattacagttacttcataggcaagctactcctgtgattgaggttggaatgttttggaattttaccaagtctccttatgttatccatgctgctg

SEQ ID NO: 15782 - DNA, 309 bp, Muscodor strobelii
  misc_feature: SGI cDNA ID NO. 565235
  misc_feature: Reduced expression when VOC is produced
  misc_feature: Encodes the peptide sequence at SEQ ID NO 15783
atgggcatcgcatcaggagtcggccacctcttcgagagcgttggcgaagtattccagggtattttcctcgccatcgtccacgccttccagttcgtgttcaacaccgtgctgggattcttccagttcatcctcaacagcatcgcgggcttgttcaagggattcgtcaacttcgttgagggcacgcttggtttcgccattcacaacttcttcatcctcggcacactcgcagccgttgttctgggctacatggtttacactcagcgccaaggcaccgcaccagccagtcgcgctatcaagaagaatacttag

SEQ ID NO: 15783 - protein, 102 aa, Muscodor strobelii
  misc_feature: SGI Peptide ID NO. 565235
  misc_feature: Useful for introducing or modulating the production of volatile compounds
MGIASGVGHLFESVGEVFQGIFLAIVHAFQFVFNTVLGFFQFILNSIAGLFKGFVNFVEGTLGFAIHNFFILGTLAAVVLGYMVYTQRQGTAPASRAIKKNT

SEQ ID NO: 15784 - DNA, 2254 bp, Muscodor strobelii
  misc_feature: SGI EST ID NO. CUFF.37411.0
  misc_feature: Variant of the nucleotide sequence at SEQ ID NO 15782
cttccccgcgtcatcgcctaatcgagcaggcacaaaaccaacagtccgctactcatgtctgccccagaaatctaagccgaaagactgtatgtgtagcaagcctatagttacaagtgatgacatcaccggcagcacctacaacgcgacaaatcacaactatcggcccgtaacgaatgctccggataggcaaacaaagaaccaagagctgcctgcttgcggtatcagatctgaggtagcgttttcccagcccgtcatctgacatcttggcattcaagtttccttgctgtgattccgttgtggcgtttctgtacaagagttgcgcgacagccacaatttacttatagtctcgtcgttcactcatcatcctgcagtacttataaacacccccacagcctcgccatcctaagtcatacagcaacacacatcgacgcagaaacaaaccacaacagattgcaaattctctagtacaccactaaataagtcaatcgagatgggcatcgcatcaggagtcggccacctcttcgagagcgttggcgaagtattccagggtattttcctcgccatcgtccacgccttccagttcgtgttcaacaccgtgctgggattcttccagttcatcctcaacagcatcgcgggcttgttcaagggattcgtcaacttcgttgagggcacgcttggtttcgccattcacaacttcttcatcctcggcacactcgcagccgttgttctgggctacatggtttacactcagcgccaaggcaccgcaccagccagtcgcgctatcaagaagaatacttagtgtttgtcgcttccgcatgcttgcgagcctgtgcgaggttactcgacgttcgagtcgcctggttctttgcatatcgttattgatgatggctcggcgtggagttcggaacggaatggatatgcgtgtacgctagctggccagcactgatacgttgatgtccgatgatacctatagggccaaggacgggttatgagttatgaatggcgaaattgtacgataaaacacccgtataagagattgacacctctataacactactcctctattatctatgcacactgtgattcaatttattctgtatgaagaatacatgtaggtatacttaaagtctacacacgttcctcccccctatttccaagacgtacgtctcaggctattttctgatatgccccatccccacggtatccctcgtctgtttccgcccagatacggcaagactaggataagcttgattaggacgatacagatcgataaattcatttgactgcgcgggcggagtccgtggcttcatgactttgcgccacgctgccgcgataggtgaagtcgtgcgctgtggcttatgtttcgtcgagtagcttgatggcccatcctcatcgctcgatcctcctgccacgctatctgcccatgctacactcttccccttgtcttgactactgggtgtcgtgagaggtgatgagacgcgagggacctcgtgatgtgtgtgcggatgtgtataggagtgcgtatttgatctataatgggtttggactcttgaggatggtcgtttgaggggttcgtcagcgacgattgacgctcgtctgtaggttggagaaatcattgggatgactggttgttgttcttgagatctcttgccgctgtcttctggaaagctgttggctaggtcataggatgacttatgatgccgtagcggcggagtagcagtagccgtacttgcgacccgggagcttggacagatcatctggggtgatgatgtaccctcagtaggaaaagatggactctgaaatgaggtactatacgggggcctgaagtgaatgtccacgatggagtgaggtcgttcgtcgacctggttgcgatgctcgggaagccattgcatccattgcggtataggtttcgtagggctcggtttgaacgaaggcgtattcaacggatccagaatcgagacatagattgcggagtccaggggaacaacgcagtcaagttccgcaaaacctggcgtcgtcgagcggcgtacatggagttttgcaatagtgtcataatcgatatcatctcctggtccatcactagaaatttgatactgtcgtgcaggaaccctcgtgacctcaccgcgagtcttgaaacgatgtcgactgacgccgccatctgctttatcaacgcgtctcatggctttctttagcactgtctcttcatcgtcgttctcgcagctcacgacacagttgacacacatcgggatctccg

SEQ ID NO: 15785 - DNA, 1185 bp, Muscodor strobelii
  misc_feature: SGI cDNA ID NO. 565236
  misc_feature: Reduced expression when VOC is produced
  misc_feature: Encodes the peptide sequence at SEQ ID NO 15786
atggagctatttgaaggagatgtggaaatgctatccgttgcagaggatggtacgattgccgaggaagagcaggtggtggatagggcgaagggaaaacagcttacggagatcccgatgtgtgtcaactgtgtcgtgagctgcgagaacgacgatgaagagacagtgctaaagaaagccatgagacgcgttgataaagcagatggcggcgtcagtcgacatcgtttcaagactcgcggtgaggtcacgagggttcctgcacgacagtatcaaatttctagtgatggaccaggagatgatatcgattatgacactattgcaaaactccatgtacgccgctcgacgacgccaggttttgcggaacttgactgcgttgttcccctggactccgcaatctatgtctcgattctggatccgttgaatacgccttcgttcaaaccgagccctacgaaacctataccgcaatggatgcaatggcttcccgagcatcgcaaccaggtcgacgaacgacctcactccatcgtggacattcacttcaggcccccgtatagtacctcatttcagagtccatcttttcctactgagggtacatcatcaccccagatgatctgtccaagctcccgggtcgcaagtacggctactgctactccgccgctacggcatcataagtcatcctatgacctagccaacagctttccagaagacagcggcaagagatctcaagaacaacaaccagtcatcccaatgatttctccaacctacagacgagcgtcaatcgtcgctgacgaacccctcaaacgaccatcctcaagagtccaaacccattatagatcaaatacgcactcctatacacatccgcacacacatcacgaggtccctcgcgtctcatcacctctcacgacacccagtagtcaagacaaggggaagagtgtagcatgggcagatagcgtggcaggaggatcgagcgatgaggatgggccatcaagctactcgacgaaacataagccacagcgcacgacttcacctatcgcggcagcgtggcgcaaagtcatgaagccacggactccgcccgcgcagtcaaatgaatttatcgatctgtatcgtcctaatcaagcttatcctagtcttgccgtatctgggcggaaacagacgagggataccgtggggatggggcatatcagaaaatag

SEQ ID NO: 15786 - protein, 394 aa, Muscodor strobelii
  misc_feature: SGI Peptide ID NO. 565236
  misc_feature (31)..(368): NCBI GI: 261360262 Blast Desc: conserved [Verticillium albo-atrum VaMs.102]
  misc_feature (21)..(374): NCBI GI: 46124579 Blast Desc: FG06667.1 [Gibberella zeae PH-1]
  misc_feature (21)..(340): NCBI GI: 145601955 Blast Desc: [Magnaporthe grisea 70-15] gi|145010412|gb|EDJ95068.1| [Magnaporthe grisea 70-15]
  misc_feature (15)..(157): NCBI GI: 171685590 Blast Desc: protein product [Podospora anserina] gi|170942756|emb|CAP68409.1| protein product [Podospora anserina]
  misc_feature (48)..(157): NCBI GI: 164428945 Blast Desc: NCU10345 [Neurospora crassa OR74A] gi|157072346|gb|EDO65407.1| [Neurospora crassa OR74A]
  misc_feature: Useful for introducing or modulating the production of volatile compounds
MELFEGDVEMLSVAEDGTIAEEEQVVDRAKGKQLTEIPMCVNCVVSCENDDEETVLKKAMRRVDKADGGVSRHRFKTRGEVTRVPARQYQISSDGPGDDIDYDTIAKLHVRRSTTPGFAELDCVVPLDSAIYVSILDPLNTPSFKPSPTKPIPQWMQWLPEHRNQVDERPHSIVDIHFRPPYSTSFQSPSFPTEGTSSPQMICPSSRVASTATATPPLRHHKSSYDLANSFPEDSGKRSQEQQPVIPMISPTYRRASIVADEPLKRPSSRVQTHYRSNTHSYTHPHTHHEVPRVSSPLTTPSSQDKGKSVAWADSVAGGSSDEDGPSSYSTKHKPQRTTSPIAAAWRKVMKPRTPPAQSNEFIDLYRPNQAYPSLAVSGRKQTRDTVGMGHIRK

SEQ ID NO: 15787 - DNA, 1549 bp, Muscodor strobelii
  misc_feature: SGI EST ID NO. CUFF.37411.2
  misc_feature: Variant of the nucleotide sequence at SEQ ID NO 15785
cgacgatgaagagacagtgctaaagaaagccatgagacgcgttgataaagcagatggcggcgtcagtcgacatcgtttcaagactcgcggtgaggtcacgagggttcctgcacgacagtatcaaatttctagtgatggaccaggagatgatatcgattatgacactattgcaaaactccatgtacgccgctcgacgacgccaggttttgcggaacttgactgcgttgttcccctggactccgcaatctatgtctcgattctggatccgttgaatacgccttcgttcaaaccgagccctacgaaacctataccgcaatggatgcaatggcttcccgagcatcgcaaccaggtcgacgaacgacctcactccatcgtggacattcacttcaggcccccgtatagtacctcatttcagagtccatcttttcctactgagggtacatcatcaccccagatgatctgtccaagctcccgggtcgcaagtacggctactgctactccgccgctacggcatcataagtcatcctatgacctagccaacagctttccagaagacagcggcaagagatctcaagaacaacaaccagtcatcccaatgatttctccaacctacagacgagcgtcaatcgtcgctgacgaacccctcaaacgaccatcctcaagagtccaaacccattatagatcaaatacgcactcctatacacatccgcacacacatcacgaggtccctcgcgtctcatcacctctcacgacacccagtagtcaagacaaggggaagagtgtagcatgggcagatagcgtggcaggaggatcgagcgatgaggatgggccatcaagctactcgacgaaacataagccacagcgcacgacttcacctatcgcggcagcgtggcgcaaagtcatgaagccacggactccgcccgcgcagtcaaatgaatttatcgatctgtatcgtcctaatcaagcttatcctagtcttgccgtatctgggcggaaacagacgagggataccgtggggatggggcatatcagaaaatagcctgagacgtacgtcttggaaataggggggaggaacgtgtgtagactttaagtatacctacatgtattcttcatacagaataaattgaatcacagtgtgcatagataatagaggagtagtgttatagaggtgtcaatctcttatacgggtgttttatcgtacaatttcgccattcataactcataacccgtccttggccctataggtatcatcggacatcaacgtatcagtgctggccagctagcgtacacgcatatccattccgttccgaactccacgccgagccatcatcaataacgatatgcaaagaaccaggcgactcgaacgtcgagtaacctcgcacaggctcgcaagcatgcggaagcgacaaacactaagtattcttcttgatagcgcgactggctggtgcggtgccttggcgctgagtgtaaaccatgtagcccagaacaacggctgcgagtgtgccgaggatgaagaagttgtctagttggcgaatggagttagtgttta

SEQ ID NO: 15788 - DNA, 2091 bp, Muscodor strobelii
  misc_feature: SGI cDNA ID NO. 565237
  misc_feature: Encodes the peptide sequence at SEQ ID NO 15789
atgtcgtcgcctccgcgtcgccgctcgaagcgcatcgcttcctcttccaagagaagcagggcctcgcccactccccaacttgagtccctcaccgaggccgaagagcctgttcagcaggacgcacctcgtcttcccaccatcatgtcttcacctgctcccaatcccaagacaccctcctctgcctcgccggtcaagctgcccatgtccgagatgcatcccagcagagtccatccgaccactgcgcccccctcttctgcacttcgacacggcttcactgacattgactacactgctccgcctgctgctttgggccagaacactccttccaagaccactgtgccgtcgtctgatttcacctttcgctacgtgcgatccactggcgagaagtctgatggcgacgataagcttggacctgctgcccgcaagatgatggaggaactccgcgaggaggctgctcagatcaaggcccaattggctgctgaacgtgctcgtgagctagccgagcgtggagagactgcagatggccgcaagattgccgctgctaagggtaaggctggacgctacagcgccgctcatctggccgagtttaagaagatggattctatcgaaggacacccttcagcctaccgtgccgcccccggtcgctctacgcccaacaagaatgtgacgccattgaagcatggtgtgaagcgtagccagtccaaggccaatctcgacgagcccgagtccgcccatgctaagaccgtcccctctcgtttccaggtccgactggtcgagcagcccagtgctgcacccgagtcaccgtcgaagcgtattcgtcagcgtattgaggatgatacatccacattccgtcctgtttcacgagacggatcttccatccctcggcccaagagcagcggcaatgactccattcgcagtgcaattccccggtcgcagacacttagcaacattgcgaccccgaccaagtcttcgttggctcgcagcaatagcatcaagtcaaccatcagccttctcaaatcgcccagcaagtcgggcctcagtcaagttaggagcttttctaccaggcttgagggcgcgttcacacgatctcctaccaaaccggagcacgagaatggtctccgatctcctggtaagaaagggtttggtgggctgacaaagtccgctacggccagcaacttgtctctgtttgagagcaacaaccccactcatgtgcagacaccgggtcgatttgatagagtcaaatcaatcctgaagcgacaagttagtggacccaagtctaagccgtcagagactgtgtctccctccaaaacgcccagccaccacgcttcgctggacaagatgctacctcctgtgcctctaaccactccgggacgaaaacacgaccgtcacgttgctttcaccccagagacgaaacgtgcagccatggctcagaactctccctcccccattaagtcgagcattccgagatcgacaacgcttgccaaactgcctgcgcctgacttccctactggtaacacaaacaagaaaaagacgcagaaggatgaagtttcgtatcctgatctctcagcttacgaatccggcgagatgaaggaacaatctccgccccagtctgtacctggcaccttcacattccgtagtgaccatactatcagctttagctcgagtccgtctaaaggattcgggtcggctctcggccaagctagtctgcgtcatgttcgcgaatcaaccctccctcccgttcgcatgccaggcgccttcccacgcaactcggaaatttcgcctgataaggagaacgatgatcctgctgtcgcctctggaatccctcatgggctgccgaacaagaagcgctcccgagccggcgccgatgaagatgaagaggatgagggtgctaagcgaggcatgaagaagcttcggaaagatcctcctgttgcggagggacatgctgtggtggctccccgccttgtcagccagacttcgcctgctaagaagtcaatgacacccggatctcgtacaccaagccctcaaaagaagaagaccggtctgagcatgagtagactcaacatgctggctcgacccaaggttcgcaagtag

SEQ ID NO: 15789 - protein, 696 aa, Muscodor strobelii
  misc_feature: SGI Peptide ID NO. 565237
  misc_feature (3)..(695): NCBI GI: 46124577 Blast Desc: FG06666.1 [Gibberella zeae PH-1]
  misc_feature (49)..(695): NCBI GI: 116208184 Blast Desc: CHGG_03385 [Chaetomium globosum CBS 148.51] gi|88183982|gb|EAQ91450.1| CHGG_03385 [Chaetomium globosum CBS 148.51]
  misc_feature (55)..(679): NCBI GI: 171685592 Blast Desc: protein product [Podospora anserina] gi|170942757|emb|CAP68410.1| protein product [Podospora anserina]
  misc_feature (3)..(695): NCBI GI: 256733292 Blast Desc: NECHADRAFT_100238 [Nectria haematococca mpVI 77-13-4]
  misc_feature (24)..(696): NCBI GI: 154292486 Blast Desc: BC1G_14882 [Botryotinia fuckeliana B05.10] gi|150846079|gb|EDN21272.1| BC1G_14882 [Botryotinia fuckeliana B05.10]
  misc_feature (27)..(696): NCBI GI: 156051386 Blast Desc: SS1G_07100 [Sclerotinia sclerotiorum 1980] gi|154704878|gb|EDO04617.1| SS1G_07100 [Sclerotinia sclerotiorum 1980]
  misc_feature (52)..(696): NCBI GI: 145601953 Blast Desc: MGG_12890 [Magnaporthe grisea 70-15] gi|145010411|gb|EDJ95067.1| MGG_12890 [Magnaporthe grisea 70-15]
  misc_feature (7)..(693): NCBI GI: 164428945 Blast Desc: NCU10345 [Neurospora crassa OR74A] gi|157072346|gb|EDO65407.1| [Neurospora crassa OR74A]
  misc_feature (53)..(695): NCBI GI: 242784811 Blast Desc: erythromycin esterase, [Talaromyces stipitatus ATCC 10500] gi|218720615|gb|EED20034.1| erythromycin esterase, [Talaromyces stipitatus ATCC 10500]
  misc_feature (24)..(693): NCBI GI: 255935289 Blast Desc: Pc13g02300 [Penicillium chrysogenum Wisconsin 54-1255] gi|211583291|emb|CAP91299.1| Pc13g02300 [Penicillium chrysogenum Wisconsin 54-1255]
MSSPPRRRSKRIASSSKRSRASPTPQLESLTEAEEPVQQDAPRLPTIMSSPAPNPKTPSSASPVKLPMSEMHPSRVHPTTAPPSSALRHGFTDIDYTAPPAALGQNTPSKTTVPSSDFTFRYVRSTGEKSDGDDKLGPAARKMMEELREEAAQIKAQLAAERARELAERGETADGRKIAAAKGKAGRYSAAHLAEFKKMDSIEGHPSAYRAAPGRSTPNKNVTPLKHGVKRSQSKANLDEPESAHAKTVPSRFQVRLVEQPSAAPESPSKRIRQRIEDDTSTFRPVSRDGSSIPRPKSSGNDSIRSAIPRSQTLSNIATPTKSSLARSNSIKSTISLLKSPSKSGLSQVRSFSTRLEGAFTRSPTKPEHENGLRSPGKKGFGGLTKSATASNLSLFESNNPTHVQTPGRFDRVKSILKRQVSGPKSKPSETVSPSKTPSHHASLDKMLPPVPLTTPGRKHDRHVAFTPETKRAAMAQNSPSPIKSSIPRSTTLAKLPAPDFPTGNTNKKKTQKDEVSYPDLSAYESGEMKEQSPPQSVPGTFTFRSDHTISFSSSPSKGFGSALGQASLRHVRESTLPPVRMPGAFPRNSEISPDKENDDPAVASGIPHGLPNKKRSRAGADEDEEDEGAKRGMKKLRKDPPVAEGHAVVAPRLVSQTSPAKKSMTPGSRTPSPQKKKTGLSMSRLNMLARPKVRK

SEQ ID NO: 15790 - DNA, 2827 bp, Muscodor strobelii
  misc_feature: SGI EST ID NO. CUFF.37402.0
  misc_feature: Variant of the nucleotide sequence at SEQ ID NO 15788
cgtcgatcaaattgccaaacattgcgcgtatatgtttgtgacatcacatttcgctcgcccttatctgttaatctccaatcgacagccacgtccttagctggcacaattaaccctatatcattttgtgctgtttaatccgtacacagttatcgacgacaacctacgcgctcatcatgtcgtcgcctccgcgtcgccgctcgaagcgcatcgcttcctcttccaagagaagcagggcctcgcccactccccaacttgagtccctcaccgaggccgaagagcctgttcagcaggacgcacctcgtcttcccaccatcatgtcttcacctgctcccaatcccaagacaccctcctctgcctcgccggtcaagctgcccatgtccgagatgcatcccagcagagtccatccgaccactgcgcccccctcttctgcacttcgacacggcttcactgacattgactacactgctccgcctgctgctttgggccagaacactccttccaagaccactgtgccgtcgtctgatttcacctttcgctacgtgcgatccactggcgagaagtctgatggcgacgataagcttggacctgctgcccgcaagatgatggaggaactccgcgaggaggctgctcagatcaaggcccaattggctgctgaacgtgctcgtgagctagccgagcgtggagagactgcagatggccgcaagattgccgctgctaagggtaaggctggacgctacagcgccgctcatctggccgagtttaagaagatggattctatcgaaggacacccttcagcctaccgtgccgcccccggtcgctctacgcccaacaagaatgtgacgccattgaagcatggtgtgaagcgtagccagtccaaggccaatctcgacgagcccgagtccgcccatgctaagaccgtcccctctcgtttccaggtccgactggtcgagcagcccagtgctgcacccgagtcaccgtcgaagcgtattcgtcagcgtattgaggatgatacatccacattccgtcctgtttcacgagacggatcttccatccctcggcccaagagcagcggcaatgactccattcgcagtgcaattccccggtcgcagacacttagcaacattgcgaccccgaccaagtcttcgttggctcgcagcaatagcatcaagtcaaccatcagccttctcaaatcgcccagcaagtcgggcctcagtcaagttaggagcttttctaccaggcttgagggcgcgttcacacgatctcctaccaaaccggagcacgagaatggtctccgatctcctggtaagaaagggtttggtgggctgacaaagtccgctacggccagcaacttgtctctgtttgagagcaacaaccccactcatgtgcagacaccgggtcgatttgatagagtcaaatcaatcctgaagcgacaagttagtggacccaagtctaagccgtcagagactgtgtctccctccaaaacgcccagccaccacgcttcgctggacaagatgctacctcctgtgcctctaaccactccgggacgaaaacacgaccgtcacgttgctttcaccccagagacgaaacgtgcagccatggctcagaactctccctcccccattaagtcgagcattccgagatcgacaacgcttgccaaactgcctgcgcctgacttccctactggtaacacaaacaagaaaaagacgcagaaggatgaagtttcgtatcctgatctctcagcttacgaatccggcgagatgaaggaacaatctccgccccagtctgtacctggcaccttcacattccgtagtgaccatactatcagctttagctcgagtccgtctaaaggattcgggtcggctctcggccaagctagtctgcgtcatgttcgcgaatcaaccctccctcccgttcgcatgccaggcgccttcccacgcaactcggaaatttcgcctgataaggagaacgatgatcctgctgtcgcctctggaatccctcatgggctgccgaacaagaagcgctcccgagccggcgccgatgaagatgaagaggatgagggtgctaagcgaggcatgaagaagcttcggaaagatcctcctgttgcggagggacatgctgtggtggctccccgccttgtcagccagacttcgcctgctaagaagtcaatgacacccggatctcgtacaccaagccctcaaaagaagaagaccggtctgagcatgagtagactcaacatgctggctcgacccaaggttcgcaagtagtcgtctcatggtttggagtacgggcgtcactgcgaccgacgattatgcgctatgaatggaaatgacactgaatgcagtaacgaacacccttgctatccaagagaataggatttggaacggccattggtggccttcttcaaggctgttgtttatgcttgcttgtttcacactgcgaggatatgaaggagttttcacgacactggcgtcagtcacgtttacgttaagtgtctctgaaatatgcaattggttgcatatgatcttttacttgttctgctttgctttcgagttgtctctttttgaagagacagactccaatttgtagggttactaaaaacaaatgtttctgttggtatggggatcggtggctggctttggcgtttagtggactggaggtgcatatgtcgcagggtgcgatcatggtaatggacacaacgtgctcttgtttcatctgctgacgagcatttgtagccctttgcggcacttagatgtctctattcactaatgatgagttattaagaccggttttcatcataaatcttactccgatgttcggtgatagcgac

SEQ ID NO: 15791 - DNA, 1236 bp, Muscodor strobelii
  misc_feature: SGI cDNA ID NO. 565238
  misc_feature: Encodes the peptide sequence at SEQ ID NO 15792
atggcggatatcaaaccatacacgatcaatgtgagcgagtcgcagattcaggatctgaaggctcgactctccttcgccaaattcccagatgagcttgagggcgccgagtgggaaatgggcgcgccgcttagcgacgtccaacggttgacaaagtactggaaggactcttttgactggaagaaagccgaaaagaccatcaatgagttgcctcatttcatcaccgatatccaatgcgaaggtttcaagccgctcgctatacacttcatacatatcaaaagtggtgtcaagggagccatacctcttctctttatccatggatggcctggtcacttcatggaagcatataagattgcgaagcagcttacgggaggcgatggggtgaatacgccagcttttgatctggtagttccgtcgctccccaattttggcttttctcaaggcactaagcagcgagcattcatgctggaacaatacgctgaaacgatgaacaagctcatgttgagacttggctataatgaatacgtgacacagggtggtgactggggctgccacattagtcgcacactcgcgcatttgtttccacagtactgtaaggcaacacacttgaactacgatttcgccgaacctccagagtttctcaagaatcctctactggcgctgcagcacgcaatccagccatactcgaaacacgagagggagggtcagaagcgaactcaacagttccaaaaggaaggacgaggatacaatctcgaacagtcgactaaaccgcaaactcttggatatggccttgctgactctccggtggcgtgtctcgcctggatttacgagaagctgcacgactggactgatagctacccatggactgacgacgaggtctgtacttgggttagcatctactggttctcgaccgccggtcctgccgcaagtgttcgtatctactatgaaaccaatcataacgttgatggacgaccgaataagatggaccgcaaacggctacagacttattcgccaggtgtcaagattgggttcagccatttcccaatggacttagcagtcctaccaagtacttggatcaagacgttgggtaacatcgtctttgagaaaattcacgagagcggagggcacttcgctgcttgggaaagacctaacgagatcatccaagacgtacgcgagatgtttgggagaggtggcggtgcttttggttgtgtcaagggcgtaaatggctattcatcgtaa

SEQ ID NO: 15792 - protein, 411 aa, Muscodor strobelii
  misc_feature: SGI Peptide ID NO. 565238
  misc_feature (132)..(391): Pfam Id: PF00561 Pfam Desc: alpha/beta hydrolase fold
  misc_feature (5)..(117): Pfam Id: PF06441 Pfam Desc: Epoxide hydrolase N terminus
  misc_feature (132)..(199): Pfam Id: PF00561 Pfam Desc: alpha/beta hydrolase fold
  misc_feature (6)..(409): NCBI GI: 156048390 Blast Desc: SS1G_08926 [Sclerotinia sclerotiorum 1980] gi|154693323|gb|EDN93061.1| SS1G_08926 [Sclerotinia sclerotiorum 1980]
  misc_feature (1)..(409): NCBI GI: 255950628 Blast Desc: Pc22g21860 [Penicillium chrysogenum Wisconsin 54-1255] gi|211593098|emb|CAP99474.1| Pc22g21860 [Penicillium chrysogenum Wisconsin 54-1255]
  misc_feature (4)..(410): NCBI GI: 149210895 Blast Desc: MGCH7_ch7g920 [Magnaporthe grisea 70-15] gi|86196875|gb|EAQ71513.1| MGCH7_ch7g920 [Magnaporthe grisea 70-15]
  misc_feature (3)..(404): NCBI GI: 256730470 Blast Desc: NECHADRAFT_30008 [Nectria haematococca mpVI 77-13-4]
  misc_feature (1)..(409): NCBI GI: 169608071 Blast Desc: SNOG_07102 [Phaeosphaeria nodorum SN15] gi|111064633|gb|EAT85753.1| SNOG_07102 [Phaeosphaeria nodorum SN15]
  misc_feature (1)..(409): NCBI GI: 238841134 Blast Desc: epoxide hydrolase [Microsporum canis CBS 113480]
  misc_feature (3)..(409): NCBI GI: 189188968 Blast Desc: epoxide hydrolase 1 [Pyrenophora tritici-repentis Pt-1C-BFP] gi|187972429|gb|EDU39928.1| epoxide hydrolase 1 [Pyrenophora tritici-repentis Pt-1C-BFP]
  misc_feature (1)..(400): NCBI GI: 154298362 Blast Desc: BC1G_11636 [Botryotinia fuckeliana B05.10] gi|150858089|gb|EDN33281.1| BC1G_11636 [Botryotinia fuckeliana B05.10]
  misc_feature (1)..(409): NCBI GI: 159125001 Blast Desc: epoxide hydrolase, [Aspergillus fumigatus A1163]
  misc_feature (1)..(409): NCBI GI: 70994616 Blast Desc: epoxide hydrolase [Aspergillus fumigatus Af293] gi|66849719|gb|EAL90047.1| epoxide hydrolase, [Aspergillus fumigatus Af293]
  misc_feature (3)..(394): SWISSPROT Homolog: EC 3.3.2.9 Microsomal epoxide hydrolase
MADIKPYTINVSESQIQDLKARLSFAKFPDELEGAEWEMGAPLSDVQRLTKYWKDSFDWKKAEKTINELPHFITDIQCEGFKPLAIHFIHIKSGVKGAIPLLFIHGWPGHFMEAYKIAKQLTGGDGVNTPAFDLVVPSLPNFGFSQGTKQRAFMLEQYAETMNKLMLRLGYNEYVTQGGDWGCHISRTLAHLFPQYCKATHLNYDFAEPPEFLKNPLLALQHAIQPYSKHEREGQKRTQQFQKEGRGYNLEQSTKPQTLGYGLADSPVACLAWIYEKLHDWTDSYPWTDDEVCTWVSIYWFSTAGPAASVRIYYETNHNVDGRPNKMDRKRLQTYSPGVKIGFSHFPMDLAVLPSTWIKTLGNIVFEKIHESGGHFAAWERPNEIIQDVREMFGRGGGAFGCVKGVNGYSS

SEQ ID NO: 15793 - DNA, 2153 bp, Muscodor strobelii
  misc_feature: SGI EST ID NO. CUFF.37430.1
  misc_feature: Variant of the nucleotide sequence at SEQ ID NO 15791
cgatgaagtaccgtacagtttctggggttcgaagacccaccacgccctacgaacgtcatttgagcgtgtagtacatgaagcttacaaacgttcaggtaccatacacaacaccaccaaagtcgggtatgatctcattttagcgccacaaagctcaagccatcagtcaaggctcaagatctataagtataatgtctatccatgaactgcagcggtataatattcgaggagactaaattatcgcccagattgtatcttgtttgtctcttggccaccaaatagttgcttcgtatattggaacacaatggcggatatcaaaccatacacgatcaatgtgagcgagtcgcagattcaggatctgaaggctcgactctccttcgccaaattcccagatgagcttgagggcgccgagtgggaaatgggcgcgccgcttagcgacgtccaacggttgacaaagtactggaaggactcttttgactggaagaaagccgaaaagaccatcaatgagttgcctcatttcatcaccgatatccaatgcgaaggtttcaagccgctcgctatacacttcatacatatcaaaagtggtgtcaagggagccatacctcttctctttatccatggatggcctggtcacttcatggaagcatataagattgcgaagcagcttacgggaggcgatggggtgaatacgccagcttttgatctggtagttccgtcgctccccaattttggcttttctcaaggcactaagcagcgagcattcatgctggaacaatacgctgaaacgatgaacaagctcatgttgagacttggctataatgaatacgtgacacagggtggtgactggggctgccacattagtcgcacactcgcgcatttgtttccacagtactgtaaggcaacacacttgaactacgatttcgccgaacctccagagtttctcaagaatcctctactggcgctgcagcacgcaatccagccatactcgaaacacgagagggagggtcagaagcgaactcaacagttccaaaaggaaggacgaggatacaatctcgaacagtcgactaaaccgcaaactcttggatatggccttgctgactctccggtggcgtgtctcgcctggatttacgagaagctgcacgactggactgatagctacccatggactgacgacgaggtctgtacttgggttagcatctactggttctcgaccgccggtcctgccgcaagtgttcgtatctactatgaaaccaatcataacgttgatggacgaccgaataagatggaccgcaaacggctacagacttattcgccaggtgtcaagattgggttcagccatttcccaatggacttagcagtcctaccaagtacttggatcaagacgttgggtaacatcgtctttgagaaaattcacgagagcggagggcacttcgctgcttgggaaagacctaacgagatcatccaagacgtacgcgagatgtttgggagaggtggcggtgcttttggttgtgtcaagggcgtaaatggctattcatcgtaataaggcggcttcggattcttgatgaggcactgatgttattacgatttaaataccaatacctttttttctgcataaaagtcaatgcatcagacctcccacttggccgaagaacatgttcgcaatgctagaaggccttaggtgtttaatcaaagttgggaatacctggctgcttctcgatccgctcgaagttactctttagtcgaatgcctccagaatatatcaacactagtagatcaaaatagtggtcagtgatagccgaaccagctatgcggcgactaattactgtatgtgataacgatgctgtggtttacagaatatttcaggtatcaattatatgtcagagagtgtatgtatgtgcgtgtaggtaactgtgtgattcaaactgtatctcaattactgtacttgttgtatgtccgcaactatatatgagaggacatcaagggggtcggatccgacgcattccgaataaggctcaagacactataaatgcacataagtaaggaatctacctagctttttggtgattacccctattaccaccactcaaaggctgttacaaagtggcccgcttattcggggtaaccacctaaggtaatgtggtacactcaggggagca

SEQ ID NO: 15794 - DNA, 1239 bp, Muscodor strobelii
  misc_feature: SGI cDNA ID NO. 565239
  misc_feature: Encodes the peptide sequence at SEQ ID NO 15795
atggcggatatcaaaccatacacgatcaatgtgagcgagtcgcagattcaggatctgaaggctcgactctccttcgccaaattcccagatgagcttgagggcgccgagtgggaaatgggcgcgccgcttagcgacgtccaacggttgacaaagtactggaaggactcttttgactggaagaaagccgaaaagaccatcaatgagttgcctcatttcatcaccgatatccaatgcgaaggtttcaagccgctcgctatacacttcatacatatcaaaagtggtgtcaagggagccatacctcttctctttatccatggatggcctggtcacttcatggaagcatataagattgcgaagcagcttacgggaggcgatggggtgaatacgccagcttttgatctggtagttccgtcgctccccaattttggcttttctcaaggcactaagcagcgagcattcatgctggaacaatacgctgaaacgatgaacaagctcatgttgagacttggctataatgaatacgtgacacagggtggtgactggggctgccacattagtcgcacactcgcgcatttgtttccacagtactgtaaggcaacacacttgaactacgatttcgccgaacctccagagtttctcaagaatcctctactggcgctgcagcacgcaatccagccatactcgaaacacgagagggagggtcagaagcgaactcaacagttccaaaaggaaggacgaggatacaatctcgaacagtcgactaaaccgcaaactcttggatatggccttgctgactctccggtggcgtgtctcgcctggatttacgagaagctgcacgactggactgatagctacccatggactgacgacgaggtctgtacttgggttagcatctactggttctcgaccgccggtcctgccgcaagtgttcgtatctactatgaaaccaatcataacgttgatggacgaccgaataagatggaccgcaaacggctacagacttattcgccaggtgtcaagattgggttcagccatttcccaatggacttagcagtcctaccaagtacttggatcaagacgttgggtaacatcgtctttgagaaaattcacgagagcggagggcacttcgctgcttgggaaagacctaacgagatcatccaagacgtacgcgagatgtttgtagggagaggtggcggtgcttttggttgtgtcaagggcgtaaatggctattcatcgtaa

SEQ ID NO: 15795 - protein, 412 aa, Muscodor strobelii
  misc_feature: SGI Peptide ID NO. 565239
  misc_feature (132)..(391): Pfam Id: PF00561 Pfam Desc: alpha/beta hydrolase fold
  misc_feature (5)..(117): Pfam Id: PF06441 Pfam Desc: Epoxide hydrolase N terminus
  misc_feature (132)..(199): Pfam Id: PF00561 Pfam Desc: alpha/beta hydrolase fold
  misc_feature (6)..(410): NCBI GI: 156048390 Blast Desc: SS1G_08926 [Sclerotinia sclerotiorum 1980] gi|154693323|gb|EDN93061.1| SS1G_08926 [Sclerotinia sclerotiorum 1980]
  misc_feature (1)..(410): NCBI GI: 255950628 Blast Desc: Pc22g21860 [Penicillium chrysogenum Wisconsin 54-1255] gi|211593098|emb|CAP99474.1| Pc22g21860 [Penicillium chrysogenum Wisconsin 54-1255]
  misc_feature (4)..(411): NCBI GI: 149210895 Blast Desc: MGCH7_ch7g920 [Magnaporthe grisea 70-15] gi|86196875|gb|EAQ71513.1| MGCH7_ch7g920 [Magnaporthe grisea 70-15]
  misc_feature (3)..(405): NCBI GI: 256730470 Blast Desc: NECHADRAFT_30008 [Nectria haematococca mpVI 77-13-4]
  misc_feature (1)..(410): NCBI GI: 169608071 Blast Desc: SNOG_07102 [Phaeosphaeria nodorum SN15] gi|111064633|gb|EAT85753.1| SNOG_07102 [Phaeosphaeria nodorum SN15]
  misc_feature (1)..(410): NCBI GI: 238841134 Blast Desc: epoxide hydrolase [Microsporum canis CBS 113480]
  misc_feature (3)..(410): NCBI GI: 189188968 Blast Desc: epoxide hydrolase 1 [Pyrenophora tritici-repentis Pt-1C-BFP] gi|187972429|gb|EDU39928.1| epoxide hydrolase 1 [Pyrenophora tritici-repentis Pt-1C-BFP]
  misc_feature (1)..(401): NCBI GI: 154298362 Blast Desc: BC1G_11636 [Botryotinia fuckeliana B05.10] gi|150858089|gb|EDN33281.1| BC1G_11636 [Botryotinia fuckeliana B05.10]
  misc_feature (1)..(410): NCBI GI: 159125001 Blast Desc: epoxide hydrolase, [Aspergillus fumigatus A1163]
  misc_feature (1)..(410): NCBI GI: 70994616 Blast Desc: epoxide hydrolase [Aspergillus fumigatus Af293] gi|66849719|gb|EAL90047.1| epoxide hydrolase, [Aspergillus fumigatus Af293]
  misc_feature (3)..(395): SWISSPROT Homolog: EC 3.3.2.9 Microsomal epoxide hydrolase
MADIKPYTINVSESQIQDLKARLSFAKFPDELEGAEWEMGAPLSDVQRLTKYWKDSFDWKKAEKTINELPHFITDIQCEGFKPLAIHFIHIKSGVKGAIPLLFIHGWPGHFMEAYKIAKQLTGGDGVNTPAFDLVVPSLPNFGFSQGTKQRAFMLEQYAETMNKLMLRLGYNEYVTQGGDWGCHISRTLAHLFPQYCKATHLNYDFAEPPEFLKNPLLALQHAIQPYSKHEREGQKRTQQFQKEGRGYNLEQSTKPQTLGYGLADSPVACLAWIYEKLHDWTDSYPWTDDEVCTWVSIYWFSTAGPAASVRIYYETNHNVDGRPNKMDRKRLQTYSPGVKIGFSHFPMDLAVLPSTWIKTLGNIVFEKIHESGGHFAAWERPNEIIQDVREMFVGRGGGAFGCVKGVNGYSS

SEQ ID NO: 15796 - DNA, 2153 bp, Muscodor strobelii; identical to SEQ ID NO: 15793
  misc_feature: SGI EST ID NO. CUFF.37430.1
  misc_feature: Variant of the nucleotide sequence at SEQ ID NO 15794

SEQ ID NO: 15797 - DNA, 2319 bp, Muscodor strobelii
  misc_feature: SGI cDNA ID NO. 565240
  misc_feature: Encodes the peptide sequence at SEQ ID NO 15798
atggatcgaacatccaaccccagctcgaactcgaaagcctcgtctgtcgaaacccaaacgatcgtatccgagaattcttccatttcgatggtggccacgaccaaacccaataccaggtccccgcggaaactgcgatcccaatacccacgagagtctgccgaaaaccatgtggaatatatcttggtggcatcgttcgacattgaccgtggtccggttatggagcatcaatttcccgttgcaatcaccggcgacgagaacatgttagccgagttgatgttaccggatcaggcgcatgcgcgaaaccaggactggaccattttcttcctacataaagactcaaatcaagaagaggaggaggaagaacaaaggcagaaagacgcacgtcgaagaaggaggagacggcgaaagcacagagaaggtggagtcctcaatacagatgacgataacgacctgagcgacgaagaaaacgagagccgcgaaggcgacgacgataatgatgatgactttgatgacgacatgtcgactgattcggagcctgaaggcggcgaagggcccccgttgatctacgtcctgaacttggtctataccaagcacgacaagtcggtcaagagaggggcaattgtcaaagccatggctatatgtacccgccatccctttttgcatatatataagcctcttttgctacttgcactggaagagtactttaagtctcccgttccggaaaccttatctttgctttacgatgctgtcaacaacatggatctgtctttaatgcctagactcagcttgctggaaaagtatctcttacaatcgagcaacaacaaggatctgtttgttgagaaattcgagctgatggtccaaaggcgcatcgccgaggacaaatcgcgccaagttggggaaccttttgacgcaagcaaaagcccccctaagtcccagggtatatctcgtgcaggtactaaggcgtatctcgaaggccaaacggcctatgctgtgccacgagacactcatgagtttgagagcaaagtcatgtacaaaggcatccctatacccgtaaaaattcccacggctactatgccagagacagtcggtgatttctctctcatcaagttgatacagaacttctctgagccccatgctaaatccatgcaaccctttacaacacatgcccatctcaccactaatggacctgggacgcatcccatcatggtcttggccaatgctcttctcactcagaagcgggtcatttttctggggcacaatatgccctccggtgatgttgcggaagcagtcctagctgcttgcgcccttgcatctggcggtatacttcggggctttacccgattcgcatttccctatacggatctcacgaagatcgatgatcttctcaaggtaccgggctttattgctggcgtgacaaatcctacgtttgaacttcacccagaatggtgggatgttctgtgtgatcttccgagtgggcgcataaagatcagtagcaagatcgaacagccgcccatcacagaaggtttagtgtatttccagcaacaaaatccatcctttgcgaatttattaaatggctcatcgaatacatcagccgatcttacaggagatatcttgttcatgaatgatattctcaagagtatcgctgcgaggcacggagaacgggtcattcgtgccaagtggcgcgattgggtggtcagatttactcgtatcgctgctgccttcgaagaaagtgtctacggcgctagtgcattgttcattggaggtgatgaacacgagcagatcacaggtggccatggctacgtttgggccgacgatgcttctaaacagaaggaactcgcaggaaacgtatgccgaattgagggctggagaaacacaagaagctactacagctatatccaggacctcggccaactgtacactatccgacccttgaagggcctggatctgcaccatatgcatgatcgcctgcgcactcagcgacttacgcccttgcaaagtcgagatgtttatctcgccttttctaattctgtgtggtcctatgacgagatctgtcttctgttgacagtcgcccctgaatcccatgcaggcctcttctatatcgcgctcgggcttttccataaagacaaagacgtgcgtgtcaagacatcggagctcctggagcgtgtatctgagcacgaagctggacagcactggtggaaaggacttagccgatatcagaagcttgcctaccataggattcgacgggaagccgagacggacatgaagacagagctcgaaaaggaccattttgttcccggtgatggcaagagaagtagttaa

SEQ ID NO: 15798 - protein, 772 aa, Muscodor strobelii
  misc_feature: SGI Peptide ID NO. 565240
  misc_feature (57)..(749): Pfam Id: PF08616 Pfam Desc: Spindle pole body interacting protein
  misc_feature (2)..(772): NCBI GI: 261360257 Blast Desc: MesA [Verticillium albo-atrum VaMs.102]
  misc_feature (2)..(765): NCBI GI: 39939844 Blast Desc: MGG_05318 [Magnaporthe grisea 70-15] gi|145010396|gb|EDJ95052.1| MGG_05318 [Magnaporthe grisea 70-15]
  misc_feature (2)..(765): NCBI GI: 46124605 Blast Desc: FG06680.1 [Gibberella zeae PH-1]
  misc_feature (2)..(761): NCBI GI: 256733283 Blast Desc: [Nectria haematococca mpVI 77-13-4]
  misc_feature (1)..(772): NCBI GI: 171687022 Blast Desc: protein product [Podospora anserina] gi|170943472|emb|CAP69125.1| protein product [Podospora anserina]
  misc_feature (29)..(768): NCBI GI: 116191793 Blast Desc: CHGG_05614 [Chaetomium globosum CBS 148.51] gi|88181527|gb|EAQ88995.1| CHGG_05614 [Chaetomium globosum CBS 148.51]
  misc_feature (2)..(768): NCBI GI: 154315388 Blast Desc: BC1G_04733 [Botryotinia fuckeliana B05.10] gi|150847696|gb|EDN22889.1| BC1G_04733 [Botryotinia fuckeliana B05.10]
  misc_feature (2)..(758): NCBI GI: 156051796 Blast Desc: SS1G_07305 [Sclerotinia sclerotiorum 1980] gi|154705083|gb|EDO04822.1| SS1G_07305 [Sclerotinia sclerotiorum 1980]
  misc_feature (217)..(751): NCBI GI: 164428910 Blast Desc: NCU00172 [Neurospora crassa OR74A] gi|157072334|gb|EAA27159.2| NCU00172 [Neurospora crassa OR74A]
  misc_feature (39)..(749): NCBI GI: 242804321 Blast Desc: conserved [Talaromyces stipitatus ATCC 10500] gi|218717696|gb|EED17117.1| conserved [Talaromyces stipitatus ATCC 10500]
MDRTSNPSSNSKASSVETQTIVSENSSISMVATTKPNTRSPRKLRSQYPRESAENHVEYILVASFDIDRGPVMEHQFPVAITGDENMLAELMLPDQAHARNQDWTIFFLHKDSNQEEEEEEQRQKDARRRRRRRRKHREGGVLNTDDDNDLSDEENESREGDDDNDDDFDDDMSTDSEPEGGEGPPLIYVLNLVYTKHDKSVKRGAIVKAMAICTRHPFLHIYKPLLLLALEEYFKSPVPETLSLLYDAVNNMDLSLMPRLSLLEKYLLQSSNNKDLFVEKFELMVQRRIAEDKSRQVGEPFDASKSPPKSQGISRAGTKAYLEGQTAYAVPRDTHEFESKVMYKGIPIPVKIPTATMPETVGDFSLIKLIQNFSEPHAKSMQPFTTHAHLTTNGPGTHPIMVLANALLTQKRVIFLGHNMPSGDVAEAVLAACALASGGILRGFTRFAFPYTDLTKIDDLLKVPGFIAGVTNPTFELHPEWWDVLCDLPSGRIKISSKIEQPPITEGLVYFQQQNPSFANLLNGSSNTSADLTGDILFMNDILKSIAARHGERVIRAKWRDWVVRFTRIAAAFEESVYGASALFIGGDEHEQITGGHGYVWADDASKQKELAGNVCRIEGWRNTRSYYSYIQDLGQLYTIRPLKGLDLHHMHDRLRTQRLTPLQSRDVYLAFSNSVWSYDEICLLLTVAPESHAGLFYIALGLFHKDKDVRVKTSELLERVSEHEAGQHWWKGLSRYQKLAYHRIRREAETDMKTELEKDHFVPGDGKRSS

SEQ ID NO: 15799 - DNA, 6399 bp, Muscodor strobelii
  misc_feature: SGI EST ID NO. CUFF.38033.0
  misc_feature: Variant of the nucleotide sequence at SEQ ID NO 15797
cgacactacagccgtgccttatcttgagacaactggagaggatattctaccatggccatgtagtgtgaagctgggaggtctggacccttcacgttcgctgtaactcttgtgcgtttgggcaccgttgcatcgtgttacttgctatcgctggctttgtactcactcaattggtttatactccctcaatcgaggctgcctcttcgaaaaggggggcatttcctctgggaagccgcatgttgccaacaacagttgttccgttccgtgtcaattgactcggctgcgaatggactgattgtcccatcgtacggtcctgtgcttgccgacccataactctcatctgcgaagctctacggacttgatttgcagcccgaggagcgcaggcagagtgcgattgctcagctacgatcccatcagtgctgcgccgcggcaagaaactgggaaataatcagcaaaaagggccatggccacggtaggaactgctcggccgtatttgacacgaacgaacacgaatcagtcacgcgcttccctttcgtcctttcccgcgtcccgctccggttccgtgtcgagccagactctacggtccccgccatcacctcgcccgcctgtcttcgaaatggatcgaacatccaaccccagctcgaactcgaaagcctcgtctgtcgaaacccaaacgatcgtatccgagaattcttccatttcgatggtggccacgaccaaacccaataccaggtccccgcggaaactgcgatcccaatacccacgagagtctgccgaaaaccatgtggaatatatcttggtggcatcgttcgacattgaccgtggtccggttatggagcatcaatttcccgttgcaatcaccggcgacgagaacatgttagccgagttgatgttaccggatcaggcgcatgcgcgaaaccaggactggaccattttcttcctacataaagactcaaatcaagaagaggaggaggaagaacaaaggcagaaagacgcacgtcgaagaaggaggagacggcgaaagcacagagaaggtggagtcctcaatacagatgacgataacgacctgagcgacgaagaaaacgagagccgcgaaggcgacgacgataatgatgatgactttgatgacgacatgtcgactgattcggagcctgaaggcggcgaagggcccccgttgatctacgtcctgaacttggtctataccaagcacgacaagtcggtcaagagaggggcaattgtcaaagccatggctatatgtacccgccatccctttttgcatatatataagcctcttttgctacttgcactggaagagtactttaagtctcccgttccggaaaccttatctttgctttacgatgctgtcaacaacatggatctgtctttaatgcctagactcagcttgctggaaaagtatctcttacaatcgagcaacaacaaggatctgtttgttgagaaattcgagctgatggtccaaaggcgcatcgccgaggacaaatcgcgccaagttggggaaccttttgacgcaagcaaaagcccccctaagtcccagggtatatctcgtgcaggtactaaggcgtatctcgaaggccaaacggcctatgctgtgccacgagacactcatgagtttgagagcaaagtcatgtacaaaggcatccctatacccgtaaaaattcccacggctactatgccagagacagtcggtgatttctctctcatcaagttgatacagaacttctctgagccccatgctaaatccatgcaaccctttacaacacatgcccatctcaccactaatggacctgggacgcatcccatcatggtcttggccaatgctcttctcactcagaagcgggtcatttttctggggcacaatatgccctccggtgatgttgcggaagcagtcctagctgcttgcgcccttgcatctggcggtatacttcggggctttacccgattcgcatttccctatacggatctcacgaagatcgatgatcttctcaaggtaccgggctttattgctggcgtgacaaatcctacgtttgaacttcacccagaatggtgggatgttctgtgtgatcttccgagtgggcgcataaagatcagtagcaagatcgaacagccgcccatcacagaaggtttagtgtatttccagcaacaaaatccatcctttgcgaatttattaaatggctcatcgaatacatcagccgatcttacaggagatatcttgttcatgaatgatattctcaagagtatcgctgcgaggcacggagaacgggtcattcgtgccaagtggcgcgattgggtggtcagatttactcgtatcgctgctgccttcgaagaaagtgtctacggcgctagtgcattgttcattggaggtgatgaacacgagcagatcacaggtggccatggctacgtttgggccgacgatgcttctaaacagaaggaactcgcaggaaacgtatgccgaattgagggctggagaaacacaagaagctactacagctatatccaggacctcggccaactgtacactatccgacccttgaagggcctggatctgcaccatatgcatgatcgcctgcgcactcagcgacttacgcccttgcaaagtcgagatgtttatctcgccttttctaattctgtgtggtcctatgacgagatctgtcttctgttgacagtcgcccctgaatcccatgcaggcctcttctatatcgcgctcgggcttttccataaagacaaagacgtgcgtgtcaagacatcggagctcctggagcgtgtatctgagcacgaagctggacagcactggtggaaaggacttagccgatatcagaagcttgcctaccataggattcgacgggaagccgagacggacatgaagacagagctcgaaaaggaccattttgttcccggtgatggcaagagaagtagttaatacgtcgacatatggatgtcatctctctaaagaacatgttgcatttattgcgagttatctgggagtttggtaatgagcatccggtttaatgaaatgattgatatcccagacatagctacgacgttatttacatctgatcatatgcagttcctgagtacctcacaatacaattagttaatcatctcaccgcttcctactctctaacacaacttctcagccacagatcagctgcctggtttcatggcaatctggacttgaactagatgatagttgttatgtttcgtaaacgttatgtttccacatacaatctccggtggtgctgcgccatctacacactactctccaccttggactagccagcggcatcgagactctggacctgaatctcctctctcgcttgctcatactaagataccgataccttggtttcgatccctagagaagatacttcgctgcgtggtcgacatgatcttgggcaaaactcgagatgaagtagtaagagtggtcgtagtgctaaatctctttgtcagcatgttgtcccagtaggcatagaaacaagaagacgtctagaaactcacctcctgataccgcaccgtgacaccagtaaccccattctccttaacagccttctcgaagttctcaggcaggagctgaccctgcttataaaagttatcaccagtcccaacatcaatcaaagtcttgatgtccttccccttccactccgcacccgcaacgagctccgtagcatcgtgcgccttccacgtctccttgtcggacccaaggtatccagagaatgccttctcgccccaggggcacaaagacggattgctgatcggcgcaagtgccgacacggacttgtatttcccgggattgcgcaggtagagggtcagagcaccatgtcctcccatagaatgccccgtgatgctaacccgctcgctatcgagcttcgcgccgagcgacgggtcggagaataaggcctcgggaagctcggtgagaacgtagtcgtacatgttgtagtttttgctccagggttcctgcgtagcgtttacgtagaagccggcgcccgtgccgaagtcccagccatcgtcttcgccctggatgtttgcgccccgtggggaggtatccgggtacacgatggcgatgccgtgtttgctggccgctgccgagaagaaacctttctcgctgcagttgtctggtgtgcaggttaggccggagaggaagaataggaccggcactctggaggtttgtgatgcggctgggagatacacggatacgttcatcggtgtcttggtcgaggttgactcgtgggatagctttaggagctgcccgccgaacgtcgctattgttgctttggtttcgaatggcatcttggctttttgggatggggttgtccagtagatgttcttgatattgatgaactcaagtcaagaggcgtttgatatgtgtgctcacgaattgaggagatggagagaaggcagtagttgagttgtgtataatacgagcaatagatgccttcgtggaggaggggtcgcgatgacgaaacagagacgatctatggttaagctctccgatggtactgtaatatcaaattgtcatacacgatgtatttgacatacttgtttctcttatgtcaagaattagatagtattattataggttgcattgagcagcacggagatcgctcatctctatattatagatctccttactaggcgcatcatcaatcgtctttcaacggcacatttcaggtttgccacctgttctagtgatcgagtccgatgcgtggcaatgcgatttgatgctggagtatataacgcccctcatcgccccctcttggcctcatatatttccctccgattcggatggtttatatccaacgttgatgaggagcagactgtcgcagtctatgaacccctccaagagctcttatcaaccccacatgatcagtgcaaacacgccaccaaatcaggtgcttaaacgccagaaaatctccgaaccaccgaagagtctatatgtacgacttaatccgtagttgatgacaggcaaattatcgagtaaatcaacgatacccattggaaagccgactgtgaagtcttgatagaatcagcaagcagtgtccagtaaacatgcctaagttcctctataccctcatctcctccgagatgaataggcatttgtactgtaaagacggttcccaagttagttcagtggatgaacagggtaaagcttaaaagattatgcactttattatttatctattgatgtcatggtatcatcaaccctcttaattaccacctgaacgccagtgctacaggaaacacaaaatgccgaaagcaagtaggcccgtcgctttgacgaatatcaacgcatcctttcccttaattactgcccaaatcaagagcgacacatcagcaatgacggtgggaacctaggcagtcgtcgtggtgttcttgtggcagtcgaaagatgcaagagatttgtcccaagagaccgagtgcagattgaacttgtgcgggttgtcaaagtagaacgaggtgccgaaagtgcagcctgtgggtgacttgcagatatctgagcaagagctcctacatctttcatcagtatgaagttttcaacttaggtaggtaggtacagctattacttacacgcgaggccagcagtagaagtcgtctccatcgggagcgaaggtgtttgtgttccgtacaaattcggcaggcaggtcgtgacagtcctcaagagtgtagtcctggtacacgcaatcgcctgtagcattggcgccagtgcagatcagaacctggaaagagcgattcttaagtcagtctattgatcgtgacgattgtgccagcttcgacgttaacttacaccacccattgctcgcttctcaatcttgggccatcccgcgggcagagcggacacacaggtcgcagctgcgagaaaggtggtaaatgctccaagcaattgcatggcggcggcaattgatgttaatggcaaggatgaatattttggtctgctggtatcatatattgacaaagcggcaaataattcgttgaccagtttaccggcttgtgtagatcggcgacagatagaatcttgtcaagagcggatgaaaggcgaggacgtgtctgtcacagataagtgaagattcggcgaggaatgtgaatgaaaaagaaagcagttgcaggcagtcacggtttgggctatatcgcaaataatcgtgacagggcaggtgtagggagtgaagaaggaacggttcaataatataccaattttgtatcctagttcaagacaaccacgatatcctagaagctgctgagatagagaggggttcaccacatggataagacagtgatcgacaaaaatacacacatatcaatgttcatcaatactgccagctggtatgtacgcagccctgattattccggtatcttccaagtccggattaaacggcatcttgattgcataaacca

SEQ ID NO: 15800 - DNA, 867 bp, Muscodor strobelii
  misc_feature: SGI cDNA ID NO. 565241
  misc_feature: Reduced expression when VOC is produced
  misc_feature: Encodes the peptide sequence at SEQ ID NO 15801
atgccattcgaaaccaaagcaacaatagcgacgttcggcgggcagctcctaaagctatcccacgagtcaacctcgaccaagacaccgatgaacgtatccgtgtatctcccagccgcatcacaaacctccagagtgccggtcctattcttcctctccggcctaacctgcacaccagacaactgcagcgagaaaggtttcttctcggcagcggccagcaaacacggcatcgccatcgtgtacccggatacctccccacggggcgcaaacatccagggcgaagacgatggctgggacttcggcacgggcgccggcttctacgtaaacgctacgcaggaaccctggagcaaaaactacaacatgtacgactacgttctcaccgagcttcccgaggccttattctccgacccgtcgctcggcgcgaagctcgatagcgagcgggttagcatcacggggcattctatgggaggacatggtgctctgaccctctacctgcgcaatcccgggaaatacaagtccgtgtcggcacttgcgccgatcagcaatccgtctttgtgcccctggggcgagaaggcattctctggataccttgggtccgacaaggagacgtggaaggcgcacgatgctacggagctcgttgcgggtgcggagtggaaggggaaggacatcaagactttgattgatgttgggactggtgataacttttataagcagggtcagctcctgcctgagaacttcgagaaggctgttaaggagaatggggttactggtgtcacggtgcggtatcaggagcactacgaccactcttactacttcatctcgagttttgcccaagatcatgtcgaccacgcagcgaagtatcttctctag

SEQ ID NO: 15801 - protein, 288 aa, Muscodor strobelii
  misc_feature: SGI Peptide ID NO. 565241
  misc_feature (15)..(282): Pfam Id: PF00756 Pfam Desc: esterase
  misc_feature (1)..(287): NCBI GI: 116191795 Blast Desc: CHGG_05615 [Chaetomium globosum CBS 148.51] gi|88181528|gb|EAQ88996.1| CHGG_05615 [Chaetomium globosum CBS 148.51]
  misc_feature (1)..(287): NCBI GI: 85079680 Blast Desc: esterase D [Neurospora crassa OR74A] gi|28917459|gb|EAA27160.1| esterase D [Neurospora crassa OR74A]
  misc_feature (1)..(288): NCBI GI: 70997844 Blast Desc: esterase [Aspergillus fumigatus Af293] gi|66851290|gb|EAL91616.1| esterase, [Aspergillus fumigatus Af293] gi|159126612|gb|EDP51728.1| esterase, [Aspergillus A1163]
  misc_feature (1)..(288): NCBI GI: 255931739 Blast Desc: Pc12g05820 [Penicillium chrysogenum Wisconsin 54-1255] gi|211582045|emb|CAP80209.1| Pc12g05820 [Penicillium chrysogenum Wisconsin 54-1255]
  misc_feature (1)..(288): NCBI GI: 119479353 Blast Desc: esterase, [Neosartorya fischeri NRRL 181] gi|119407859|gb|EAW17808.1| esterase, [Neosartorya fischeri NRRL 181]
  misc_feature (1)..(288): NCBI GI: 67903590 Blast Desc: AN8782.2 [Aspergillus nidulans FGSC A4] gi|40741385|gb|EAA60575.1| AN8782.2 [Aspergillus nidulans FGSC A4] gi|259483012|tpe|CBF78029.1| TPA: esterase, (AFU_orthologue;
  misc_feature (1)..(288): NCBI GI: 145237492 Blast Desc: An07g03100 [Aspergillus niger] gi|134075865|emb|CAL00244.1| protein product [Aspergillus niger]
  misc_feature (1)..(288): NCBI GI: 121713348 Blast Desc: esterase, [Aspergillus clavatus NRRL 1] gi|119402438|gb|EAW12859.1| esterase, [Aspergillus clavatus NRRL 1]
  misc_feature (1)..(288): NCBI GI: 238482387 Blast Desc: esterase, [Aspergillus flavus NRRL3357] gi|220700482|gb|EED56820.1| esterase, [Aspergillus flavus NRRL3357]
  misc_feature (1)..(288): NCBI GI: 238843307 Blast Desc: S-formylglutathione hydrolase [Microsporum canis CBS 113480]
  misc_feature (1)..(287): SWISSPROT Homolog: EC 3.1.2.12 S-formylglutathione hydrolase
  misc_feature: Useful for introducing or modulating the production of volatile compounds
MPFETKATIATFGGQLLKLSHESTSTKTPMNVSVYLPAASQTSRVPVLFFLSGLTCTPDNCSEKGFFSAAASKHGIAIVYPDTSPRGANIQGEDDGWDFGTGAGFYVNATQEPWSKNYNMYDYVLTELPEALFSDPSLGAKLDSERVSITGHSMGGHGALTLYLRNPGKYKSVSALAPISNPSLCPWGEKAFSGYLGSDKETWKAHDATELVAGAEWKGKDIKTLIDVGTGDNFYKQGQLLPENFEKAVKENGVTGVTVRYQEHYDHSYYFISSFAQDHVDHAAKYLL

SEQ ID NO: 15802 - DNA, 4901 bp, Muscodor strobelii
  misc_feature: SGI EST ID NO. CUFF.38034.1
  misc_feature: Variant of the nucleotide sequence at SEQ ID NO 15800
gctggcagtattgatgaacattgatatgtgtgtatttttgtcgatcactgtcttatccatgtggtgaacccctctctatctcagcagcttctaggatatcgtggttgtcttgaactaggatacaaaattggtatattattgaaccgttccttcttcactccctacacctgccctgtcacgattatttgcgatatagcccaaaccgtgactgcctgcaactgctttctttttcattcacattcctcgccgaatcttcacttatctgtgacagacacgtcctcgcctttcatccgctcttgacaagattctatctgtcgccgatctacacaagccggtaaactggtcaacgaattatttgccgctttgtcaatatatgataccagcagaccaaaatattcatccttgccattaacatcaattgccgccgccatgcaattgcttggagcatttaccacctttctcgcagctgcgacctgtgtgtccgctctgcccgcgggatggcccaagattgagaagcgagcaatgggtggtgttctgatctgcactggcgccaatgctacaggcgattgcgtgtaccaggactacactcttgaggactgtcacgacctgcctgccgaatttgtacggaacacaaacaccttcgctcccgatggagacgacttctactgctggcctcgcgtgagctcttgctcagatatctgcaagtcacccacaggctgcactttcggcacctcgttctactttgacaacccgcacaagttcaatctgcactcggtctcttgggacaaatctcttgcatctttcgactgccacaagaacaccacgacgactgcctaggttcccaccgtcattgctgatgtgtcgctcttgatttgggcagtaattaagggaaaggatgcgttgatattcgtcaaagcgacgggcctacttgctttcggcattttgtgtttcctgtagcactggcgttcaggtggtaattaagagggttgatgataccatgacatcaatagataaataataaagtgcataatcttttaagctttaccctgttcatccactgaactaacttgggaaccgtctttacagtacaaatgcctattcatctcggaggagatgagggtatagaggaacttaggcatgtttactggacactgcttgctgattctatcaagacttcacagtcggctttccaatgggtatcgttgatttactcgataatttgcctgtcatcaactacggattaagtcgtacatatagactcttcggtggttcggagattttctggcgtttaagcacctgatttggtggcgtgtttgcactgatcatgtggggttgataagagctcttggaggggttcatagactgcgacagtctgctcctcatcaacgttggatataaaccatccgaatcggagggaaatatatgaggccaagagggggcgatgaggggcgttatatactccagcatcaaatcgcattgccacgcatcggactcgatcactagaacaggtggcaaacctgaaatgtgccgttgaaagacgattgatgatgcgcctagtaaggagatctataatatagagatgagcgatctccgtgctgctcaatgcaacctataataatactatctaattcttgacataagagaaacaagtatgtcaaatacatcgtgtatgacaatttgatattacagtaccatcggagagcttaaccatagatcgtctctgtttcgtcatcgcgacccctcctccacgaaggcatctattgctcgtattatacacaactcaactactgccttctctccatctcctcaattcgtgagcacacatatcaaacgcctcttgacttgagttcatcaatatcaagaacatctactggacaaccccatcccaaaaagccaagatgccattcgaaaccaaagcaacaatagcgacgttcggcgggcagctcctaaagctatcccacgagtcaacctcgaccaagacaccgatgaacgtatccgtgtatctcccagccgcatcacaaacctccagagtgccggtcctattcttcctctccggcctaacctgcacaccagacaactgcagcgagaaaggtttcttctcggcagcggccagcaaacacggcatcgccatcgtgtacccggatacctccccacggggcgcaaacatccagggcgaagacgatggctgggacttcggcacgggcgccggcttctacgtaaacgctacgcaggaaccctggagcaaaaactacaacatgtacgactacgttctcaccgagcttcccgaggccttattctccgacccgtcgctcggcgcgaagctcgatagcgagcgggttagcatcacggggcattctatgggaggacatggtgctctgaccctctacctgcgcaatcccgggaaatacaagtccgtgtcggcacttgcgccgatcagcaatccgtctttgtgcccctggggcgagaaggcattctctggataccttgggtccgacaaggagacgtggaaggcgcacgatgctacggagctcgttgcgggtgcggagtggaaggggaaggacatcaagactttgattgatgttgggactggtgataacttttataagcagggtcagctcctgcctgagaacttcgagaaggctgttaaggagaatggggttactggtgtcacggtgcggtatcaggagcactacgaccactcttactacttcatctcgagttttgcccaagatcatgtcgaccacgcagcgaagtatcttctctagggatcgaaaccaaggtatcggtatcttagtatgagcaagcgagagaggagattcaggtccagagtctcgatgccgctggctagtccaaggtggagagtagtgtgtagatggcgcagcaccaccggagattgtatgtggaaacataacgtttacgaaacataacaactatcatctagttcaagtccagattgccatgaaaccaggcagctgatctgtggctgagaagttgtgttagagagtaggaagcggtgagatgattaactaattgtattgtgaggtactcaggaactgcatatgatcagatgtaaataacgtcgtagctatgtctgggatatcaatcatttcattaaaccggatgctcattaccaaactcccagataactcgcaataaatgcaacatgttctttagagagatgacatccatatgtcgacgtattaactacttctcttgccatcaccgggaacaaaatggtccttttcgagctctgtcttcatgtccgtctcggcttcccgtcgaatcctatggtaggcaagcttctgatatcggctaagtcctttccaccagtgctgtccagcttcgtgctcagatacacgctccaggagctccgatgtcttgacacgcacgtctttgtctttatggaaaagcccgagcgcgatatagaagaggcctgcatgggattcaggggcgactgtcaacagaagacagatctcgtcataggaccacacagaattagaaaaggcgagataaacatctcgactttgcaagggcgtaagtcgctgagtgcgcaggcgatcatgcatatggtgcagatccaggcccttcaagggtcggatagtgtacagttggccgaggtcctagacaaggattagtgagtaatctcacgaacgcggccgcataccatgcatacctggatatagctgtagtagcttcttgtgtttctccagccctcaattcggcatacgtttcctgcgagttccttctgtttagaagcatcgtcggcccaaacgtagccatggccacctgtgatctgctcgtgttcatcacctccaatgaacaatgcactagcgccgtagacactttcttcgaaggcagcagcgatacgagtaaatctgaccacccaatcgcgccacttggcacgaatgacccgttctccgtgcctcgcagcgatactcttgagaatatcattcatgaacaagatatctcctgtaagatcggctgatgtattcgatgagccatttaataaattcgcaaaggatggattttgttgctggaaatacactaaaccttctgtgatgggcggctgttcgatcttgctactgatctttatgcgcccactcggaagatcacacagaacatcccaccattctgggtgaagttcaaacgtaggatttgtcacgccagcaataaagcccggtaccttgagaagatcatcgatcttcgtgagatccgtatagggaaatgcgaatcgggtaaagccccgaagtataccgccagatgcaagggcgcaagcagctaggactgcttccgcaacatcaccggagggcatattgtgccccagaaaaatgacccgcttctgagtgagaagagcattggccaagaccatgatgggatgcgtcccaggtccattagtggtgagatgggcatgtgttgtaaagggttgcatggatttagcatggggctcagagaagttctgtatcaacttgatgagagagaaatcaccgactgtctctggcatagtagccgtgggaatttttacgggtatagggatgcctttgtacatgactttgctctcaaactcatgagtgtctcgtggcacagcataggccgtttggccttcgagatacgccttagtacctgcacgagatataccctgggacttaggggggcttttgcttgcgtcaaaaggttccccaacttggcgcgatttgtcctcggcgatgcgcctttggaccatcagctcgaatttctcaacaaacagatccttgttgttgctcgattgtaagagatacttttccagcaagctgagtctaggcattaaagacagatccatgttgttgacagcatcgtaaagcaaagataaggtttccggaacgggagacttaaagtactcttccagtgcaagtagcaaaagaggc

SEQ ID NO: 15803 - DNA, 408 bp, Muscodor strobelii
  misc_feature: SGI cDNA ID NO. 565242
  misc_feature: Reduced expression when VOC is produced
  misc_feature: Encodes the peptide sequence at SEQ ID NO 15804
atgcaattgcttggagcatttaccacctttctcgcagctgcgacctgtgtgtccgctctgcccgcgggatggcccaagattgagaagcgagcaatgggtggtgttctgatctgcactggcgccaatgctacaggcgattgcgtgtaccaggactacactcttgaggactgtcacgacctgcctgccgaatttgtacggaacacaaacaccttcgctcccgatggagacgacttctactgctggcctcgcgtgagctcttgctcagatatctgcaagtcacccacaggctgcactttcggcacctcgttctactttgacaacccgcacaagttcaatctgcactcggtctcttgggacaaatctcttgcatctttcgactgccacaagaacaccacgacgactgcctag

SEQ ID NO: 15804 - protein, 135 aa, Muscodor strobelii
  misc_feature: SGI Peptide ID NO. 565242
  misc_feature (1)..(135): NCBI GI: 256732825 Blast Desc: NECHADRAFT_106063 [Nectria haematococca mpVI 77-13-4]
  misc_feature (1)..(130): NCBI GI: 46124609 Blast Desc: FG06682.1 [Gibberella zeae PH-1]
  misc_feature (1)..(132): NCBI GI: 116191797 Blast Desc: CHGG_05616 [Chaetomium globosum CBS 148.51] gi|88181529|gb|EAQ88997.1| CHGG_05616 [Chaetomium globosum CBS 148.51]
  misc_feature (29)..(127): NCBI GI: 171687026 Blast Desc: protein product [Podospora anserina] gi|170943474|emb|CAP69127.1| protein product [Podospora anserina]
  misc_feature: Useful for introducing or modulating the production of volatile compounds
MQLLGAFTTFLAAATCVSALPAGWPKIEKRAMGGVLICTGANATGDCVYQDYTLEDCHDLPAEFVRNTNTFAPDGDDFYCWPRVSSCSDICKSPTGCTFGTSFYFDNPHKFNLHSVSWDKSLASFDCHKNTTTTA

SEQ ID NO: 15805 - DNA, 4901 bp, Muscodor strobelii; identical to SEQ ID NO: 15802
  misc_feature: SGI EST ID NO. CUFF.38034.1
  misc_feature: Variant of the nucleotide sequence at SEQ ID NO 15803

SEQ ID NO: 15806 - DNA, 486 bp, Muscodor strobelii
  misc_feature: SGI cDNA ID NO. 565243
  misc_feature: Reduced expression when VOC is produced
  misc_feature: Encodes the peptide sequence at SEQ ID NO 15807
atgtccgactacggggatgatggtgatgttgtcaccagcggcgccatggacgagcccatgtacgaagaggaggaagagattctcgaggatgagctggatcccgaggtggccaacgacgacgaggacgacttcaaccgacgtggcaaccaagaggaagagaacgttgtcatttctggcgacccttctgctgctgccaatatccagaagactggctccggcaacaggtccatcaaggacaagagaatccccaatgaggagcgcaccactaccccctacatgaccaagtacgagaaggcccgcattctcggcacccgagcactccagatcagcatgaatgcgcctgttctcgttgatctagaaggagagtcggaccctcttcaaattgccatcaaggagatgaatgagaagaagatcccccttatcgttcgtcgatacatgcccgatggatactacgaggattggacatgtgaagaactgctccagtaa

SEQ ID NO: 15807 - protein, 161 aa, Muscodor strobelii
  misc_feature: SGI Peptide ID NO. 565243
  misc_feature (91)..(144): Pfam Id: PF01192 Pfam Desc: RNA polymerase Rpb6
  misc_feature (1)..(161): NCBI GI: 164428772 Blast Desc: DNA-directed RNA polymerases I [Neurospora crassa OR74A] gi|157072273|gb|EDO65394.1| DNA-directed RNA polymerases I [Neurospora crassa OR74A]
  misc_feature (49)..(161): NCBI GI: 116192063 Blast Desc: CHGG_05749 [Chaetomium globosum CBS 148.51] gi|88181662|gb|EAQ89130.1| CHGG_05749 [Chaetomium globosum CBS 148.51]
  misc_feature (24)..(161): NCBI GI: 39939838 Blast Desc: MGG_05321 [Magnaporthe grisea 70-15] gi|145010392|gb|EDJ95048.1| MGG_05321 [Magnaporthe grisea 70-15]
  misc_feature (1)..(149): NCBI GI: 46124611 Blast Desc: FG06683.1 [Gibberella zeae PH-1]
  misc_feature (1)..(160): NCBI GI: 238486558 Blast Desc: DNA-directed RNA polymerase I, II, and III subunit Rpb6 [Aspergillus flavus NRRL3357] gi|220699396|gb|EED55735.1| DNA-directed RNA polymerase I, II, and III subunit Rpb6 flavus
  misc_feature (54)..(161): NCBI GI: 261360255 Blast Desc: DNA-directed RNA polymerases I [Verticillium albo-atrum VaMs.102]
  misc_feature (1)..(160): NCBI GI: 242803045 Blast Desc: DNA-directed RNA polymerase I, II, and III subunit Rpb6 [Talaromyces stipitatus ATCC 10500] gi|218717439|gb|EED16860.1| DNA-directed RNA polymerase I, II,
  misc_feature (1)..(160): NCBI GI: 70990832 Blast Desc: DNA-directed RNA polymerase I, II, and III subunit Rpb6 [Aspergillus fumigatus Af293] gi|66847897|gb|EAL88227.1| DNA-directed RNA polymerase I, II, and III subunit Rpb6 fumigatus
  misc_feature (1)..(160): NCBI GI: 145229113 Blast Desc: An01g04380 [Aspergillus niger] gi|134054964|emb|CAK36973.1| protein product [Aspergillus niger]
  misc_feature (1)..(160): NCBI GI: 159130739 Blast Desc: DNA-directed RNA polymerase I, II, and III subunit Rpb6 [Aspergillus fumigatus A1163]
  misc_feature (77)..(159): SWISSPROT Homolog: EC 2.7.7.6 DNA-directed RNA polymerase
  misc_feature: Useful for introducing or modulating the production of volatile compounds
MSDYGDDGDVVTSGAMDEPMYEEEEEILEDELDPEVANDDEDDFNRRGNQEEENVVISGDPSAAANIQKTGSGNRSIKDKRIPNEERTTTPYMTKYEKARILGTRALQISMNAPVLVDLEGESDPLQIAIKEMNEKKIPLIVRRYMPDGYYEDWTCEELLQ

SEQ ID NO: 15808 - DNA, 1631 bp, Muscodor strobelii
  misc_feature: SGI EST ID NO. CUFF.38169.0
  misc_feature: Variant of the nucleotide sequence at SEQ ID NO 15806
ttcagaggcttcgatgtaaagctctctatttgtctcaaccccactgctgcaggtacctgggtacaaggtaggcgggacggcagtaggtagctgcatctcgaatctctttcagccgcccgcgccttgaatttttgcatcgcattcggtcaagtccaaagccctgggccatctcgcgccaaccactgtagctgcctgcaccacacctgcgcactctctttctttgcgccgcgacaaaggcagtcttcttcagcctcacacttttctaactactgtggtcaacgcaacacgcgcttgcacgcaccatgtccgactacggggatgatggtgatgttgtcaccagcggcgccatggacgagcccatgtacgaagaggaggaagagattctcgaggatgagctggatcccgaggtggccaacgacgacgaggacgacttcaaccgacgtggcaaccaagaggaagagaacgttgtcatttctggcgacccttctgctgctgccaatatccagaagactggctccggcaacaggtccatcaaggacaagagaatccccaatgaggagcgcaccactaccccctacatgaccaagtacgagaaggcccgcattctcggcacccgagcactccagatcagcatgaatgcgcctgttctcgttgatctagaaggagagtcggaccctcttcaaattgccatcaaggagatgaatgagaagaagatcccccttatcgttcgtcgatacatgcccgatggatactacgaggattggacatgtgaagaactgctccagtaataagggtgcagactcaatcctcattcctattccgagatttccaaaaatgccaacatatggtatggactgaccggatattctatatctctgcactcctcttttgcaaatagtagagtgagcaggcagacaccaaaaatgtgcatcagcgaggcgttggggttggtcattgggatataccaagtatattctcacaaaaattgagagattctctttctggagaatgatcctttccacagggaagctaatagtgtgtcgcgagtgagaattgtgaattacgaagcttcgtgtcacgatctggtagcatgatctgtgttgttatcaaaatgacaatacatcatgatctgagatgtgtaggaaatatcttttcgtgccttgcctcacaagacgatgtatccatgacaggtatatgagttgtgtttaggccacatagccggactacggtcttgttaaccaagcatattatgttaccaggagtgtcacatataaatacgcaagtttaatgcaattcgacaagctagcgaggctacacattgataagagaggaatgagagccgcaggttatagttggctagccaccccatataccatactaccactgatgaccactgtcaggtgttcgaacactcttgcgtagcatggctcgatggtatgttctgctgatgtcaggcacaagcaatacgttatcgtggccaacagcaacatgaaggatgcacccagaacaacaaatcaatataccaacctcagagtgacaatgtttcttctgctgcgtcattcacatgatatcatatggatctctacgaagctcaggcgcgcggttcccagatgccgagcgggttggtgaag

SEQ ID NO: 15809 - DNA, 1602 bp, Muscodor strobelii
  misc_feature: SGI cDNA ID NO. 565244
  misc_feature: Reduced expression when VOC is produced
  misc_feature: Encodes the peptide sequence at SEQ ID NO 15810
atgaagcgagctttggaaccggaccctgagccttcgggtccgcacaagagagcgaggaccggccctgccgcctccctcgcctacgaagcctcgctagggcatgattacactggatatccagacccggacgactacagctatggcaaccatggcaacgactatcactccgattccgagtcccagccagatacccaaaccactacttccctcgccgccaacacacccgattctaccactcccgatgacccgcccacccctatcatctataaaaaattcatgtgcgacgtcaagaccatccgctgcgacttccctggttgcgacaagaccttcaatcgccctgcccgcatggaagcccaccgacgatcccacaacgatgaccgcaccttcaaatgcacgtacgatggctgtgacaaggactacaccagcaagaagtacctcgacgaacacatcaagggtgcacacaaggatgaacgcacatacacctgcacccacccgggctgcggcaagtccttcatgacggccacacgtctcaaacgacacagggctgtacatgagggccgtttccagtgcaccgacttccccccttgcacggataagttccgcaaggccatcacccttgaacgtcacatccgaactgtgcaccagaaccggcctgccttcacctgtacccacgtcgacccggactcgggagcggtctgcaccgagggtttcaagtcggttaatagcctgaaacgacatcagcaacgggcccatggggacaaccgcttcttctgcgaggaatgtgccgaacacgagaccgacgagcacggcaaccccaagattgtcggcttccccaccatcactctgctacagaaccatgtgaaggaagcacacataagatgtttcttctgcaacagagtctttaacagtcggcccgagatggaggaacacgtcgagactgctcacgtcaaccccccctaccagcccctcgaggagcgcaagacagtcgcttgcacctggcctggatgcacaaagaccttcacccgcgtctccaaccggaactctcacattcgtactgctcatcaaggtggcacagtcttcatctgcggcgaatttgatttggccgagtacccagatctagctgcctggcccaaaagtgatggctgtggtaagtccttcaacaccaagtacaacctggagaagcacgtccgccacatccatctcaaggtccctcggccggaggtgctcgatccgacaggcaagctatatgaacccacgaccttggagctgttgactggcgtccgcgaaaatatgcgccagaccatcccctgcactttcccgggctgccacttgaagttcaagcatctcggccaacgcgcggaacatattaggcaggaacacggagccgaacaaggtctgatccataatcttgacgaggtgcacgatgatggggacggcgagggaatgcgcgagtgggaagctgcttatggcggcgaggagctctgggctggtgagggtacgaatacgggtgcagccctggatgcctcgcaagaagacaataccatgaagacctggaacgatgatgagatgatgacactgctcgatcctgcactagcgaactag

SEQ ID NO: 15810 - protein, 533 aa, Muscodor strobelii
  misc_feature: SGI Peptide ID NO. 565244
  misc_feature (160)..(184): Pfam Id: PF00096 Pfam Desc: Zinc finger, C2H2 type
  misc_feature (99)..(123): Pfam Id: PF00096 Pfam Desc: Zinc finger, C2H2 type
  misc_feature (129)..(154): Pfam Id: PF00096 Pfam Desc: Zinc finger, C2H2 type
  misc_feature (329)..(354): Pfam Id: PF00096 Pfam Desc: Zinc finger, C2H2 type
  misc_feature (17)..(531): NCBI GI: 154315394 Blast Desc: BC1G_04736 [Botryotinia fuckeliana B05.10] gi|150847699|gb|EDN22892.1| BC1G_04736 [Botryotinia fuckeliana B05.10]
  misc_feature (79)..(531): NCBI GI: 156051802 Blast Desc: SS1G_07308 [Sclerotinia sclerotiorum 1980] gi|154705086|gb|EDO04825.1| SS1G_07308 [Sclerotinia sclerotiorum 1980]
  misc_feature (51)..(456): NCBI GI: 171686808 Blast Desc: protein product [Podospora anserina] gi|170943365|emb|CAP69018.1| protein product [Podospora anserina]
  misc_feature (17)..(412): NCBI GI: 164428770 Blast Desc: NCU00038 [Neurospora crassa OR74A] gi|157072272|gb|EAA27789.2| conserved [Neurospora crassa OR74A]
  misc_feature (51)..(460): NCBI GI: 145601927 Blast Desc: MGG_05322 [Magnaporthe grisea 70-15] gi|145010391|gb|EDJ95047.1| MGG_05322 [Magnaporthe grisea 70-15]
  misc_feature (58)..(462): NCBI GI: 256733282 Blast Desc: NECHADRAFT_38592 [Nectria haematococca mpVI 77-13-4]
  misc_feature (59)..(532): NCBI GI: 119496757 Blast Desc: C2H2 transcription factor (TFIIIA), [Neosartorya fischeri NRRL 181] gi|119413314|gb|EAW23255.1| C2H2 transcription factor (TFIIIA), [Neosartorya fischeri NRRL 181]
  misc_feature (88)..(470): NCBI GI: 145229111 Blast Desc: An01g04370 [Aspergillus niger] gi|134054963|emb|CAK36972.1| protein product [Aspergillus niger]
  misc_feature (59)..(528): NCBI GI: 169770955 Blast Desc: [Aspergillus oryzae RIB40] gi|83767806|dbj|BAE57945.1| protein product [Aspergillus oryzae]
  misc_feature (55)..(401): NCBI GI: 67524581 Blast Desc: AN2748.2 [Aspergillus nidulans FGSC A4] gi|40744000|gb|EAA63182.1| AN2748.2 [Aspergillus nidulans FGSC A4] gi|259486338|tpe|CBF84096.1| TPA: C2H2 transcription factor
  misc_feature (106)..(397): SWISSPROT Homolog: EC 2.1.1.43 Histone-lysine N-methyltransferase
  misc_feature: Useful for introducing or modulating the production of volatile compounds
MKRALEPDPEPSGPHKRARTGPAASLAYEASLGHDYTGYPDPDDYSYGNHGNDYHSDSESQPDTQTTTSLAANTPDSTTPDDPPTPIIYKKFMCDVKTIRCDFPGCDKTFNRPARMEAHRRSHNDDRTFKCTYDGCDKDYTSKKYLDEHIKGAHKDERTYTCTHPGCGKSFMTATRLKRHRAVHEGRFQCTDFPPCTDKFRKAITLERHIRTVHQNRPAFTCTHVDPDSGAVCTEGFKSVNSLKRHQQRAHGDNRFFCEECAEHETDEHGNPKIVGFPTITLLQNHVKEAHIRCFFCNRVFNSRPEMEEHVETAHVNPPYQPLEERKTVACTWPGCTKTFTRVSNRNSHIRTAHQGGTVFICGEFDLAEYPDLAAWPKSDGCGKSFNTKYNLEKHVRHIHLKVPRPEVLDPTGKLYEPTTLELLTGVRENMRQTIPCTFPGCHLKFKHLGQRAEHIRQEHGAEQGLIHNLDEVHDDGDGEGMREWEAAYGGEELWAGEGTNTGAALDASQEDNTMKTWNDDEMMTLLDPALAN

SEQ ID NO: 15811 - DNA, 1911 bp, Muscodor strobelii
  misc_feature: SGI EST ID NO. CUFF.38178.0
  misc_feature: Variant of the nucleotide sequence at SEQ ID NO 15809
cggcgagaccagcttctctttcacaagtgctggcttgcggttgagcaatctctgcccacaacgccgacaacttccaaattctcagcttcaattggtcaaccagtacgtcgtcgttactgctggcctcgacatttctggaaaagggtagacatgtgaccatcaatcttttcgcaccatgaagcgagctttggaaccggaccctgagccttcgggtccgcacaagagagcgaggaccggccctgccgcctccctcgcctacgaagcctcgctagggcatgattacactggatatccagacccggacgactacagctatggcaaccatggcaacgactatcactccgattccgagtcccagccagatacccaaaccactacttccctcgccgccaacacacccgattctaccactcccgatgacccgcccacccctatcatctataaaaaattcatgtgcgacgtcaagaccatccgctgcgacttccctggttgcgacaagaccttcaatcgccctgcccgcatggaagcccaccgacgatcccacaacgatgaccgcaccttcaaatgcacgtacgatggctgtgacaaggactacaccagcaagaagtacctcgacgaacacatcaagggtgcacacaaggatgaacgcacatacacctgcacccacccgggctgcggcaagtccttcatgacggccacacgtctcaaacgacacagggctgtacatgagggccgtttccagtgcaccgacttccccccttgcacggataagttccgcaaggccatcacccttgaacgtcacatccgaactgtgcaccagaaccggcctgccttcacctgtacccacgtcgacccggactcgggagcggtctgcaccgagggtttcaagtcggttaatagcctgaaacgacatcagcaacgggcccatggggacaaccgcttcttctgcgaggaatgtgccgaacacgagaccgacgagcacggcaaccccaagattgtcggcttccccaccatcactctgctacagaaccatgtgaaggaagcacacataagatgtttcttctgcaacagagtctttaacagtcggcccgagatggaggaacacgtcgagactgctcacgtcaaccccccctaccagcccctcgaggagcgcaagacagtcgcttgcacctggcctggatgcacaaagaccttcacccgcgtctccaaccggaactctcacattcgtactgctcatcaaggtggcacagtcttcatctgcggcgaatttgatttggccgagtacccagatctagctgcctggcccaaaagtgatggctgtggtaagtccttcaacaccaagtacaacctggagaagcacgtccgccacatccatctcaaggtccctcggccggaggtgctcgatccgacaggcaagctatatgaacccacgaccttggagctgttgactggcgtccgcgaaaatatgcgccagaccatcccctgcactttcccgggctgccacttgaagttcaagcatctcggccaacgcgcggaacatattaggcaggaacacggagccgaacaaggtctgatccataatcttgacgaggtgcacgatgatggggacggcgagggaatgcgcgagtgggaagctgcttatggcggcgaggagctctgggctggtgagggtacgaatacgggtgcagccctggatgcctcgcaagaagacaataccatgaagacctggaacgatgatgagatgatgacactgctcgatcctgcactagcgaactaggagatctctgcatgatgaggatacgacagttatgataccctttgctttttaaggcacttgctatatacccagtggtctctaaatagcccaggatagcccagataggtacctgaaaatgagacgaagattaacca

SEQ ID NO: 15812 - DNA, 1149 bp, Muscodor strobelii
  misc_feature: SGI cDNA ID NO. 565245
  misc_feature: Encodes the peptide sequence at SEQ ID NO 15813
atgacgtcgagccaaggacgtcgaaagcgtggctccgcttccctctcgaacagcactcctacactgcaaacagatagcaccaagagtactagtccatatgaccggacttttcaacagcatcttaccgatcaccggatttactctgacggttatagatatcccggcgcaaaggctcttcctcagccagataatctaaatgccatatctaaagtgctatcacaacgaagatcttctttgtcacggtcccgattttcagatagcgacttccaacagtttaagcaagccgatagagatgctttcaaagacgatgaggttatatctagcgttatacctatcattgaaggacgtatagaagatggcaaaggcgtctcagggagaatacggttcacaaaccttgatcaccttactgatggctcgctcgtgggtggcaatccagatcgctactatggtgcccgtcccgaacaactggatcaacgagcccgggcagagctcagtgggcacgttgtcccgtcaacacagcacgacctccctatcgtgccaaatttcttcctcgccgtcaaaggtccagatggatctcttgccgtggctgaacggcaagcctgttacgatggtgcgctaggagcaaggagtatccgcagtcttcagatgtatagcgaggcggaacgaatccccgacaatagggcatatacaataacatgcacctatcacgggggtcagcttaaaatgtatactagtcacattgtaccagcagcttgtccagagggggcctatgagtatataatgacacaaatcgactcttggagcttgactggaaatgcgagtatgttccggaaaggggcggctgcctatcgaaatgcaagagactgggcaaagcagcagagggacgaggcgatcagcaaggcgaatgagaaggtcagacaagacatgtcgtcggtagatagacctcaagtcaagcgcactcgacgggcgggtgatctacgaccaagctctcttggcaactctgatacatctgccgatgaattggccctggatatgtccttggtaaatagacctcgagtgaagcgatttcggcgggcgagtgatttgcgattaagatctcttgacaactctgatacttctggtgatgaattggcgttggagatactgtaa

SEQ ID NO: 15813 - protein, 382 aa, Muscodor strobelii
  misc_feature: SGI Peptide ID NO. 565245
  misc_feature (26)..(307): NCBI GI: 242763443 Blast Desc: conserved [Talaromyces stipitatus ATCC 10500] gi|218723771|gb|EED23188.1| conserved [Talaromyces stipitatus ATCC 10500]
  misc_feature (3)..(312): NCBI GI: 238844446 Blast Desc: conserved [Microsporum canis CBS 113480]
  misc_feature (25)..(304): NCBI GI: 154278140 Blast Desc: [Ajellomyces capsulatus NAm1] gi|150413476|gb|EDN08859.1| [Ajellomyces capsulatus NAm1]
  misc_feature (2)..(376): NCBI GI: 240276392 Blast Desc: conserved [Ajellomyces capsulatus H143]
  misc_feature (3)..(339): NCBI GI: 239609757 Blast Desc: conserved [Ajellomyces dermatitidis ER-3]
  misc_feature (25)..(304): NCBI GI: 226292430 Blast Desc: conserved [Paracoccidioides brasiliensis Pb18]
  misc_feature (2)..(339): NCBI GI: 261199139 Blast Desc: conserved [Ajellomyces dermatitidis SLH14081] gi|239595123|gb|EEQ77704.1| conserved [Ajellomyces dermatitidis SLH14081]
  misc_feature (7)..(305): NCBI GI: 258574347 Blast Desc: [Uncinocarpus reesii 1704] gi|237901621|gb|EEP76022.1| [Uncinocarpus reesii 1704]
  misc_feature (16)..(303): NCBI GI: 154278928 Blast Desc: [Ajellomyces capsulatus NAm1] gi|150412220|gb|EDN07607.1| [Ajellomyces capsulatus NAm1]
  misc_feature (32)..(303): NCBI GI: 154277078 Blast Desc: [Ajellomyces capsulatus NAm1] gi|150414457|gb|EDN09822.1| [Ajellomyces capsulatus NAm1]
MTSSQGRRKRGSASLSNSTPTLQTDSTKSTSPYDRTFQQHLTDHRIYSDGYRYPGAKALPQPDNLNAISKVLSQRRSSLSRSRFSDSDFQQFKQADRDAFKDDEVISSVIPIIEGRIEDGKGVSGRIRFTNLDHLTDGSLVGGNPDRYYGARPEQLDQRARAELSGHVVPSTQHDLPIVPNFFLAVKGPDGSLAVAERQACYDGALGARSIRSLQMYSEAERIPDNRAYTITCTYHGGQLKMYTSHIVPAACPEGAYEYIMTQIDSWSLTGNASMFRKGAAAYRNARDWAKQQRDEAISKANEKVRQDMSSVDRPQVKRTRRAGDLRPSSLGNSDTSADELALDMSLVNRPRVKRFRRASDLRLRSLDNSDTSGDELALEIL

SEQ ID NO: 15814 - DNA, 256 bp, Muscodor strobelii
  misc_feature: SGI EST ID NO. CUFF.37417.0
  misc_feature: Variant of the nucleotide sequence at SEQ ID NO 15812
agaagatggcaaaggcgtctcagggagaatacggttcacaaaccttgatcaccttactgatggctcgctcgtgggtggcaatccagatcgctactatggtgcccgtcccgaacaactggatcaacgagcccgggcagagctcagtgggcacgttgtcccgtcaacacagcacgacctccctatcgtgccaaatttcttcctcgccgtcaaaggtccagatggatctcttgccgtggctgaacggcaagcctgttac

SEQ ID NO: 15815 - DNA, 735 bp, Muscodor strobelii
  misc_feature: SGI cDNA ID NO. 565246
  misc_feature: Encodes the peptide sequence at SEQ ID NO 15816
atgtcttacaacgataacgacaacaactacggctccagccgccgcgataacgacagctacggctcgtcgaacaatgacagctatggttcttccaataacgacagttatgggtcgagccgtcgagacaacgacaacgacaacagctttggctcttcaaacaacgatagttacggatcaagccgtcgcgatgacgacaacagctatggttcgtcaaagcgcgacaacgacagctacggctcttcaaacaatgatagcagctatggctcaagccgtagagacaacgacaacagctatggctcgtccggtcgtagcgacgagaacacctacggctcgtctaacactgagtcgttcggctcttctggtcgtcgcaacgaggacagctatggatcgtctaacactgaatctttcggcacttctggccgtaacaatgagggcagctacggtgctccaaacactgaatcgtttggttcttctggccgcaccaacgagaacacctacggctcttctaacgatgatagctacggttcgagccgccgtgataatgataacacttatggctcttcaaacaacgacagctatggctctagcagcagagacgatgacaagtccgattcgaagctgggcaaattcatggagaaagctggtgatgtgctcggcagcgacagtctgagagagaagggtgagcgtaaacggggcgataatgacagctacggcaacagcagcaatgattactga

SEQ ID NO: 15816 - protein, 244 aa, Muscodor strobelii
  misc_feature: SGI Peptide ID NO. 565246
  misc_feature (7)..(235): NCBI GI: 46124629 Blast Desc: FG06692.1 [Gibberella zeae PH-1]
  misc_feature (8)..(188): NCBI GI: 68483600 Blast Desc: potential stress response protein [Candida albicans SC5314] gi|68483873|ref|XP_714115.1| potential stress response protein [Candida albicans SC5314] gi|46435649|gb|EAK95026.1|
  misc_feature (47)..(198): NCBI GI: 68483600 Blast Desc: potential stress response protein [Candida albicans SC5314] gi|68483873|ref|XP_714115.1| potential stress response protein [Candida albicans SC5314] gi|46435649|gb|EAK95026.1|
  misc_feature (10)..(200): NCBI GI: 259148755 Blast Desc: Ddr48p [Saccharomyces cerevisiae EC1118]
  misc_feature (8)..(219): NCBI GI: 238841934 Blast Desc: stress protein DDR48 [Microsporum canis CBS 113480]
  misc_feature (6)..(198): NCBI GI: 6323826 Blast Desc: DNA damage-responsive protein, expression is increased in response to heat-shock stress or treatments that produce DNA lesions; contains multiple repeats of the amino acid sequence 48;
  misc_feature (6)..(198): NCBI GI: 171388 Blast Desc: DDR48 stress protein [Saccharomyces cerevisiae]
  misc_feature (6)..(200): NCBI GI: 6323826 Blast Desc: DNA damage-responsive protein, expression is increased in response to heat-shock stress or treatments that produce DNA lesions; contains multiple repeats of the amino acid sequence 48;
  misc_feature (6)..(200): NCBI GI: 171388 Blast Desc: DDR48 stress protein [Saccharomyces cerevisiae]
  misc_feature (6)..(199): NCBI GI: 6323826 Blast Desc: DNA damage-responsive protein, expression is increased in response to heat-shock stress or treatments that produce DNA lesions; contains multiple repeats of the amino acid sequence 48;
MSYNDNDNNYGSSRRDNDSYGSSNNDSYGSSNNDSYGSSRRDNDNDNSFGSSNNDSYGSSRRDDDNSYGSSKRDNDSYGSSNNDSSYGSSRRDNDNSYGSSGRSDENTYGSSNTESFGSSGRRNEDSYGSSNTESFGTSGRNNEGSYGAPNTESFGSSGRTNENTYGSSNDDSYGSSRRDNDNTYGSSNNDSYGSSSRDDDKSDSKLGKFMEKAGDVLGSDSLREKGERKRGDNDSYGNSSNDY

SEQ ID NO: 15817 - DNA, 1369 bp, Muscodor strobelii
  misc_feature: SGI EST ID NO. CUFF.37438.1
  misc_feature: Variant of the nucleotide sequence at SEQ ID NO 15815
aaacaaccgagccatgattcgcacggcaatgagacatcgcgttccatccagcggggtagcagacgccatctcagcctagtatgctgcgcgccatcggggctagctcactcagtacgtcagtcagagtccgaaatccaatgaggcctctccgtgggctgcgacgacctatcatatcagctcaccacagctccttgcatgggactgctcatttgcatggaactgctcatctgcatgcagttacagcaaatagaaatcacagcaaggtattagtatgaggtgcttcctcctcccgctctccctatcgctgtccccgaagcacgacatgttctatccttgtataggaatgggggcatccagcttgaaagagggaaccaaatgacgtattcgcgatctacctgaatcaggttgggatgcccctctcgttcagctgaagacctcgggaaacagtccgtaaggacctcagtcgtagtctgtgaactagttaatttactcaattactggtttacgaatacaacaatcaaaatgtcttacaacgataacgacaacaactacggctccagccgccgcgataacgacagctacggctcgtcgaacaatgacagctatggttcttccaataacgacagttatgggtcgagccgtcgagacaacgacaacgacaacagctttggctcttcaaacaacgatagttacggatcaagccgtcgcgatgacgacaacagctatggttcgtcaaagcgcgacaacgacagctacggctcttcaaacaatgatagcagctatggctcaagccgtagagacaacgacaacagctatggctcgtccggtcgtagcgacgagaacacctacggctcgtctaacactgagtcgttcggctcttctggtcgtcgcaacgaggacagctatggatcgtctaacactgaatctttcggcacttctggccgtaacaatgagggcagctacggtgctccaaacactgaatcgtttggttcttctggccgcaccaacgagaacacctacggctcttctaacgatgatagctacggttcgagccgccgtgataatgataacacttatggctcttcaaacaacgacagctatggctctagcagcagagacgatgacaagtccgattcgaagctgggcaaattcatggagaaagctggtgatgtgctcggcagcgacagtctgagagagaagggtgagcgtaaacggggcgataatgacagctacggcaacagcagcaatgattactgaatgggacctagtgggaaggataatctagctcggcctttcctaagtctttcatagtcgaactgttggtagttaatactccgcgaataattgacgaatatgattgaaacccaaa

SEQ ID NO: 15818 - DNA, 1833 bp, Muscodor strobelii
  misc_feature: SGI cDNA ID NO. 565247
  misc_feature: Reduced expression when VOC is produced
  misc_feature: Encodes the peptide sequence at SEQ ID NO 15819
atggacgccgtcttgcgccagagcaaggccatgtgcccgttcatgaagacggccacgcctgctactctgcgcgctctctcgactgccacccgaccgcatgcctcgtctccctgcggcggcaccatctcgaagctgcagctgtttggccagcgatgccctgtcatgtccaaggcgctcgccatccagtctgcccgtgtcgccggcagcaccggatttcgctccttcaccggctgtcccaagaccggcaaggccaagatccatacaagccgctctgctgaggcgcgggccctcaactcccccgtcttcacccagcgtgatggtgcgcaaatccctcccgctcctccggcccgcaaagctaatgctgctgcgactacgtctgcgcagccatcgacccacggcaagttcgactatactggcttctacgaacacgagctggacaaaaagcacaaggacaagtcgtaccgctacttcaacaacatcaaccgccttgctaaggagttcccccgcgctcatggagccaacaaggaggaacgagtcacggtctggtgctccaacgactatctcggcatgggccggaactcgaaagttcttgaccgcatgcataagaccctcgatgagtacggctctggcgctggtggaactcgaaatatctctggccacaaccaacatgcggtggaactcgaggccaccattgccaagctccacgcgaaggagagcgctttggtcttcagctcatgctatgtcgccaatgacgccactcttgctactctcgggagcaagctgccggactgcgtcattctctctgacagcttgaatcatgcgtcgatgattcagggcatccgccattctggaacccggaagatcgttttcaaacacaatgatctagatgacctcgaagccaagctagcatccttaccattgcatgtcccgaaaatcatagctttcgagtctgtgtatagcatgtgtggttctatcgggccaattgagaagatatgcgaccttgccgataagtatggcgccatcacttttctcgatgaagtccatgccgtcggtatgtacggcccgaacggcgctggtgttgccgaacatctcgacttcgacgcgcaccaacagggtcgaccacgcggtacggttatggaccgcgtagatatcattactggtactcttggcaaggcgtacggctgcgtcggtggctacatcgctgcgagcgctaagcttgttgacatgatccgctctcttgcgcctggcttcatcttcactacatccctgcccccggctactatggcaggcgctacagcggctatcgaacatcaagtcgagtataagggcgatagacgtctacagcagctccatacccgagctgtgaaggaggcactggacgctcgagatatcccagttattccgaacccatcacacatcatacccattctggttgggaatgccgagcttgccaaacaggcatctgatatgttgttgaacgattacaatatctatgtgcagtctatcaactatcctaccgtgcctgtcggccaggagcgcctgcggatcacaccgacacctggccacaccaaagaataccgagatcaactggtccaagccattgatgagatctggaataaactcgatattaagcgaacctctgcatgggctgccgaaggcgggttcatcggcgtcggagaacagaatgcccagccagcacagcccctctggacggacgcgcagctaggcattgataaccacatcgccaaggaaatcaaagcttccaagcctgccatcggtttcatggaaaccttgcttgcacgtgagagccaacgagtggccgcttcggcatga

SEQ ID NO: 15819 - protein, 610 aa, Muscodor strobelii
  misc_feature: SGI Peptide ID NO. 565247
  misc_feature (177)..(534): Pfam Id: PF00155 Pfam Desc: Aminotransferase class I and II
  misc_feature (1)..(604): NCBI GI: 171685716 Blast Desc: protein product [Podospora anserina] gi|170942819|emb|CAP68472.1| protein product [Podospora anserina]
  misc_feature (1)..(602): NCBI GI: 145608688 Blast Desc: 5-aminolevulinate synthase, mitochondrial precursor [Magnaporthe grisea 70-15] gi|145016136|gb|EDK00626.1| 5-aminolevulinate synthase, mitochondrial precursor [Magnaporthe
  misc_feature (1)..(607): NCBI GI: 154295273 Blast Desc: BC1G_13450 [Botryotinia fuckeliana B05.10] gi|150844177|gb|EDN19370.1| BC1G_13450 [Botryotinia fuckeliana B05.10]
  misc_feature (1)..(607): NCBI GI: 164425265 Blast Desc: 5-aminolevulinate synthase, mitochondrial precursor [Neurospora crassa OR74A] gi|166203660|sp|Q7RVY5.2|HEM1_NEUCR RecName: Full=5-aminolevulinate synthase, mitochondrial; AltName:
  misc_feature (1)..(604): NCBI GI: 169612469 Blast Desc: delta-aminolevulinic acid synthase [Phaeosphaeria nodorum SN15] gi|74040368|gb|AAZ95011.1| delta-aminolevulinic acid synthase [Phaeosphaeria nodorum] gi|160702518|gb|EAT83549.2|
  misc_feature (1)..(604): NCBI GI: 189190232 Blast Desc: 5-aminolevulinate synthase, mitochondrial precursor [Pyrenophora tritici-repentis Pt-1C-BFP] gi|187973061|gb|EDU40560.1| 5-aminolevulinate synthase, precursor
  misc_feature (1)..(535): NCBI GI: 156051058 Blast Desc: conserved [Sclerotinia sclerotiorum 1980] gi|154704714|gb|EDO04453.1| conserved [Sclerotinia sclerotiorum 1980]
  misc_feature (102)..(610): NCBI GI: 15721883 Blast Desc: 5-aminolevulinate synthase [Gibberella fujikuroi]
  misc_feature (1)..(577): NCBI GI: 226290644 Blast Desc: 5-aminolevulinate synthase [Paracoccidioides brasiliensis Pb18]
  misc_feature (112)..(605): NCBI GI: 46125777 Blast Desc: FG07266.1 [Gibberella zeae PH-1]
  misc_feature (1)..(607): SWISSPROT Homolog: EC 2.3.1.37 5-aminolevulinate synthase
  misc_feature: Useful for introducing or modulating the production of volatile compounds
MDAVLRQSKAMCPFMKTATPATLRALSTATRPHASSPCGGTISKLQLFGQRCPVMSKALAIQSARVAGSTGFRSFTGCPKTGKAKIHTSRSAEARALNSPVFTQRDGAQIPPAPPARKANAAATTSAQPSTHGKFDYTGFYEHELDKKHKDKSYRYFNNINRLAKEFPRAHGANKEERVTVWCSNDYLGMGRNSKVLDRMHKTLDEYGSGAGGTRNISGHNQHAVELEATIAKLHAKESALVFSSCYVANDATLATLGSKLPDCVILSDSLNHASMIQGIRHSGTRKIVFKHNDLDDLEAKLASLPLHVPKIIAFESVYSMCGSIGPIEKICDLADKYGAITFLDEVHAVGMYGPNGAGVAEHLDFDAHQQGRPRGTVMDRVDIITGTLGKAYGCVGGYIAASAKLVDMIRSLAPGFIFTTSLPPATMAGATAAIEHQVEYKGDRRLQQLHTRAVKEALDARDIPVIPNPSHIIPILVGNAELAKQASDMLLNDYNIYVQSINYPTVPVGQERLRITPTPGHTKEYRDQLVQAIDEIWNKLDIKRTSAWAAEGGFIGVGEQNAQPAQPLWTDAQLGIDNHIAKEIKASKPAIGFMETLLARESQRVAASA

SEQ ID NO: 15820 - DNA, 2481 bp, Muscodor strobelii
  misc_feature: SGI EST ID NO. CUFF.37598.0
  misc_feature: Variant of the nucleotide sequence at SEQ ID NO 15818
ctattatgcattacgggacgagttgaggctggtcagacgaagcctctgcccctcggtgagcgtctcgacaccgcacaatcgctgcgaatcagtgccggcttattattctctccctctcttgctttcgcccgtacaaattctcgtcttacgtgcgatagtttttgaagctagaccgccaattcacatcacccattgcggtctgctctaccgctctactgctctactgcttttgcaacagacataagacctgcttccgaggcgaccgtcctctcgatccaattgccacgttctcggctccattgacaatcgacctcaaccgccaccatggacgccgtcttgcgccagagcaaggccatgtgcccgttcatgaagacggccacgcctgctactctgcgcgctctctcgactgccacccgaccgcatgcctcgtctccctgcggcggcaccatctcgaagctgcagctgtttggccagcgatgccctgtcatgtccaaggcgctcgccatccagtctgcccgtgtcgccggcagcaccggatttcgctccttcaccggctgtcccaagaccggcaaggccaagatccatacaagccgctctgctgaggcgcgggccctcaactcccccgtcttcacccagcgtgatggtgcgcaaatccctcccgctcctccggcccgcaaagctaatgctgctgcgactacgtctgcgcagccatcgacccacggcaagttcgactatactggcttctacgaacacgagctggacaaaaagcacaaggacaagtcgtaccgctacttcaacaacatcaaccgccttgctaaggagttcccccgcgctcatggagccaacaaggaggaacgagtcacggtctggtgctccaacgactatctcggcatgggccggaactcgaaagttcttgaccgcatgcataagaccctcgatgagtacggctctggcgctggtggaactcgaaatatctctggccacaaccaacatgcggtggaactcgaggccaccattgccaagctccacgcgaaggagagcgctttggtcttcagctcatgctatgtcgccaatgacgccactcttgctactctcgggagcaagctgccggactgcgtcattctctctgacagcttgaatcatgcgtcgatgattcagggcatccgccattctggaacccggaagatcgttttcaaacacaatgatctagatgacctcgaagccaagctagcatccttaccattgcatgtcccgaaaatcatagctttcgagtctgtgtatagcatgtgtggttctatcgggccaattgagaagatatgcgaccttgccgataagtatggcgccatcacttttctcgatgaagtccatgccgtcggtatgtacggcccgaacggcgctggtgttgccgaacatctcgacttcgacgcgcaccaacagggtcgaccacgcggtacggttatggaccgcgtagatatcattactggtactcttggcaaggcgtacggctgcgtcggtggctacatcgctgcgagcgctaagcttgttgacatgatccgctctcttgcgcctggcttcatcttcactacatccctgcccccggctactatggcaggcgctacagcggctatcgaacatcaagtcgagtataagggcgatagacgtctacagcagctccatacccgagctgtgaaggaggcactggacgctcgagatatcccagttattccgaacccatcacacatcatacccattctggttgggaatgccgagcttgccaaacaggcatctgatatgttgttgaacgattacaatatctatgtgcagtctatcaactatcctaccgtgcctgtcggccaggagcgcctgcggatcacaccgacacctggccacaccaaagaataccgagatcaactggtccaagccattgatgagatctggaataaactcgatattaagcgaacctctgcatgggctgccgaaggcgggttcatcggcgtcggagaacagaatgcccagccagcacagcccctctggacggacgcgcagctaggcattgataaccacatcgccaaggaaatcaaagcttccaagcctgccatcggtttcatggaaaccttgcttgcacgtgagagccaacgagtggccgcttcggcatgagcacaacccaattcgtgaaagatttctgtccggcgatttcaacgtagctcatccgaccgactcaccttcgttggagcatgcaaggaactctgaaagagcgttacgcgcctcatcccattctcatctgatcatctttacacatattggccttctgggtctatttttaggcacttccgtgtccttggcatctaacatgccaaacctatggtactatcatatcaatgcaatcggcaccatctcgttggctagatggattcacgcccattcgccatcaccaatatcctcgtcttcagattaaatgtgatgattattacccatgccaaa

SEQ ID NO: 15821 - DNA, 1452 bp, Muscodor strobelii
  misc_feature: SGI cDNA ID NO. 565248
  misc_feature: Encodes the peptide sequence at SEQ ID NO 15822
atgaagacacaaggcctcctcatcacaggtgtgctgccgctcgcttcagcactgccctcatggctcggtcttcaaactcgccaagctgcttcaacgatcacagtagatctgacgaagacatatcaaactatggacggattcggctgctccttcgcgttccaacgggcgaatctcatcacgaatatgagcgacaagacgaagcagcgccagctgctcgacctcctattcaatacgacatcgggggcggggctgagtatcgtcaggaatggcatcggcagtagtccagactcgagctcagatcacatgaacacattcgcgcccaagaaccccggcgggcccacagcgacaccgcagtatagctgggatggaaaggacagcggacaggtctttgtctcgcaggaagcatacaagacatacggcgttaaacagatctacggcgatgcttggagcgcaccgggatacatgaagacgaacaacaatgagaacaacggcgggacactctgtggtgtgacgggggcgagttgttcgagcggagattggaaacaagcttatgcgaactatctcgtgcagtacgtcaaatattacgcggatgccggtgttcccgtgacgagactcgggtttctgaacgagccggagttttccccgtcgtatgcgggtatgaactcgaatggtcagcaagcggcggatttcatcaaagtgctctacgccaccctgcagtctgcgaacttgaccgatcaagtcgggatcggatgttgtgagagcgagggatggggcaaccaggtcaatatgttgaacgcgattaaatccgccggcgcggaaaatatgctcgctatggttacgagtcatacttacaccggtggttcgaactcgccgatgaatacgaaagtaccggtctggctgtctgaacagtgtgatctgaatggaggctggactaccgcttggtatagctctggtggtgcgggcgatgggtatacgtgggcgaataacatttataatgccgtgaccggtacgcaggtctccggctatctgtattgggagggtgtccagtggccttcgcctaatacgaacgagaagatgatcaaagttgatcagcagagcccatataatatcgaagtctcgaaacggctttgggcgtttgcgaactggagtcgttttgttaggccgggtgctgtcagattgggtacttcagggggatcgggcgtcaagagtacagcatttaagaatgttgatgggagtgtggcggtcgtggtcatctctactggaacttcggcgagtgcggtgagtgtcaaggtctcgggtgcgactacggccgcaactacggctacgggttgggtcacagacacaacgcatgattgtgcccagacaaatgtcaccgtcgctgctgatgggacattgagtggaagtgttgctgggagatctattacgacgtttttcattcctgctgcagcctaa

SEQ ID NO: 15822 - protein, 483 aa, Muscodor strobelii
  misc_feature: SGI Peptide ID NO. 565248
  misc_feature (28)..(483): NCBI GI: 116207174 Blast Desc: CHGG_02880 [Chaetomium globosum CBS 148.51] gi|88183477|gb|EAQ90945.1| CHGG_02880 [Chaetomium globosum CBS 148.51]
  misc_feature (24)..(479): NCBI GI: 171685760 Blast Desc: protein product [Podospora anserina] gi|170942841|emb|CAP68494.1| protein product [Podospora anserina]
  misc_feature (4)..(483): NCBI GI: 116200289 Blast Desc: CHGG_08300 [Chaetomium globosum CBS 148.51] gi|88179579|gb|EAQ87047.1| CHGG_08300 [Chaetomium globosum CBS 148.51]
  misc_feature (26)..(479): NCBI GI: 28629056 Blast Desc: AF487263_8 endo-exoxylanase [Leptosphaeria maculans]
  misc_feature (24)..(482): NCBI GI: 171679950 Blast Desc: protein product [Podospora anserina] gi|170939601|emb|CAP64828.1| protein product [Podospora anserina]
  misc_feature (30)..(450): NCBI GI: 115388667 Blast Desc: conserved [Aspergillus terreus NIH2624] gi|114195923|gb|EAU37623.1| conserved [Aspergillus terreus NIH2624]
  misc_feature (24)..(483): NCBI GI: 169854329 Blast Desc: CC1G_01516 [Coprinopsis cinerea okayama7#130] gi|116504974|gb|EAU87869.1| CC1G_01516 [Coprinopsis cinerea okayama7#130]
  misc_feature (35)..(479): NCBI GI: 121715874 Blast Desc: cellulose hydrolase, [Aspergillus clavatus NRRL 1] gi|119403703|gb|EAW14120.1| cellulose hydrolase, [Aspergillus clavatus NRRL 1]
  misc_feature (44)..(482): NCBI GI: 169608037 Blast Desc: SNOG_07084 [Phaeosphaeria nodorum SN15] gi|160701544|gb|EAT85735.2| SNOG_07084 [Phaeosphaeria nodorum SN15]
  misc_feature (1)..(476): NCBI GI: 261354647 Blast Desc: cellulosome enzyme [Verticillium albo-atrum VaMs.102]
MKTQGLLITGVLPLASALPSWLGLQTRQAASTITVDLTKTYQTMDGFGCSFAFQRANLITNMSDKTKQRQLLDLLFNTTSGAGLSIVRNGIGSSPDSSSDHMNTFAPKNPGGPTATPQYSWDGKDSGQVFVSQEAYKTYGVKQIYGDAWSAPGYMKTNNNENNGGTLCGVTGASCSSGDWKQAYANYLVQYVKYYADAGVPVTRLGFLNEPEFSPSYAGMNSNGQQAADFIKVLYATLQSANLTDQVGIGCCESEGWGNQVNMLNAIKSAGAENMLAMVTSHTYTGGSNSPMNTKVPVWLSEQCDLNGGWTTAWYSSGGAGDGYTWANNIYNAVTGTQVSGYLYWEGVQWPSPNTNEKMIKVDQQSPYNIEVSKRLWAFANWSRFVRPGAVRLGTSGGSGVKSTAFKNVDGSVAVVVISTGTSASAVSVKVSGATTAATTATGWVTDTTHDCAQTNVTVAADGTLSGSVAGRSITTFFIPAAA

SEQ ID NO: 15823 - DNA, 451 bp, Muscodor strobelii
  misc_feature: SGI EST ID NO. CUFF.37604.0
  misc_feature: Variant of the nucleotide sequence at SEQ ID NO 15821
cagcgacaccgcagtatagctgggatggaaaggacagcggacaggtctttgtctcgcaggaagcatacaagacatacggcgttaaacagatctacggcgatgcttggagcgcaccgggatacatgaagacgaacaacaatgagaacaacggcgggacactctgtggtgtgacgggggcgagttgttcgagcggagattggaaacaagcttatgcgaactatctcgtgcagtacgtcaaatattacgcggatgccggtgttcccgtgacgagactcgggtttctgaacgagccggagttttccccgtcgtatgcgggtatgaactcgaatggtcagcaagcggcggatttcatcaaagtgctctacgccaccctgcagtctgcgaacttgaccgatcaagtcgggatcggatgttgtgagagcgagggatggggcaaccaggtcaatatgtt

SEQ ID NO: 15824 - DNA, 543 bp, Muscodor strobelii
  misc_feature: SGI cDNA ID NO. 565249
  misc_feature: Encodes the peptide sequence at SEQ ID NO 15825
atggccactcctcagcgacggcttcagaagccctcaatcttcctactcacatctcaaaaagtcttaaaagcagccaagatcctgaagctacccgtcttcgtaacgacacaaaacggagcaaagctaggcggcacagtcccagagatcgaggctctgatcgacgatgccgtcgctaacgtcgacaagaccctattcagcatggttacgccagaagttgccgcaaaacttccggagaagggagaggttgtcatcgtcggtatcgaaagccatatctgtgtcacacagacggctcttgatcttctctctcgtggctacaaggtctatgttcttgcggatggtgtcagtagttgcaatgagcaggaagttccgatcgcgcttgctagactgcgtagtgagggagctgtcgtcacgacttctgagagttggttgtatgagtgtatgggtgatgcaggcatcgcggaattcagggacattgcgaagcttattaaggagagcagtggggataccaagacggcgcttgctgggctgttgagcaagatgtag

SEQ ID NO: 15825 - protein, 180 aa, Muscodor strobelii
  misc_feature: SGI Peptide ID NO. 565249
  misc_feature (81)..(143): Pfam Id: PF00857 Pfam Desc: Isochorismatase family
  misc_feature (2)..(176): NCBI GI: 145615657 Blast Desc: MGG_05741 [Magnaporthe grisea 70-15] gi|145022446|gb|EDK06466.1| MGG_05741 [Magnaporthe grisea 70-15]
  misc_feature (4)..(177): NCBI GI: 171685756 Blast Desc: protein product [Podospora anserina] gi|170942839|emb|CAP68492.1| protein product [Podospora anserina]
  misc_feature (2)..(176): NCBI GI: 189206548 Blast Desc: isochorismatase domain-containing protein 2A, mitochondrial precursor [Pyrenophora tritici-repentis Pt-1C-BFP] gi|187975701|gb|EDU42327.1| isochorismatase domain-containing 2A,
  misc_feature (10)..(176): NCBI GI: 169621201 Blast Desc: SNOG_13808 [Phaeosphaeria nodorum SN15] gi|160704202|gb|EAT78832.2| SNOG_13808 [Phaeosphaeria nodorum SN15]
  misc_feature (17)..(176): NCBI GI: 67539792 Blast Desc: AN6066.2 [Aspergillus nidulans FGSC A4] gi|40738851|gb|EAA58041.1| AN6066.2 [Aspergillus nidulans FGSC A4] gi|259479749|tpe|CBF70255.1| TPA: isochorismatase family FGSC
  misc_feature (7)..(173): NCBI GI: 225684237 Blast Desc: isochorismatase domain containing 2b [Paracoccidioides brasiliensis Pb03]
  misc_feature (7)..(173): NCBI GI: 154274063 Blast Desc: conserved [Ajellomyces capsulatus NAm1] gi|150415491|gb|EDN10844.1| conserved [Ajellomyces capsulatus NAm1]
  misc_feature (17)..(173): NCBI GI: 238841949 Blast Desc: GH17932p [Microsporum canis CBS 113480]
  misc_feature (12)..(173): NCBI GI: 225559362 Blast Desc: isochorismatase domain-containing protein [Ajellomyces capsulatus G186AR]
  misc_feature (12)..(173): NCBI GI: 240282295 Blast Desc: isochorismatase domain-containing protein [Ajellomyces capsulatus H143]
MATPQRRLQKPSIFLLTSQKVLKAAKILKLPVFVTTQNGAKLGGTVPEIEALIDDAVANVDKTLFSMVTPEVAAKLPEKGEVVIVGIESHICVTQTALDLLSRGYKVYVLADGVSSCNEQEVPIALARLRSEGAVVTTSESWLYECMGDAGIAEFRDIAKLIKESSGDTKTALAGLLSKM

SEQ ID NO: 15826 - DNA, 697 bp, Muscodor strobelii
  misc_feature: SGI EST ID NO. CUFF.37615.1
  misc_feature: Variant of the nucleotide sequence at SEQ ID NO 15824
ccgatctgctatatggaactttgacaaagtcctactcacatctcaaaaagtcttaaaagcagccaagatcctgaagctacccgtcttcgtaacgacacaaaacggagcaaagctaggcggcacagtcccagagatcgaggctctgatcgacgatgccgtcgctaacgtcgacaagaccctattcagcatggttacgccagaagttgccgcaaaacttccggagaagggagaggttgtcatcgtcggtatcgaaagccatatctgtgtcacacagacggctcttgatcttctctctcgtggctacaaggtctatgttcttgcggatggtgtcagtagttgcaatgagcaggaagttccgatcgcgcttgctagactgcgtagtgagggagctgtcgtcacgacttctgagagttggttgtatgagtgtatgggtgatgcaggcatcgcggaattcagggacattgcgaagcttattaaggagagcagtggggataccaagacggcgcttgctgggctgttgagcaagatgtagatgcggtgtcgaaggtcctaaaagggttggaacatgatttctcagtgattatcgtaagtcaggctcatagaggctcgagtatacataacaattggaacgactagtatgaggcatagctcaaataatattggaagtcagcactgagtgtattccaatatgtgatgc

SEQ ID NO: 15827 - DNA, 1563 bp, Muscodor strobelii
  misc_feature: SGI cDNA ID NO. 565250
  misc_feature: Encodes the peptide sequence at SEQ ID NO 15828
atggtcgatttatcactgtatctggtgacggactcgacgccggccattctcggcgacaaagacatttgccaagtcgtcgaggctgcactgcggggcggcgtgacatgcgttcagtaccgagacaaaaccagcgacaccggggttttgattgagatcggacgcaaactgcatgaaattacaaagaaatatggtgttccgctactcatcaacgatcgtgttgacgttgcgcttgctgtaggttgcgagggcgtacatatcggccaagacgacatgaagcttgagactgcgagacatatacttggtccagacaagattattggcgttactgtgagtaatgctgaggaaactagggttgcttgtcagggagatgcgagttacctggggattgggactatttttgcaacgcctaccaaagaaaatgtgaagagcatcattggagtcgcgggtttgcaagatatactacgacagatcgctcgagaaaagccaacaatgccatcggtatgcattggaggaatcaatgcgtcaaacgtctcaagtgtcttttggcaatgtgcggattttggtggcgtctactcacttgacggcgtagctgtcgttagtgccatcatggctgcaaaagaccccgaggctgctgcaagggaattaaaacgactcctgacaacaactccgaagtacatggaaaatatcacggcaggaaatcaggatggtcggttcaaacgagatgctgaggagctgctaaaggaggtcccacatatcatcaaggcagtcgccaaagggaaaccgctatcccataacatgacgaatctcgtggttcagaacttcgcagccaacgtcgctctttgtgtaggcgccagtcccatcatggcaaattatggtgaagaggcaaaagatcttgcgaaacttggcggtgtactagtgatcaacatgggtacggtgacaccagagggtttagagaactatctgaaggcactacgagcttacaataatactggaaatccagtggtatttgatcccgttggtgctggagctactgccgttcgcagatcagcaacgaagaccatccttacaggaggtcacatagacgtgatcaaaggaaaccaggccgagatcctctcttgtcttggtgacagcgaggtacagcaacgtggtgttgacagcggaggcgccgaaatgagcgcttcgaagatcgcagaactgatcaaagccctcgcgatccaacgagacactattgtagtcatgacgggcaagacggactacgtcacggctggcgatagggtctatgcgatcaagaatgggcatgagtatctgggaaatgttaccggcacggggtgttgccttggtacgacgatctctgccatgattgcggcgtggccccaggatcaacttgccgcaactattgctggtctattattctacaacatcgctgctgagttggctgctgaacgggacgatgtcaaggggcctgggagctttgtgcctgcttttcttgattcgctttacaccattcgaatggcgactgtgcatgacaatctcagctggcttacgagagcacaaattcaatga

SEQ ID NO: 15828 - protein, 520 aa, Muscodor strobelii
  misc_feature: SGI Peptide ID NO. 565250
  misc_feature (253)..(505): Pfam Id: PF02110 Pfam Desc: Hydroxyethylthiazole kinase family
  misc_feature (6)..(202): Pfam Id: PF02581 Pfam Desc: Thiamine monophosphate synthase/TENI
  misc_feature (2)..(519): NCBI GI: 164428902 Blast Desc: NCU11173 [Neurospora crassa OR74A] gi|157072331|gb|EDO65405.1| NCU11173 [Neurospora crassa OR74A]
  misc_feature (2)..(520): NCBI GI: 154301521 Blast Desc: BC1G_10430 [Botryotinia fuckeliana B05.10] gi|150856170|gb|EDN31362.1| BC1G_10430 [Botryotinia fuckeliana B05.10]
  misc_feature (2)..(520): NCBI GI: 156032975 Blast Desc: SS1G_13563 [Sclerotinia sclerotiorum 1980] gi|154698966|gb|EDN98704.1| SS1G_13563 [Sclerotinia sclerotiorum 1980]
  misc_feature (1)..(519): NCBI GI: 39977091 Blast Desc: MGG_06448 [Magnaporthe grisea 70-15] gi|145016134|gb|EDK00624.1| MGG_06448 [Magnaporthe grisea 70-15]
  misc_feature (2)..(520): NCBI GI: 119480739 Blast Desc: thiamine biosynthetic bifunctional enzyme, [Neosartorya fischeri NRRL 181] gi|119408552|gb|EAW18501.1| thiamine biosynthetic bifunctional enzyme, [Neosartorya fischeri
  misc_feature (2)..(520): NCBI GI: 256733229 Blast Desc: [Nectria haematococca mpVI 77-13-4]
  misc_feature (2)..(518): NCBI GI: 171685758 Blast Desc: protein product [Podospora anserina] gi|170942840|emb|CAP68493.1| protein product [Podospora anserina]
  misc_feature (2)..(520): NCBI GI: 71001098 Blast Desc: thiamine biosynthetic bifunctional enzyme [Aspergillus fumigatus Af293] gi|66852868|gb|EAL93192.1| thiamine biosynthetic bifunctional enzyme, [Aspergillus fumigatus Af293]
  misc_feature (2)..(520): NCBI GI: 159129316 Blast Desc: thiamine biosynthetic bifunctional enzyme, [Aspergillus fumigatus A1163]
  misc_feature (2)..(520): NCBI GI: 121698835 Blast Desc: thiamine biosynthetic bifunctional enzyme, [Aspergillus clavatus NRRL 1] gi|119395965|gb|EAW06397.1| thiamine biosynthetic bifunctional enzyme, [Aspergillus clavatus
  misc_feature (2)..(520): SWISSPROT Homolog: EC 2.5.1.3 Thiamine-phosphate diphosphorylase
  misc_feature (2)..(520): SWISSPROT Homolog: EC 2.7.1.50 Hydroxyethylthiazole kinase
MVDLSLYLVTDSTPAILGDKDICQVVEAALRGGVTCVQYRDKTSDTGVLIEIGRKLHEITKKYGVPLLINDRVDVALAVGCEGVHIGQDDMKLETARHILGPDKIIGVTVSNAEETRVACQGDASYLGIGTIFATPTKENVKSIIGVAGLQDILRQIAREKPTMPSVCIGGINASNVSSVFWQCADFGGVYSLDGVAVVSAIMAAKDPEAAARELKRLLTTTPKYMENITAGNQDGRFKRDAEELLKEVPHIIKAVAKGKPLSHNMTNLVVQNFAANVALCVGASPIMANYGEEAKDLAKLGGVLVINMGTVTPEGLENYLKALRAYNNTGNPVVFDPVGAGATAVRRSATKTILTGGHIDVIKGNQAEILSCLGDSEVQQRGVDSGGAEMSASKIAELIKALAIQRDTIVVMTGKTDYVTAGDRVYAIKNGHEYLGNVTGTGCCLGTTISAMIAAWPQDQLAATIAGLLFYNIAAELAAERDDVKGPGSFVPAFLDSLYTIRMATVHDNLSWLTRAQIQ

SEQ ID NO: 15829 - DNA, 1787 bp, Muscodor strobelii
  misc_feature: SGI EST ID NO. CUFF.37445.0
  misc_feature: Variant of the nucleotide sequence at SEQ ID NO 15827
ctctattcttctcactcactcttttgcttctgagcatctgcgacacgtagaagatggtcgatttatcactgtatctggtgacggactcgacgccggccattctcggcgacaaagacatttgccaagtcgtcgaggctgcactgcggggcggcgtgacatgcgttcagtaccgagacaaaaccagcgacaccggggttttgattgagatcggacgcaaactgcatgaaattacaaagaaatatggtgttccgctactcatcaacgatcgtgttgacgttgcgcttgctgtaggttgcgagggcgtacatatcggccaagacgacatgaagcttgagactgcgagacatatacttggtccagacaagattattggcgttactgtgagtaatgctgaggaaactagggttgcttgtcagggagatgcgagttacctggggattgggactatttttgcaacgcctaccaaagaaaatgtgaagagcatcattggagtcgcgggtttgcaagatatactacgacagatcgctcgagaaaagccaacaatgccatcggtatgcattggaggaatcaatgcgtcaaacgtctcaagtgtcttttggcaatgtgcggattttggtggcgtctactcacttgacggcgtagctgtcgttagtgccatcatggctgcaaaagaccccgaggctgctgcaagggaattaaaacgactcctgacaacaactccgaagtacatggaaaatatcacggcaggaaatcaggatggtcggttcaaacgagatgctgaggagctgctaaaggaggtcccacatatcatcaaggcagtcgccaaagggaaaccgctatcccataacatgacgaatctcgtggttcagaacttcgcagccaacgtcgctctttgtgtaggcgccagtcccatcatggcaaattatggtgaagaggcaaaagatcttgcgaaacttggcggtgtactagtgatcaacatgggtacggtgacaccagagggtttagagaactatctgaaggcactacgagcttacaataatactggaaatccagtggtatttgatcccgttggtgctggagctactgccgttcgcagatcagcaacgaagaccatccttacaggaggtcacatagacgtgatcaaaggaaaccaggccgagatcctctcttgtcttggtgacagcgaggtacagcaacgtggtgttgacagcggaggcgccgaaatgagcgcttcgaagatcgcagaactgatcaaagccctcgcgatccaacgagacactattgtagtcatgacgggcaagacggactacgtcacggctggcgatagggtctatgcgatcaagaatgggcatgagtatctgggaaatgttaccggcacggggtgttgccttggtacgacgatctctgccatgattgcggcgtggccccaggatcaacttgccgcaactattgctggtctattattctacaacatcgctgctgagttggctgctgaacgggacgatgtcaaggggcctgggagctttgtgcctgcttttcttgattcgctttacaccattcgaatggcgactgtgcatgacaatctcagctggcttacgagagcacaaattcaatgagccgatataagagtcgaggtggacaactgttggacgagtgaacacgctgaatagacatagagacccgagcaacttgaaatacaacttccgcagaatagaaagggggactaacgctttcgctgtgatgttctaatcgttaccaaattcgtaataattggcaccatgtataag

SEQ ID NO: 15830 - DNA, 1884 bp, Muscodor strobelii
  misc_feature: SGI cDNA ID NO. 565251
  misc_feature: Encodes the peptide sequence at SEQ ID NO 15831
atggattctcgctaccctgctactcgcgaggaactctacaatgtccacatggacgtcagcaaactgcagatcgtacagagcaaccatgccgaaagactctcgcgtctagagaagcaacaagccagcgatgctgccatcaaatctgtctggaactctccttttccaagcgcaattagtggcaccccacaacacggtccgattcagatgcctccaagcgagatgttcgacgattttgaggagcagggccagaatctgttaggcagtcttcaccttgatgccgaagacgagcctgcaaggcggggcacaacctcccgagccaacagtgtccggttcgtcgaaagcgctctgcagggctctaattggtcgcagaatggccgccagtcaggcgattttgggcctatcagacctggcagtggtcttggaagtcatgctatgatggagcgttccatgtcacataagtccgatggaagacacagctctgccggtcattcagtccattcgattcactcccatcattcggtcgcgtctggacgaggaagcagcttgggcctggatacgaccttcaccccagccggccaggaagacgagtctccagccagcgtcccagagccgcccccaagctttttcattttgggttcagttccctccattgtcagatgttggcttacggctaatttttctcacgacactctcctctacgcagatatctgcaccggatcacagaagtccgtcgtcgaatactcgttgatcaaggaactggaccttgtcgacagcatccatcgcgatctcgatggggttcatcgcattcggctgcatgtatatctcactgaagcaacggtttcccaatccaaccctcggagtgccagtccagcgcctcaaatgccaagtctagcctgtacttttgaggttgcaggtatggaccaagctgatttgccggatgcaaagaagaccattcgtatcttcattggcagtgaaactttacgtgaacactcggccgatgttcttttctcgcagaatcgcatgacactttacagcagtgagcgtgagaaactttccgtaccctttgtacgccccgaggataacggagcctttaagaacatccgaactatggctgtatttccggagaagcccaagctgaatgcgacagcgcgaccctttgttgttggaggaggctcgaaaatcccagagtcgacgattccatctcctgagcaaactccgttccaacctaacaatgatgggaaggatgcatacgacgtcatcacacctacatcagagcaagcgagtcagccaaacggtacaggaggcccttctacagtttccgatagcggtggggaaggtgaagaacaccgcaaagagctcagcccagttgatcaacatcccaccaaagattctcagtttcatgcgcaagacgcatccgaggatggcataagacgcacgtcagcagctggtggtatctggaattcgtggcgatcaggaggaccaacgacaactggagatcaaaaagacagtgccccattgagcggatatcagcctgcaggacgtgggcgtaatatgaaggttctgaagcctatgaagtcgacatcatcatcttcagctcggactggatcggcttatgaaccagcaccatccaccaggaccagtggagaacttcgccgcaagagccagacggttgctgagacaggtgccactagtagcacaattcgatgggaaacgaagaaaacgccagtcagtggacaggaacccaagcctggcatgaatactcgagagactcgaagtgtgtcccacacacctcgaacgtctacaaaccctgtcggcggcgcttcagctttttcatggatgactccaacgagcaagccgaggacttcgacaacagccgcggaataa

SEQ ID NO: 15831 - protein, 627 aa, Muscodor strobelii
  misc_feature: SGI Peptide ID NO. 565251
  misc_feature (17)..(621): NCBI GI: 145615625 Blast Desc: MGG_13161 [Magnaporthe grisea 70-15] gi|145022425|gb|EDK06445.1| MGG_13161 [Magnaporthe grisea 70-15]
  misc_feature (1)..(623): NCBI GI: 46125765 Blast Desc: FG07260.1 [Gibberella zeae PH-1]
  misc_feature (17)..(623): NCBI GI: 154301517 Blast Desc: BC1G_10428 [Botryotinia fuckeliana B05.10] gi|150856168|gb|EDN31360.1| BC1G_10428 [Botryotinia fuckeliana B05.10]
  misc_feature (1)..(613): NCBI GI: 85084278 Blast Desc: NCU00398 [Neurospora crassa OR74A] gi|28918373|gb|EAA28048.1| [Neurospora crassa OR74A]
  misc_feature (17)..(627): NCBI GI: 156032971 Blast Desc: SS1G_13561 [Sclerotinia sclerotiorum 1980] gi|154698964|gb|EDN98702.1| SS1G_13561 [Sclerotinia sclerotiorum 1980]
  misc_feature (1)..(625): NCBI GI: 171685754 Blast Desc: protein product [Podospora anserina] gi|170942838|emb|CAP68491.1| protein product [Podospora anserina]
  misc_feature (1)..(621): NCBI GI: 116207180 Blast Desc: CHGG_02883 [Chaetomium globosum CBS 148.51] gi|88183480|gb|EAQ90948.1| CHGG_02883 [Chaetomium globosum CBS 148.51]
  misc_feature (9)..(526): NCBI GI: 189207218 Blast Desc: ubiquitin carboxyl-terminal hydrolase 19 [Pyrenophora tritici-repentis Pt-1C-BFP] gi|187976036|gb|EDU42662.1| ubiquitin carboxyl-terminal hydrolase 19 [Pyrenophora tritici-repentis
  misc_feature (9)..(613): NCBI GI: 169619311 Blast Desc: SNOG_12850 [Phaeosphaeria nodorum SN15] gi|160703792|gb|EAT79650.2| SNOG_12850 [Phaeosphaeria nodorum SN15]
  misc_feature (1)..(622): NCBI GI: 115443390 Blast Desc: conserved [Aspergillus terreus NIH2624] gi|114188371|gb|EAU30071.1| conserved [Aspergillus terreus NIH2624]
MDSRYPATREELYNVHMDVSKLQIVQSNHAERLSRLEKQQASDAAIKSVWNSPFPSAISGTPQHGPIQMPPSEMFDDFEEQGQNLLGSLHLDAEDEPARRGTTSRANSVRFVESALQGSNWSQNGRQSGDFGPIRPGSGLGSHAMMERSMSHKSDGRHSSAGHSVHSIHSHHSVASGRGSSLGLDTTFTPAGQEDESPASVPEPPPSFFILGSVPSIVRCWLTANFSHDTLLYADICTGSQKSVVEYSLIKELDLVDSIHRDLDGVHRIRLHVYLTEATVSQSNPRSASPAPQMPSLACTFEVAGMDQADLPDAKKTIRIFIGSETLREHSADVLFSQNRMTLYSSEREKLSVPFVRPEDNGAFKNIRTMAVFPEKPKLNATARPFVVGGGSKIPESTIPSPEQTPFQPNNDGKDAYDVITPTSEQASQPNGTGGPSTVSDSGGEGEEHRKELSPVDQHPTKDSQFHAQDASEDGIRRTSAAGGIWNSWRSGGPTTTGDQKDSAPLSGYQPAGRGRNMKVLKPMKSTSSSSARTGSAYEPAPSTRTSGELRRKSQTVAETGATSSTIRWETKKTPVSGQEPKPGMNTRETRSVSHTPRTSTNPVGGASAFSWMTPTSKPRTSTTAAE

SEQ ID NO: 15832 - DNA, 3527 bp, Muscodor strobelii
  misc_feature: SGI EST ID NO. CUFF.37452.0
  misc_feature: Variant of the nucleotide sequence at SEQ ID NO 15830
ccaacaccgaatccagattccacagatgtgtatccccaacgctaaactcgttacagcattaagcgcggtccgtcatgctgtggcccacggatggcttcccccctgcttccacgcttggcctgcgagcctgcccctgccgggcacaccttagttacggtaaggctaagtcttgcattctttgccttactgtcgactgtcgacctgtagtgacgactgggagatacgtgccaggtcgtaaagtccgaacctcccaaccttcggctgcaccccttggtcaaagcaattcagcactcgtccgcatcatcgttagaccatcatcgccgccagattccactgctaatagacacactctttccatcccatcactgcttcaacagtccaccgtggaccccctctcttccatagatctcaggctcgcggttcattggtagactcacagcagcatccttgttcgccctagcagatacctactgtacagcaggtagtaagagccgcagcgtaaccatccgacctcttgtgcttccagaacctctgttcatcaacccgcacatactgtacatcagcacacctgcccgtgtctctgcctcgctgcctcgctgcctcgctgctctcctctcgaggtcgttaacgacttccatttctatcggtctctgtgcgccgactgatatccaacatcgacccctgcctccaagagtctcccccactactgctaccctcatccccaaacacccgactgagcaccaactccctcaccgtctcatttgtctccattgccacataacataattgtatcgcacatcgcaccgtcaattctacatctgcgccgtatcggataagtacttgcggaacgcggcacactacaaacttcctacaatcttaaagcagcagcttcgatatccaccctactcgacctccgtttgtgcacctctctccctgccgtgcccgtgaatcgccccgttcgaaagctcctgcgtcgacatccccctccgaacagcacgaacaaaagacgccacgagtttgttaccaagccaagagaagcattgcctcgctgcctggccctctctcgttgaagtgaccacctggtcctctgcgatgaggtcgtggtggtggacctcatcgatcggacatccaggttcgaggtcatagtcgttcgttccgaggccctacaccttcacaatcggttccctgtccatctgcctgtcgccagcaagctagtcttgcctttctgtggtcgttctgtctgtcctatggtctactgtttttggagttcttgagctttgaactctgtactcccttgttgcccctcagagtctgtctcttgtttctcgtggactcaaatcttggcttgcggatgaaccttaacactctgtctaactttctctaactttcacactgtaactgttcgatctctgaaattgccaatacggtgtgggtatggattctcgctaccctgctactcgcgaggaactctacaatgtccacatggacgtcagcaaactgcagatcgtacagagcaaccatgccgaaagactctcgcgtctagagaagcaacaagccagcgatgctgccatcaaatctgtctggaactctccttttccaagcgcaattagtggcaccccacaacacggtccgattcagatgcctccaagcgagatgttcgacgattttgaggagcagggccagaatctgttaggcagtcttcaccttgatgccgaagacgagcctgcaaggcggggcacaacctcccgagccaacagtgtccggttcgtcgaaagcgctctgcagggctctaattggtcgcagaatggccgccagtcaggcgattttgggcctatcagacctggcagtggtcttggaagtcatgctatgatggagcgttccatgtcacataagtccgatggaagacacagctctgccggtcattcagtccattcgattcactcccatcattcggtcgcgtctggacgaggaagcagcttgggcctggatacgaccttcaccccagccggccaggaagacgagtctccagccagcgtcccagagccgcccccaagctttttcattttgggttcagttccctccattgtcagatgttggcttacggctaatttttctcacgacactctcctctacgcagatatctgcaccggatcacagaagtccgtcgtcgaatactcgttgatcaaggaactggaccttgtcgacagcatccatcgcgatctcgatggggttcatcgcattcggctgcatgtatatctcactgaagcaacggtttcccaatccaaccctcggagtgccagtccagcgcctcaaatgccaagtctagcctgtacttttgaggttgcaggtatggaccaagctgatttgccggatgcaaagaagaccattcgtatcttcattggcagtgaaactttacgtgaacactcggccgatgttcttttctcgcagaatcgcatgacactttacagcagtgagcgtgagaaactttccgtaccctttgtacgccccgaggataacggagcctttaagaacatccgaactatggctgtatttccggagaagcccaagctgaatgcgacagcgcgaccctttgttgttggaggaggctcgaaaatcccagagtcgacgattccatctcctgagcaaactccgttccaacctaacaatgatgggaaggatgcatacgacgtcatcacacctacatcagagcaagcgagtcagccaaacggtacaggaggcccttctacagtttccgatagcggtggggaaggtgaagaacaccgcaaagagctcagcccagttgatcaacatcccaccaaagattctcagtttcatgcgcaagacgcatccgaggatggcataagacgcacgtcagcagctggtggtatctggaattcgtggcgatcaggaggaccaacgacaactggagatcaaaaagacagtgccccattgagcggatatcagcctgcaggacgtgggcgtaatatgaaggttctgaagcctatgaagtcgacatcatcatcttcagctcggactggatcggcttatgaaccagcaccatccaccaggaccagtggagaacttcgccgcaagagccagacggttgctgagacaggtgccactagtagcacaattcgatgggaaacgaagaaaacgccagtcagtggacaggaacccaagcctggcatgaatactcgagagactcgaagtgtgtcccacacacctcgaacgtctacaaaccctgtcggcggcgcttcagctttttcatggatgactccaacgagcaagccgaggacttcgacaacagccgcggaataaatcacgcagacagatgacgggtgttgttctacgttcacacttcagatgctctgtccactaaaccagctttcagtggcttaccctatttagcagtataaaagtaaaaactataaattaacaatgaaagtgctcgtcaatcaagattctttatccatacatggtgaaacacttagaaacatgctataacgacagagggtgatggaatggcc

SEQ ID NO: 15833 - DNA, 1449 bp, Muscodor strobelii
  misc_feature: SGI cDNA ID NO. 565252
  misc_feature: Encodes the peptide sequence at SEQ ID NO 15834
atggagcgttccatgtcacataagtccgatggaagacacagctctgccggtcattcagtccattcgattcactcccatcattcggtcgcgtctggacgaggaagcagcttgggcctggatacgaccttcaccccagccggccaggaagacgagtctccagccagcgtcccagagccgcccccaagctttttcattttgggttcagttccctccattgtcagatgttggcttacggctaatttttctcacgacactctcctctacgcagatatctgcaccggatcacagaagtccgtcgtcgaatactcgttgatcaaggaactggaccttgtcgacagcatccatcgcgatctcgatggggttcatcgcattcggctgcatgtatatctcactgaagcaacggtttcccaatccaaccctcggagtgccagtccagcgcctcaaatgccaagtctagcctgtacttttgaggttgcaggtatggaccaagctgatttgccggatgcaaagaagaccattcgtatcttcattggcagtgaaactttacgtgaacactcggccgatgttcttttctcgcagaatcgcatgacactttacagcagtgagcgtgagaaactttccgtaccctttgtacgccccgaggataacggagcctttaagaacatccgaactatggctgtatttccggagaagcccaagctgaatgcgacagcgcgaccctttgttgttggaggaggctcgaaaatcccagagtcgacgattccatctcctgagcaaactccgttccaacctaacaatgatgggaaggatgcatacgacgtcatcacacctacatcagagcaagcgagtcagccaaacggtacaggaggcccttctacagtttccgatagcggtggggaaggtgaagaacaccgcaaagagctcagcccagttgatcaacatcccaccaaagattctcagtttcatgcgcaagacgcatccgaggatggcataagacgcacgtcagcagctggtggtatctggaattcgtggcgatcaggaggaccaacgacaactggagatcaaaaagacagtgccccattgagcggatatcagcctgcaggacgtgggcgtaatatgaaggttctgaagcctatgaagtcgacatcatcatcttcagctcggactggatcggcttatgaaccagcaccatccaccaggaccagtggagaacttcgccgcaagagccagacggttgctgagacaggtgccactagtagcacaattcgatgggaaacgaagaaaacgccagtcagtggacaggaacccaagcctggcatgaatactcgagagactcgaagtgtgtcccacacacctcgaacgtctacaaaccctgtcggcggcgcttcagctttttcatggatgactccaacgagcaagccgaggacttcgacaacagccgcggaataa

SEQ ID NO: 15834 - protein, 482 aa, Muscodor strobelii
  misc_feature: SGI Peptide ID NO. 565252
  misc_feature (1)..(476): NCBI GI: 145615625 Blast Desc: MGG_13161 [Magnaporthe grisea 70-15] gi|145022425|gb|EDK06445.1| MGG_13161 [Magnaporthe grisea 70-15]
  misc_feature (1)..(478): NCBI GI: 46125765 Blast Desc: FG07260.1 [Gibberella zeae PH-1]
  misc_feature (1)..(480): NCBI GI: 171685754 Blast Desc: protein product [Podospora anserina] gi|170942838|emb|CAP68491.1| protein product [Podospora anserina]
  misc_feature (2)..(482): NCBI GI: 156032971 Blast Desc: SS1G_13561 [Sclerotinia sclerotiorum 1980] gi|154698964|gb|EDN98702.1| SS1G_13561 [Sclerotinia sclerotiorum 1980]
  misc_feature (2)..(478): NCBI GI: 154301517 Blast Desc: BC1G_10428 [Botryotinia fuckeliana B05.10] gi|150856168|gb|EDN31360.1| BC1G_10428 [Botryotinia fuckeliana B05.10]
  misc_feature (2)..(468): NCBI GI: 85084278 Blast Desc: NCU00398 [Neurospora crassa OR74A] gi|28918373|gb|EAA28048.1| [Neurospora crassa OR74A]
  misc_feature (1)..(476): NCBI GI: 116207180 Blast Desc: CHGG_02883 [Chaetomium globosum CBS 148.51] gi|88183480|gb|EAQ90948.1| CHGG_02883 [Chaetomium globosum CBS 148.51]
  misc_feature (2)..(381): NCBI GI: 189207218 Blast Desc: ubiquitin carboxyl-terminal hydrolase 19 [Pyrenophora tritici-repentis Pt-1C-BFP] gi|187976036|gb|EDU42662.1| ubiquitin carboxyl-terminal hydrolase 19 [Pyrenophora tritici-repentis
  misc_feature (2)..(468): NCBI GI: 169619311 Blast Desc: SNOG_12850 [Phaeosphaeria nodorum SN15] gi|160703792|gb|EAT79650.2| SNOG_12850 [Phaeosphaeria nodorum SN15]
  misc_feature (2)..(479): NCBI GI: 145246570 Blast Desc: An12g04650 [Aspergillus niger] gi|134080252|emb|CAK97155.1| protein product [Aspergillus niger]
MERSMSHKSDGRHSSAGHSVHSIHSHHSVASGRGSSLGLDTTFTPAGQEDESPASVPEPPPSFFILGSVPSIVRCWLTANFSHDTLLYADICTGSQKSVVEYSLIKELDLVDSIHRDLDGVHRIRLHVYLTEATVSQSNPRSASPAPQMPSLACTFEVAGMDQADLPDAKKTIRIFIGSETLREHSADVLFSQNRMTLYSSEREKLSVPFVRPEDNGAFKNIRTMAVFPEKPKLNATARPFVVGGGSKIPESTIPSPEQTPFQPNNDGKDAYDVITPTSEQASQPNGTGGPSTVSDSGGEGEEHRKELSPVDQHPTKDSQFHAQDASEDGIRRTSAAGGIWNSWRSGGPTTTGDQKDSAPLSGYQPAGRGRNMKVLKPMKSTSSSSARTGSAYEPAPSTRTSGELRRKSQTVAETGATSSTIRWETKKTPVSGQEPKPGMNTRETRSVSHTPRTSTNPVGGASAFSWMTPTSKPRTSTTAAE

SEQ ID NO: 15835 - DNA, 3527 bp, Muscodor strobelii; identical to SEQ ID NO: 15832
  misc_feature: SGI EST ID NO. CUFF.37452.0
  misc_feature: Variant of the nucleotide sequence at SEQ ID NO 15833

SEQ ID NO: 15836 - DNA, 927 bp, Muscodor strobelii
  misc_feature: SGI cDNA ID NO. 565253
  misc_feature: Encodes the peptide sequence at SEQ ID NO 15837
atggcattgctggacataaatactccgtttcctgtcgtatcgttgagtgatttccccttcagtatggctgctccatataagcaactcgtgctcttcggcgattcccttttcgagttctgcagtgccgctcaggaaggcttctcttttcagggcgctctccagcaacgttgcatgagaggcctcgatgtcatcaataggggtttatcgtatgtacatgttctccggttgaacaaggcttttggacaatttgagcgcatcacttttgcactggctaacactggcctcttccatcccttcagaggctatcatacaagaaatgcagttgacgtatttccaaaaattttccttccgccttctccctcgatcccacgcatcgagtatctcatagttctgtttggagcgaacgatgcagctctacctgaccacccatgcaatcagcacatgcacaatctgaaaaagatgatcacgcatgactatatcaagcaacatggtccaaagattctgctttgtacaccacctccccttgagcaaacaacttcgttcgagagggactgtgagcgctatcctgatcatccggaaccaagtcgaacagcggctcagagtgcccaatattcagacgccgccagacaagtcgcttctgaggtacctggagtcatactgattgaccttcaaaaattgattatggacaaagcgattgcaaacactcccgactacaatcccgaaggaccaggtttaggctatcctggtaacaagagtgctgctcttcaagagctgctcccagatgggctccatatgagcggattggcttacaaaatcttatttgaagaagttctcaagcaccttgatttgccagccccggagcatccagagtacctgtctcaactccaaactttcatggtgcacccagggtggagggaattgaaatag

SEQ ID NO: 15837 - protein, 308 aa, Muscodor strobelii
  misc_feature: SGI Peptide ID NO. 565253
  misc_feature (29)..(277): Pfam Id: PF00657 Pfam Desc: GDSL-like Lipase/Acylhydrolase
  misc_feature (115)..(277): Pfam Id: PF00657 Pfam Desc: GDSL-like Lipase/Acylhydrolase
  misc_feature (25)..(303): NCBI GI: 256721449 Blast Desc: NECHADRAFT_55049 [Nectria haematococca mpVI 77-13-4]
  misc_feature (22)..(282): NCBI GI: 171685752 Blast Desc: protein product [Podospora anserina] gi|170942837|emb|CAP68490.1| protein product [Podospora anserina]
  misc_feature (26)..(306): NCBI GI: 116207182 Blast Desc: CHGG_02884 [Chaetomium globosum CBS 148.51] gi|88183481|gb|EAQ90949.1| CHGG_02884 [Chaetomium globosum CBS 148.51]
  misc_feature (22)..(307): NCBI GI: 46125767 Blast Desc: FG07261.1 [Gibberella zeae PH-1]
  misc_feature (22)..(281): NCBI GI: 164429064 Blast Desc: NCU00397 [Neurospora crassa OR74A] gi|157072395|gb|EAA28047.2| conserved [Neurospora crassa OR74A]
  misc_feature (22)..(307): NCBI GI: 256732787 Blast Desc: NECHADRAFT_100192 [Nectria haematococca mpVI 77-13-4]
  misc_feature (22)..(307): NCBI GI: 256725379 Blast Desc: NECHADRAFT_83195 [Nectria haematococca mpVI 77-13-4]
  misc_feature (21)..(306): NCBI GI: 119480733 Blast Desc: GDSL Lipase/Acylhydrolase family protein [Neosartorya fischeri NRRL 181] gi|119408549|gb|EAW18498.1| GDSL Lipase/Acylhydrolase family protein [Neosartorya fischeri NRRL
  misc_feature (21)..(306): NCBI GI: 71001090 Blast Desc: GDSL Lipase/Acylhydrolase family protein [Aspergillus fumigatus Af293] gi|66852864|gb|EAL93188.1| GDSL Lipase/Acylhydrolase family protein [Aspergillus fumigatus Af293]
  misc_feature (25)..(306): NCBI GI: 121698433 Blast Desc: GDSL Lipase/Acylhydrolase family protein [Aspergillus clavatus NRRL 1] gi|119395962|gb|EAW06394.1| GDSL Lipase/Acylhydrolase family protein [Aspergillus clavatus NRRL 1]
MALLDINTPFPVVSLSDFPFSMAAPYKQLVLFGDSLFEFCSAAQEGFSFQGALQQRCMRGLDVINRGLSYVHVLRLNKAFGQFERITFALANTGLFHPFRGYHTRNAVDVFPKIFLPPSPSIPRIEYLIVLFGANDAALPDHPCNQHMHNLKKMITHDYIKQHGPKILLCTPPPLEQTTSFERDCERYPDHPEPSRTAAQSAQYSDAARQVASEVPGVILIDLQKLIMDKAIANTPDYNPEGPGLGYPGNKSAALQELLPDGLHMSGLAYKILFEEVLKHLDLPAPEHPEYLSQLQTFMVHPGWRELK

SEQ ID NO: 15838 - DNA, 1207 bp, Muscodor strobelii
  misc_feature: SGI EST ID NO. CUFF.37455.0
  misc_feature: Variant of the nucleotide sequence at SEQ ID NO 15836
attgatgagtacaagcacaatctgaaaaagatgatcacgcatgactatatcaagcaacatggtccaaagattctgctttgtacaccacctccccttgagcaaacaacttcgttcgagagggactgtgagcgctatcctgatcatccggaaccaagtcgaacagcggctcagagtgcccaatattcagacgccgccagacaagtcgcttctgaggtacctggagtcatactgattgaccttcaaaaattgattatggacaaagcgattgcaaacactcccgactacaatcccgaaggaccaggtttaggctatcctggtaacaagagtgctgctcttcaagagctgctcccagatgggctccatatgagcggattggcttacaaaatcttatttgaagaagttctcaagcaccttgatttgccagccccggagcatccagagtacctgtctcaactccaaactttcatggtgcacccagggtggagggaattgaaatagcaaaaatattggagcagaggaacgaaagaaaaccaatgattatagaatgtgaacggaagaattagaccaaagcattcgtatcaagacgttatgtactcacgttctctaactagggggatgggcaatgacgatgttactcattagacaacgcaaacagtgcattttggtatcgcaatgatgtggtacgcaattgtgtgtcatttttctacgttaagcagaatttaatggcgaattccggcgtccatcagatattcgttagcaggtgtcagtcagactatttgaaatctagatcattcccgtgagactatgatacagagacaggcaggcccgttgacaaaataagtgatacatccatggtatttctaccaacgccagcaaatgattccgcagaacacacattaattacttgaattttatctatctacagtactcgaaaattgttcaaaaacaaatcgaatgattattcgaattatcgtcagtaatcgggtagctgcagaattcgactattttgagtattgtcttattcggtaatgccattcattttatgtcccgcctaacaggcaggcactagacacttatattccaacggacatgccggcttcgaatacacattgataatccctcttatcttattggtctgtttgtgtgaataggcagatgggtcgtaaggtagggattgtgatatgagatttttggaagagcatctccg

SEQ ID NO: 15839 - DNA, 5397 bp, Muscodor strobelii
  misc_feature: SGI cDNA ID NO. 565254
  misc_feature: Reduced expression when VOC is produced
  misc_feature: Encodes the peptide sequence at SEQ ID NO 15840
atggcgacggcattggcggcgcaacttgcgcagatcgcggccaactccaagacttctctcgatgtgcgagctcagaaggccgcacactccaagtcattgatcttcgagccccgtgttgccgcctcgcagagctaccagaccctctacagcatatgtcgcgagggcttcgacgagctgtgccagctggacccgcgcttcgtctccttccagacgacgctgttcagcgagcagagccaggatgaagaccgcacgcagatgaccgccgatgagaatgccgagttggacaggaggatcgatgcttttctgcgtctcgcgggcgcccgtctgcggcttatgcccgccatcaagtccgtcgagtggctgatcaggagattccagatccacgaatacaacacgatagcgatactctcgactttcctgccgtatcacacgcttcccgcttttaccgctctcttgtctatcctgcctcgaaacctgcccgaggtgtacaagttcttggacccttatgttcgatctttgaccgtgccaccccgtgccgtgcttgtccatcgggctattcaccatgctgacttcctcacgactatttccacatacaccttggacacctgtcgcgcgcagcagcattatcccgccctggtctccttttgggctggtcttatgaccgaggccgtcaatggcagggtggaccaaatgcgatcaggccgccgagccatccagaaaagcaacgaccagggcctgatccagctggtagggccaatcattggtgaagcgcttgtcatgtccaaggtgccaagcatccagatcgcctgctacatggtcatcactgttttcgtggccaagggtgatctcgacgacagcaccatcagcgcgttgatggagcagttggtcatggcatggaccactgagtctcttcgccccggcctcatttgcctttcggtgctggcacaacaccgttctgcaaagcagatgtctgccaagatcacgagagccttgttgaaaatacagcacctacccgaaatgctacaagatatcggaaaagagcacgagattggaagactagccaacgggctatgtcttgcacttgtagaccgggtccataaaaagggtgattcgagaggcctaccactcatacaatctttactcttgtcatctgttcttagtcggcagcaggcagcggtggtctttaagtctctgctgctagcagcttggaaagttgatgatcaagtcgacgaacagggcctaattcgaagggacttggcatcaaccatcatccaattatcacaagcagagtcaaatgttcgcgacatatttactcaggcgattcaagatacggacgtcgacttagacgtccttgaaatgagactagacatacagattcgcccacggttgttgacagttcaacccaatggcgatgtcgtgatggaagagcgcgagattgagcaagcttcgaccgaaagtttcgagacagcaatccaacgcgtcagcctacagaaaacagagccatcaacctcatgtcttcgccccaaaaatctggatatgttcaccgatctttgctccgtttttcttgcagggctcactgaagagggcaagattgcgatcttcgacgatatctctcctatacatcgcggcacagccaacaaagaacctttttatttttcattcttgatgcgcatctggtgcggaccgtacccgactctcgcgagagcaggtgctttggatcttgcgaaatccagactcaagcagaatgattgtcacgatatcgatttccaggccttactgccctacgcaattgtggcccttagtgacccttcaagaaaggtccgacgcgccgcagccgatcttatatcggtacttgaaactcgctacgatagtcagtcaggagagcaaagcgatctttggggacagaagtctctctacgatgccaatgctacgttggagcgaatgccacataacgtttgtcgaagttttgtgaaatcagtattaacgccctgtctagaggaatgtgtcttgaatgcagactatgttcctgaagtcgtcaatactgcattgctcgccggctccagaagtagagcggacggtgtcgaaaagaacaagaaaaatcacttgtcccacagcacacggcattcaatccttgtgttcattgctcagcacgccgtctatactccgcttctcgtacttaagctgcgcttaggagcatgtctggaccaagtcaaaagtatttccgggacatcgcgcacacagcttcttctaccattgcttcaacagtggacctccctatcggccgaacaagccgccgaactttgctctcttgaaaaactcagcgaatcagcagtggatcagagcagtttgaaagtattatcacccaatgatcaagatgggctggagttcgttttagcggccattgaatcaaatacgcttttctcgaggcgaaatctcctgcattctgtctttcttcgtttgagcgaattatggccgtccatgaagacggagatccggtatatgatcgctgggcgaatgcttcatttggcacagaaagactggtcaggggaacagaacctggccgcgagtgaagctgcagattttctacgaagcgttaccttgactacggacatcttgcttcacttcctggaatctttagaaccaaccgcaaagatgtcatcagagcctccaccaggcaaacggcggcggacgagctcttcggaggctcaccgaggactgaaatcacaggcaactcctaagataagtttaatgctcaaacaagttacctttgtattgcagcttgtggagggatccgaaccagaaaagcatccagaactactcaatgctcttttcaatgcactgtcggagcttcagcacttccgagtccttgttggttccgagctaggttatctccaaagcctggtacttcgcagccttcttgcaatggtcccaacgtataaggacagtaaagatctcaaaattgatagcactggcggacatggtgacttacttgtgagctgtatccagaagtcctccagtccagctgtccagagcacggcgctgctacttgtcgcgagtctcgccaaggttgcacccgatctggtcctgaacagcgtgatgcccatcttcacccaaatgggcagctcagttctccggcagagcgacgactattctgctcatgtcatcaatcaaactatcaaagaggtggtccctccgctgatacaatctttacgtaggggtaaagtcagtcctctggctggctctgcagaacttctgctcagctttgtcactgcttatgaacacattccggcacatcgaaggttcggcctattcgtgtccctgatagagactttaggggccgaggattttctcttcgcacttcttggtatgctcgcgaatatgtacggacctactgagcaggtcatgtcatttgctgccgaggtcttcaaccattttacggtagagattcagttgcagtccctgattaagcttctcgacttgaccaaagacattttccaacctagacccaacatatctgcagttctcctcggcactaacgatcagctaaaggaagaccctgaactaatcagtttgagcgagctccgtctcctcccccatttgctctcgagcagaaagttgacacagcaaatcggcaagctgactgaacgagatgatatggaagcctctaaggtccgcgaactgtattcgacactactggaagatctattactcctggccgataccctgagacaacgccaggctctgtataactgctgcggtgacgcgttgtccaaggtattgaacttgctctcgattggcgaatttatcaaatcggtcgagacgctcctagatcgtcccgatgcaatattacgccgaaaggtactcaaggctgttgagacgagaattgaccgggaaagccaagcagatagtacatctagagcaactttgcttgcgttcttgccgcaactcactgcaattattagagtttctaatgatgttgcttacaagcacatcgctgttggctgtgtagacaagatttcagagaaatatggcaagaaggatcctgaggccgtggcggcggcagcattgacaatcgctggagacgaatgtcttggccaagagaacgtccaacttcgtgtcatggctcttctatgcttggcttcgctggtcgatgttcttcaagacggaattgttcccgtgcttcctttggctctcccaagagctctgtcatatattacggagagcttgtccagcagcgatcgtttggaagggttgcataacgcgtgttactctcttcttacggctttggcacagtacctgccttatatgctttctggctcttatcttgagcagatatttgcagtttctagcacctctgcaaattcaaagatgggcaacgcggccaatgacgcccgattacaatgtcttcagttcgtagcaaaacaaaccgatgcaaagaccatatttgcagctctcgagcgcaattggagtaatgctctggattctggtcatccggcaatacgcgaatttctcaacgtcttaggcattgcgatcgataagcactctaaagcagatatatcgaagaatgctactactctttcctccatattcttcaacgcattcgacgctcgcaggctccttcactcaaagggcgtcgatactggagaagccgtcagacatatcggtcaaattgaaacaaatgtcaacgatgttgcactcagaatggtctacaagttgaatgatgctgccttccgaccgatattttcccaactcatggaatggtctagagctgtgtcgaagaaggacgtcggaggaaagaatatgcgacttattagcgtctacagctttcttttaaccttctttggcagtcttaagtccattgtgacgagctatgcgacgtatgtcactgatagtgccgttgctgtcctcaaaacggccgatcttaccagcacggaggaacgcgaactctggaggaaggtactgcaagttttagagcaatgctttgagcatgaccaagacgacttttggcaggccccggctcacttcagtgctgtggcgccagccctcacctcacagtttatccatgcagcgtcggttgacttgacgcaagatctagtccctgctgttgtggagctagccgccgcggcggactcccaggatcatcagaaggaactcaacactgctcttctaaagcaattgcgttctgagcaggcagccgttcgcattgcagtcataaagtgccagcaggtattaaccgataggctgggtgaggaatggctctccatgttgccagaaatgctgccctacatcagcgaactgcaggaagatgacgatgaagatgttgaaagagagacacatcgctggattgttggcatcgaaggagtgttgggagagagtctcgatgcaatgcttcagtag

SEQ ID NO: 15840 - protein, 1798 aa, Muscodor strobelii
  misc_feature: SGI Peptide ID NO. 565254
  misc_feature (1516)..(1668): Pfam Id: PF08146 Pfam Desc: BP28CT (NUC211) domain
  misc_feature (1)..(1797): NCBI GI: 226278024 Blast Desc: U3 small nucleolar RNA-associated protein [Paracoccidioides brasiliensis Pb01]
  misc_feature (1)..(1797): NCBI GI: 238840688 Blast Desc: U3 small nucleolar RNA-associated protein 10 [Microsporum canis CBS 113480]
  misc_feature (1)..(1797): NCBI GI: 225560961 Blast Desc: U3 small nucleolar RNA-associated protein [Ajellomyces capsulatus G186AR]
  misc_feature (1)..(1797): NCBI GI: 240280495 Blast Desc: U3 small nucleolar RNA-associated protein [Ajellomyces capsulatus H143]
  misc_feature (1)..(1797): NCBI GI: 225683911 Blast Desc: conserved [Paracoccidioides brasiliensis Pb03]
  misc_feature (1)..(1797): NCBI GI: 240111866 Blast Desc: HEAT repeat containing protein [Coccidioides posadasii C735 delta SOWgp]
  misc_feature (1)..(1797): NCBI GI: 145240761 Blast Desc: An08g09160 [Aspergillus niger] gi|160197372|sp|A5AB61.1|UTP10_ASPNC RecName: Full=U3 small nucleolar RNA-associated protein 10 gi|134077551|emb|CAK96695.1|
  misc_feature (1)..(1797): NCBI GI: 67538570 Blast Desc: AN5455.2 [Aspergillus nidulans FGSC A4] gi|74595131|sp|Q5B1X5.1|UTP10_EMENI RecName: Full=U3 small nucleolar RNA-associated protein 10 gi|40743425|gb|EAA62615.1| U3
  misc_feature (1)..(1797): NCBI GI: 115390092 Blast Desc: conserved [Aspergillus terreus NIH2624] gi|121740019|sp|Q0CSG1.1|UTP10_ASPTN RecName: Full=U3 small nucleolar RNA-associated protein 10 gi|114194947|gb|EAU36647.1|
  misc_feature (1)..(1797): NCBI GI: 70992729 Blast Desc: SSU processome component Utp10 [Aspergillus fumigatus Af293] gi|74670390|sp|Q4WLI9.1|UTP10_ASPFU RecName: Full=U3 small nucleolar RNA-associated protein 10 gi|66848846|gb|EAL89175.1|
  misc_feature: Useful for introducing or modulating the production of volatile compounds
MATALAAQLAQIAANSKTSLDVRAQKAAHSKSLIFEPRVAASQSYQTLYSICREGFDELCQLDPRFVSFQTTLFSEQSQDEDRTQMTADENAELDRRIDAFLRLAGARLRLMPAIKSVEWLIRRFQIHEYNTIAILSTFLPYHTLPAFTALLSILPRNLPEVYKFLDPYVRSLTVPPRAVLVHRAIHHADFLTTISTYTLDTCRAQQHYPALVSFWAGLMTEAVNGRVDQMRSGRRAIQKSNDQGLIQLVGPIIGEALVMSKVPSIQIACYMVITVFVAKGDLDDSTISALMEQLVMAWTTESLRPGLICLSVLAQHRSAKQMSAKITRALLKIQHLPEMLQDIGKEHEIGRLANGLCLALVDRVHKKGDSRGLPLIQSLLLSSVLSRQQAAVVFKSLLLAAWKVDDQVDEQGLIRRDLASTIIQLSQAESNVRDIFTQAIQDTDVDLDVLEMRLDIQIRPRLLTVQPNGDVVMEEREIEQASTESFETAIQRVSLQKTEPSTSCLRPKNLDMFTDLCSVFLAGLTEEGKIAIFDDISPIHRGTANKEPFYFSFLMRIWCGPYPTLARAGALDLAKSRLKQNDCHDIDFQALLPYAIVALSDPSRKVRRAAADLISVLETRYDSQSGEQSDLWGQKSLYDANATLERMPHNVCRSFVKSVLTPCLEECVLNADYVPEVVNTALLAGSRSRADGVEKNKKNHLSHSTRHSILVFIAQHAVYTPLLVLKLRLGACLDQVKSISGTSRTQLLLPLLQQWTSLSAEQAAELCSLEKLSESAVDQSSLKVLSPNDQDGLEFVLAAIESNTLFSRRNLLHSVFLRLSELWPSMKTEIRYMIAGRMLHLAQKDWSGEQNLAASEAADFLRSVTLTTDILLHFLESLEPTAKMSSEPPPGKRRRTSSSEAHRGLKSQATPKISLMLKQVTFVLQLVEGSEPEKHPELLNALFNALSELQHFRVLVGSELGYLQSLVLRSLLAMVPTYKDSKDLKIDSTGGHGDLLVSCIQKSSSPAVQSTALLLVASLAKVAPDLVLNSVMPIFTQMGSSVLRQSDDYSAHVINQTIKEVVPPLIQSLRRGKVSPLAGSAELLLSFVTAYEHIPAHRRFGLFVSLIETLGAEDFLFALLGMLANMYGPTEQVMSFAAEVFNHFTVEIQLQSLIKLLDLTKDIFQPRPNISAVLLGTNDQLKEDPELISLSELRLLPHLLSSRKLTQQIGKLTERDDMEASKVRELYSTLLEDLLLLADTLRQRQALYNCCGDALSKVLNLLSIGEFIKSVETLLDRPDAILRRKVLKAVETRIDRESQADSTSRATLLAFLPQLTAIIRVSNDVAYKHIAVGCVDKISEKYGKKDPEAVAAAALTIAGDECLGQENVQLRVMALLCLASLVDVLQDGIVPVLPLALPRALSYITESLSSSDRLEGLHNACYSLLTALAQYLPYMLSGSYLEQIFAVSSTSANSKMGNAANDARLQCLQFVAKQTDAKTIFAALERNWSNALDSGHPAIREFLNVLGIAIDKHSKADISKNATTLSSIFFNAFDARRLLHSKGVDTGEAVRHIGQIETNVNDVALRMVYKLNDAAFRPIFSQLMEWSRAVSKKDVGGKNMRLISVYSFLLTFFGSLKSIVTSYATYVTDSAVAVLKTADLTSTEERELWRKVLQVLEQCFEHDQDDFWQAPAHFSAVAPALTSQFIHAASVDLTQDLVPAVVELAAAADSQDHQKELNTALLKQLRSEQAAVRIAVIKCQQVLTDRLGEEWLSMLPEMLPYISELQEDDDEDVERETHRWIVGIEGVLGESLDAMLQ

SEQ ID NO: 15841 - DNA, 6341 bp, Muscodor strobelii
  misc_feature: SGI EST ID NO. CUFF.37478.0
  misc_feature: Variant of the nucleotide sequence at SEQ ID NO 15839
aaaaaagtcattgaagatatgtcgaatcgctgtgggaactcgacgtcggtatcaaaacgtctgcgcaaccccttgcctgcgtctgaaccagccccccaacactagattgacgcacgctgcatacctcacctcgtcggatgtgcatgttggactatctcaccgcatagacggcgatggcgacggcattggcggcgcaacttgcgcagatcgcggccaactccaagacttctctcgatgtgcgagctcagaaggccgcacactccaagtcattgatcttcgagccccgtgttgccgcctcgcagagctaccagaccctctacagcatatgtcgcgagggcttcgacgagctgtgccagctggacccgcgcttcgtctccttccagacgacgctgttcagcgagcagagccaggatgaagaccgcacgcagatgaccgccgatgagaatgccgagttggacaggaggatcgatgcttttctgcgtctcgcgggcgcccgtctgcggcttatgcccgccatcaagtccgtcgagtggctgatcaggagattccagatccacgaatacaacacgatagcgatactctcgactttcctgccgtatcacacgcttcccgcttttaccgctctcttgtctatcctgcctcgaaacctgcccgaggtgtacaagttcttggacccttatgttcgatctttgaccgtgccaccccgtgccgtgcttgtccatcgggctattcaccatgctgacttcctcacgactatttccacatacaccttggacacctgtcgcgcgcagcagcattatcccgccctggtctccttttgggctggtcttatgaccgaggccgtcaatggcagggtggaccaaatgcgatcaggccgccgagccatccagaaaagcaacgaccagggcctgatccagctggtagggccaatcattggtgaagcgcttgtcatgtccaaggtgccaagcatccagatcgcctgctacatggtcatcactgttttcgtggccaagggtgatctcgacgacagcaccatcagcgcgttgatggagcagttggtcatggcatggaccactgagtctcttcgccccggcctcatttgcctttcggtgctggcacaacaccgttctgcaaagcagatgtctgccaagatcacgagagccttgttgaaaatacagcacctacccgaaatgctacaagatatcggaaaagagcacgagattggaagactagccaacgggctatgtcttgcacttgtagaccgggtccataaaaagggtgattcgagaggcctaccactcatacaatctttactcttgtcatctgttcttagtcggcagcaggcagcggtggtctttaagtctctgctgctagcagcttggaaagttgatgatcaagtcgacgaacagggcctaattcgaagggacttggcatcaaccatcatccaattatcacaagcagagtcaaatgttcgcgacatatttactcaggcgattcaagatacggacgtcgacttagacgtccttgaaatgagactagacatacagattcgcccacggttgttgacagttcaacccaatggcgatgtcgtgatggaagagcgcgagattgagcaagcttcgaccgaaagtttcgagacagcaatccaacgcgtcagcctacagaaaacagagccatcaacctcatgtcttcgccccaaaaatctggatatgttcaccgatctttgctccgtttttcttgcagggctcactgaagagggcaagattgcgatcttcgacgatatctctcctatacatcgcggcacagccaacaaagaacctttttatttttcattcttgatgcgcatctggtgcggaccgtacccgactctcgcgagagcaggtgctttggatcttgcgaaatccagactcaagcagaatgattgtcacgatatcgatttccaggccttactgccctacgcaattgtggcccttagtgacccttcaagaaaggtccgacgcgccgcagccgatcttatatcggtacttgaaactcgctacgatagtcagtcaggagagcaaagcgatctttggggacagaagtctctctacgatgccaatgctacgttggagcgaatgccacataacgtttgtcgaagttttgtgaaatcagtattaacgccctgtctagaggaatgtgtcttgaatgcagactatgttcctgaagtcgtcaatactgcattgctcgccggctccagaagtagagcggacggtgtcgaaaagaacaagaaaaatcacttgtcccacagcacacggcattcaatccttgtgttcattgctcagcacgccgtctatactccgcttctcgtacttaagctgcgcttaggagcatgtctggaccaagtcaaaagtatttccgggacatcgcgcacacagcttcttctaccattgcttcaacagtggacctccctatcggccgaacaagccgccgaactttgctctcttgaaaaactcagcgaatcagcagtggatcagagcagtttgaaagtattatcacccaatgatcaagatgggctggagttcgttttagcggccattgaatcaaatacgcttttctcgaggcgaaatctcctgcattctgtctttcttcgtttgagcgaattatggccgtccatgaagacggagatccggtatatgatcgctgggcgaatgcttcatttggcacagaaagactggtcaggggaacagaacctggccgcgagtgaagctgcagattttctacgaagcgttaccttgactacggacatcttgcttcacttcctggaatctttagaaccaaccgcaaagatgtcatcagagcctccaccaggcaaacggcggcggacgagctcttcggaggctcaccgaggactgaaatcacaggcaactcctaagataagtttaatgctcaaacaagttacctttgtattgcagcttgtggagggatccgaaccagaaaagcatccagaactactcaatgctcttttcaatgcactgtcggagcttcagcacttccgagtccttgttggttccgagctaggttatctccaaagcctggtacttcgcagccttcttgcaatggtcccaacgtataaggacagtaaagatctcaaaattgatagcactggcggacatggtgacttacttgtgagctgtatccagaagtcctccagtccagctgtccagagcacggcgctgctacttgtcgcgagtctcgccaaggttgcacccgatctggtcctgaacagcgtgatgcccatcttcacccaaatgggcagctcagttctccggcagagcgacgactattctgctcatgtcatcaatcaaactatcaaagaggtggtccctccgctgatacaatctttacgtaggggtaaagtcagtcctctggctggctctgcagaacttctgctcagctttgtcactgcttatgaacacattccggcacatcgaaggttcggcctattcgtgtccctgatagagactttaggggccgaggattttctcttcgcacttcttggtatgctcgcgaatatgtacggacctactgagcaggtcatgtcatttgctgccgaggtcttcaaccattttacggtagagattcagttgcagtccctgattaagcttctcgacttgaccaaagacattttccaacctagacccaacatatctgcagttctcctcggcactaacgatcagctaaaggaagaccctgaactaatcagtttgagcgagctccgtctcctcccccatttgctctcgagcagaaagttgacacagcaaatcggcaagctgactgaacgagatgatatggaagcctctaaggtccgcgaactgtattcgacactactggaagatctattactcctggccgataccctgagacaacgccaggctctgtataactgctgcggtgacgcgttgtccaaggtattgaacttgctctcgattggcgaatttatcaaatcggtcgagacgctcctagatcgtcccgatgcaatattacgccgaaaggtactcaaggctgttgagacgagaattgaccgggaaagccaagcagatagtacatctagagcaactttgcttgcgttcttgccgcaactcactgcaattattagagtttctaatgatgttgcttacaagcacatcgctgttggctgtgtagacaagatttcagagaaatatggcaagaaggatcctgaggccgtggcggcggcagcattgacaatcgctggagacgaatgtcttggccaagagaacgtccaacttcgtgtcatggctcttctatgcttggcttcgctggtcgatgttcttcaagacggaattgttcccgtgcttcctttggctctcccaagagctctgtcatatattacggagagcttgtccagcagcgatcgtttggaagggttgcataacgcgtgttactctcttcttacggctttggcacagtacctgccttatatgctttctggctcttatcttgagcagatatttgcagtttctagcacctctgcaaattcaaagatgggcaacgcggccaatgacgcccgattacaatgtcttcagttcgtagcaaaacaaaccgatgcaaagaccatatttgcagctctcgagcgcaattggagtaatgctctggattctggtcatccggcaatacgcgaatttctcaacgtcttaggcattgcgatcgataagcactctaaagcagatatatcgaagaatgctactactctttcctccatattcttcaacgcattcgacgctcgcaggctccttcactcaaagggcgtcgatactggagaagccgtcagacatatcggtcaaattgaaacaaatgtcaacgatgttgcactcagaatggtctacaagttgaatgatgctgccttccgaccgatattttcccaactcatggaatggtctagagctgtgtcgaagaaggacgtcggaggaaagaatatgcgacttattagcgtctacagctttcttttaaccttctttggcagtcttaagtccattgtgacgagctatgcgacgtatgtcactgatagtgccgttgctgtcctcaaaacggccgatcttaccagcacggaggaacgcgaactctggaggaaggtactgcaagttttagagcaatgctttgagcatgaccaagacgacttttggcaggccccggctcacttcagtgctgtggcgccagccctcacctcacagtttatccatgcagcgtcggttgacttgacgcaagatctagtccctgctgttgtggagctagccgccgcggcggactcccaggatcatcagaaggaactcaacactgctcttctaaagcaattgcgttctgagcaggcagccgttcgcattgcagtcataaagtgccagcaggtattaaccgataggctgggtgaggaatggctctccatgttgccagaaatgctgccctacatcagcgaactgcaggaagatgacgatgaagatgttgaaagagagacacatcgctggattgttggcatcgaaggagtgttgggagagagtctcgatgcaatgcttcagtagagttttgtatcaacctgactcgcctatatatgttgtacataggagttcgctgaatccaattagatgtaaattattagatattgacacaagctacctcctgataactactgaaggttgatatgatagtcaagggtaaacctctatacctcggtgatgatatctcgtatacttgtccctacgcctcattctccgtctctggcttatatgaatccacaatagcacctatcggattgaagttcgttgtactcgtcttcatagtgctgaatgcgtgtgtgatataccttcgggggacacggcgctagatttgctctgttcgtccagcgatggccgtcgatcttttggcgctccttcaggcacaactgtatcttcgatatctacaatcggggcatggatctcgttagtgttggcatctttagtgacaataatcttctctctagacacttcacgttccgccgactcgataccctgagtttgaacaccctcgtctttgtacgagtctcgacgggttgaggttccgaagcgtggcgcactctgcgctgtttcgttgttgtttgtcactggccgtgtctgcggccttgcacgcatggagattctatcgttctgcatcttgattccacgctgtgtagcccccttgtgtctgtcgttggatgcaaagcgtaatccgagcctgctgttgcccgtgtcgtctggaagagtttgcactctgcggacgccaggccggatcatcggctcgtgctcctggactaagcgcatactacgttctatgtcccc

SEQ ID NO: 15842 - DNA, 2094 bp, Muscodor strobelii
  misc_feature: SGI cDNA ID NO. 565255
  misc_feature: Encodes the peptide sequence at SEQ ID NO 15843
atgaagctaggcataactaaggacgtcgaccaggagctcgaggaactcagccggctgagacgattgggtaatttcatggctgcacagagatttttcaagcaggaatttgcgggccggtcaaatgatccttacttcttcgtacttcacgctcagctactttttgaaatgggagacttccgatcctttgacacgctgaggccatcccacgtctttagtgatatccaggacgaagcgatgcagaagaattgtgatctgctccgacatagctggaacttgctggtcgatttgacgatgcttcccgtgagagactgcgccgagaaggtgatgacggagattgacgaagccttggccagtcttgagtcttccgtagagttaggttctactgagatacaaatactcagcctcgtatttcgcttgatcggatatcttgctcacacattagggatccaatccccgcatctaagagatacaaaagaattggctatgaggtggacagactggactagggtgtatcatcaccttgcatcggagggacgagtttgggattttagggatgtttctacggcgtacaagaaagcatatgggcaggacaaagctttcgataccttcttcaacaccgagtccgtcgacgagatcatgaaaacaatggcctacgactgggaaacacagggctacgacgaatcgaccaatatggcccttctagacatcatatcttttctaatcttggagagcgatttcgagaagacttcattggaatactacaatgcttgtcttgaacatggagaaaaatttgccaaatctttgatggacgactttcccgaagctatgaaaagtcgatcatttgcgaggtggttagtagcaaaagcagcagctctagtctgtagcgcccacaacaaccccttttcgtcattcatgtttctcgatccatatcccggaatgcaacttcggcaaggcgacggcattcatgtcccgatatacgtccctcttcggtcagagagacccacctggcaagtcccactggcgtcccgcgagtgggaggatgcggttcagatggcattgatgattgcgaaagatctgggagactacgaaacccaggtcctgtgtctgaaacacttaattgttcggtctcaggcaccacatcagcttcttgaggaactctctacattacagaacttggtccaagacgatcaagacggctatcttcggacctgtttatcgagacttctcaccctcacggacagcgactcccaacgacggctagcggaggaactgtttcggttccgtcaagatgagactgtcatcaaccagaagttgcctatcgaacatcacaatctgtctctccaatgggcgcgaaacgtcatattttcaacgctgcccgccaccgtgggcggaacgtacacgatagacaagtccggaccattctatgcccgcctgccgacttatataagacaattcatcgacgtcagggaagtcttctacgcccagtccaaactcaagagcccttttcaagaaagcaataagaaattgagacaacggccaatggataacatagatgaaggggacatagaacgtagtatgcgcttagtccaggagcacgagccgatgatccggcctggcgtccgcagagtgcaaactcttccagacgacacgggcaacagcaggctcggattacgctttgcatccaacgacagacacaagggggctacacagcgtggaatcaagatgcagaacgatagaatctccatgcgtgcaaggccgcagacacggccagtgacaaacaacaacgaaacagcgcagagtgcgccacgcttcggaacctcaacccgtcgagactcgtacaaagacgagggtgttcaaactcagggtatcgagtcggcggaacgtgaagtgtctagagagaagattattgtcactaaagatgccaacactaacgagatccatgccccgattgtagatatcgaagatacagttgtgcctgaaggagcgccaaaagatcgacggccatcgctggacgaacagagcaaatctagcgccgtgtcccccgaaggtgctattgtggattcatataagccagagacggagaatgaggcgtag

SEQ ID NO: 15843 - protein, 697 aa, Muscodor strobelii
  misc_feature: SGI Peptide ID NO. 565255
  misc_feature (1)..(444): NCBI GI: 256723759 Blast Desc: NECHADRAFT_86755 [Nectria haematococca mpVI 77-13-4]
  misc_feature (16)..(488): NCBI GI: 116192385 Blast Desc: CHGG_05910 [Chaetomium globosum CBS 148.51] gi|88181823|gb|EAQ89291.1| CHGG_05910 [Chaetomium globosum CBS 148.51]
  misc_feature (1)..(486): NCBI GI: 16945391 Blast Desc: [Neurospora crassa]
  misc_feature (1)..(486): NCBI GI: 164427584 Blast Desc: NCU02976 [Neurospora crassa OR74A] gi|157071804|gb|EAA36127.2| [Neurospora crassa OR74A]
  misc_feature (1)..(454): NCBI GI: 171684755 Blast Desc: protein product [Podospora anserina] gi|170942338|emb|CAP67990.1| protein product [Podospora anserina]
  misc_feature (2)..(420): NCBI GI: 145233281 Blast Desc: An02g08790 [Aspergillus niger] gi|134056941|emb|CAK44288.1| protein product [Aspergillus niger]
  misc_feature (7)..(465): NCBI GI: 154297521 Blast Desc: BC1G_12357 [Botryotinia fuckeliana B05.10] gi|150858553|gb|EDN33745.1| BC1G_12357 [Botryotinia fuckeliana B05.10]
  misc_feature (208)..(464): NCBI GI: 154294669 Blast Desc: BC1G_13461 [Botryotinia fuckeliana B05.10] gi|150844596|gb|EDN19789.1| BC1G_13461 [Botryotinia fuckeliana B05.10]
  misc_feature (1)..(303): NCBI GI: 145604310 Blast Desc: [Magnaporthe grisea 70-15] gi|145012328|gb|EDJ96984.1| [Magnaporthe grisea 70-15]
  misc_feature (1)..(418): NCBI GI: 39941714 Blast Desc: [Magnaporthe grisea 70-15] gi|145022481|gb|EDK06501.1| [Magnaporthe grisea 70-15]
MKLGITKDVDQELEELSRLRRLGNFMAAQRFFKQEFAGRSNDPYFFVLHAQLLFEMGDFRSFDTLRPSHVFSDIQDEAMQKNCDLLRHSWNLLVDLTMLPVRDCAEKVMTEIDEALASLESSVELGSTEIQILSLVFRLIGYLAHTLGIQSPHLRDTKELAMRWTDWTRVYHHLASEGRVWDFRDVSTAYKKAYGQDKAFDTFFNTESVDEIMKTMAYDWETQGYDESTNMALLDIISFLILESDFEKTSLEYYNACLEHGEKFAKSLMDDFPEAMKSRSFARWLVAKAAALVCSAHNNPFSSFMFLDPYPGMQLRQGDGIHVPIYVPLRSERPTWQVPLASREWEDAVQMALMIAKDLGDYETQVLCLKHLIVRSQAPHQLLEELSTLQNLVQDDQDGYLRTCLSRLLTLTDSDSQRRLAEELFRFRQDETVINQKLPIEHHNLSLQWARNVIFSTLPATVGGTYTIDKSGPFYARLPTYIRQFIDVREVFYAQSKLKSPFQESNKKLRQRPMDNIDEGDIERSMRLVQEHEPMIRPGVRRVQTLPDDTGNSRLGLRFASNDRHKGATQRGIKMQNDRISMRARPQTRPVTNNNETAQSAPRFGTSTRRDSYKDEGVQTQGIESAEREVSREKIIVTKDANTNEIHAPIVDIEDTVVPEGAPKDRRPSLDEQSKSSAVSPEGAIVDSYKPETENEA

SEQ ID NO: 15844 - DNA, 1476 bp, Muscodor strobelii
  misc_feature: SGI cDNA ID NO. 565256
  misc_feature: Encodes the peptide sequence at SEQ ID NO 15845
atgcaacctcggtggataattcaggaaaaaatggcgcgcattggtggtgcgtccactgctggccctaccgtctcttctcccagcttctcctccctgttctgcgaagtcaagtctacacagccttacaccaatagctgtaaagtcatatgggttgatacgatggagccagaattccatagattagttcgacgcaaaaagtcgaaaggtagaggctatggaccaagcgacttcgagaaatttgatcgctacagcgcgtgtgctggtcatggacaactcggcgaggtcagagttacaactagcattgattttgaggagtcacaatggggttttatggacaccaagactccgggtgccatcatatatatgaagattggcttcacgcagcccgagaactgcaagttggagacagcgacaattttggtgacgctagaatccctggatgagattcgcgataaagaagagttagacgcgctcgagcgacaaccggggctttccccttccacttcctctcgaattcagcttacgcactttgggccagtgtatgtgccaggtagagagactgaagcggatttctcgcgcgacatcaatgcaactccatcattggggtatggggggttttctatggacggcctgggagtcgatcagcagaaggcttataagtatcacaaccgctgggtattttccggccagctattaggagacgatcagcactccgcattcagaaagctgcaatggtttttacaagaaaacaagctcgactcgccgtcgaatcatggacctgagttccaggctgcctttgcacttacccataatcagacacctttctttatcagggtggaaatcaaagggaggcttgaaaagagactgaaacgcgttaagcaaggattccagaagctgaagtacggatttcatggggacaagcctctccggtctacgctgacgcttgtcaacgttgctggattcgagccaccaaggaggctgctaattacgagggctaaacgcctgcccgtaaagatggcgaagaggaatggcgtagtggaggtgacatcggaactagaaacggaggctgaagaggaaatcagtgatgacgttgactcttcacatttagcaaggaaggatccaaacgaattgtcccgacaagcaccaagaaagacgacagaagacccagcgctcagcgagataaggaagatatatgcttctctatctacaagtgacaccagtcaagataagccacggatgtcatcgacaacgcttgtagatgacgacagccaaaacgaccagagcgaggttgaggatcagaatgcaattaattccgaacaaaaagattccagaaagagtaaacaagacggtcacggcggcaaagatttgaactttcttttcctcgtcaggctcttcttccgctacctatgtctccaggcgggatttgttgcccctgaggtcccaacaggtagtcagttatcaggcagtactacttaa

SEQ ID NO: 15845 - protein, 491 aa, Muscodor strobelii
  misc_feature: SGI Peptide ID NO. 565256
  misc_feature (51)..(327): NCBI GI: 171684753 Blast Desc: protein product [Podospora anserina] gi|170942337|emb|CAP67989.1| protein product [Podospora anserina]
  misc_feature (87)..(327): NCBI GI: 116192383 Blast Desc: CHGG_05909 [Chaetomium globosum CBS 148.51] gi|88181822|gb|EAQ89290.1| CHGG_05909 [Chaetomium globosum CBS 148.51]
  misc_feature (70)..(327): NCBI GI: 39941712 Blast Desc: MGG_05767 [Magnaporthe grisea 70-15] gi|145022480|gb|EDK06500.1| MGG_05767 [Magnaporthe grisea 70-15]
  misc_feature (75)..(308): NCBI GI: 164427586 Blast Desc: NCU02975 [Neurospora crassa OR74A] gi|16945390|emb|CAB97312.2| [Neurospora crassa] gi|157071805|gb|EAA36126.2| [Neurospora crassa OR74A]
  misc_feature (69)..(343): NCBI GI: 154294667 Blast Desc: BC1G_13460 [Botryotinia fuckeliana B05.10] gi|150844595|gb|EDN19788.1| BC1G_13460 [Botryotinia fuckeliana B05.10]
  misc_feature (70)..(362): NCBI GI: 145233279 Blast Desc: An02g08780 [Aspergillus niger] gi|134056940|emb|CAK44287.1| protein product [Aspergillus niger]
  misc_feature (70)..(339): NCBI GI: 145604240 Blast Desc: MGG_08453 [Magnaporthe grisea 70-15] gi|145012276|gb|EDJ96932.1| MGG_08453 [Magnaporthe grisea 70-15]
  misc_feature (82)..(424): NCBI GI: 145248812 Blast Desc: An14g01170 [Aspergillus niger] gi|134081415|emb|CAK46456.1| protein product [Aspergillus niger]
  misc_feature (61)..(294): NCBI GI: 169776255 Blast Desc: [Aspergillus oryzae RIB40] gi|83771329|dbj|BAE61461.1| protein product [Aspergillus oryzae]
  misc_feature (91)..(294): NCBI GI: 154297523 Blast Desc: BC1G_12358 [Botryotinia fuckeliana B05.10] gi|150858554|gb|EDN33746.1| BC1G_12358 [Botryotinia fuckeliana B05.10]
MQPRWIIQEKMARIGGASTAGPTVSSPSFSSLFCEVKSTQPYTNSCKVIWVDTMEPEFHRLVRRKKSKGRGYGPSDFEKFDRYSACAGHGQLGEVRVTTSIDFEESQWGFMDTKTPGAIIYMKIGFTQPENCKLETATILVTLESLDEIRDKEELDALERQPGLSPSTSSRIQLTHFGPVYVPGRETEADFSRDINATPSLGYGGFSMDGLGVDQQKAYKYHNRWVFSGQLLGDDQHSAFRKLQWFLQENKLDSPSNHGPEFQAAFALTHNQTPFFIRVEIKGRLEKRLKRVKQGFQKLKYGFHGDKPLRSTLTLVNVAGFEPPRRLLITRAKRLPVKMAKRNGVVEVTSELETEAEEEISDDVDSSHLARKDPNELSRQAPRKTTEDPALSEIRKIYASLSTSDTSQDKPRMSSTTLVDDDSQNDQSEVEDQNAINSEQKDSRKSKQDGHGGKDLNFLFLVRLFFRYLCLQAGFVAPEVPTGSQLSGSTT

SEQ ID NO: 15846 - DNA, 668 bp, Muscodor strobelii
  misc_feature: SGI EST ID NO. CUFF.37472.0
  misc_feature: Variant of the nucleotide sequence at SEQ ID NO 15844
cttacaccaatagctgtaaagtcatatgggttgatacgatggagccagaattccatagattagttcgacgcaaaaagtcgaaaggtagaggctatggaccaagcgacttcgagaaatttgatcgctacagcgcgtgtgctggtcatggacaactcggcgaggtcagagttacaactagcattgattttgaggagtcacaatggggttttatggacaccaagactccgggtgccatcatatatatgaagattggcttcacgcagcccgagaactgcaagttggagacagcgacaattttggtgacgctagaatccctggatgagattcgcgataaagaagagttagacgcgctcgagcgacaaccggggctttccccttccacttcctctcgaattcagcttacgcactttgggccagtgtatgtgccaggtagagagactgaagcggatttctcgcgcgacatcaatgcaactccatcattggggtatggggggttttctatggacggcctgggagtcgatcagcagaaggcttataagtatcacaaccgctgggtattttccggccagctattaggagacgatcagcactccgcattcagaaagctgcaatggtttttacaagaaaacaagctcgactcgccgtcgaatcatggacctgagttccag

SEQ ID NO: 15847 - DNA, 2022 bp, Muscodor strobelii
  misc_feature: SGI cDNA ID NO. 565257
  misc_feature: Reduced expression when VOC is produced
  misc_feature: Encodes the peptide sequence at SEQ ID NO 15848
atggcttcaatgtttcaaaaagccggcaacgccctacgcggtgctactgggaatcaggagcatcatgatcaagacggcgaatccttgacgacaatcctcgagacggacgacgatcgtggcgctctcacgttgctcatttgcgatatcacagagcgcatgaggcagcagattctcgataccttcgatccgaaagaaacgggatctggggagcaattcgatgaatttgctgcagccgaggaacaggcgaatgagactaacgctgatcacgacgggagcaaggaacaggaacagcaacaaaaacttgaagagaagcggaaggccgagcaagcgaaaagagagaaggaggttaacgagcagagtatggttgagctcaaggagtcggcgctgagcttctttgataactggcgtgacagcgttattctgagagttggagaagtcatcaatgcaaggaaggatggagatgagaagccaaaatctcgacccaagcaagcgactactgaaaaaagccccgatgctattggattggggaaggatcagcatgattctcatgttgatgacacactccagaaagtctacgctccggttgagacacctttgcgcaaaatcgagagttcgcggaaagctctcattctacattctgttctgttgcttatgctgagcctggagcattataatggatattcgagaattttactgctgcgcctcgctgtgtccttagggctctcgatcaaggtcctatcagaggaagaacgcaaagtcgctcatgggctactagctgcggcgaagcagatgtccgcagacgacgaaacaaaacagagagctgacgataatcggacggcacgaagatggaaaatgggagctgctggtgtggccggcgccgcacttatcggcatcactggaggcttggcggcgcctttcctcgctgctggagttggcacagtcttaggaggaatcggtctaggggcaaccgctacagctggttatcttggcgctttggccgggagtagtgtgcttgttggtggtctcttcggtgcctatggtgcacgcatgtccactattgctatggatcagtatacgagagacgtcgaagacttcgcttttgtgcctatcagagagtccagagatcagaccgacgttcaccgcctaagagtcgcgatcggcgtgtctggctggcttagcgatgagtctgaggttacgtccacatggaaagtaattggcgattctcaagaagcatttgccttgcgattcgaagttgagtcgttgaagagactcggtaactcattacgagcactcatcacatctctcgcatggaaggtagccaagtctgaggttattaagcgaacagtatttgcggctttgatggctgggctttggccattgtccctcactaacgcaggcaagatcattgacaacccttggatggttgcgaatcagcgtgctcagaaggcaggcgaggttcttgctgaagctctcatcaacaaagctcagggtgaacgaccagtcactttggtgggatactcattgggcgccaaagtcatctacgtatgcctgcagcaactagcgcggcgaaaagcattcggtctggttgagaacgtagttctgctaggagctcctacgccgagtaactccgctgattggcgccgcattcgaacagtggtgagcggcagagttgttaacgcatatagcactcaagattacatattggctttcttataccgatccagcagtatccagttcggagttgctggcctacatcctattgctgtgaaaggggtggagaatatcaacgcaagtgacctagtcgaaggtcatacgctttatcgacatgctactggtccgatattggggcgattgggcttcgaagatatcgatgctaacgagcttacgaaggaaaagcgcaggcttgatgaacaagagaaacaagagcgtgaacagcgcgagaatacgcctcgagggaatgagccagagggcaaaaatggtggcggcggtgtaagtgagcaaagtcatttgcagccagcttag

SEQ ID NO: 15848 - protein, 673 aa, Muscodor strobelii
  misc_feature: SGI Peptide ID NO. 565257
  misc_feature (278)..(621): Pfam Id: PF05277 Pfam Desc: Domain of function (DUF726)
  misc_feature (17)..(640): NCBI GI: 189198670 Blast Desc: PTRG_05339 [Pyrenophora tritici-repentis Pt-1C-BFP] gi|187982771|gb|EDU48259.1| PTRG_05339 [Pyrenophora tritici-repentis Pt-1C-BFP]
  misc_feature (17)..(630): NCBI GI: 169609254 Blast Desc: SNOG_07715 [Phaeosphaeria nodorum SN15] gi|160701811|gb|EAT85181.2| SNOG_07715 [Phaeosphaeria nodorum SN15]
  misc_feature (18)..(630): NCBI GI: 154298011 Blast Desc: BC1G_12158 [Botryotinia fuckeliana B05.10] gi|150858285|gb|EDN33477.1| BC1G_12158 [Botryotinia fuckeliana B05.10]
  misc_feature (20)..(630): NCBI GI: 156055942 Blast Desc: SS1G_05323 [Sclerotinia sclerotiorum 1980] gi|154703107|gb|EDO02846.1| SS1G_05323 [Sclerotinia sclerotiorum 1980]
  misc_feature (6)..(648): NCBI GI: 255932081 Blast Desc: Pc12g07620 [Penicillium chrysogenum Wisconsin 54-1255] gi|211582216|emb|CAP80389.1| Pc12g07620 [Penicillium chrysogenum Wisconsin 54-1255]
  misc_feature (17)..(648): NCBI GI: 261195284 Blast Desc: DUF726 domain-containing protein [Ajellomyces dermatitidis SLH14081] gi|239587918|gb|EEQ70561.1| DUF726 domain-containing protein [Ajellomyces dermatitidis SLH14081]
  misc_feature (17)..(648): NCBI GI: 239610592 Blast Desc: DUF726 domain-containing protein [Ajellomyces dermatitidis ER-3]
  misc_feature (17)..(644): NCBI GI: 225563239 Blast Desc: DUF726 domain-containing protein [Ajellomyces capsulatus G186AR]
  misc_feature (19)..(651): NCBI GI: 212537339 Blast Desc: DUF726 domain protein [Penicillium marneffei ATCC 18224] gi|210068567|gb|EEA22658.1| DUF726 domain protein [Penicillium marneffei ATCC 18224]
  misc_feature (17)..(645): NCBI GI: 154281735 Blast Desc: conserved [Ajellomyces capsulatus NAm1] gi|150411859|gb|EDN07247.1| conserved [Ajellomyces capsulatus NAm1]
  misc_feature: Useful for introducing or modulating the production of volatile compounds
MASMFQKAGNALRGATGNQEHHDQDGESLTTILETDDDRGALTLLICDITERMRQQILDTFDPKETGSGEQFDEFAAAEEQANETNADHDGSKEQEQQQKLEEKRKAEQAKREKEVNEQSMVELKESALSFFDNWRDSVILRVGEVINARKDGDEKPKSRPKQATTEKSPDAIGLGKDQHDSHVDDTLQKVYAPVETPLRKIESSRKALILHSVLLLMLSLEHYNGYSRILLLRLAVSLGLSIKVLSEEERKVAHGLLAAAKQMSADDETKQRADDNRTARRWKMGAAGVAGAALIGITGGLAAPFLAAGVGTVLGGIGLGATATAGYLGALAGSSVLVGGLFGAYGARMSTIAMDQYTRDVEDFAFVPIRESRDQTDVHRLRVAIGVSGWLSDESEVTSTWKVIGDSQEAFALRFEVESLKRLGNSLRALITSLAWKVAKSEVIKRTVFAALMAGLWPLSLTNAGKIIDNPWMVANQRAQKAGEVLAEALINKAQGERPVTLVGYSLGAKVIYVCLQQLARRKAFGLVENVVLLGAPTPSNSADWRRIRTVVSGRVVNAYSTQDYILAFLYRSSSIQFGVAGLHPIAVKGVENINASDLVEGHTLYRHATGPILGRLGFEDIDANELTKEKRRLDEQEKQEREQRENTPRGNEPEGKNGGGGVSEQSHLQPA

SEQ ID NO: 15849 - DNA, 2137 bp, Muscodor strobelii
  misc_feature: SGI EST ID NO. CUFF.37509.1
  misc_feature: Variant of the nucleotide sequence at SEQ ID NO 15847
aagatattgaaacattacaatggcttcaatgtttcaaaaagccggcaacgccctacgcggtgctactgggaatcaggagcatcatgatcaagacggcgaatccttgacgacaatcctcgagacggacgacgatcgtggcgctctcacgttgctcatttgcgatatcacagagcgcatgaggcagcagattctcgataccttcgatccgaaagaaacgggatctggggagcaattcgatgaatttgctgcagccgaggaacaggcgaatgagactaacgctgatcacgacgggagcaaggaacaggaacagcaacaaaaacttgaagagaagcggaaggccgagcaagcgaaaagagagaaggaggttaacgagcagagtatggttgagctcaaggagtcggcgctgagcttctttgataactggcgtgacagcgttattctgagagttggagaagtcatcaatgcaaggaaggatggagatgagaagccaaaatctcgacccaagcaagcgactactgaaaaaagccccgatgctattggattggggaaggatcagcatgattctcatgttgatgacacactccagaaagtctacgctccggttgagacacctttgcgcaaaatcgagagttcgcggaaagctctcattctacattctgttctgttgcttatgctgagcctggagcattataatggatattcgagaattttactgctgcgcctcgctgtgtccttagggctctcgatcaaggtcctatcagaggaagaacgcaaagtcgctcatgggctactagctgcggcgaagcagatgtccgcagacgacgaaacaaaacagagagctgacgataatcggacggcacgaagatggaaaatgggagctgctggtgtggccggcgccgcacttatcggcatcactggaggcttggcggcgcctttcctcgctgctggagttggcacagtcttaggaggaatcggtctaggggcaaccgctacagctggttatcttggcgctttggccgggagtagtgtgcttgttggtggtctcttcggtgcctatggtgcacgcatgtccactattgctatggatcagtatacgagagacgtcgaagacttcgcttttgtgcctatcagagagtccagagatcagaccgacgttcaccgcctaagagtcgcgatcggcgtgtctggctggcttagcgatgagtctgaggttacgtccacatggaaagtaattggcgattctcaagaagcatttgccttgcgattcgaagttgagtcgttgaagagactcggtaactcattacgagcactcatcacatctctcgcatggaaggtagccaagtctgaggttattaagcgaacagtatttgcggctttgatggctgggctttggccattgtccctcactaacgcaggcaagatcattgacaacccttggatggttgcgaatcagcgtgctcagaaggcaggcgaggttcttgctgaagctctcatcaacaaagctcagggtgaacgaccagtcactttggtgggatactcattgggcgccaaagtcatctacgtatgcctgcagcaactagcgcggcgaaaagcattcggtctggttgagaacgtagttctgctaggagctcctacgccgagtaactccgctgattggcgccgcattcgaacagtggtgagcggcagagttgttaacgcatatagcactcaagattacatattggctttcttataccgatccagcagtatccagttcggagttgctggcctacatcctattgctgtgaaaggggtggagaatatcaacgcaagtgacctagtcgaaggtcatacgctttatcgacatgctactggtccgatattggggcgattgggcttcgaagatatcgatgctaacgagcttacgaaggaaaagcgcaggcttgatgaacaagagaaacaagagcgtgaacagcgcgagaatacgcctcgagggaatgagccagagggcaaaaatggtggcggcggtgtaagtgagcaaagtcatttgcagccagcttaggatggtgcagtcgtttgataaacaactcctcatagaaataacaaacaaagagttgtatgatgcgattgcttcttcttcgctcgaggaatcctccat

SEQ ID NO: 15850 - DNA, 825 bp, Muscodor strobelii
  misc_feature: SGI cDNA ID NO. 565258
  misc_feature: Encodes the peptide sequence at SEQ ID NO 15851
atgttctccaaactcgtagctgcgcttgctttagcaacagtgccaatctttgcgcaaccggttcccgatatccctggtttcaaggttgtttggaagaccaacttcgaaggtgccaaaggcagtaccgtcgagccggtggtttggaacattattcaaagttctaacaatgccaatggcgagctggaaacctacaccaagtccaacaccaaccaccaccactcgggtgatggaacactgctgatcattccgcacaagaatgctcaaggcgcttggacttcagctcgattagagtctaagtatatctttacgcctaagctcggcaagaggactattgtccaggccaagatccggttcggaaaaaatgctatttcccataagcagggcatatggcctgctttttggatgcttggtgattctattcgtcatggcacacagtggccagcgtgtggcgagattgatatcctagaaacggtcaacggtgatgtgtatcccggtggcatctgcaatgaaggtcagggtattggcggcactatcagcatctcggaccaaggctggcacacttggcgtgtgatcatcaaccgcacccacggtagttggatgcaggatttcatcgtttgggaacgaaacggcgtccagtttatgaaagtgactggagctcgcattggcaaccagagtgtctggcaaagtctcgttaattcgcccctttatatcattctgaacgtcgctgttggtggtaatttccccggtcaccctaatgccagcacgaaaggcggtttgggtagcgctatggaggtgggctacgttgctcattacgtgtctacctaa

SEQ ID NO: 15851 - protein, 274 aa, Muscodor strobelii
  misc_feature: SGI Peptide ID NO. 565258
  misc_feature (59)..(273): Pfam Id: PF00722 Pfam Desc: Glycosyl hydrolases family 16
  misc_feature (127)..(158): Pfam Id: PF00722 Pfam Desc: Glycosyl hydrolases family 16
  misc_feature (1)..(273): NCBI GI: 242769808 Blast Desc: endo-1,3(4)-beta-glucanase, [Talaromyces stipitatus ATCC 10500] gi|218725045|gb|EED24462.1| endo-1,3(4)-beta-glucanase, [Talaromyces stipitatus ATCC 10500]
  misc_feature (1)..(273): NCBI GI: 46119371 Blast Desc: FG04768.1 [Gibberella zeae PH-1]
  misc_feature (5)..(273): NCBI GI: 119473375 Blast Desc: secreted glucosidase [Neosartorya fischeri NRRL 181] gi|119406739|gb|EAW16690.1| secreted glucosidase [Neosartorya fischeri NRRL 181]
  misc_feature (1)..(273): NCBI GI: 70986272 Blast Desc: endo-1,3(4)-beta-glucanase [Aspergillus fumigatus Af293] gi|66846259|gb|EAL86592.1| endo-1,3(4)-beta-glucanase, [Aspergillus fumigatus Af293] gi|159128225|gb|EDP53340.1| A1163]
  misc_feature (1)..(273): NCBI GI: 119474307 Blast Desc: secreted glucosidase [Neosartorya fischeri NRRL 181] gi|119407182|gb|EAW17132.1| secreted glucosidase [Neosartorya fischeri NRRL 181]
  misc_feature (21)..(271): NCBI GI: 145602777 Blast Desc: MGG_09861 [Magnaporthe grisea 70-15] gi|145011166|gb|EDJ95822.1| MGG_09861 [Magnaporthe grisea 70-15]
  misc_feature (22)..(271): NCBI GI: 212542069 Blast Desc: endo-1,3(4)-beta-glucanase, [Penicillium marneffei ATCC 18224] gi|210066096|gb|EEA20189.1| endo-1,3(4)-beta-glucanase, [Penicillium marneffei ATCC 18224]
  misc_feature (22)..(273): NCBI GI: 70992959 Blast Desc: endo-1,3(4)-beta-glucanase [Aspergillus fumigatus Af293] gi|66848961|gb|EAL89290.1| endo-1,3(4)-beta-glucanase, [Aspergillus fumigatus Af293] gi|159130220|gb|EDP55333.1| A1163]
  misc_feature (2)..(273): NCBI GI: 116194890 Blast Desc: CHGG_04043 [Chaetomium globosum CBS 148.51] gi|88179956|gb|EAQ87424.1| CHGG_04043 [Chaetomium globosum CBS 148.51]
  misc_feature (18)..(273): NCBI GI: 46116344 Blast Desc: FG04014.1 [Gibberella zeae PH-1]
  misc_feature (22)..(271): SWISSPROT Homolog: EC 3.2.1.39 Glucan endo-1,3-beta-D-glucosidase
MFSKLVAALALATVPIFAQPVPDIPGFKVVWKTNFEGAKGSTVEPVVWNIIQSSNNANGELETYTKSNTNHHHSGDGTLLIIPHKNAQGAWTSARLESKYIFTPKLGKRTIVQAKIRFGKNAISHKQGIWPAFWMLGDSIRHGTQWPACGEIDILETVNGDVYPGGICNEGQGIGGTISISDQGWHTWRVIINRTHGSWMQDFIVWERNGVQFMKVTGARIGNQSVWQSLVNSPLYIILNVAVGGNFPGHPNASTKGGLGSAMEVGYVAHYVST

SEQ ID NO: 15852 - DNA, 2082 bp, Muscodor strobelii
  misc_feature: SGI cDNA ID NO. 565259
  misc_feature: Encodes the peptide sequence at SEQ ID NO 15853
atgaagaccttgtggaagccgagaagcttagggcgatcaactcgagctgccaaacatttaggtttcaagaggcggctcgccacagttgcgcctgagggtgcgcgacctttcgatgtggttgtagtaggcggaggccatgctgggactgaagcctgtgccgctgcagcccgcgccggcgcacgaaccgcgctcatcacccccaagatcgacaacctaggcgtatgctcgtgcaatccaagctttggcggaatagggaagggcaccatcctgagagagatcgacgcgttggacggcgtggccggtcgcataatcgataagtcaggcgtacagttcaaggttctcaatagaagaaagggacctgctgtatggggaccacgagcacagattgatcgtgtgctataccagaaacatatgcgcgaggaacttcagaactacccgaatctgtctatcatcacgggaagcgtctcggatatcgtcgttgatgcatatccaattggcccacatagtctagccaagagtaggataacaggagtccggttggagtccggtgaggttttgcccacgacacaagtcattatcaccacaggcacatttttaggcggcgaaatacatattggcttagaagcatttccatctggacgtatgggtgaagcagctacgtttggactgagtaaatcgctacgcgacgcaggattccaactaggacgattaaaaaccggtacccccccacgcatagcgaaagacagtatagactatactgcgcttgagattcaaaaaggcgatgacccgcccgaaccgttcagctatctacatgaccgggtgtctgtagaggatcaaatgctgtgctgggccacatacacaaatgctgcgacgcataacatcgtccgtgaaaatctcgataaatcgatacatattcgcgaaactgtaaaaggcccacgatactgcccctccctagagtcaaaaatcatcaagtttggaggcaaggagcgacacatagtgtggctagagcctgagggctttacaagcgatttgatttatccaaatggcctttctatgacgataccggcggaggcccaagaacaacttctccgcacgattccaggactggaaaagtcacatatgacacaggccggatatggagtagaatatgactacgtagatccgcgtggcttgaaagcttctctggaaaccaaggctatcaacggcttgtacctcgcaggccaaatcaatggcacaacggggtacgaggaagcagcaggtcagggcataatagcaggtatcaatgccggacgcgctgcgcttggcctggaacctatgacggtaacccgtgccgatggatatatcggcattatgatcgatgacttgatcactaaaggagtatcggagccatacaggatgttcacgtcgcgcagcgaatatcgcatgtcaagtcgtgctgataatgctgatttacgcctaacggcgaaaggacgctcctggggcgtcgtctcagatcgacgatggacagctcatagtgatctcaagacacaaatcgacgaactatattctctacttgactcatatacgttgagcacacaagcctggattcaagcaggtttccagtctcgcgttgacggtaaacatcgcagtgcgcttgatattctgcgcttgagagacattcggatcccggacttggccgacagaattccccaggtactatcctacccagaggctgttcgggaacgtgttactgtcgaggcacgttacgcaccatacgttgagcgtcaacgtgctgaggcggcagtcttcttgcgtgatgagtctctacggctttcctcggacatcgattatgactccatatttgggcttagcattgccgagaagacagtcttaaaggccacgaaaccggagagcttaggtcaagcccgtcgtgtcgaaggtatgactcctgcgggatgcttgcgtcttctttcttatgtgcagaggaagaatcagcaagacatgcgtgcgatgcagttcaacgatctcattgccgccgatatggcgcctttgggaaacgaaatcgacacgctcgactcagaagcacggacgagagatttgtaa

SEQ ID NO: 15853 - protein, 693 aa, Muscodor strobelii
  misc_feature: SGI Peptide ID NO. 565259
  misc_feature (38)..(437): Pfam Id: PF01134 Pfam Desc: Glucose inhibited division protein A
  misc_feature (23)..(658): NCBI GI: 154298844 Blast Desc: BC1G_11669 [Botryotinia fuckeliana B05.10] gi|150857574|gb|EDN32766.1| BC1G_11669 [Botryotinia fuckeliana B05.10]
  misc_feature (23)..(669): NCBI GI: 156064023 Blast Desc: SS1G_00019 [Sclerotinia sclerotiorum 1980] gi|154690881|gb|EDN90619.1| SS1G_00019 [Sclerotinia sclerotiorum 1980]
  misc_feature (1)..(657): NCBI GI: 164428879 Blast Desc: NCU11170 [Neurospora crassa OR74A] gi|157072320|gb|EAA26953.2| NCU11170 [Neurospora crassa OR74A]
  misc_feature (25)..(656): NCBI GI: 256726221 Blast Desc: NECHADRAFT_100996 [Nectria haematococca mpVI 77-13-4]
  misc_feature (2)..(658): NCBI GI: 261360096 Blast Desc: mitochondrial translation optimization protein [Verticillium albo-atrum VaMs.102]
  misc_feature (1)..(661): NCBI GI: 46111425 Blast Desc: FG02594.1 [Gibberella zeae PH-1]
  misc_feature (15)..(678): NCBI GI: 145614278 Blast Desc: MGG_08852 [Magnaporthe grisea 70-15] gi|145021212|gb|EDK05341.1| MGG_08852 [Magnaporthe grisea 70-15]
  misc_feature (36)..(662): NCBI GI: 116192205 Blast Desc: CHGG_05820 [Chaetomium globosum CBS 148.51] gi|88181733|gb|EAQ89201.1| CHGG_05820 [Chaetomium globosum CBS 148.51]
  misc_feature (7)..(655): NCBI GI: 238842932 Blast Desc: mitochondrial translation optimization protein [Microsporum canis CBS 113480]
  misc_feature (36)..(663): NCBI GI: 189190196 Blast Desc: tRNA uridine 5-carboxymethylaminomethyl modification enzyme gidA [Pyrenophora tritici-repentis Pt-1C-BFP] gi|187973043|gb|EDU40542.1| tRNA uridine modification enzyme gidA
MKTLWKPRSLGRSTRAAKHLGFKRRLATVAPEGARPFDVVVVGGGHAGTEACAAAARAGARTALITPKIDNLGVCSCNPSFGGIGKGTILREIDALDGVAGRIIDKSGVQFKVLNRRKGPAVWGPRAQIDRVLYQKHMREELQNYPNLSIITGSVSDIVVDAYPIGPHSLAKSRITGVRLESGEVLPTTQVIITTGTFLGGEIHIGLEAFPSGRMGEAATFGLSKSLRDAGFQLGRLKTGTPPRIAKDSIDYTALEIQKGDDPPEPFSYLHDRVSVEDQMLCWATYTNAATHNIVRENLDKSIHIRETVKGPRYCPSLESKIIKFGGKERHIVWLEPEGFTSDLIYPNGLSMTIPAEAQEQLLRTIPGLEKSHMTQAGYGVEYDYVDPRGLKASLETKAINGLYLAGQINGTTGYEEAAGQGIIAGINAGRAALGLEPMTVTRADGYIGIMIDDLITKGVSEPYRMFTSRSEYRMSSRADNADLRLTAKGRSWGVVSDRRWTAHSDLKTQIDELYSLLDSYTLSTQAWIQAGFQSRVDGKHRSALDILRLRDIRIPDLADRIPQVLSYPEAVRERVTVEARYAPYVERQRAEAAVFLRDESLRLSSDIDYDSIFGLSIAEKTVLKATKPESLGQARRVEGMTPAGCLRLLSYVQRKNQQDMRAMQFNDLIAADMAPLGNEIDTLDSEARTRDL

SEQ ID NO: 15854 - DNA, 3187 bp, Muscodor strobelii
  misc_feature: SGI EST ID NO. CUFF.37581.0
  misc_feature: Variant of the nucleotide sequence at SEQ ID NO 15852
tgtgaatatctcgctctcgtactccaaagtctaattatcaacaaggaacatcgacatgaagaccttgtggaagccgagaagcttagggcgatcaactcgagctgccaaacatttaggtttcaagaggcggctcgccacagttgcgcctgagggtgcgcgacctttcgatgtggttgtagtaggcggaggccatgctgggactgaagcctgtgccgctgcagcccgcgccggcgcacgaaccgcgctcatcacccccaagatcgacaacctaggcgtatgctcgtgcaatccaagctttggcggaatagggaagggcaccatcctgagagagatcgacgcgttggacggcgtggccggtcgcataatcgataagtcaggcgtacagttcaaggttctcaatagaagaaagggacctgctgtatggggaccacgagcacagattgatcgtgtgctataccagaaacatatgcgcgaggaacttcagaactacccgaatctgtctatcatcacgggaagcgtctcggatatcgtcgttgatgcatatccaattggcccacatagtctagccaagagtaggataacaggagtccggttggagtccggtgaggttttgcccacgacacaagtcattatcaccacaggcacatttttaggcggcgaaatacatattggcttagaagcatttccatctggacgtatgggtgaagcagctacgtttggactgagtaaatcgctacgcgacgcaggattccaactaggacgattaaaaaccggtacccccccacgcatagcgaaagacagtatagactatactgcgcttgagattcaaaaaggcgatgacccgcccgaaccgttcagctatctacatgaccgggtgtctgtagaggatcaaatgctgtgctgggccacatacacaaatgctgcgacgcataacatcgtccgtgaaaatctcgataaatcgatacatattcgcgaaactgtaaaaggcccacgatactgcccctccctagagtcaaaaatcatcaagtttggaggcaaggagcgacacatagtgtggctagagcctgagggctttacaagcgatttgatttatccaaatggcctttctatgacgataccggcggaggcccaagaacaacttctccgcacgattccaggactggaaaagtcacatatgacacaggccggatatggagtagaatatgactacgtagatccgcgtggcttgaaagcttctctggaaaccaaggctatcaacggcttgtacctcgcaggccaaatcaatggcacaacggggtacgaggaagcagcaggtcagggcataatagcaggtatcaatgccggacgcgctgcgcttggcctggaacctatgacggtaacccgtgccgatggatatatcggcattatgatcgatgacttgatcactaaaggagtatcggagccatacaggatgttcacgtcgcgcagcgaatatcgcatgtcaagtcgtgctgataatgctgatttacgcctaacggcgaaaggacgctcctggggcgtcgtctcagatcgacgatggacagctcatagtgatctcaagacacaaatcgacgaactatattctctacttgactcatatacgttgagcacacaagcctggattcaagcaggtttccagtctcgcgttgacggtaaacatcgcagtgcgcttgatattctgcgcttgagagacattcggatcccggacttggccgacagaattccccaggtactatcctacccagaggctgttcgggaacgtgttactgtcgaggcacgttacgcaccatacgttgagcgtcaacgtgctgaggcggcagtcttcttgcgtgatgagtctctacggctttcctcggacatcgattatgactccatatttgggcttagcattgccgagaagacagtcttaaaggccacgaaaccggagagcttaggtcaagcccgtcgtgtcgaaggtatgactcctgcgggatgcttgcgtcttctttcttatgtgcagaggaagaatcagcaagacatgcgtgcgatgcagttcaacgatctcattgccgccgatatggcgcctttgggaaacgaaatcgacacgctcgactcagaagcacggacgagagatttgtaacgaatagcgaggcattaatggttaagcggcagagtcatgacaggaacctagacggttgtatttctagcacaaggtaaatatttgtaatatcaccaggacaacattgtaattactcaaccttattaatcacatagattacctagtatacgcagatagtcaacaggctatggcaagatacgcattttaagagatccacttggcataaatcattcctgattaccgaaaacaaaccggtcggcggtgttcgttcggttcttcgctctgttattcgcagcccagctaggcaaggtagtagcaaccgaagttacgggttcggattcgccgttgtgtgataatcgagctaagacctttcttagaggctcagaatggctcaacctcacgacgagctgcaagatgaaccccttcaccggaatatctggcttttagttctatgtacatcagtattcctccgtatcgtaagcacgtcggtaccattggtcattcaagcaatgaaatagaacggaagcgctctcgggcgatgaatctaattttatacaggtaggatttatgtggcatactttatgatacaagtgatctgttctacaactcccgtgccgaattagccttactctgttgctgaccgctccaacaataacgaagtctaagagtctttgggcttgctcttctctttactctctgacaaaattctcacagcgtctttactaaatacatagcttagaccactccagacggtcgtagtggcaacgatacatctattccaaatatcagcccagttcccgtatcgcagaacatgagaaacttactggaacgctgacatcgccatgctgacatctactgcgacgacaggagccaccatagttgcacccatgagtccaagctgcaagaatgtattgtacttgctgatggttgtagggcgtacctcggccgacggcagtgaaaagtcccaatacctcatgaaggtcttgggaggtggtaaagagatatagcgatagtatatcgcgctgattgccaaccctacatctcggccgagaataatgacagccagccaga

SEQ ID NO: 15855 - DNA, 774 bp, Muscodor strobelii
  misc_feature: SGI cDNA ID NO. 565260
  misc_feature: Reduced expression when VOC is produced
  misc_feature: Encodes the peptide sequence at SEQ ID NO 15856
atgacggaatccgctgccttggccttgggccggctagattctgtgtctcaacgccccacgcagggaaaggatgatcatcaaaataagccaatacaaacagacgaggtggaatcaaagagtattcgcaaggtcctgccatcactcacaccgcatgagaacatttacacgataccaaatctcctgactttctctcgccttgtcgcgacacccttcatcggctatgccatcttgcacgatgcgcatacactggcgctcggcctgttcgcatacgctggggtttcagatctattggatgggtggatcgcccgccgttggaagttgcagacggtcgtggggagcgtcgttgatccgatggcggataagatgttgatgacggtccttacggtgtgtttagctgccaaaggagctttgcctgtctggctggctgtcattattctcggccgagatgtagggttggcaatcagcgcgatatactatcgctatatctctttaccacctcccaagaccttcatgaggtattgggacttttcactgccgtcggccgaggtacgccctacaaccatcagcaagtacaatacattcttgcagcttggactcatgggtgcaactatggtggctcctgtcgtcgcagtagatgtcagcatggcgatgtcagcgttccaatgtatcgttgccactacgaccgtctggagtggtctaagctatgtatttagtaaagacgctgtgagaattttgtcagagagtaaagagaagagcaagcccaaagactcttag

SEQ ID NO: 15856 - protein, 257 aa, Muscodor strobelii
  misc_feature: SGI Peptide ID NO. 565260
  misc_feature (85)..(220): Pfam Id: PF01066 Pfam Desc: CDP-alcohol phosphatidyltransferase
  misc_feature (15)..(247): NCBI GI: 171686658 Blast Desc: protein product [Podospora anserina] gi|170943290|emb|CAP68943.1| protein product [Podospora anserina]
  misc_feature (30)..(257): NCBI GI: 116192207 Blast Desc: CHGG_05821 [Chaetomium globosum CBS 148.51] gi|88181734|gb|EAQ89202.1| CHGG_05821 [Chaetomium globosum CBS 148.51]
  misc_feature (51)..(253): NCBI GI: 145614280 Blast Desc: MGG_08851 [Magnaporthe grisea 70-15] gi|145021213|gb|EDK05342.1| MGG_08851 [Magnaporthe grisea 70-15]
  misc_feature (51)..(249): NCBI GI: 256725819 Blast Desc: NECHADRAFT_42829 [Nectria haematococca mpVI 77-13-4]
  misc_feature (14)..(249): NCBI GI: 261360097 Blast Desc: cardiolipin synthetase [Verticillium albo-atrum VaMs.102]
  misc_feature (47)..(247): NCBI GI: 164428877 Blast Desc: NCU00135 [Neurospora crassa OR74A] gi|157072319|gb|EAA26952.2| NCU00135 [Neurospora crassa OR74A]
  misc_feature (21)..(251): NCBI GI: 46111423 Blast Desc: FG02593.1 [Gibberella zeae PH-1]
  misc_feature (22)..(253): NCBI GI: 121703664 Blast Desc: phosphatidyl synthase [Aspergillus clavatus NRRL 1] gi|119398240|gb|EAW08670.1| phosphatidyl synthase [Aspergillus clavatus NRRL 1]
  misc_feature (51)..(253): NCBI GI: 70984230 Blast Desc: phosphatidyl synthase [Aspergillus fumigatus Af293] gi|66845259|gb|EAL85594.1| phosphatidyl synthase [Aspergillus fumigatus Af293] gi|159122418|gb|EDP47539.1| phosphatidyl A1163]
  misc_feature (11)..(253): NCBI GI: 212546297 Blast Desc: phosphatidyl synthase [Penicillium marneffei ATCC 18224] gi|210064822|gb|EEA18917.1| phosphatidyl synthase [Penicillium marneffei ATCC 18224]
  misc_feature: Useful for introducing or modulating the production of volatile compounds
MTESAALALGRLDSVSQRPTQGKDDHQNKPIQTDEVESKSIRKVLPSLTPHENIYTIPNLLTFSRLVATPFIGYAILHDAHTLALGLFAYAGVSDLLDGWIARRWKLQTVVGSVVDPMADKMLMTVLTVCLAAKGALPVWLAVIILGRDVGLAISAIYYRYISLPPPKTFMRYWDFSLPSAEVRPTTISKYNTFLQLGLMGATMVAPVVAVDVSMAMSAFQCIVATTTVWSGLSYVFSKDAVRILSESKEKSKPKDS

SEQ ID NO: 15857 - DNA, 4195 bp, Muscodor strobelii
  misc_feature: SGI EST ID NO. CUFF.37582.1
  misc_feature: Variant of the nucleotide sequence at SEQ ID NO 15855
gcccaccaaggctgttagggccgccaaatagattgacgacataagctctgaagcttggatcttggtgtcctatcagggcaaagctcaaatattatctacacaacgataggacgcgaggctgatcctgcgcctcgggattaaaatcgacaaaatctggtgttggacataatttttacgaaccagtattggtcacgtccgtagggacaataggaattcggaattcacccgggcttttcttccaacttcgtcgtgcgcctagcgtccgtactgcacccgctggcttcgtcccgtagtaaggacttaggaaaaggacctgaaaggccgatatgatctgacctaacgcggtttgctactccaacaccggggcactggtcttgcacaacctcagactgcttgagttttgaggctgagaactggcactaagggccaacccattgtctgacgccttgtgccatgttgatgcgcaaccctggctgcggtccatcgccggcccggacatttcaacggttccggctgcgaaatgacggaatccgctgccttggccttgggccggctagattctgtgtctcgtcgaacctgagacctcatgctggggtgtcgacatccacgactgcatcatctgacatatcaaggctcagcacaaagctcgtcgcgtcaaatcgtcttgattataccccttgcttcactgcatcaaagggacggtggcttctgggggcttcggggtcactattatcgaggcatcacattcatgggaataacgcttcgaggtgcttctcgaacacaccagaacgccccacgcagggaaaggatgatcatcaaaataagccaatacaaacagacgaggtggaatcaaagagtattcgcaaggtcctgccatcactcacaccgcatgagaacatttacacgataccaaatctcctgactttctctcgccttgtcgcgacacccttcatcggctatgccatcttgcacgatgcgcatacactggcgctcggcctgttcgcatacgctggggtttcagatctattggatgggtggatcgcccgccgttggaagttgcagacggtcgtggggagcgtcgttgatccgatggcggataagatgttgatgacggtccttacggtgtgtttagctgccaaaggagctttgcctgtctggctggctgtcattattctcggccgagatgtagggttggcaatcagcgcgatatactatcgctatatctctttaccacctcccaagaccttcatgaggtattgggacttttcactgccgtcggccgaggtacgccctacaaccatcagcaagtacaatacattcttgcagcttggactcatgggtgcaactatggtggctcctgtcgtcgcagtagatgtcagcatggcgatgtcagcgttccaatgtatcgttgccactacgaccgtctggagtggtctaagctatgtatttagtaaagacgctgtgagaattttgtcagagagtaaagagaagagcaagcccaaagactcttagacttcgttattgttggagcggtcagcaacagagtaaggctaattcggcacgggagttgtagaacagatcacttgtatcataaagtatgccacataaatcctacctgtataaaattagattcatcgcccgagagcgcttccgttctatttcattgcttgaatgaccaatggtaccgacgtgcttacgatacggaggaatactgatgtacatagaactaaaagccagatattccggtgaaggggttcatcttgcagctcgtcgtgaggttgagccattctgagcctctaagaaaggtcttagctcgattatcacacaacggcgaatccgaacccgtaacttcggttgctactaccttgcctagctgggctgcgaataacagagcgaagaaccgaacgaacaccgccgaccggtttgttttcggtaatcaggaatgatttatgccaagtggatctcttaaaatgcgtatcttgccatagcctgttgactatctgcgtatactaggtaatctatgtgattaataaggttgagtaattacaatgttgtcctggtgatattacaaatatttaccttgtgctagaaatacaaccgtctaggttcctgtcatgactctgccgcttaaccattaatgcctcgctattcgttacaaatctctcgtccgtgcttctgagtcgagcgtgtcgatttcgtttcccaaaggcgccatatcggcggcaatgagatcgttgaactgcatcgcacgcatgtcttgctgattcttcctctgcacataagaaagaagacgcaagcatcccgcaggagtcataccttcgacacgacgggcttgacctaagctctccggtttcgtggcctttaagactgtcttctcggcaatgctaagcccaaatatggagtcataatcgatgtccgaggaaagccgtagagactcatcacgcaagaagactgccgcctcagcacgttgacgctcaacgtatggtgcgtaacgtgcctcgacagtaacacgttcccgaacagcctctgggtaggatagtacctggggaattctgtcggccaagtccgggatccgaatgtctctcaagcgcagaatatcaagcgcactgcgatgtttaccgtcaacgcgagactggaaacctgcttgaatccaggcttgtgtgctcaacgtatatgagtcaagtagagaatatagttcgtcgatttgtgtcttgagatcactatgagctgtccatcgtcgatctgagacgacgccccaggagcgtcctttcgccgttaggcgtaaatcagcattatcagcacgacttgacatgcgatattcgctgcgcgacgtgaacatcctgtatggctccgatactcctttagtgatcaagtcatcgatcataatgccgatatatccatcggcacgggttaccgtcataggttccaggccaagcgcagcgcgtccggcattgatacctgctattatgccctgacctgctgcttcctcgtaccccgttgtgccattgatttggcctgcgaggtacaagccgttgatagccttggtttccagagaagctttcaagccacgcggatctacgtagtcatattctactccatatccggcctgtgtcatatgtgacttttccagtcctggaatcgtgcggagaagttgttcttgggcctccgccggtatcgtcatagaaaggccatttggataaatcaaatcgcttgtaaagccctcaggctctagccacactatgtgtcgctccttgcctccaaacttgatgatttttgactctagggaggggcagtatcgtgggccttttacagtttcgcgaatatgtatcgatttatcgagattttcacggacgatgttatgcgtcgcagcatttgtgtatgtggcccagcacagcatttgatcctctacagacacccggtcatgtagatagctgaacggttcgggcgggtcatcgcctttttgaatctcaagcgcagtatagtctatactgtctttcgctatgcgtgggggggtaccggtttttaatcgtcctagttggaatcctgcgtcgcgtagcgatttactcagtccaaacgtagctgcttcacccatacgtccagatggaaatgcttctaagccaatatgtatttcgccgcctaaaaatgtgcctgtggtgataatgacttgtgtcgtgggcaaaacctcaccggactccaaccggactcctgttatcctactcttggctagactatgtgggccaattggatatgcatcaacgacgatatccgagacgcttcccgtgatgatagacagattcgggtagttctgaagttcctcgcgcatatgtttctggtatagcacacgatcaatctgtgctcgtggtccccatacagcaggtccctttcttctattgagaaccttgaactgtacgcctgacttatcgattatgcgaccggccacgccgtccaacgcgtcgatctctctcaggatggtgcccttccctattccgccaaagcttggattgcacgagcatacgcctaggttgtcgatcttgggggtgatgagcgcggttcgtgcgccggcgcgggctgcagcggcacaggcttcagtcccagcatggcctccgcctactacaaccacatcgaaaggtctatcgttctcgggttagtctgtgtgtgatggctgtaactgtagaacgggatactaaccgcgcac

SEQ ID NO: 15858 - DNA, 1269 bp, Muscodor strobelii
  misc_feature: SGI cDNA ID NO. 565261
  misc_feature: Encodes the peptide sequence at SEQ ID NO 15859
atggcggaacggtccggcacaccactccaccctacctttcagggctacatagggtctaccatggacgccttgattctgttcgaatgctgtctgtctggccgcctcctacatgtagcacgaagacctcatgaccgcgaaagaacccaactcatcaaaagtggtaatgtcttcatttacgaggagcactcgtccggcatcaaacgatggacagatggagttccttggagtcccagccgtatcctcggcaacttccttctgtatcgagaacttgagaagccgtttacccctggagagaaaaagcgagccctcaaaaagaagagtgatggcggaattgtcaagaacgtttctcagagttcgagatcgaactctataagtagtttttccaatggtaacttgggctcagactctagcctcaacagcaccaatggaagtgatgcggataggtatcttattgggtctctcgtcgactcatattcattcaaagatgggggtttgataaaaaagaccatcagtgtttcctacaggggcgtccaacaccatcttgtgtcctactacagcatcgaggacatcaaagccaacagactcataaccccgagccattcgaattcagctgtctgcacggtcattcctcgagctagcctaatttcatccggaaatttcagggcccctgtacatgacgaagagtacacactcgtggacccacggtactatacggtagctcctgattacactgcatcttacggtctgccgaatcgctctatgtctgtgccgacactccagggttattcacagtctaatgtttggccctctgcttcgcagtacggggacggcactcctcacggctgggccagctcctcacaatacacgtcgaactcctcgcagtatacgccgagctcctcgcagtatacagccggtgcttcgtacaccatgccacaaggcttagctactggcttagcgtcaagcttggcatcgacattgccctccggcatgtcttcacaattgtcagcctcgcaactgtcagggtcccaattatcagcttcgcaattgtcagcttcacagttgtcggcttcacaactatcggccacacaaatgtcgccaaacaacggaggctacggctcagggtcacaaatgatgcccgatggttacgaacaagcctataccagaggacagtcccaggatttctggagtgactggggtacgcaccaaggtcattggcctccgcctccaaatccaaacgcgaacccgaatctggaggacgaaaggcgataa

SEQ ID NO: 15859 - protein, 422 aa, Muscodor strobelii
  misc_feature: SGI Peptide ID NO. 565261
  misc_feature (9)..(233): NCBI GI: 225678548 Blast Desc: cAMP-independent regulatory protein pac2 [Paracoccidioides brasiliensis Pb03]
  misc_feature (9)..(233): NCBI GI: 226294744 Blast Desc: cAMP-independent regulatory protein pac2 [Paracoccidioides brasiliensis Pb18]
  misc_feature (9)..(233): NCBI GI: 226285727 Blast Desc: cAMP-independent regulatory protein pac2 [Paracoccidioides brasiliensis Pb01]
  misc_feature (9)..(233): NCBI GI: 261190923 Blast Desc: Ryp1 [Ajellomyces dermatitidis SLH14081] gi|239590914|gb|EEQ73495.1| Ryp1 [Ajellomyces dermatitidis SLH14081] gi|239613179|gb|EEQ90166.1| Ryp1 [Ajellomyces ER-3]
  misc_feature (9)..(233): NCBI GI: 240276901 Blast Desc: conserved [Ajellomyces capsulatus H143]
  misc_feature (9)..(233): NCBI GI: 225554725 Blast Desc: conserved [Ajellomyces capsulatus G186AR]
  misc_feature (9)..(233): NCBI GI: 161598402 Blast Desc: Ryp1 [Ajellomyces capsulatus]
  misc_feature (9)..(233): NCBI GI: 154272591 Blast Desc: conserved [Ajellomyces capsulatus NAm1] gi|150409135|gb|EDN04591.1| conserved [Ajellomyces capsulatus NAm1]
  misc_feature (1)..(366): NCBI GI: 169777059 Blast Desc: [Aspergillus oryzae RIB40] gi|83771732|dbj|BAE61862.1| protein product [Aspergillus oryzae]
  misc_feature (1)..(366): NCBI GI: 145250273 Blast Desc: An15g01110 [Aspergillus niger] gi|134082168|emb|CAK42280.1| protein product [Aspergillus niger]
MAERSGTPLHPTFQGYIGSTMDALILFECCLSGRLLHVARRPHDRERTQLIKSGNVFIYEEHSSGIKRWTDGVPWSPSRILGNFLLYRELEKPFTPGEKKRALKKKSDGGIVKNVSQSSRSNSISSFSNGNLGSDSSLNSTNGSDADRYLIGSLVDSYSFKDGGLIKKTISVSYRGVQHHLVSYYSIEDIKANRLITPSHSNSAVCTVIPRASLISSGNFRAPVHDEEYTLVDPRYYTVAPDYTASYGLPNRSMSVPTLQGYSQSNVWPSASQYGDGTPHGWASSSQYTSNSSQYTPSSSQYTAGASYTMPQGLATGLASSLASTLPSGMSSQLSASQLSGSQLSASQLSASQLSASQLSATQMSPNNGGYGSGSQMMPDGYEQAYTRGQSQDFWSDWGTHQGHWPPPPNPNANPNLEDERR

SEQ ID NO: 15860 - DNA, 475 bp, Muscodor strobelii
  misc_feature: SGI EST ID NO. CUFF.37500.0
  misc_feature: Variant of the nucleotide sequence at SEQ ID NO 15858
ctactacagcatcgaggacatcaaagccaacagactcataaccccgagccattcgaattcagctgtctgcacggtcattcctcgagctagcctaatttcatccggaaatttcagggcccctgtacatgacgaagagtacacactcgtggacccacggtactatacggtagctcctgattacactgcatcttacggtctgccgaatcgctctatgtctgtgccgacactccagggttattcacagtctaatgtttggccctctgcttcgcagtacggggacggcactcctcacggctgggccagctcctcacaatacacgtcgaactcctcgcagtatacgccgagctcctcgcagtatacagccggtgcttcgtacaccatgccacaaggcttagctactggcttagcgtcaagcttggcatcgacattgccctccggcatgtcttcacaattgtcagcctcgcaactgtcaggg

SEQ ID NO: 15861 - DNA, 1800 bp, Muscodor strobelii
  misc_feature: SGI cDNA ID NO. 565262
  misc_feature: Encodes the peptide sequence at SEQ ID NO 15862
atgaacggcgacgacgatccgtttgacggcgacgatgacgccgcgctgcggtatgcgattgcactctcgcttcaagacgccaatccgtcggctactgctgacgacccacttgtgattgacgatgaggacgatggggatgacgatttggaaatgggtccttcttatgctcctccgcctaagaagccttccagcaagttgggtgttggggagggcgggaaaaacgaggttgagatgaagagctctaccttagcagctgctacgaatcaaggggtattttcggccctgggacttgacaggaaagaaatggaaaaggaacgacttgcaagagcggcgaaacgtaagggagatgccgacgaattgagtggtccgcttgccagaagggtcaaaatcgagagggaatctgatgagatgtcggatccatcttcgtcaagatcccaaccgactcagcctgactccaaggcactggtgtttccagagggtacagtcaagaagacttgggcaaagggctatcctcgccagaatgacatcaaggtcgaagaggtcttccaaaaagaacacttacaacttgctgttctgagttcttttcagtgggacgatgattggatgctgtcaaagatcgacatcaagaaaactaagatcgtgtgcattgcatatgcgaaagacgacgcacataaagatcaaatgagagcaaatgtccccagagatcgcattcgattttgctttccaccgatgggaccctttggaaacatgcattcaaagctgcagattctgaagtttccaagccatctaaggattgtgatcccaactggtaatctggtaccttacgattggggcgagactggtgtaatggaaaatatggtattcttaatcgacctcccgaaaacagacgagccaagactaggaatagaaaagagtctgttcggccaagaactctgtctctttctacgcgcttctggtctcggtgagagtttactcggcagcctctcgaaatatgatttttcggctgcagaccgttacagatttgttcataccatggcatgtattggaccgtcccgttcaatttcttccagcatcgcaactttcagaaaggtctatgctaacgtcggttatagttattgcggacttggccgagccattaaatccctagacttagctatggcggaagttgagttagactatattgtcacatcgctaggcgctgtcaacgaagatctggtgacggcactctataacgctgctcaaggcgacgatggtctgaaagagtacgaaaagagaaccggcaaaggtgccaagaagaaagccctcaaggggagtgaacctagtcacgcacaggataagtttcgtatctattttccttctcaagaaaccgtgttgaaaagtcggggtggtaagaatagcggtggtactatttgtcttcagagaaaatggtgggatgccgcgacgttcccaagacacatgatccacgattgcaagaatgtccgtgaaggtctcttaatgcattccaagatcctcttcgcacgtcatcttcgtaatggagagtcccacgcaagttgggcctaccttggatccgcaaacttgtcagaaagcgcttggggccgcctggtgaaagataaaacgtctggccagcccagaatgacttgtcgtaattgggaatgtggtgtcatcattgtcgcagacaatcctcacgatcagctgagcctgggcggctttgagccgaaagtgcctgtccctatcatgttaccgggtgaagcttatggcaagacccagtcgaaggcgccttggtttttcctagaatcataa

SEQ ID NO: 15862 - protein, 599 aa, Muscodor strobelii
  misc_feature: SGI Peptide ID NO. 565262
  misc_feature (152)..(586): Pfam Id: PF06087 Pfam Desc: Tyrosyl-DNA phosphodiesterase
  misc_feature (516)..(556): Pfam Id: PF06087 Pfam Desc: Tyrosyl-DNA phosphodiesterase
  misc_feature (10)..(27): Pfam Id: PF02809 Pfam Desc: Ubiquitin interaction motif
  misc_feature (6)..(556): NCBI GI: 46111419 Blast Desc: FG02591.1 [Gibberella zeae PH-1]
  misc_feature (9)..(553): NCBI GI: 256725817 Blast Desc: NECHADRAFT_94592 [Nectria haematococca mpVI 77-13-4]
  misc_feature (85)..(596): NCBI GI: 116192211 Blast Desc: CHGG_05823 [Chaetomium globosum CBS 148.51] gi|88181736|gb|EAQ89204.1| CHGG_05823 [Chaetomium globosum CBS 148.51]
  misc_feature (97)..(598): NCBI GI: 261360099 Blast Desc: tyrosyl-DNA phosphodiesterase domain-containing protein [Verticillium albo-atrum VaMs.102]
  misc_feature (9)..(596): NCBI GI: 159122429 Blast Desc: conserved [Aspergillus fumigatus A1163]
  misc_feature (95)..(596): NCBI GI: 119467668 Blast Desc: tyrosyl-DNA phosphodiesterase domain protein [Neosartorya fischeri NRRL 181] gi|119405792|gb|EAW15743.1| tyrosyl-DNA phosphodiesterase domain protein [Neosartorya NRRL
  misc_feature (1)..(596): NCBI GI: 145614288 Blast Desc: MGG_08847 [Magnaporthe grisea 70-15] gi|145021217|gb|EDK05346.1| MGG_08847 [Magnaporthe grisea 70-15]
  misc_feature (16)..(585): NCBI GI: 145250279 Blast Desc: An15g01140 [Aspergillus niger] gi|134082171|emb|CAK42283.1| protein product [Aspergillus niger]
  misc_feature (45)..(598): NCBI GI: 225678545 Blast Desc: conserved [Paracoccidioides brasiliensis Pb03]
  misc_feature (9)..(596): NCBI GI: 121703656 Blast Desc: tyrosyl-DNA phosphodiesterase domain protein [Aspergillus clavatus NRRL 1] gi|119398236|gb|EAW08666.1| tyrosyl-DNA phosphodiesterase domain protein [Aspergillus NRRL 1]
MNGDDDPFDGDDDAALRYAIALSLQDANPSATADDPLVIDDEDDGDDDLEMGPSYAPPPKKPSSKLGVGEGGKNEVEMKSSTLAAATNQGVFSALGLDRKEMEKERLARAAKRKGDADELSGPLARRVKIERESDEMSDPSSSRSQPTQPDSKALVFPEGTVKKTWAKGYPRQNDIKVEEVFQKEHLQLAVLSSFQWDDDWMLSKIDIKKTKIVCIAYAKDDAHKDQMRANVPRDRIRFCFPPMGPFGNMHSKLQILKFPSHLRIVIPTGNLVPYDWGETGVMENMVFLIDLPKTDEPRLGIEKSLFGQELCLFLRASGLGESLLGSLSKYDFSAADRYRFVHTMACIGPSRSISSSIATFRKVYANVGYSYCGLGRAIKSLDLAMAEVELDYIVTSLGAVNEDLVTALYNAAQGDDGLKEYEKRTGKGAKKKALKGSEPSHAQDKFRIYFPSQETVLKSRGGKNSGGTICLQRKWWDAATFPRHMIHDCKNVREGLLMHSKILFARHLRNGESHASWAYLGSANLSESAWGRLVKDKTSGQPRMTCRNWECGVIIVADNPHDQLSLGGFEPKVPVPIMLPGEAYGKTQSKAPWFFLES

SEQ ID NO: 15863 - DNA, 1295 bp, Muscodor strobelii
  misc_feature: SGI EST ID NO. CUFF.37550.0
  misc_feature: Variant of the nucleotide sequence at SEQ ID NO 15861
cttcattgccgtggaaccctgaagaggtctgagcacagtctcaacaccgtacgtcattgaaccctggcgagaggcaagcacctaacattttgcacgtgagttcgtgacacggtcgcgttgcagcaacgcatttcatcgttctctcgacgcgcaatctacttacctgtttatttgtacttggattggtctgctcaagatatcgtccctctggcaggtgcacttcaccttacttcactataacacttcccttgcatcatgaacggcgacgacgatccgtttgacggcgacgatgacgccgcgctgcggtatgcgattgcactctcgcttcaagacgccaatccgtcggctactgctgacgacccacttgtgattgacgatgaggacgatggggatgacgatttggaaatgggtccttcttatgctcctccgcctaagaagccttccagcaagttgggtgttggggagggcgggaaaaacgaggttgagatgaagagctctaccttagcagctgctacgaatcaaggggtattttcggccctgggacttgacaggaaagaaatggaaaaggaacgacttgcaagagcggcgaaacgtaagggagatgccgacgaattgagtggtccgcttgccagaagggtcaaaatcgagagggaatctgatgagatgtcggatccatcttcgtcaagatcccaaccgactcagcctgactccaaggcactggtgtttccagagggtacagtcaagaagacttgggcaaagggctatcctcgccagaatgacatcaaggtcgaagaggtcttccaaaaagaacacttacaacttgctgttctgagttcttttcagtgggacgatgattggatgctgtcaaagatcgacatcaagaaaactaagatcgtgtgcattgcatatgcgaaagacgacgcacataaagatcaaatgagagcaaatgtccccagagatcgcattcgattttgctttccaccgatgggaccctttggaaacatgcattcaaagctgcagattctgaagtttccaagccatctaaggattgtgatcccaactggtaatctggtaccttacgattggggcgagactggtgtaatggaaaatatggtattcttaatcgacctcccgaaaacagacgagccaagactaggaatagaaaagagtctgttcggccaagaactctgtctctttctacgcgcttctggtctcggtgagagtttactcggcagcctctcgaaatatgatttttcggctgcagaccgttacagatttgttcataccatggcatg

SEQ ID NO: 15864 - DNA, 1551 bp, Muscodor strobelii
  misc_feature: SGI cDNA ID NO. 565263
  misc_feature: Reduced expression when VOC is produced
  misc_feature: Encodes the peptide sequence at SEQ ID NO 15865
atgacgacccttcagcctcctgcttcgccctcctcctccgttgattcactcagcccatcctcatccgatcccgtcttcattatttatccttatctagaaagcagttataaagaaccaaacccacaaggcattgcctgcgcatcgccgacgacctcattgacggcttgccacttccaacaaagagcagcatccttccgcatagtgcatgagcgtccggagtttgtgacctgccaccacgcccaacctaatccctccactcgcactcaccctcgcccgtcccactctgcctcggcgtcacagtttgttcatttcccacgacaacgacaacaacaacaatcaggccttggcctcttgccgcctctcgccaccggcacaaccacggaccgacgtcccattgtcgcaacatcaacatatcttagcggccctcgactcttccggcgacaagactcatgttgccattatagcatggagtcatcgctgatccaaaagaacacgcccaaccggcgccgcaacgcgagcggccggactcgaaatgctgcccagaagacttacgcctcggagaacgacgtcccctccaccgtgcctttccaccccatcagccccagccccagcaccccgcagaagctggcctcggctgccaatggaggcgcccatggagtgccccagacacagtcaacgacccagaagcagcgcagcaagggcaagtctcgaaacaagaagaacgccaacggcactgggtcccccggccaccatcaccatgagcgcagcagcccgtctttcctgcctcaagacgacgccgctcccatcttcgccggctccaccttccatgcttcgccagcgccctcggcattgcccatcccgagcttcctcgcccgttcgagcgtcgccagccccatgggagcaccaccacagtcgagctcccctcaccagcagcaagtatccacgcctccaacagagtctgactccgatagcgctgccgatctatcggacgcccgcccgccgccgcgcaacgaggactctcccttggagttctttttccgcgccgaccgggccgagaaggagaggacgcgccgtgcaagctccgccaatgctggcgccaggctcgttgcccctttctccccgcctcaggaatcctctagggaagccaggattcacccaagaaccgtagcccacaactccttccgacgtccaccattcagccaaagcaattcgtccccgggcatctcgacaagcgaactcgatgggaacccgggacagccagttggcccagccttctccacgccctatcaggatcgcatccgagcggctcgttcgaatcagagctcggcccagaactctacacagaccacgcccgccacgagccatgctcagagcccccatctcagttcctcagacgctctgaaacgatatcgtttactggccagttcgactcgagcgcatcgcaggagctgccccgacaagctccatctccactgggcaggcagcctctgcaatcgtcggcacagttttcacaacagcaataccccagccccgacgcgaaccgacatgtag

SEQ ID NO: 15865 - protein, 516 aa, Muscodor strobelii
  misc_feature: SGI Peptide ID NO. 565263
  misc_feature (161)..(473): NCBI GI: 85109760 Blast Desc: NCU06223 [Neurospora crassa OR74A] gi|28924725|gb|EAA33838.1| NCU06223 [Neurospora crassa OR74A]
  misc_feature (160)..(450): NCBI GI: 171686600 Blast Desc: protein product [Podospora anserina] gi|170943261|emb|CAP68914.1| protein product [Podospora anserina]
  misc_feature (163)..(476): NCBI GI: 116192213 Blast Desc: CHGG_05824 [Chaetomium globosum CBS 148.51] gi|88181737|gb|EAQ89205.1| CHGG_05824 [Chaetomium globosum CBS 148.51]
  misc_feature (179)..(446): NCBI GI: 39953612 Blast Desc: MGG_08845 [Magnaporthe grisea 70-15] gi|145021219|gb|EDK05348.1| MGG_08845 [Magnaporthe grisea 70-15]
  misc_feature (179)..(477): NCBI GI: 46111233 Blast Desc: FG02498.1 [Gibberella zeae PH-1]
  misc_feature (266)..(488): NCBI GI: 256725816 Blast Desc: NECHADRAFT_104831 [Nectria haematococca mpVI 77-13-4]
  misc_feature (266)..(444): NCBI GI: 154298846 Blast Desc: BC1G_11670 [Botryotinia fuckeliana B05.10] gi|150857575|gb|EDN32767.1| BC1G_11670 [Botryotinia fuckeliana B05.10]
  misc_feature (211)..(479): NCBI GI: 238844305 Blast Desc: conserved [Microsporum canis CBS 113480]
  misc_feature (266)..(441): NCBI GI: 156064041 Blast Desc: SS1G_00028 [Sclerotinia sclerotiorum 1980] gi|154690890|gb|EDN90628.1| SS1G_00028 [Sclerotinia sclerotiorum 1980]
  misc_feature (163)..(385): NCBI GI: 261360100 Blast Desc: [Verticillium albo-atrum VaMs.102]
  misc_feature: Useful for introducing or modulating the production of volatile compounds
MTTLQPPASPSSSVDSLSPSSSDPVFIIYPYLESSYKEPNPQGIACASPTTSLTACHFQQRAASFRIVHERPEFVTCHHAQPNPSTRTHPRPSHSASASQFVHFPRQRQQQQSGLGLLPPLATGTTTDRRPIVATSTYLSGPRLFRRQDSCCHYSMESSLIQKNTPNRRRNASGRTRNAAQKTYASENDVPSTVPFHPISPSPSTPQKLASAANGGAHGVPQTQSTTQKQRSKGKSRNKKNANGTGSPGHHHHERSSPSFLPQDDAAPIFAGSTFHASPAPSALPIPSFLARSSVASPMGAPPQSSSPHQQQVSTPPTESDSDSAADLSDARPPPRNEDSPLEFFFRADRAEKERTRRASSANAGARLVAPFSPPQESSREARIHPRTVAHNSFRRPPFSQSNSSPGISTSELDGNPGQPVGPAFSTPYQDRIRAARSNQSSAQNSTQTTPATSHAQSPHLSSSDALKRYRLLASSTRAHRRSCPDKLHLHWAGSLCNRRHSFHNSNTPAPTRTDM

SEQ ID NO: 15866 - DNA, 2587 bp, Muscodor strobelii
  misc_feature: SGI EST ID NO. CUFF.37512.0
  misc_feature: Variant of the nucleotide sequence at SEQ ID NO 15864
catgcgacccaaactccacttactatctcaggctttgctaggattctcacccagcatgacgacccttcagcctcctgcttcgccctcctcctccgttgattcactcagcccatcctcatccgatcccgtcttcattatttatccttatctagaaagcagttataaagaaccaaacccacaaggcattgcctgcgcatcgccgacgacctcattgacggcttgccacttccaacaaagagcagcatccttccgcatagtgcatgagcgtccggagtttgtgacctgccaccacgcccaacctaatccctccactcgcactcaccctcgcccgtcccactctgcctcggcgtcacagtttgttcatttcccacgacaacgacaacaacaacaatcaggccttggcctcttgccgcctctcgccaccggcacaaccacggaccgacgtcccattgtcgcaacatcaacatatcttagcggccctcgactcttccggcgacaagactcatgttgccattatagcatggagtcatcgctgatccaaaagaacacgcccaaccggcgccgcaacgcgagcggccggactcgaaatgctgcccagaagacttacgcctcggagaacgacgtcccctccaccgtgcctttccaccccatcagccccagccccagcaccccgcagaagctggcctcggctgccaatggaggcgcccatggagtgccccagacacagtcaacgacccagaagcagcgcagcaagggcaagtctcgaaacaagaagaacgccaacggcactgggtcccccggccaccatcaccatgagcgcagcagcccgtctttcctgcctcaagacgacgccgctcccatcttcgccggctccaccttccatgcttcgccagcgccctcggcattgcccatcccgagcttcctcgcccgttcgagcgtcgccagccccatgggagcaccaccacagtcgagctcccctcaccagcagcaagtatccacgcctccaacagagtctgactccgatagcgctgccgatctatcggacgcccgcccgccgccgcgcaacgaggactctcccttggagttctttttccgcgccgaccgggccgagaaggagaggacgcgccgtgcaagctccgccaatgctggcgccaggctcgttgcccctttctccccgcctcaggaatcctctagggaagccaggattcacccaagaaccgtagcccacaactccttccgacgtccaccattcagccaaagcaattcgtccccgggcatctcgacaagcgaactcgatgggaacccgggacagccagttggcccagccttctccacgccctatcaggatcgcatccgagcggctcgttcgaatcagagctcggcccagaactctacacagaccacgcccgccacgagccatgctcagagcccccatctcagttcctcagacgctctgaaacgatatcgtttactggccagttcgactcgagcgcatcgcaggagctgccccgacaagctccatctccactgggcaggcagcctctgcaatcgtcggcacagttttcacaacagcaataccccagccccgacgcgaaccgacatgtagccccgactcaggcgtcctcaccaccacaaaagcatttcccgcggggcatgtttcctgcatccgtactcgctggttatccctctcctgctcagtcgaccgtatcttcgacagaagtccaatctaatccgaatgcccggcctgaccatattgtcgcgttggagggtgatcttcgacggatgcttaaacttgattcattgacctagatcgaactagcgttcgtcacatcaacagcaacggtgttcagggcgcaggcgtcatggtcatttccttcgcatttatacttacggcttacaacttcgttattttcatttttctctcgactcagtggctacaaagacggagctgctaccacgctgattcccatggctaatcttatcacgttttcgaacatataaccatgtgtaaggggcatgcattttcagacttccttcatgttgtctacttgagctcgagtaatgtattatgggttgggagttacgacatcgcataggtatggcacaggattacatccgagaaggtcggctaggctacatggtgtggcgagtctgcctataagagtcgttcacggtttcggcagggatgcttgggctcggagtttggtctgggtgcggtgcggacagacccagatgcatccaatctgaatgtttagagcgacgacatgaggaaacgtttcggttacaaggtggcttattgcaatggttgcagatggatctcgattcattcagtgccgacatgagctgacgaatctcgtgtatttgtgtatgagataagaccggtggtgggtggcgatgaggattctatgaggcgaaaattgctcaagcagcgagaagaaaaaaatcatgaaaaaaagaaaaaagaagggtggttttctgatgatatacctcagtactttggtcttggtattccgagatagaccttagctgatcaataaaaagagacctttttggtcttgtatatcatcaatttctgatccattatagc

SEQ ID NO: 15867 - DNA, 366 bp, Muscodor strobelii
  misc_feature: SGI cDNA ID NO. 565264
  misc_feature: Encodes the peptide sequence at SEQ ID NO 15868
atggccgacgtcgacatgaccgatgctcccagcaattccgctgtagtccccaagcgtgccaagggcgctgctgccgacggtaagaacgaggccaagcagcgattcgaggtcaagaagtggaacgccgttgctctgtgggcctgggacattgtcgtcgacaactgcgccatctgccgcaaccacatcatggacctgtgcatcgagtgccaggccaaccaggcctccgctacgagcgaggagtgcactgtggcctggggtatctgcaatcacgccttccatttccactgcatctctagatggctcaaggcccgtcatgtctgccccctcgacaacagagactgggagttccagaagtacggccgttag

SEQ ID NO: 15868 - protein, 121 aa, Muscodor strobelii
  misc_feature: SGI Peptide ID NO. 565264
  misc_feature (1)..(121): NCBI GI: 145614290 Blast Desc: ring-box 1 [Magnaporthe grisea 70-15] gi|145021220|gb|EDK05349.1| ring-box 1 [Magnaporthe grisea 70-15]
  misc_feature (1)..(121): NCBI GI: 171686598 Blast Desc: protein product [Podospora anserina] gi|170943260|emb|CAP68913.1| protein product [Podospora anserina]
  misc_feature (1)..(121): NCBI GI: 240109271 Blast Desc: RING-box protein 1a , [Coccidioides posadasii C735 delta SOWgp]
  misc_feature (1)..(121): NCBI GI: 212536072 Blast Desc: ubiquitin ligase subunit HrtA, [Penicillium marneffei ATCC 18224] gi|210070591|gb|EEA24681.1| ubiquitin ligase subunit HrtA, [Penicillium marneffei ATCC 18224]
  misc_feature (1)..(121): NCBI GI: 261360101 Blast Desc: RING-box protein [Verticillium albo-atrum VaMs.102]
  misc_feature (1)..(121): NCBI GI: 169611979 Blast Desc: SNOG_09105 [Phaeosphaeria nodorum SN15] gi|160702408|gb|EAT83297.2| SNOG_09105 [Phaeosphaeria nodorum SN15]
  misc_feature (1)..(121): NCBI GI: 189189930 Blast Desc: RING-box protein 1 [Pyrenophora tritici-repentis Pt-1C-BFP] gi|187972910|gb|EDU40409.1| RING-box protein 1 [Pyrenophora tritici-repentis Pt-1C-BFP]
  misc_feature (1)..(121): NCBI GI: 156064039 Blast Desc: RING-box protein 1 [Sclerotinia sclerotiorum 1980] gi|154690889|gb|EDN90627.1| RING-box protein 1 [Sclerotinia sclerotiorum 1980]
  misc_feature (1)..(121): NCBI GI: 240277307 Blast Desc: RING finger domain-containing protein [Ajellomyces capsulatus H143]
  misc_feature (1)..(121): NCBI GI: 225562222 Blast Desc: RING-box protein HRT1 [Ajellomyces capsulatus G186AR]
  misc_feature (54)..(116): SWISSPROT Homolog: EC 6.3.2.19 Ubiquitin--protein ligase
MADVDMTDAPSNSAVVPKRAKGAAADGKNEAKQRFEVKKWNAVALWAWDIVVDNCAICRNHIMDLCIECQANQASATSEECTVAWGICNHAFHFHCISRWLKARHVCPLDNRDWEFQKYGR

SEQ ID NO: 15869 - DNA, 1833 bp, Muscodor strobelii
  misc_feature: SGI EST ID NO. CUFF.37610.0
  misc_feature: Variant of the nucleotide sequence at SEQ ID NO 15867
agtacctacttaggtgttcgggtgggtgctacagcctcctccaacccgcttcgcttgccttgtctacctatctctggtatctcagcttgcttcagcctagcaaccttgacgggcaacctgtagtgtacctaaggtacatgtagttgagtagcccatctatagcaaagcagttcacgctcaggcattcgtacatctatttgcgcattgtacattgtgcacagcagattactggcgttaccatctaccgtccatccagaaccgccgtggttcctctctacaaaacagctgccagtagctgtgacatagagccaaacgacactaccacctcgtgaccactccggctccttataaaacatcacgctgaatctcaacaatatcagtatcccagctttccacactggtagaagatggccgacgtcgacatgaccgatgctcccagcaattccgctgtagtccccaagcgtgccaagggcgctgctgccgacggtaagaacgaggccaagcagcgattcgaggtcaagaagtggaacgccgttgctctgtgggcctgggacattgtcgtcgacaactgcgccatctgccgcaaccacatcatggacctgtgcatcgagtgccaggccaaccaggcctccgctacgagcgaggagtgcactgtggcctggggtatctgcaatcacgccttccatttccactgcatctctagatggctcaaggcccgtcatgtctgccccctcgacaacagagactgggagttccagaagtacggccgttagtcctgtggtcgagatggtaaggctcaggaaggaaggcaagggaaaagggggcccatatggatccatgcagcacgcttagtagtgttctcgcgagggcgtgaacgtgtcatgagtagacgaagcctcacgggcatcacgagaaagtcacgacggagggaacacgaacagaattgcccaacggcatcacaggctagagaggactcggatttgtccgggtgttgggtagtagattgctacctatattccgccaacgaggcttatgtttgcaacatcaaagcaacaccttaagcctcctaaagtacatagcatgaatgcaaaagaaatcactgttttgctcaagcaccttcccgctattttgccaacatcttctcgtctatgactatgttgctgggaatatttgtagttgctgatgatccaccgatagggagccactggacggggtgtcggttgaagaagggccagggaggaacgacaaggaggaaggtcagggctgtgcctgcgagaccgatcttgagggcgagggcgatatcttggaggaagaagccgacgaggaaggatatggcctagcagcaggggactgacgttagtattttgtcgagcgcatcgctgataggcgcgatggagaggatgaatagacgtacgccgactacagaaaggagaatggttgctaattgatcggctagcttctggccctcgaagtcctacaggcaaatggtaagtccgtatgagcgacgcaagtcacatagcttggggattggtgatagacgcacaatttggccttcgacaacgtcacgcacttggtcgagaagctgttccgccatgattgtgcactagttgggtgactaggtccagatgtaggcccttgataagatttatgtaagttgctggagttgtggtagcagtgatctgttactttgtcttgaatattggatactaggcaagcgtggtaagtggttcaaggtatcgcgatgtgtggagcggcgacgtggtccaatggcccttggcaggtaccttgtggggcccgggctagtgctgggatgcgccaaacattgaatttcgc

SEQ ID NO: 15870 - DNA, 324 bp, Muscodor strobelii
  misc_feature: SGI cDNA ID NO. 565265
  misc_feature: Reduced expression when VOC is produced
  misc_feature: Encodes the peptide sequence at SEQ ID NO 15871
atggcggaacagcttctcgaccaagtgcgtgacgttgtcgaaggccaaattgacttcgagggccagaagctagccgatcaattagcaaccattctcctttctgtagtcggcgccatatccttcctcgtcggcttcttcctccaagatatcgccctcgccctcaagatcggtctcgcaggcacagccctgaccttcctccttgtcgttcctccctggcccttcttcaaccgacaccccgtccagtggctccctatcggtggatcatcagcaactacaaatattcccagcaacatagtcatagacgagaagatgttggcaaaatag

SEQ ID NO: 15871 - protein, 107 aa, Muscodor strobelii
  misc_feature: SGI Peptide ID NO. 565265
  misc_feature (17)..(93): Pfam Id: PF06645 Pfam Desc: Microsomal signal peptidase 12 kDa subunit (SPC12)
  misc_feature (17)..(84): Pfam Id: PF06645 Pfam Desc: Microsomal signal peptidase 12 kDa subunit (SPC12)
  misc_feature (1)..(105): NCBI GI: 145614292 Blast Desc: MGG_11330 [Magnaporthe grisea 70-15] gi|145021221|gb|EDK05350.1| MGG_11330 [Magnaporthe grisea 70-15]
  misc_feature (1)..(103): NCBI GI: 164425238 Blast Desc: NCU11313 [Neurospora crassa OR74A] gi|157070846|gb|EDO65123.1| conserved [Neurospora crassa OR74A]
  misc_feature (1)..(105): NCBI GI: 116192219 Blast Desc: CHGG_05827 [Chaetomium globosum CBS 148.51] gi|88181740|gb|EAQ89208.1| CHGG_05827 [Chaetomium globosum CBS 148.51]
  misc_feature (1)..(105): NCBI GI: 171686596 Blast Desc: protein product [Podospora anserina] gi|170943259|emb|CAP68912.1| protein product [Podospora anserina]
  misc_feature (1)..(106): NCBI GI: 154298850 Blast Desc: microsomal signal peptidase 12kDa subunit [Botryotinia fuckeliana B05.10] gi|150857577|gb|EDN32769.1| microsomal signal peptidase 12kDa subunit [Botryotinia fuckeliana B05.10]
  misc_feature (1)..(106): NCBI GI: 156064037 Blast Desc: SS1G_00026 [Sclerotinia sclerotiorum 1980] gi|154690888|gb|EDN90626.1| SS1G_00026 [Sclerotinia sclerotiorum 1980]
  misc_feature (1)..(86): NCBI GI: 256725815 Blast Desc: [Nectria haematococca mpVI 77-13-4]
  misc_feature (1)..(94): NCBI GI: 261360102 Blast Desc: microsomal signal peptidase 12kDa subunit [Verticillium albo-atrum VaMs.102]
  misc_feature (1)..(94): NCBI GI: 189189928 Blast Desc: conserved [Pyrenophora tritici-repentis Pt-1C-BFP] gi|187972909|gb|EDU40408.1| conserved [Pyrenophora tritici-repentis Pt-1C-BFP]
  misc_feature (1)..(86): NCBI GI: 46111229 Blast Desc: FG02496.1 [Gibberella zeae PH-1]
  misc_feature: Useful for introducing or modulating the production of volatile compounds
MAEQLLDQVRDVVEGQIDFEGQKLADQLATILLSVVGAISFLVGFFLQDIALALKIGLAGTALTFLLVVPPWPFFNRHPVQWLPIGGSSATTNIPSNIVIDEKMLAK

SEQ ID NO: 15872 - DNA, 1811 bp, Muscodor strobelii
  misc_feature: SGI EST ID NO. CUFF.37611.1
  misc_feature: Variant of the nucleotide sequence at SEQ ID NO 15870
gcgaaattcaatgtttggcgcatcccagcactagcccgggccccacaaggtacctgccaagggccattggaccacgtcgccgctccacacatcgcgataccttgaaccacttaccacgcttgcctagtatccaatattcaagacaaagtaacagatcactgctaccacaactccagcaacttacataaatcttatcaagggcctacatctggacctagtcacccaactagtgcacaatcatggcggaacagcttctcgaccaagtgcgtgacgttgtcgaaggccaaattgacttcgagggccagaagctagccgatcaattagcaaccattctcctttctgtagtcggcgccatatccttcctcgtcggcttcttcctccaagatatcgccctcgccctcaagatcggtctcgcaggcacagccctgaccttcctccttgtcgttcctccctggcccttcttcaaccgacaccccgtccagtggctccctatcggtggatcatcagcaactacaaatattcccagcaacatagtcatagacgagaagatgttggcaaaatagcgggaaggtgcttgagcaaaacagtgatttcttttgcattcatgctatgtactttaggaggcttaaggtgttgctttgatgttgcaaacataagcctcgttggcggaatataggtagcaatctactacccaacacccggacaaatccgagtcctctctagcctgtgatgccgttgggcaattctgttcgtgttccctccgtcgtgactttctcgtgatgcccgtgaggcttcgtctactcatgacacgttcacgccctcgcgagaacactactaagcgtgctgcatggatccatatgggcccccttttcccttgccttccttcctgagccttaccatctcgaccacaggactaacggccgtacttctggaactcccagtctctgttgtcgagggggcagacatgacgggccttgagccatctagagatgcagtggaaatggaaggcgtgctatttcatgagacaactagtcagtgatatgatcaggaaagaagtgtgaatttcagcggcgtacattgcagataccccaggccacagtgcactcctcgctcgtagcggaggcctggttggcctggcactcgatgcacaggtccatgatgtggttgcggcagatggcgcagttgtcgacgacaatgtcccaggcccacagagcaacggcgttccactgcgagacggtgtgtcagcacgtcatgagggcaatgtagaggttggaggggtggaatcaccttcttgacctcgaatcgctgcttggcctcgttcttaccgtcggcagcagcgcccttggcacgcttggggactacagcggaattgctgggagcatcggtcatgtcgacgtcggccatcttctaccagtgtggaaagctgggatactgatattgttgagattcagcgtgatgttttataaggagccggagtggtcacgaggtggtagtgtcgtttggctctatgtcacagctactggcagctgttttgtagagaggaaccacggcggttctggatggacggtagatggtaacgccagtaatctgctgtgcacaatgtacaatgcgcaaatagatgtacgaatgcctgagcgtgaactgctttgctatagatgggctactcaactacatgtaccttaggtacactacaggttgcccgtcaaggttgctaggctgaagcaagctgagataccagagataggtagacaaggcaagcgaagcgggttggaggaggctgtagcacccacccgaacacctaagtaggtact

SEQ ID NO: 15873 - DNA, 1884 bp, Muscodor strobelii
  misc_feature: SGI cDNA ID NO. 565266
  misc_feature: Reduced expression when VOC is produced
  misc_feature: Encodes the peptide sequence at SEQ ID NO 15874
atgtccgaccacgaaggaagctccggtcgaagcttcgcgaccccggtccccgagctcgacgatcaccgccgccaggggtcctccgcgcagaggcttgaacgtcctcgccgtggcactgttgacactctctatggctctcgcttgcatctagatgttgagagcccctattcgcccaacgatgtcaaagttcgtgacttcaatgaagaggctataattgacgaagaagataacgacgattcgcccatcattccccacggccgacgtccgacttttacatccaccaacgagcgagctgtttcgcctcccaactcggtcaaggccttcgccgaggcacgtcgtcgtgaccgtgctctctcaatctcagacggccgagccctgaatggagaagacggcgagactcttcagcgcacattttccaatgccagtcgaaacagccatcgtagcgggagatctgggcgaagcaggcccgtgaccttcgccgacgatgcagcgtccttggctaccaacaagaccgcggaggaggatgtctgcttccctattcaagacgaacaccgtcacgatcagctctatatcgacttcgattggcttgagcatttcatccaactggaaactgctgcgaacagggacagggacagcctcgaggcaccgcaagctcccaaagtgttctcccctgtacagcatgaaaatagcgctgcgacattcactgcagatggtgacttcatccacataccctctagctcctcggagaccgacgacaagccttccaaggtgatcgatgaacccctacctcccatggccgcaagtgttaaggaccaggaccatgtggaccccaaccgatactgctttttctcgtctgcctgggagtctaccgtacatgcgtctgaattcggtgacctggtcctacctggtgaggacgtccgcaacatgttctccttccctcgcgatgaaccggatggagtgtggtggctgaatgtgaacatgcccacggaggaagaagttcggggactatgcaaagcattcggcgtgcaccctttgacgattgaagatatcacgacccaggaaatccgcgagaagattgagatattcccttcgtactattttgccagttttcgatccttcaacgtcgtccaggaggaggatggcccggactatgaagcgtacaacatatacgtgatcgtgtggcgtgagggcacactctccttcagctaccagcccaacggccacgcctctcaggtccggaagagaatcaccaatctgaaggagtatgtgtcgctgagcagcgattggatctgctatgctttgattgataatattgtcgattcgtttgcccctgccatcacccgtattgagatggaaactgaatctattgaggattcggttttcgtggcacgcagtgatgacatgcatttgttcctacgcagactcggcaacatccgcaagaacacattggcactgatgcgggttctgggcggcaaagccgacgtcctgaaaggcttcgggaagcgatgcaacgaggacttcaaggtcacaccccgtatggatatcgccatgtacctgggcgacattcaggatcacgtcgtcactatgatgaataacttgactcactttgagaaaattttgtcccgagcccacagcaattatctaggtcagctcacaattgacagcatgtctcagggaacaaagacgaatgccgcgctcaccaagatcacgttcattgccactgtcattgtccccttgaatatcgtaaccggtctgttcggcatgaacgtccttgttccattcagagatgccgagagccttgcgccattctttggcattgttggtgttttggtcgtcttcgtggccgcttgtctgttcctggcccgtcgtctgcgattgatttag

SEQ ID NO: 15874 - protein, 627 aa, Muscodor strobelii
  misc_feature: SGI Peptide ID NO. 565266
  misc_feature (319)..(627): Pfam Id: PF01544 Pfam Desc: CorA-like Mg2+ transporter protein
  misc_feature (1)..(625): NCBI GI: 116192221 Blast Desc: CHGG_05828 [Chaetomium globosum CBS 148.51] gi|88181741|gb|EAQ89209.1| CHGG_05828 [Chaetomium globosum CBS 148.51]
  misc_feature (1)..(627): NCBI GI: 39953592 Blast Desc: MGG_08843 [Magnaporthe grisea 70-15] gi|145021222|gb|EDK05351.1| MGG_08843 [Magnaporthe grisea 70-15]
  misc_feature (1)..(627): NCBI GI: 256726218 Blast Desc: [Nectria haematococca mpVI 77-13-4]
  misc_feature (1)..(627): NCBI GI: 46111227 Blast Desc: FG02495.1 [Gibberella zeae PH-1]
  misc_feature (1)..(627): NCBI GI: 261360103 Blast Desc: magnesium transporter ALR1 [Verticillium albo-atrum VaMs.102]
  misc_feature (1)..(627): NCBI GI: 171686594 Blast Desc: protein product [Podospora anserina] gi|170943258|emb|CAP68911.1| protein product [Podospora anserina]
  misc_feature (1)..(625): NCBI GI: 164425236 Blast Desc: NCU11312 [Neurospora crassa OR74A] gi|157070845|gb|EDO65122.1| conserved [Neurospora crassa OR74A]
  misc_feature (1)..(627): NCBI GI: 154298854 Blast Desc: BC1G_11674 [Botryotinia fuckeliana B05.10] gi|150857579|gb|EDN32771.1| BC1G_11674 [Botryotinia fuckeliana B05.10]
  misc_feature (1)..(582): NCBI GI: 156064035 Blast Desc: SS1G_00025 [Sclerotinia sclerotiorum 1980] gi|154690887|gb|EDN90625.1| SS1G_00025 [Sclerotinia sclerotiorum 1980]
  misc_feature (97)..(627): NCBI GI: 261359299 Blast Desc: magnesium transporter ALR1 [Verticillium albo-atrum VaMs.102]
  misc_feature: Useful for introducing or modulating the production of volatile compounds
MSDHEGSSGRSFATPVPELDDHRRQGSSAQRLERPRRGTVDTLYGSRLHLDVESPYSPNDVKVRDFNEEAIIDEEDNDDSPIIPHGRRPTFTSTNERAVSPPNSVKAFAEARRRDRALSISDGRALNGEDGETLQRTFSNASRNSHRSGRSGRSRPVTFADDAASLATNKTAEEDVCFPIQDEHRHDQLYIDFDWLEHFIQLETAANRDRDSLEAPQAPKVFSPVQHENSAATFTADGDFIHIPSSSSETDDKPSKVIDEPLPPMAASVKDQDHVDPNRYCFFSSAWESTVHASEFGDLVLPGEDVRNMFSFPRDEPDGVWWLNVNMPTEEEVRGLCKAFGVHPLTIEDITTQEIREKIEIFPSYYFASFRSFNVVQEEDGPDYEAYNIYVIVWREGTLSFSYQPNGHASQVRKRITNLKEYVSLSSDWICYALIDNIVDSFAPAITRIEMETESIEDSVFVARSDDMHLFLRRLGNIRKNTLALMRVLGGKADVLKGFGKRCNEDFKVTPRMDIAMYLGDIQDHVVTMMNNLTHFEKILSRAHSNYLGQLTIDSMSQGTKTNAALTKITFIATVIVPLNIVTGLFGMNVLVPFRDAESLAPFFGIVGVLVVFVAACLFLARRLRLI

SEQ ID NO: 15875 - DNA, 2982 bp, Muscodor strobelii
  misc_feature: SGI EST ID NO. CUFF.37553.0
  misc_feature: Variant of the nucleotide sequence at SEQ ID NO 15873
ctgcactaccccgatccattcagcgctgattttcatcctctgccctttctccgccgccctctctaattgcacacacttcacaacattccctcttcacattttttgttctcctcactccacaccaggacaacacaacatcttggtcttctgcccttgtcatttgcatttgcacttgcaaccaagaagcaaacaatctcttttgcatctctgcgtacttcttgagccccatccacactccgccagttgctgcccacttgccatccacagctctcagcagtctgtcctgcagcttgatacacagtcaccgccactgctcaccctcaccctcgatacttcgagtattttcgactatcggccttcgctgaacaacacgaggcgtacacaacagtcacaacttgtcctatttctttcgctgccaggagtacctagcaacgtccgaacttgatcaacgtccttagacgagatcgaatacacgcgccatattccatccgcgactcagctgggcttgcccatatccctttccaaacctccaagttggcgggcttcaatagcgacaagttttccttctctcgaccgcttctaggccctctctgctgggtctacagcggcgttgatacgaagcctccctaactcgccttggacaacccgcaattttgtcgccatcaccaagttccagtcccactgcttgctcagtccggagtctgtttatacgcaagtctcgacctgtgctcttgttttacactgcggctggtctcaacacacagctttcgagcagtgggcgtgctgctacgccttctgcgacccacgaatgctgcagtactaggagctctctcactatgcgcgccttcgtctaagccatcgaaggccttttcccctatccgaccccctcccttccaccgtgccattgcatagactgctcgccgtctttcctcttacacacatagataccatagatccagcatcatgtccgaccacgaaggaagctccggtcgaagcttcgcgaccccggtccccgagctcgacgatcaccgccgccaggggtcctccgcgcagaggcttgaacgtcctcgccgtggcactgttgacactctctatggctctcgcttgcatctagatgttgagagcccctattcgcccaacgatgtcaaagttcgtgacttcaatgaagaggctataattgacgaagaagataacgacgattcgcccatcattccccacggccgacgtccgacttttacatccaccaacgagcgagctgtttcgcctcccaactcggtcaaggccttcgccgaggcacgtcgtcgtgaccgtgctctctcaatctcagacggccgagccctgaatggagaagacggcgagactcttcagcgcacattttccaatgccagtcgaaacagccatcgtagcgggagatctgggcgaagcaggcccgtgaccttcgccgacgatgcagcgtccttggctaccaacaagaccgcggaggaggatgtctgcttccctattcaagacgaacaccgtcacgatcagctctatatcgacttcgattggcttgagcatttcatccaactggaaactgctgcgaacagggacagggacagcctcgaggcaccgcaagctcccaaagtgttctcccctgtacagcatgaaaatagcgctgcgacattcactgcagatggtgacttcatccacataccctctagctcctcggagaccgacgacaagccttccaaggtgatcgatgaacccctacctcccatggccgcaagtgttaaggaccaggaccatgtggaccccaaccgatactgctttttctcgtctgcctgggagtctaccgtacatgcgtctgaattcggtgacctggtcctacctggtgaggacgtccgcaacatgttctccttccctcgcgatgaaccggatggagtgtggtggctgaatgtgaacatgcccacggaggaagaagttcggggactatgcaaagcattcggcgtgcaccctttgacgattgaagatatcacgacccaggaaatccgcgagaagattgagatattcccttcgtactattttgccagttttcgatccttcaacgtcgtccaggaggaggatggcccggactatgaagcgtacaacatatacgtgatcgtgtggcgtgagggcacactctccttcagctaccagcccaacggccacgcctctcaggtccggaagagaatcaccaatctgaaggagtatgtgtcgctgagcagcgattggatctgctatgctttgattgataatattgtcgattcgtttgcccctgccatcacccgtattgagatggaaactgaatctattgaggattcggttttcgtggcacgcagtgatgacatgcatttgttcctacgcagactcggcaacatccgcaagaacacattggcactgatgcgggttctgggcggcaaagccgacgtcctgaaaggcttcgggaagcgatgcaacgaggacttcaaggtcacaccccgtatggatatcgccatgtacctgggcgacattcaggatcacgtcgtcactatgatgaataacttgactcactttgagaaaattttgtcccgagcccacagcaattatctaggtcagctcacaattgacagcatgtctcagggaacaaagacgaatgccgcgctcaccaagatcacgttcattgccactgtcattgtccccttgaatatcgtaaccggtctgttcggcatgaacgtccttgttccattcagagatgccgagagccttgcgccattctttggcattgttggtgttttggtcgtcttcgtggccgcttgtctgttcctggcccgtcgtctgcgattgatttagagcgcgcaacagctatctttcctctcagcgttagctatagataaatagactttaataactttcccatccagaacgtgctctacgtttttgtcccattaatcatgagtgaaacggagttgattacgaatcaaaagc

SEQ ID NO: 15876 - DNA, 807 bp, Muscodor strobelii
  misc_feature: SGI cDNA ID NO. 565267
  misc_feature: Encodes the peptide sequence at SEQ ID NO 15877
atggcgtccggatacgatcgagctctttcagtcttcagtcccgatggacatgtgttccaagtcgagtatgccggcgaagctgtgaagagaggaacctgcgctgttggcgtcaagggcagcgatatcgtcgtcctcggctgtgagaagagatcggctatgaaactgcaggatacccgcatcacaccttccaaaatcggccttgtagacacccacgtatgcctcgccttcgccggcttgaacgccgatgcccgcattctcgtcgacaaggcccgtctcgaggcccagtcgcatcgtctgaccgtcgaggatcccgtcaccatcgactacatcacaaaatacattgctggagtacagcagcgatacacgcagagtggcggtgtccggcccttcggtattagcactatggttgttggcttcgacaagggcagcaccgtccccagactctaccagaccgagcccagtggcatctactccgcatggaaagcaaatgccattggtcgctcgagcaagacggttcgtgaattcctggagcgaaactacaaggaggacatggatcgtgaggccacaatccgattggccatcaagtcgctgctggaagtcgttcagacgggcgctaagaacatcgagatcgccatcatggctccgggcaagaccatagagatgctaccggtcgaggacatcgagacgtacgtcaagaacatcgagcaggagaaacaggaggaggctgccaagaagaagaccggtcggacaccgggcaccggcagtgccgccattctcacgagaggaggagagggcagtagttcatag

SEQ ID NO: 15877 - protein, 268 aa, Muscodor strobelii
  misc_feature: SGI Peptide ID NO. 565267
  misc_feature (28)..(213): Pfam Id: PF00227 Pfam Desc: Proteasome A-type and B-type
  misc_feature (1)..(261): NCBI GI: 39977139 Blast Desc: conserved [Magnaporthe grisea 70-15] gi|145016108|gb|EDK00598.1| conserved [Magnaporthe grisea 70-15]
  misc_feature (1)..(268): NCBI GI: 212534950 Blast Desc: proteasome component Pre6, [Penicillium marneffei ATCC 18224] gi|210070030|gb|EEA24120.1| proteasome component Pre6, [Penicillium marneffei ATCC 18224]
  misc_feature (1)..(268): NCBI GI: 242791663 Blast Desc: proteasome component Pre6, [Talaromyces stipitatus ATCC 10500] gi|218718391|gb|EED17811.1| proteasome component Pre6, [Talaromyces stipitatus ATCC 10500]
  misc_feature (1)..(268): NCBI GI: 119182842 Blast Desc: conserved [Coccidioides immitis RS] gi|240109415|gb|EER27584.1| proteasome component, [Coccidioides posadasii C735 delta SOWgp]
  misc_feature (1)..(268): NCBI GI: 226291209 Blast Desc: proteasome component PRE6 [Paracoccidioides brasiliensis Pb18]
  misc_feature (1)..(268): NCBI GI: 154285012 Blast Desc: proteasome component PRE6 [Ajellomyces capsulatus NAm1] gi|150406942|gb|EDN02483.1| proteasome component PRE6 [Ajellomyces capsulatus NAm1] gi|240277485|gb|EER40993.1| PRE6
  misc_feature (1)..(268): NCBI GI: 261202850 Blast Desc: proteasome component PRE6 [Ajellomyces dermatitidis SLH14081] gi|239590736|gb|EEQ73317.1| proteasome component PRE6 [Ajellomyces dermatitidis SLH14081] gi|239612457|gb|EEQ89444.1|
  misc_feature (1)..(268): NCBI GI: 226281680 Blast Desc: proteasome component PRE6 [Paracoccidioides brasiliensis Pb01]
  misc_feature (13)..(261): NCBI GI: 171686844 Blast Desc: protein product [Podospora anserina] gi|170943383|emb|CAP69036.1| protein product [Podospora anserina]
  misc_feature (1)..(268): NCBI GI: 156050233 Blast Desc: SS1G_07703 [Sclerotinia sclerotiorum 1980] gi|154692104|gb|EDN91842.1| SS1G_07703 [Sclerotinia sclerotiorum 1980]
  misc_feature (3)..(234): SWISSPROT Homolog: EC 3.4.25.1 Proteasome endopeptidase complex
MASGYDRALSVFSPDGHVFQVEYAGEAVKRGTCAVGVKGSDIVVLGCEKRSAMKLQDTRITPSKIGLVDTHVCLAFAGLNADARILVDKARLEAQSHRLTVEDPVTIDYITKYIAGVQQRYTQSGGVRPFGISTMVVGFDKGSTVPRLYQTEPSGIYSAWKANAIGRSSKTVREFLERNYKEDMDREATIRLAIKSLLEVVQTGAKNIEIAIMAPGKTIEMLPVEDIETYVKNIEQEKQEEAAKKKTGRTPGTGSAAILTRGGEGSSS

SEQ ID NO: 15878 - DNA, 4807 bp, Muscodor strobelii
  misc_feature: SGI EST ID NO. CUFF.37915.1
  misc_feature: Variant of the nucleotide sequence at SEQ ID NO 15876
gcaagcattggcaaccagcagcagcttgggggggagcttcgtaacttctggcagccttgcggatgaactcatcccaaacacactgtacgaagaccacgacacgacacacaaccacccttcctctcacccccctccaccactcaatcttgcccgccactgtctcaacactttcagatacccttcacaatggcgtccggatacgatcgagctctttcagtcttcagtcccgatggacatgtgttccaagtcgagtatgccggcgaagctgtgaagagaggaacctgcgctgttggcgtcaagggcagcgatatcgtcgtcctcggctgtgagaagagatcggctatgaaactgcaggatacccgcatcacaccttccaaaatcggccttgtagacacccacgtatgcctcgccttcgccggcttgaacgccgatgcccgcattctcgtcgacaaggcccgtctcgaggcccagtcgcatcgtctgaccgtcgaggatcccgtcaccatcgactacatcacaaaatacattgctggagtacagcagcgatacacgcagagtggcggtgtccggcccttcggtattagcactatggttgttggcttcgacaagggcagcaccgtccccagactctaccagaccgagcccagtggcatctactccgcatggaaagcaaatgccattggtcgctcgagcaagacggttcgtgaattcctggagcgaaactacaaggaggacatggatcgtgaggccacaatccgattggccatcaagtcgctgctggaagtcgttcagacgggcgctaagaacatcgagatcgccatcatggctccgggcaagaccatagagatgctaccggtcgaggacatcgagacgtacgtcaagaacatcgagcaggagaaacaggaggaggctgccaagaagaagaccggtcggacaccgggcaccggcagtgccgccattctcacgagaggaggagagggcagtagttcataggttattctgggaggcatgatgaagaagtcctgagtcgaggttatgactggcgttgcatgggcgaaatgaaacctagagcgttctctcagatagatgtacaataatgaaaaccgggatcgatcatgtcagccttgttggcattcgtctggattcttggtctcgtcatgtctaaaaatgtggtatcatatatgaagttcagtcgctcttgcacttcctttctcgaatatctctctcctgtcccgcaccgatatacagtctcaacacgtcgcattgcccaacttggcaacatccattcatcccagtttatcggcatcgctctggatatcaaagatggtccgatgctcgttattcttgacacgctcgtccttcaacatgcggttgtccatgcgggcgtcctcgccctcgacccttagagcgggcttcgggatgacggcctcgatgacgaagtggttatcgcagtgggggcagtactcgtcggcctcctcgaactcctgggcgtctttgcggaagcacttcttacacttcttgcatgcgaacgtcatctcgaagacttgtagtagggcgtgtgactcttgctcttggtggcattctgcgcagtcaaaccatttcttgcctacgtttgtcgttgtgcgtgagtcgtgggttcggagagagaggtttcaggggtaattaacggccgacgtacaacagggggagcgtaccgccacttgggcattgaggatgtgtttactttggcggtgtcagttcatgtgatatttggtctggagggcgcttgaatcttaccacatgatctcggctcatatacttgagatgattgtcaggtaaagagaggaacccaatatgaacaatttgacggcggacttggcttggctggacacctccggcgcggtcacgaaattttggacgctgaggcggattggtaatgcggggtgctactgattggcctcttagcatcccgctattgtggggttgaagtacgttaccccgtgcagccacacttgagtttggatactacagtctctcttctacaaatacatgtatgtaactcatacctccttgctgctatgtcccatgagatagctaagtagctaagtagctaagctatgtgtgtgcctgccaagtgattggacaacaccaaagaagaagaaaggggcgacaggcagccattagcggatgtatctccttagatgtcatatcacgcggacaattttttacgagacttgatgtggcatcctcaatcttcttaaataccacacgtatacatagaatgcgtctctataggtaacacaaatgcttgatttacaccgacgaaaggctttggtactctacgtgtatcatttcgatcaacggcatactcacgtcctgatcagagttcactagggatatggtgtaaaattgtattataggcgaaggggtacactgttgtgaaaggttctctaagcctctatgcagtggtacaggattcaagctatcaccccatacaatcccccacaagccttactctgacaatagactgttcataatcgttcctcgtacttcgtacttcgtggttcctgcaatgaagcctttcaacgccgtatgctgtgttcttaatcagacaatgcgcatccgaatcctggtcttttgcttggtgatccaagcacctcttaatttcaccagagcccatcgtattccgcagttttccaaatttgattggcttgctctaccgggaagtcgtattattgcgcagctcaaccattttgagggcttgtgtgcgtggggtcgagtggtcattttctatgctctgaagcagttaaatttgccgaaggagaatcgccagggaccacgatgcacgccacgacggtcggcatggaccgatgtaccaaagtgtcttcccccaataccctttgagtagaagagaggcattctcgattgattctgtatttgacgaatcggcggggtatggtcaagttgtgtatgcgaactgctagatcagacagaacatcagtaaagtatcgggcgcaatttacaagacgaagtgatacttacgttgatttttcacaatctagatgaacggagtttaggcttgagaggtttgagaagcgtaaattagaaaagacgattcctgaacgagcgacacgatgaatctttatcctccaaaatcgtctgggcattcatcatatgttggccgcttgtaacagctgatccaccagggttctcctgcctggatgtaaaccttggtgacgcagctacgtcactgctcaggaatccggcgcaacttggaaattgatcgttttaggcattgccaaaatctccgattggctctgattgagcttggcatcggatcgcctgtcaatcataccaggaccctgacgtgcttgaccactcagcactgaagccaagcatggtctataatactgtttcatgatgcctacacacgtatttctagtgtatgtcaggtttaaaccagcgtaaccaagtaatctcaagatcttcaaccagtagcccaataccaatcctgtcatacgtaggatacagttcgtaatttcttgggctattgagcatatcactagatagtgccaagttgccattgccagcttctatttaatgcatatagactaaagcgccatccacgagcatttctccgccgcttgaaagtcaataaattgcgattacacgcaggcattgtcatttgcgcctttctcagctggcgcgggaggacttgaagactcgtagacaaactagacgtggaaatcattgattcccaatcttgacatattttgcctatggcttatttaaagcgtaactgcgggggtttatcttaatctagcaacggtaaaaagagaaataagatgctggtttaacacgatcgacgaacgagaaacgaagagaaacagggccttcgtgtccgctgtccagcccgatcgcgtataaagtgccattgccagttgggggaaaacaagattttaggctttctccttggcggcgtccagtaaagctgactcaaagcctacggtgaaggagacacaatcgtgaaagttgttatagattggagcgggtgcaactcggatgacatttggttttctctcatccacaatgatgccgcgttcttccagtccgtgcattgttgccgttaacaagccatcctcaagtaacaggcagagctgagcacctcgctgcattggatcagacggtgtgatgattctaaaaagtttctttgcatcgggctgtataaagcttaaacacttctcgaggaaggccgtcaatcgcaaagatttctcacgaagaggcgccatgccacctgcgagctcgaatagttccaaggacgcagtaacgcttgtgatgtcgagaacgctggggttgctaagctgaaacccggctgctcctttgaccggatggaactgattctccatcttgaaccgagttgccttatcgtttccccaccatcccgagagcctgttgctgtatcctcgttcgggctcattgtcttcctgcatagtagatactaggctgttccgtgaatgaacgaatgcacccccgatgcttcctggcccaccattgagatacttgtacgtacaccatgcggctgcgtctacgtcccagtcatgtagagagagaggcacatttcccgcagcatgagcgagatcccagataatgaagatgcccttctcacgggcaaatgcagtaatactagggatatcgaggagttgacccgaatagtattgaatgcccggtaaaagtatgagtgcggtgtctgcggcatgctttaaaataattgacttgatgagatcggtactaataactgggtcctcagcagagggtgactcgattgtca

SEQ ID NO: 15879 - DNA, 2523 bp, Muscodor strobelii
  misc_feature: SGI cDNA ID NO. 565268
  misc_feature: Encodes the peptide sequence at SEQ ID NO 15880
atgcctcccagctatgggcgccaatgcggaggatacgaacgagaaactgtctttatcgttggcacgcaagatgagaaagggagggtcggttcgcatccgccacggacgcctcaaagctcaagcagcagcatgcacgagagtacaagccaacaggtcgaaaaacttgattttgtagcggtccaaccaccgcaaccggcctggaacgagaacattgtgttgaaatttggcgaaagtcaaaggcttgttcgggtcgtctcaaaacatgctgatctggaatcgtctatgctacccataagtccatcctcgcgaggtaatggatcattcctgtcactggttgagaactccaaactgtttgacgttactccaacgtttgagcgcgaaatcttcagcttgcaatgtttctgcttaatccactggcccgataacgagacaagccatacacaggattcggtagatggactctgcctattcctatacgaacaaaattcttcgtccgtctacgaaaatccggcctcatgggaaaagtcgtcagcacttgcagatccaatccgagcaatggggccggcagcttttcagtcgttccctgcgcatcattttttcgcccgtgtttatcgacctagtgctatctggactgctcttctgaatcaccagccgacttttttgtgcaatccggaatggaccatagtgccatgggagcgtcaaccgagaacaacattggatgatttgctagatatagtagtactcttaccgtcgctattttctcaagccgccggattgacagaggaagagccaagtgcgcagagccgatcgcgggcaatagaattgctccgtagcagcgggaccatcgagtcacagttcgaaatttggcaacagatgttggcagcttcgctccagactgcggcgttctggccagattccgctgcaactggacaggcaccatttggcgagcctctgtatttcgctagtcctttgctatgtcttgtacatgtatactactggacagttcgtatacaattccatcagttcgtttttggcctgatcgaaagtatggcccctagtaatgatgctgcgccggacctgccggcgggggttgacgtgcggaaatatcagcccacgcagacccgggcgttagctacaatggtgtgccgcagcttagactcggcactcaacatgatggaaggtgagcttttggttgctccggtctggatagtcaaagaattcttcaaaggcaacagaaactctgggagcttcgaatcggagatgcagtggattgcaggatttgagggacgactgcaagaacgcaatcgggcgacgagcacttggttgcaggagaagaaatgggtccactcgacatggagggacctcatgccccgagatgcggctgtgcgtgtggctggagccacaggaggaaagcaggtacgtacccaggtacctcccaaaggcatctggaccttagcgcacctgcccccccagcaagcattggcaaccagcagcagcttgggggggagcttcgtaacttctggcagccttgcggatgaactcatcccaaacacactgtacgaagaccacgacacgacacacaaccacccttcctctcacccccctccaccactcaatcttgcccgccactgtctcaacactttcagatacccttcacaatggcgtccggatacgatcgagctctttcagtcttcaggtttgcattgcgtatcaacacacccagctcctagatactcctttctaacgccgtctagtcccgatggacatgtgttccaagtcgagtatgccggcgaagctgtgaagagaggaacctgcgctgttggcgtcaagggcagcgatatcgtcgtcctcggctgtgagaagagatcggctatgaaactgcaggatacccgcatcacaccttccaaaatcggccttgtagacacccacgtatgcctcgccttcgccggcttgaacgccgatgcccgcattctcgtcgacaaggcccgtctcgaggcccagtcgcatcgtctgaccgtcgaggatcccgtcaccatcgactacatcacaaaatacattgctggagtacagcagcgatacacgcagagtggcggtgtccggcccttcggtattagcactatggttgttggcttcgacaagggcagcaccgtccccagactctaccagaccgagcccagtggcatctactccgcatggaaagcaaatgccattggtcgctcgagcaagacggttcgtgaattcctggagcgaaactacaaggaggacatggatcgtgaggccacaatccgattggccatcaagtcgctgctggaagtcgttcagacgggcgctaagaacatcgagatcgccatcatggctccgggcaagaccatagagatgctaccggtcgaggacatcgagacgtacgtcaagaacatcgagcaggagaaacaggaggaggctgccaagaagaagaccggtcggacaccgggcaccggcagtgccgccattctcacgagaggaggagagggcagtagttcatag

SEQ ID NO: 15880 - protein, 840 aa, Muscodor strobelii
  misc_feature: SGI Peptide ID NO. 565268
  misc_feature (600)..(785): Pfam Id: PF00227 Pfam Desc: Proteasome A-type and B-type
  misc_feature (581)..(833): NCBI GI: 39977139 Blast Desc: conserved [Magnaporthe grisea 70-15] gi|145016108|gb|EDK00598.1| conserved [Magnaporthe grisea 70-15]
  misc_feature (530)..(833): NCBI GI: 171686844 Blast Desc: protein product [Podospora anserina] gi|170943383|emb|CAP69036.1| protein product [Podospora anserina]
  misc_feature (581)..(840): NCBI GI: 212534950 Blast Desc: proteasome component Pre6, [Penicillium marneffei ATCC 18224] gi|210070030|gb|EEA24120.1| proteasome component Pre6, [Penicillium marneffei ATCC 18224]
  misc_feature (581)..(840): NCBI GI: 242791663 Blast Desc: proteasome component Pre6, [Talaromyces stipitatus ATCC 10500] gi|218718391|gb|EED17811.1| proteasome component Pre6, [Talaromyces stipitatus ATCC 10500]
  misc_feature (581)..(840): NCBI GI: 119182842 Blast Desc: conserved [Coccidioides immitis RS] gi|240109415|gb|EER27584.1| proteasome component, [Coccidioides posadasii C735 delta SOWgp]
  misc_feature (565)..(840): NCBI GI: 225556940 Blast Desc: proteasome component PRE6 [Ajellomyces capsulatus G186AR]
  misc_feature (581)..(840): NCBI GI: 154285012 Blast Desc: proteasome component PRE6 [Ajellomyces capsulatus NAm1] gi|150406942|gb|EDN02483.1| proteasome component PRE6 [Ajellomyces capsulatus NAm1] gi|240277485|gb|EER40993.1| PRE6
  misc_feature (581)..(840): NCBI GI: 226291209 Blast Desc: proteasome component PRE6 [Paracoccidioides brasiliensis Pb18]
  misc_feature (575)..(840): NCBI GI: 225679479 Blast Desc: proteasome subunit alpha type-7 [Paracoccidioides brasiliensis Pb03]
  misc_feature (581)..(840): NCBI GI: 261202850 Blast Desc: proteasome component PRE6 [Ajellomyces dermatitidis SLH14081] gi|239590736|gb|EEQ73317.1| proteasome component PRE6 [Ajellomyces dermatitidis SLH14081] gi|239612457|gb|EEQ89444.1|
MPPSYGRQCGGYERETVFIVGTQDEKGRVGSHPPRTPQSSSSSMHESTSQQVEKLDFVAVQPPQPAWNENIVLKFGESQRLVRVVSKHADLESSMLPISPSSRGNGSFLSLVENSKLFDVTPTFEREIFSLQCFCLIHWPDNETSHTQDSVDGLCLFLYEQNSSSVYENPASWEKSSALADPIRAMGPAAFQSFPAHHFFARVYRPSAIWTALLNHQPTFLCNPEWTIVPWERQPRTTLDDLLDIVVLLPSLFSQAAGLTEEEPSAQSRSRAIELLRSSGTIESQFEIWQQMLAASLQTAAFWPDSAATGQAPFGEPLYFASPLLCLVHVYYWTVRIQFHQFVFGLIESMAPSNDAAPDLPAGVDVRKYQPTQTRALATMVCRSLDSALNMMEGELLVAPVWIVKEFFKGNRNSGSFESEMQWIAGFEGRLQERNRATSTWLQEKKWVHSTWRDLMPRDAAVRVAGATGGKQVRTQVPPKGIWTLAHLPPQQALATSSSLGGSFVTSGSLADELIPNTLYEDHDTTHNHPSSHPPPPLNLARHCLNTFRYPSQWRPDTIELFQSSGLHCVSTHPAPRYSFLTPSSPDGHVFQVEYAGEAVKRGTCAVGVKGSDIVVLGCEKRSAMKLQDTRITPSKIGLVDTHVCLAFAGLNADARILVDKARLEAQSHRLTVEDPVTIDYITKYIAGVQQRYTQSGGVRPFGISTMVVGFDKGSTVPRLYQTEPSGIYSAWKANAIGRSSKTVREFLERNYKEDMDREATIRLAIKSLLEVVQTGAKNIEIAIMAPGKTIEMLPVEDIETYVKNIEQEKQEEAAKKKTGRTPGTGSAAILTRGGEGSSS

SEQ ID NO: 15881 - DNA, 2977 bp, Muscodor strobelii
  misc_feature: SGI EST ID NO. CUFF.37574.0
  misc_feature: Variant of the nucleotide sequence at SEQ ID NO 15879
gaaacaactggttaaaagtgcataaaaacaattctaaaactgaagaccctgcaaggagctcgaaagaaccttggaagaagcatgcatggactttttagccgcgtagaattatggagagttctgagcccgtattcatgcgaacacgccccatagtatccattcagctagcaaaatacgggagcgcgcggcgtcggccaagcactttttaggagatggacccttcgcttcgggaactaccaggggtcgacacgacatccgcccaccacctatcggaatgcagatggacaaagagtcccaatctacatgccataccacagagcaagggccaattatttgaaacgaaaccaacaattccgcccagtcgcgccacatagaagagctgtcaattcctgcaggggagtgtcttgttcagtggccggggcattgacatagtcgtctctcgtatcgtcaacctcatggcacggttctcaccgttggtcatcaccaatacgaatgcgcaattccaatttttggatctctatcaagacttcagccaatgcgaagagccagatgggatctttccggccgtcttgcgaaccccatgctccaggaacggcctacagcgtgaagatatagtatgcagccctacggatcggaaacagagaacgtgcacgatgtcgatgtttacgcgagcatgacgtgcggatcgcatctctcaacgtccccccgccgaacggacttagagacttgcggagagatcccccaatcggccagttcgagcatggcggctgatcaggacggcgccgcgctcgcctaatatggtaatcctacctcgtgtatatgttagcatgtcggcgaaatgcaaaatagaaccacactgtagttcctagtaacagccagttggttggcctcctctgtaaagatctctcactccctggtcgaagttgctctcgtgttttagaagtttccttgtcaaccttatttcaaaaggacactcatgagaatgagatcaagttgacttgggcaaggcccaggagatatatgaagggcatcttctggctgagttgaaaacaacgcataccgaagtttgtcgattcgtcaagtcgaacgctggtcgatcttccaacaaatttgttacaccgctcgacgattatgttcattgggtaaagcaaaaaggtcctgcgaggttgaatagagaagatggttggcgttgctgggaaatacaaaggttgcaatacgtgccgcgcgagacgagttaaatgcgataacacgaggccattttgccagaaatgcactttggtatgtagagcaagggttcaactcatcgttatgaacgttagaagctaacttcgtgtcacaaagtaagcagtattgatctcggtagcgaacagatcatcaaatcgtcgattccggtgacattgacttaaactgacaatgcctcccagctatgggcgccaatgcggaggatacgaacgagaaactgtctttatcgttggcacgcaagatgagaaagggagggtcggttcgcatccgccacggacgcctcaaagctcaagcagcagcatgcacgagagtacaagccaacaggtcgaaaaacttgattttgtagcggtccaaccaccgcaaccggcctggaacgagaacattgtgttgaaatttggcgaaagtcaaaggcttgttcgggtcgtctcaaaacatgctgatctggaatcgtctatgctacccataagtccatcctcgcgaggtaatggatcattcctgtcactggttgagaactccaaactgtttgacgttactccaacgtttgagcgcgaaatcttcagcttgcaatgtttctgcttaatccactggcccgataacgagacaagccatacacaggattcggtagatggactctgcctattcctatacgaacaaaattcttcgtccgtctacgaaaatccggcctcatgggaaaagtcgtcagcacttgcagatccaatccgagcaatggggccggcagcttttcagtcgttccctgcgcatcattttttcgcccgtgtttatcgacctagtgctatctggactgctcttctgaatcaccagccgacttttttgtgcaatccggaatggaccatagtgccatgggagcgtcaaccgagaacaacattggatgatttgctagatatagtagtactcttaccgtcgctattttctcaagccgccggattgacagaggaagagccaagtgcgcagagccgatcgcgggcaatagaattgctccgtagcagcgggaccatcgagtcacagttcgaaatttggcaacagatgttggcagcttcgctccagactgcggcgttctggccagattccgctgcaactggacaggcaccatttggcgagcctctgtatttcgctagtcctttgctatgtcttgtacatgtatactactggacagttcgtatacaattccatcagttcgtttttggcctgatcgaaagtatggcccctagtaatgatgctgcgccggacctgccggcgggggttgacgtgcggaaatatcagcccacgcagacccgggcgttagctacaatggtgtgccgcagcttagactcggcactcaacatgatggaaggtgagcttttggttgctccggtctggatagtcaaagaattcttcaaaggcaacagaaactctgggagcttcgaatcggagatgcagtggattgcaggatttgagggacgactgcaagaacgcaatcgggcgacgagcacttggttgcaggagaagaaatgggtccacgttcaacgattcggatgatgcgagctatgggcagtcgactcgaagcaggtcttcagagtataatcttggtgttttatatgagtagtgtacgatggagaagacgacaaaaattggctcgttatgtatctgtaagttagagacggatgatccggtatgattacatgagtattttgtctttttgtagttgaagaaccttgaagctttggcggggtccaag

SEQ ID NO: 15882 - DNA, 369 bp, Muscodor strobelii
  misc_feature: SGI cDNA ID NO. 565269
  misc_feature: Encodes the peptide sequence at SEQ ID NO 15883
atgtgtaaacacatcctcaatgcccaagtggcggtacgctccccctgttgcaagaaatggtttgactgcgcagaatgccaccaagagcaagagtcacacgccctactacaagtcttcgagatgacgttcgcatgcaagaagtgtaagaagtgcttccgcaaagacgcccaggagttcgaggaggccgacgagtactgcccccactgcgataaccacttcgtcatcgaggccgtcatcccgaagcccgctctaagggtcgagggcgaggacgcccgcatggacaaccgcatgttgaaggacgagcgtgtcaagaataacgagcatcggaccatctttgatatccagagcgatgccgataaactgggatga

SEQ ID NO: 15883 - protein, 122 aa, Muscodor strobelii
  misc_feature: SGI Peptide ID NO. 565269
  misc_feature (2)..(73): Pfam Id: PF05495 Pfam Desc: CHY zinc finger
  misc_feature (3)..(122): NCBI GI: 240277484 Blast Desc: conserved [Ajellomyces capsulatus H143]
  misc_feature (1)..(122): NCBI GI: 261354294 Blast Desc: zinc finger protein [Verticillium albo-atrum VaMs.102]
  misc_feature (1)..(122): NCBI GI: 225679480 Blast Desc: conserved [Paracoccidioides brasiliensis Pb03]
  misc_feature (1)..(122): NCBI GI: 225556939 Blast Desc: conserved [Ajellomyces capsulatus G186AR]
  misc_feature (1)..(122): NCBI GI: 154285010 Blast Desc: conserved [Ajellomyces capsulatus NAm1] gi|150406941|gb|EDN02482.1| conserved [Ajellomyces capsulatus NAm1]
  misc_feature (1)..(122): NCBI GI: 238502711 Blast Desc: conserved [Aspergillus flavus NRRL3357] gi|220691399|gb|EED47747.1| conserved [Aspergillus flavus NRRL3357]
  misc_feature (4)..(122): NCBI GI: 240109414 Blast Desc: CPC735_029190 [Coccidioides posadasii C735 delta SOWgp]
  misc_feature (1)..(122): NCBI GI: 145233673 Blast Desc: An02g10800 [Aspergillus niger] gi|134057142|emb|CAK48745.1| protein product [Aspergillus niger]
  misc_feature (1)..(122): NCBI GI: 242791672 Blast Desc: conserved [Talaromyces stipitatus ATCC 10500] gi|218718393|gb|EED17813.1| conserved [Talaromyces stipitatus ATCC 10500]
  misc_feature (3)..(122): NCBI GI: 261202852 Blast Desc: conserved [Ajellomyces dermatitidis SLH14081] gi|239590737|gb|EEQ73318.1| conserved [Ajellomyces dermatitidis SLH14081] gi|239612458|gb|EEQ89445.1| conserved [Ajellomyces
MCKHILNAQVAVRSPCCKKWFDCAECHQEQESHALLQVFEMTFACKKCKKCFRKDAQEFEEADEYCPHCDNHFVIEAVIPKPALRVEGEDARMDNRMLKDERVKNNEHRTIFDIQSDADKLG

SEQ ID NO: 15884 - DNA, 2114 bp, Muscodor strobelii
  misc_feature: SGI EST ID NO. CUFF.37916.2
  misc_feature: Variant of the nucleotide sequence at SEQ ID NO 15882
ccgcattaccaatccgcctcagcgtccaaaatttcgtgaccgcgccggaggtgtccagccaagccaagtccgccgtcaaattgttcatattgggttcctctctttacctgacaatcatctcaagtatatgagccgagatcatgtgtaaacacatcctcaatgcccaagtggcggtacgctccccctgttgtacgtcggccgttaattacccctgaaacctctctctccgaacccacgactcacgcacaacgacaaacgtaggcaagaaatggtttgactgcgcagaatgccaccaagagcaagagtcacacgccctactacaagtcttcgagatgacgttcgcatgcaagaagtgtaagaagtgcttccgcaaagacgcccaggagttcgaggaggccgacgagtactgcccccactgcgataaccacttcgtcatcgaggccgtcatcccgaagcccgctctaagggtcgagggcgaggacgcccgcatggacaaccgcatgttgaaggacgagcgtgtcaagaataacgagcatcggaccatctttgatatccagagcgatgccgataaactgggatgaatggatgttgccaagttgggcaatgcgacgtgttgagactgtatatcggtgcgggacaggagagagatattcgagaaaggaagtgcaagagcgactgaacttcatatatgataccacatttttagacatgacgagaccaagaatccagacgaatgccaacaaggctgacatgatcgatcccggttttcattattgtacatctatctgagagaacgctctaggtttcatttcgcccatgcaacgccagtcataacctcgactcaggacttcttcatcatgcctcccagaataacctatgaactactgccctctcctcctctcgtgagaatggcggcactgccggtgcccggtgtccgaccggtcttcttcttggcagcctcctcctgtttctcctgctcgatgttcttgacgtacgtctcgatgtcctcgaccggtagcatctctatggtcttgcccggagccatgatggcgatctcgatgttcttagcgcccgtctgaacgacttccagcagcgacttgatggccaatcggattgtggcctcacgatccatgtcctccttgtagtttcgctccaggaattcacgaaccgtcttgctcgagcgaccaatggcatttgctttcctgcgcgtcgttagttacacttcatctgcctcaaaagatggccaattcctgtgtgcccaagactgaccatgcggagtagatgccactgggctcggtctggtagagtctggggacggtgctgcccttgtcgaagccaacaaccatagtgctaataccgaagggccggacaccgccactctgcgtgtatcgctgctgtactccagcaatgtattttgtgatgtagtcgatggtgacgggatcctcgacggtcagacgatgcgactgggcctcgagacgggccttgtcgacgagaatgcgggcatcggcgttcaagccggcgaaggcgaggcatacgtgggtgtctacaaggccgattttggaaggtgtgatgcgggtatcctgcagtttcatagccgatctcttctcacagccgaggacgacgatatcgctgcccttgacgccaacagcgcaggttcctaggcggtgggtgtcaggtggtgtttatctgggttgacgtaatggatgggcgggtcgtacctctcttcacagcttcgccggcatactcgacttggaacacatgtccatcgggactagacggcgttagaaaggagtatctaggagctgggtgtgttgatacgcaatgcaaacctgaagactgtaaatatcgggtgtcagctggagcaccgggaggagggatgcagcggggtccaagatacctgaaagagctcgatcgtatccggacgccattgtgaagggtatctgaaagtgttgagacagtggcgggcaagattgagtggtggaggggggtgagaggaagggtggttgtgtgtcgtgtcgtggtcttcgtacagtgtgtttgggatgagttcatccgcaaggctgccagaagttacgaagctcccccccaagctgctgctggttgccaatgcttgc

SEQ ID NO: 15885 - DNA, 1425 bp, Muscodor strobelii
  misc_feature: SGI cDNA ID NO. 565270
  misc_feature: Reduced expression when VOC is produced
  misc_feature: Encodes the peptide sequence at SEQ ID NO 15886
atggatgacccttatcgcaatacgaacatggaggccgaggccaagttgctggatgcagaggacggccttcgccacctgagagacgagtttctcatcccttctagagcggatgcgaagagagacactctcccagttgatgagcaaggcagtactgagcataccgatgacacggcactctgtacatatctatgcggaaactcgcttggcctacagcctaagagaactgcgactcgaatccagcaattcctctcaacatgggccactcagggtgtacaaggccatttcaagccgcttaagaactcacccctaccgacctggcttaatgcagactcggcagcagccaagctgatggcacctattgttggagctcaggaggaagaagttgctgttatgcagacattaacagcgaatttgcatatactcatgtccgcattttatcatccagatcctgagggtcggcacaaaatcattctagaaagcaaggctttccccagcgatcatttcgctgttctgagccaaattcggcaccacggactatctccggagacatccatggtgacaatcgagtcaccctctgctgaggacccagttattagtaccgatctcatcaagtcaattattttaaagcatgccgcagacaccgcactcatacttttaccgggcattcaatactattcgggtcaactcctcgatatccctagtattactgcatttgcccgtgagaagggcatcttcattatctgggatctcgctcatgctgcgggaaatgtgcctctctctctacatgactgggacgtagacgcagccgcatggtgtacgtacaagtatctcaatggtgggccaggaagcatcgggggtgcattcgttcattcacggaacagcctagtatctactatgcaggaagacaatgagcccgaacgaggatacagcaacaggctctcgggatggtggggaaacgataaggcaactcggttcaagatggagaatcagttccatccggtcaaaggagcagccgggtttcagcttagcaaccccagcgttctcgacatcacaagcgttactgcgtccttggaactattcgagctcgcaggtggcatggcgcctcttcgtgagaaatctttgcgattgacggccttcctcgagaagtgtttaagctttatacagcccgatgcaaagaaactttttagaatcatcacaccgtctgatccaatgcagcgaggtgctcagctctgcctgttacttgaggatggcttgttaacggcaacaatgcacggactggaagaacgcggcatcattgtggatgagagaaaaccaaatgtcatccgagttgcacccgctccaatctataacaactttcacgattgtgtctccttcaccgtaggctttgagtcagctttactggacgccgccaaggagaaagcctaa

SEQ ID NO: 15886 - protein, 474 aa, Muscodor strobelii
  misc_feature: SGI Peptide ID NO. 565270
  misc_feature (61)..(458): Pfam Id: PF00266 Pfam Desc: Aminotransferase class-V
  misc_feature (13)..(474): NCBI GI: 164429125 Blast Desc: NCU00463 [Neurospora crassa OR74A] gi|189081213|sp|Q7RXY2.2|KYNU1_NEUCR RecName: Full=Kynureninase 1; AltName: Full=L-kynurenine hydrolase 1; AltName: of nicotinic
  misc_feature (14)..(473): NCBI GI: 256725743 Blast Desc: [Nectria haematococca mpVI 77-13-4]
  misc_feature (9)..(473): NCBI GI: 171686076 Blast Desc: protein product [Podospora anserina] gi|170942999|emb|CAP68652.1| protein product [Podospora anserina]
  misc_feature (15)..(474): NCBI GI: 116207528 Blast Desc: CHGG_03057 [Chaetomium globosum CBS 148.51] gi|121788223|sp|Q2H9P7.1|KYNU1_CHAGB RecName: Full=Kynureninase 1; AltName: Full=L-kynurenine hydrolase 1; AltName: of nicotinic
  misc_feature (17)..(473): NCBI GI: 46116578 Blast Desc: FG04131.1 [Gibberella zeae PH-1]
  misc_feature (4)..(473): NCBI GI: 258575809 Blast Desc: kynureninase [Uncinocarpus reesii 1704] gi|237902352|gb|EEP76753.1| kynureninase [Uncinocarpus reesii 1704]
  misc_feature (4)..(473): NCBI GI: 240111539 Blast Desc: Kynureninase , [Coccidioides posadasii C735 delta SOWgp]
  misc_feature (4)..(473): NCBI GI: 119188619 Blast Desc: CIMG_04357 [Coccidioides immitis RS] gi|121926971|sp|Q1DZA6.1|KYNU_COCIM RecName: Full=Kynureninase; AltName: Full=L-kynurenine hydrolase; AltName: Full=Biosynthesis
  misc_feature (7)..(465): NCBI GI: 261192328 Blast Desc: kynureninase [Ajellomyces dermatitidis SLH14081] gi|239589446|gb|EEQ72089.1| kynureninase [Ajellomyces dermatitidis SLH14081]
  misc_feature (7)..(465): NCBI GI: 239615159 Blast Desc: kynureninase [Ajellomyces dermatitidis ER-3]
  misc_feature (13)..(474): SWISSPROT Homolog: EC 3.7.1.3 Kynureninase
  misc_feature: Useful for introducing or modulating the production of volatile compounds
MDDPYRNTNMEAEAKLLDAEDGLRHLRDEFLIPSRADAKRDTLPVDEQGSTEHTDDTALCTYLCGNSLGLQPKRTATRIQQFLSTWATQGVQGHFKPLKNSPLPTWLNADSAAAKLMAPIVGAQEEEVAVMQTLTANLHILMSAFYHPDPEGRHKIILESKAFPSDHFAVLSQIRHHGLSPETSMVTIESPSAEDPVISTDLIKSIILKHAADTALILLPGIQYYSGQLLDIPSITAFAREKGIFIIWDLAHAAGNVPLSLHDWDVDAAAWCTYKYLNGGPGSIGGAFVHSRNSLVSTMQEDNEPERGYSNRLSGWWGNDKATRFKMENQFHPVKGAAGFQLSNPSVLDITSVTASLELFELAGGMAPLREKSLRLTAFLEKCLSFIQPDAKKLFRIITPSDPMQRGAQLCLLLEDGLLTATMHGLEERGIIVDERKPNVIRVAPAPIYNNFHDCVSFTVGFESALLDAAKEKA

SEQ ID NO: 15887 - DNA, 3186 bp, Muscodor strobelii
  misc_feature: SGI cDNA ID NO. 565271
  misc_feature: Encodes the peptide sequence at SEQ ID NO 15888
atggctccggcggatttagcatcgtctgggctctcagcccctactaataagctgctgagcaaagtccaagacgatcagccatctcgtcacccttcaccacagcctacacatttgtccgttcctcttgataatgaagcagttacaaagaacggagccaatggacacaggatccttcgatctgccacagtgggatatatagcaccagaatttaccggaaaggcggaacagatggcaacggtcaagaaaatcattacaacacaaggttggattcctgcttctcatgtggaagaccagatttcctggttttacaatgagttaggcatcgacgatgtctattttcagcttgagaaggtcgatgtgatcgcaacgaacatcacgtccatgtatgctgccaaggttgcggcccatgctcgcattgaccaacgccaggtaatgcaactagacatggaagctgtagatcatgcgatctatattgacacgagcgttcctggtgtatcaaatctcaagggcccacgatacgaaaccaggctggaagcgaaatatcttgatcataacgatccaaacaaccggtttagagtggagactttccgctcgcctgtatccctgtcaagcaacagttcttcaggcgcttccttacgctgctatttcgtctaccagtgccagttcgtagactcgaatcccggaccggacgagactcgtctcgaagtgatcagcgaccgcatgttcctgacgaaggcaacgaagaacactaagttgatttacagcgacatcatcaagctagctgtaagccgaacaggaccggtcattgaagtattcgacatcgaaaatacagacgagaagcgtatggttgtggcgttccggagccgcacagctcgaggcctattcagcgctttaagcgatctctaccattattatggagttactagctccagaaagtacgtggagcagttctccaacggcattacggtcatgagtatctacttgaagccggctaccaacctggcgactacttcgatgcctatggatcaatccattcaccagattacgaaggaaatatcacttctttactgtatccctcagaacaagctccacccgctgttcgcatctggtcaattgagccttcaggagactatatatggtcactgtgtttgggttttcgtccagcattttctgaaccgactaggttcagagtatacctctatcagagaagccctgaacgctacgaatgccgctcatgccgaaatgctgtccaaactcaaacgccgtctgcgcacggagaccttcactcctgactacatcctcgagatcatttcatcatatccagatcttgttagatcgttgtatgctgcgtttgcaaatgtccatcttgcagtgggtgccgagttcgagcggcacctaattgcacccactccttccattgatgtcctctctgatgcccgcctcaaggagaaaatcagccgcgaggtttcgaatgaacacgaggagatggttatgactgctttccgtgttttcaatagcgctgttctgaagacaaactatttcacacctacaaaggtggctctgagcttccgtctggatccatctttcctgcctgagtcggagtatccccgtcgcttgtacggcatgttcctcgtcatcagttcagaggcacgcggatttcatcttcgtttcaaggatgttgctcgaggtggtatccggatcgtcaagtccagaagtaaggaggctttcagcatcaatgctaggaatctgtttgatgaaaactatggccttgccagcactcaacagcgaaagaacaaggatatccctgaaggcggctccaagggagttattctgttggatgcaaagcagcaagaccgggcacgtgaagcattcgagaaatacatcgacagtatccttgatctcctactcccagctcaaactcccggtatcaagaatccaattgttgacctctatcgcaaggaagagatattgttcatgggcccggatgagaatactgccgaccttgttgactgggccactgagcatgcccgattccgaggtgccccgtggtggaaatctttcttcacaggaaagtccccgaagctcggtggtatcccccacgactcatacggtatgacaaccttgtctgtccgtgagtatgtcaaaggcatttaccgtaagctcaacctggatccttctacagtgaagaaaatgcagacaggcggaccggatggcgatctaggaagcaatgagatcttgctgagcaatgaaaaatacaccgccattgtggatggctctggcgttcttgttgacccgaacggtatcgacaaggaggaattgctacggctagccaaagcacgtgcaatgatctcccatttcgatgtcgcaaagctctcaaaagatgggtaccgagttctctgcgatgattcgaatgtcacgctaccatctggtgaggtcattggcaatggtttcacattcagaaacttcttccaccttaaggacacaggcctgaccgactgctttgtaccttgtggtggcagacctgagtcgatcgatctctcatcagtcaataaactcatcaaagacgggaaaagcacggtgccctacatcgttgaaggagcgaacctattcatcactcaagatgccaagttgcgacttgaagaagctggatgtattctctttaaagacgcatccgccaacaagggaggtgtcacatcttcatcgcttgaggttctcgcttcactgagctttgatgacaagagtttcgaagagcacatgtgttgcgataagcaaggccgagcacccgaattttacaaagcgtatgtaaagcaggtccaagaaaccatctgcggaaatgctcgcctagagtttgaagcgatctggagagagcacgagcagaccggaacagctcgctctgtgctttctgacaaattgtcggtggccattaccaccctggatgaagagcttcagcagtctgacctatgggctaatgagcgcattcgacgctctgtattggctgacgctctaccccagctcctcctggagcagatcggactcgatacgattatctcccgcgttccggaagcatatctgcgagcaatcttcggaagttatctcgcgtctcgctttgtatacgaattcggcagccaaccaagccagttcgccttttacgatttcatgtccaaaagaatgtccaaggtgcaatga

SEQ ID NO: 15888 - protein, 1061 aa, Muscodor strobelii
  misc_feature: SGI Peptide ID NO. 565271
  misc_feature (696)..(961): Pfam Id: PF00208 Pfam Desc: Glutamate/Leucine/Phenylalanine/Valine dehydrogenase
  misc_feature (14)..(1061): NCBI GI: 159129138 Blast Desc: NAD+ dependent glutamate dehydrogenase, [Aspergillus fumigatus A1163]
  misc_feature (14)..(1061): NCBI GI: 70989759 Blast Desc: NAD+ dependent glutamate dehydrogenase [Aspergillus fumigatus Af293] gi|66847360|gb|EAL87691.1| NAD+ dependent glutamate dehydrogenase, [Aspergillus fumigatus Af293]
  misc_feature (14)..(1059): NCBI GI: 169769478 Blast Desc: [Aspergillus oryzae RIB40] gi|83767067|dbj|BAE57207.1| protein product [Aspergillus oryzae]
  misc_feature (14)..(1061): NCBI GI: 119480387 Blast Desc: NAD+ dependent glutamate dehydrogenase, [Neosartorya fischeri NRRL 181] gi|119408376|gb|EAW18325.1| NAD+ dependent glutamate dehydrogenase, [Neosartorya fischeri NRRL 181]
  misc_feature (14)..(1060): NCBI GI: 145234434 Blast Desc: An02g14590 [Aspergillus niger] gi|134057534|emb|CAK48888.1| protein product [Aspergillus niger]
  misc_feature (14)..(1058): NCBI GI: 212528822 Blast Desc: NAD+ dependent glutamate dehydrogenase, [Penicillium marneffei ATCC 18224] gi|210073966|gb|EEA28053.1| NAD+ dependent glutamate dehydrogenase, [Penicillium marneffei ATCC 18224]
  misc_feature (14)..(1061): NCBI GI: 121715244 Blast Desc: NAD+ dependent glutamate dehydrogenase, [Aspergillus clavatus NRRL 1] gi|119403388|gb|EAW13805.1| NAD+ dependent glutamate dehydrogenase, [Aspergillus clavatus NRRL 1]
  misc_feature (14)..(1052): NCBI GI: 115400759 Blast Desc: NAD-specific glutamate dehydrogenase [Aspergillus terreus NIH2624] gi|114191634|gb|EAU33334.1| NAD-specific glutamate dehydrogenase [Aspergillus terreus NIH2624]
  misc_feature (5)..(1059): NCBI GI: 67900928 Blast Desc: AN7451.2 [Aspergillus nidulans FGSC A4] gi|40742841|gb|EAA62031.1| AN7451.2 [Aspergillus nidulans FGSC A4] gi|259483756|tpe|CBF79408.1| TPA: NAD dependent glutamate (EC
  misc_feature (14)..(1058): NCBI GI: 242765404 Blast Desc: NAD dependent glutamate dehydrogenase, [Talaromyces stipitatus ATCC 10500] gi|218724164|gb|EED23581.1| NAD dependent glutamate dehydrogenase, [Talaromyces stipitatus ATCC 10500]
  misc_feature (6)..(1061): SWISSPROT Homolog: EC 1.4.1.2 Glutamate dehydrogenase
MAPADLASSGLSAPTNKLLSKVQDDQPSRHPSPQPTHLSVPLDNEAVTKNGANGHRILRSATVGYIAPEFTGKAEQMATVKKIITTQGWIPASHVEDQISWFYNELGIDDVYFQLEKVDVIATNITSMYAAKVAAHARIDQRQVMQLDMEAVDHAIYIDTSVPGVSNLKGPRYETRLEAKYLDHNDPNNRFRVETFRSPVSLSSNSSSGASLRCYFVYQCQFVDSNPGPDETRLEVISDRMFLTKATKNTKLIYSDIIKLAVSRTGPVIEVFDIENTDEKRMVVAFRSRTARGLFSALSDLYHYYGVTSSRKYVEQFSNGITVMSIYLKPATNLATTSMPMDQSIHQITKEISLLYCIPQNKLHPLFASGQLSLQETIYGHCVWVFVQHFLNRLGSEYTSIREALNATNAAHAEMLSKLKRRLRTETFTPDYILEIISSYPDLVRSLYAAFANVHLAVGAEFERHLIAPTPSIDVLSDARLKEKISREVSNEHEEMVMTAFRVFNSAVLKTNYFTPTKVALSFRLDPSFLPESEYPRRLYGMFLVISSEARGFHLRFKDVARGGIRIVKSRSKEAFSINARNLFDENYGLASTQQRKNKDIPEGGSKGVILLDAKQQDRAREAFEKYIDSILDLLLPAQTPGIKNPIVDLYRKEEILFMGPDENTADLVDWATEHARFRGAPWWKSFFTGKSPKLGGIPHDSYGMTTLSVREYVKGIYRKLNLDPSTVKKMQTGGPDGDLGSNEILLSNEKYTAIVDGSGVLVDPNGIDKEELLRLAKARAMISHFDVAKLSKDGYRVLCDDSNVTLPSGEVIGNGFTFRNFFHLKDTGLTDCFVPCGGRPESIDLSSVNKLIKDGKSTVPYIVEGANLFITQDAKLRLEEAGCILFKDASANKGGVTSSSLEVLASLSFDDKSFEEHMCCDKQGRAPEFYKAYVKQVQETICGNARLEFEAIWREHEQTGTARSVLSDKLSVAITTLDEELQQSDLWANERIRRSVLADALPQLLLEQIGLDTIISRVPEAYLRAIFGSYLASRFVYEFGSQPSQFAFYDFMSKRMSKVQ

SEQ ID NO: 15889 - DNA, 3923 bp, Muscodor strobelii
  misc_feature: SGI EST ID NO. CUFF.37753.1
  misc_feature: Variant of the nucleotide sequence at SEQ ID NO 15887
gtgcgacgaaactcggcaaaggacaagttctgcgacgaaggagttcctttacagttcattatgtctgatatataaatcgtttatatcctgtccgagctgtcctggacgctacgcatgttctcggttctccttattgttgcattctttattctgtctgggatggaattgctgtcgcaatggctgcaacaccgatgatacgaaaaatgttgtctgttcaaacaactaatctagccttagacaggttccctgagtacatagataccttccagactattcaaagcgtcaaaggcaaaaatagcatcatggctccggcggatttagcatcgtctgggctctcagcccctactaataagctgctgagcaaagtccaagacgatcagccatctcgtcacccttcaccacagcctacacatttgtccgttcctcttgataatgaagcagttacaaagaacggagccaatggacacaggatccttcgatctgccacagtgggatatatagcaccagaatttaccggaaaggcggaacagatggcaacggtcaagaaaatcattacaacacaaggttggattcctgcttctcatgtggaagaccagatttcctggttttacaatgagttaggcatcgacgatgtctattttcagcttgagaaggtcgatgtgatcgcaacgaacatcacgtccatgtatgctgccaaggttgcggcccatgctcgcattgaccaacgccaggtaatgcaactagacatggaagctgtagatcatgcgatctatattgacacgagcgttcctggtgtatcaaatctcaagggcccacgatacgaaaccaggctggaagcgaaatatcttgatcataacgatccaaacaaccggtttagagtggagactttccgctcgcctgtatccctgtcaagcaacagttcttcaggcgcttccttacgctgctatttcgtctaccagtgccagttcgtagactcgaatcccggaccggacgagactcgtctcgaagtgatcagcgaccgcatgttcctgacgaaggcaacgaagaacactaagttgatttacagcgacatcatcaagctagctgtaagccgaacaggaccggtcattgaagtattcgacatcgaaaatacagacgagaagcgtatggttgtggcgttccggagccgcacagctcgaggcctattcagcgctttaagcgatctctaccattattatggagttactagctccagaaagtacgtggagcagttctccaacggcattacggtcatgagtatctacttgaagccggctaccaacctggcgactacttcgatgcctatggatcaatccattcaccagattacgaaggaaatatcacttctttactgtatccctcagaacaagctccacccgctgttcgcatctggtcaattgagccttcaggagactatatatggtcactgtgtttgggttttcgtccagcattttctgaaccgactaggttcagagtatacctctatcagagaagccctgaacgctacgaatgccgctcatgccgaaatgctgtccaaactcaaacgccgtctgcgcacggagaccttcactcctgactacatcctcgagatcatttcatcatatccagatcttgttagatcgttgtatgctgcgtttgcaaatgtccatcttgcagtgggtgccgagttcgagcggcacctaattgcacccactccttccattgatgtcctctctgatgcccgcctcaaggagaaaatcagccgcgaggtttcgaatgaacacgaggagatggttatgactgctttccgtgttttcaatagcgctgttctgaagacaaactatttcacacctacaaaggtggctctgagcttccgtctggatccatctttcctgcctgagtcggagtatccccgtcgcttgtacggcatgttcctcgtcatcagttcagaggcacgcggatttcatcttcgtttcaaggatgttgctcgaggtggtatccggatcgtcaagtccagaagtaaggaggctttcagcatcaatgctaggaatctgtttgatgaaaactatggccttgccagcactcaacagcgaaagaacaaggatatccctgaaggcggctccaagggagttattctgttggatgcaaagcagcaagaccgggcacgtgaagcattcgagaaatacatcgacagtatccttgatctcctactcccagctcaaactcccggtatcaagaatccaattgttgacctctatcgcaaggaagagatattgttcatgggcccggatgagaatactgccgaccttgttgactgggccactgagcatgcccgattccgaggtgccccgtggtggaaatctttcttcacaggaaagtccccgaagctcggtggtatcccccacgactcatacggtatgacaaccttgtctgtccgtgagtatgtcaaaggcatttaccgtaagctcaacctggatccttctacagtgaagaaaatgcagacaggcggaccggatggcgatctaggaagcaatgagatcttgctgagcaatgaaaaatacaccgccattgtggatggctctggcgttcttgttgacccgaacggtatcgacaaggaggaattgctacggctagccaaagcacgtgcaatgatctcccatttcgatgtcgcaaagctctcaaaagatgggtaccgagttctctgcgatgattcgaatgtcacgctaccatctggtgaggtcattggcaatggtttcacattcagaaacttcttccaccttaaggacacaggcctgaccgactgctttgtaccttgtggtggcagacctgagtcgatcgatctctcatcagtcaataaactcatcaaagacgggaaaagcacggtgccctacatcgttgaaggagcgaacctattcatcactcaagatgccaagttgcgacttgaagaagctggatgtattctctttaaagacgcatccgccaacaagggaggtgtcacatcttcatcgcttgaggttctcgcttcactgagctttgatgacaagagtttcgaagagcacatgtgttgcgataagcaaggccgagcacccgaattttacaaagcgtatgtaaagcaggtccaagaaaccatctgcggaaatgctcgcctagagtttgaagcgatctggagagagcacgagcagaccggaacagctcgctctgtgctttctgacaaattgtcggtggccattaccaccctggatgaagagcttcagcagtctgacctatgggctaatgagcgcattcgacgctctgtattggctgacgctctaccccagctcctcctggagcagatcggactcgatacgattatctcccgcgttccggaagcatatctgcgagcaatcttcggaagttatctcgcgtctcgctttgtatacgaattcggcagccaaccaagccagttcgccttttacgatttcatgtccaaaagaatgtccaaggtgcaatgattaggtttacaagggtcggcgttgcgcggaagggaaaatgatagattcactgcatttgagcatcattcggttggcatacgtaacggctcgtgccaggtaggaaaaccacaggagcgtttgtctttacgattgacggtcacaggaccaagtatctagaccggctagattgcgaaaaccacaatataagatctccctgaatttcacagggtctcattcgaaatgcgtgcacattcgacattcctctcatattacagttgtgggttatacaattaaaatatacaattttcatcttaaggcgatgccccaagacgtcgctgaatttctcaaatttgatatggatttggctactcatattcacttggaagaatgtgtttgttgtttcattttttggacaacatgaaatgtcgagtaggtaggtagataggtaagtattac

SEQ ID NO: 15890 - DNA, 3159 bp, Muscodor strobelii
  misc_feature: SGI cDNA ID NO. 565272
  misc_feature: Reduced expression when VOC is produced
  misc_feature: Encodes the peptide sequence at SEQ ID NO 15891
atggctccggcggatttagcatcgtctgggctctcagcccctactaataagctgctgagcaaagtccaagacgatcagccatctcgtcacccttcaccacagcctacacatttgtccgttcctcttgataatgaagcagttacaaagaacggagccaatggacacaggatccttcgatctgccacagtgggatatatagcaccagaatttaccggaaaggcggaacagatggcaacggtcaagaaaatcattacaacacaaggttggattcctgcttctcatgtggaagaccagatttcctggttttacaatgagttaggcatcgacgatgtctattttcagcttgagaaggtcgatgtgatcgcaacgaacatcacgtccatgtatgctgccaaggttgcggcccatgctcgcattgaccaacgccaggtaatgcaactagacatggaagctgtagatcatgcgatctatattgacacgagcgttcctggtgtatcaaatctcaagggcccacgatacgaaaccaggctggaagcgaaatatcttgatcataacgatccaaacaaccggtttagagtggagactttccgctcgcctgtatccctgtcaagcaacagttcttcaggcgcttccttacgctgctatttcgtctaccagtgccagttcgtagactcgaatcccggaccggacgagactcgtctcgaagtgatcagcgaccgcatgttcctgacgaaggcaacgaagaacactaagttgatttacagcgacatcatcaagctagctgtaagccgaacaggaccggtcattgaagtattcgacatcgaaaatacagacgagaagcgtatggttgtggcgttccggagccgcacagctcgaggcctattcagcgctttaagcgatctctaccattattatggagttactagctccagaaagtacgtggagcagttctccaacggcattacggtcatgagtatctacttgaagccggctaccaacctggcgactacttcgatgcctatggatcaatccattcaccagattacgaaggaaatatcacttctttactgtatccctcagaacaagctccacccgctgttcgcatctggtcaattgagccttcaggagactatatatggtcactgtgtttgggttttcgtccagcattttctgaaccgactaggttcagagtatacctctatcagagaagccctgaacgctacgaatgccgctcatgccgaaatgctgtccaaactcaaacgccgtctgcgcacggagaccttcactcctgactacatcctcgagatcatttcatcatatccagatcttgttagatcgttgtatgctgcgtttgcaaatgtccatcttgcagtgggtgccgagttcgagcggcacctaattgcacccactccttccattgatgtcctctctgatgcccgcctcaaggagaaaatcagccgcgaggtttcgaatgaacacgaggagatggttatgactgctttccgtgttttcaatagcgctgttctgaagacaaactatttcacacctacaaaggtggctctgagcttccgtctggatccatctttcctgcctgagtcggagtatccccgtcgcttgtacggcatgttcctcgtcatcagttcagaggcacgcggatttcatcttcgtttcaaggatgttgctcgaggtggtatccggatcgtcaagtccagaagtaaggaggctttcagcatcaatgctaggaatctgtttgatgaaaactatggccttgccagcactcaacagcgaaagaacaaggatatccctgaaggcggctccaagggagttattctgttggatgcaaagcagcaagaccgggcacgtgaagcattcgagaaatacatcgacagtatccttgatctcctactcccagctcaaactcccggtatcaagaatccaattgttgacctctatcgcaaggaagagatattgttcatgggcccggatgagaatactgccgaccttgttgactgggccactgagcatgcccgattccgaggtgccccgtggtggaaatctttcttcacaggaaagtccccgaagctcggtggtatcccccacgactcatacggtatgacaaccttgtctgtccgtgagtatgtcaaaggcatttaccgtaagctcaacctggatccttctacagtgaagaaaatgcagacaggcggaccggatggcgatctaggaagcaatgagatcttgctgagcaatgaaaaatacaccgccattgtggatggctctggcgttcttgttgacccgaacggtatcgacaaggaggaattgctacggctagccaaagcacgtgcaatgatctcccatttcgatgtcgcaaagctctcaaaagatgggtaccgagttctctgcgatgattcgaatgtcacgctaccatctggtgaggtcattggcaatggtttcacattcagaaacttcttccaccttaaggacacaggcctgaccgactgctttgtaccttgtggtggcagacctgagtcgatcgatctctcatcagtcaataaactcatcaaagacgggaaaagcacggtgccctacatcgttgaaggagcgaacctattcatcactcaagatgccaagttgcgacttgaagaagctggatgtattctctttaaagacgcatccgccaacaagggaggtgtcacatcttcatcgcttgaggttctcgcttcactgagctttgatgacaagagtttcgaagagcacatgtgttgcgataagcaaggccgagcacccgaattttacaaagcgtatgtaaagcaggtccaagaaaccatctgcggaaatgctcgcctagagtttgaagcgatctggagagagcacgagcagaccggaacagctcgctctgtgctttctgacaaattgtcggtggccattaccaccctggatgaagagcttcagcagtctgacctatgggctaatgagcgcattcgacgctctgtattggctgacgctctaccccagctcctcctggagcagatcggactcgatacgattatctcccgcgttccggaagcatatctgcgagcaatcttcggaagttatctcgcgtctcgctttgtatacgaattcggcagccaaccaagccagttcgccttttacgatttgtaa

SEQ ID NO: 15891 - protein, 1052 aa, Muscodor strobelii
  misc_feature: SGI Peptide ID NO. 565272
  misc_feature (696)..(961): Pfam Id: PF00208 Pfam Desc: Glutamate/Leucine/Phenylalanine/Valine dehydrogenase
  misc_feature (6)..(1052): NCBI GI: 85081754 Blast Desc: NAD-specific glutamate dehydrogenase [Neurospora crassa OR74A] gi|67476478|sp|P00365.4|DHE2_NEUCR RecName: Full=NAD-specific glutamate dehydrogenase; Short=NAD-GDH crassa
  misc_feature (6)..(1052): NCBI GI: 432554 Blast Desc: NAD(+)-specific glutamate dehydrogenase [Neurospora crassa] gi|449401|prf||1919235A Glu dehydrogenase
  misc_feature (14)..(1052): NCBI GI: 171686074 Blast Desc: protein product [Podospora anserina] gi|170942998|emb|CAP68651.1| protein product [Podospora anserina]
  misc_feature (8)..(1052): NCBI GI: 39939986 Blast Desc: NAD-specific glutamate dehydrogenase [Magnaporthe grisea 70-15] gi|145010473|gb|EDJ95129.1| NAD-specific glutamate dehydrogenase [Magnaporthe grisea 70-15]
  misc_feature (8)..(1052): NCBI GI: 46116550 Blast Desc: FG04117.1 [Gibberella zeae PH-1]
  misc_feature (11)..(1052): NCBI GI: 76253270 Blast Desc: NAD+ dependent glutamate dehydrogenase [Gibberella fujikuroi]
  misc_feature (26)..(1052): NCBI GI: 256725735 Blast Desc: [Nectria haematococca mpVI 77-13-4]
  misc_feature (14)..(1052): NCBI GI: 115400759 Blast Desc: NAD-specific glutamate dehydrogenase [Aspergillus terreus NIH2624] gi|114191634|gb|EAU33334.1| NAD-specific glutamate dehydrogenase [Aspergillus terreus NIH2624]
  misc_feature (14)..(1052): NCBI GI: 159129138 Blast Desc: NAD+ dependent glutamate dehydrogenase, [Aspergillus fumigatus A1163]
  misc_feature (14)..(1052): NCBI GI: 70989759 Blast Desc: NAD+ dependent glutamate dehydrogenase [Aspergillus fumigatus Af293] gi|66847360|gb|EAL87691.1| NAD+ dependent glutamate dehydrogenase, [Aspergillus fumigatus Af293]
  misc_feature (6)..(1052): SWISSPROT Homolog: EC 1.4.1.2 Glutamate dehydrogenase
  misc_feature: Useful for introducing or modulating the production of volatile compounds
MAPADLASSGLSAPTNKLLSKVQDDQPSRHPSPQPTHLSVPLDNEAVTKNGANGHRILRSATVGYIAPEFTGKAEQMATVKKIITTQGWIPASHVEDQISWFYNELGIDDVYFQLEKVDVIATNITSMYAAKVAAHARIDQRQVMQLDMEAVDHAIYIDTSVPGVSNLKGPRYETRLEAKYLDHNDPNNRFRVETFRSPVSLSSNSSSGASLRCYFVYQCQFVDSNPGPDETRLEVISDRMFLTKATKNTKLIYSDIIKLAVSRTGPVIEVFDIENTDEKRMVVAFRSRTARGLFSALSDLYHYYGVTSSRKYVEQFSNGITVMSIYLKPATNLATTSMPMDQSIHQITKEISLLYCIPQNKLHPLFASGQLSLQETIYGHCVWVFVQHFLNRLGSEYTSIREALNATNAAHAEMLSKLKRRLRTETFTPDYILEIISSYPDLVRSLYAAFANVHLAVGAEFERHLIAPTPSIDVLSDARLKEKISREVSNEHEEMVMTAFRVFNSAVLKTNYFTPTKVALSFRLDPSFLPESEYPRRLYGMFLVISSEARGFHLRFKDVARGGIRIVKSRSKEAFSINARNLFDENYGLASTQQRKNKDIPEGGSKGVILLDAKQQDRAREAFEKYIDSILDLLLPAQTPGIKNPIVDLYRKEEILFMGPDENTADLVDWATEHARFRGAPWWKSFFTGKSPKLGGIPHDSYGMTTLSVREYVKGIYRKLNLDPSTVKKMQTGGPDGDLGSNEILLSNEKYTAIVDGSGVLVDPNGIDKEELLRLAKARAMISHFDVAKLSKDGYRVLCDDSNVTLPSGEVIGNGFTFRNFFHLKDTGLTDCFVPCGGRPESIDLSSVNKLIKDGKSTVPYIVEGANLFITQDAKLRLEEAGCILFKDASANKGGVTSSSLEVLASLSFDDKSFEEHMCCDKQGRAPEFYKAYVKQVQETICGNARLEFEAIWREHEQTGTARSVLSDKLSVAITTLDEELQQSDLWANERIRRSVLADALPQLLLEQIGLDTIISRVPEAYLRAIFGSYLASRFVYEFGSQPSQFAFYDL

SEQ ID NO: 15892 - DNA, 3923 bp, Muscodor strobelii; identical to SEQ ID NO: 15889
  misc_feature: SGI EST ID NO. CUFF.37753.1
  misc_feature: Variant of the nucleotide sequence at SEQ ID NO 15890

SEQ ID NO: 15893 - DNA, 2178 bp, Muscodor strobelii
  misc_feature: SGI cDNA ID NO. 565273
  misc_feature: Encodes the peptide sequence at SEQ ID NO 15894
atgctactaacattagcttccttcttcggtattgtgagtgaaaagccatgtttagttaggacagctccctcacggtttaccaaggaagaagagtcacttgattcaaactatctcgaatctcgggtcctttggccggcggccctcgtgctaccgtcgacagtcttcgcgcaggactcgcctcctagctggcaacaatatgtgcgggctcccaatagccgcatcatacgtccaaaggccatactgtcggatcatacgcaagggaacataacgaacccggatgggttgatcactggcgatgcaacaaccgtcttcagtcggaccgcaaactctgatgagaacacgacactcatagtcgatttcggtcaaaatgttgttggccaggtggtcattgacttcgctgggtcgacgaatggttcttcagagggctatcctggcatgacactggcattctctgaagcacttgaatttctcactgatcgaagtgattacacgcgatcggatagagcaagcggtatcgctgtgctcaatgatccctttacttggatagacgaatggggctgtcagtttaacacttatgtctgccgcgatggactccatgcctttagatatgtcaagatctcattccatggtgacgcgtcagaccacccatacgtatcttccgatggagaaataagcatctcttccgtgggtctgcaatgggtcggttatttaggtacggcagatacgtattcgggctggtttgaatgctcagacaccaacttgactcagtggtggtatgatgggacctataccgtggagatgggcacagctattttcaattctaacgacacggagccacgcaacgcagctagcgaaacgctgttggggaaattagtcctacaagatggtgcgaaacgcgatagggacccttatacgggggatctagcggtcgcttcgttgacaagctacttatcacataatgactctcacgatgctaccttgaatatccttgaagatctagctaaacaccaaagagatgatggctggcttcctcctgcgagtatcaacgactatacgctcacgctcttcgattatcctctatggtgggtttccgtgagctacgactatgtcttgtatacaggcaacacatcatatatcagtgattactaccaagtcctactgaacgttctagacaactattatcccgccaacacagataacaccaccaacctgcttcgccgccctagcggatacggtgacttcgctttcttacctcgcgacggcgaggcaggctactacagcgctttatacgtcctatcactgaagcgcgccgccgagctcgcgaccctcatatctaaggacgcggacgcgcaacgttggaccgaccgcgccgacacggtctctaccagtttccagaacacgctatgggattcctcggtctcagcatatttcgaccggaaatgttccgacagtggatgtgacgcccacgcccaagacggcaacagtcttgcgatcctcgccggcatagcaaacgagacgacagccgcatccgctctgtcctatcttgcgaataataacgcccatttctggggtaactcgttctacgacgctgcaggtgatgcactgggcgatgggttctcaacgcgtgtgtatgcattcatatcgtacctcgagggcgcagcccgtttcgagaccggcgatgcggagggcgcgctggatatgattcggcggacatggggttggatggcctcgcaagacccaggcattacgcattgggagggaatcggagaccaagggtctaaatacgagggaccggataccagtctcgcgcacgggtggtcaactggcgttacacctcttttgacgcaatacgtcctcggtgtgaaaccgacggctcccggattcagccaatttgtcgtcaggcccgttgttacggatgatatcacgtgggctaagggtgttgttccgactccttatggtgggattagtgtcagttgggagagggatgacagtggacagattgtggttgatattgatgcgccatctggtactaatggtacagttgctacggacttgtctgagaatcgtagtcttgaagtcgatgggacggagacccgtggtctggtaaagggcagatatgttgaggttgcagttcatggggggaggcggactattgtgagatctgtaaatatcaaatag

SEQ ID NO: 15894 - protein, 725 aa, Muscodor strobelii
  misc_feature: SGI Peptide ID NO. 565273
  misc_feature (108)..(683): Pfam Id: PF05592 Pfam Desc: Bacterial alpha-L-rhamnosidase
  misc_feature (584)..(683): Pfam Id: PF05592 Pfam Desc: Bacterial alpha-L-rhamnosidase
  misc_feature (47)..(690): NCBI GI: 39939988 Blast Desc: MGG_05246 [Magnaporthe grisea 70-15] gi|145010475|gb|EDJ95131.1| MGG_05246 [Magnaporthe grisea 70-15]
  misc_feature (51)..(694): NCBI GI: 156057619 Blast Desc: SS1G_04541 [Sclerotinia sclerotiorum 1980] gi|154702326|gb|EDO02065.1| SS1G_04541 [Sclerotinia sclerotiorum 1980]
  misc_feature (146)..(694): NCBI GI: 154297902 Blast Desc: BC1G_11925 [Botryotinia fuckeliana B05.10] gi|150858366|gb|EDN33558.1| BC1G_11925 [Botryotinia fuckeliana B05.10]
  misc_feature (292)..(696): NCBI GI: 116688192 Blast Desc: alpha-L-rhamnosidase [Burkholderia cenocepacia HI2424] gi|116646281|gb|ABK06922.1| alpha-L-rhamnosidase [Burkholderia cenocepacia HI2424]
  misc_feature (42)..(695): NCBI GI: 115374398 Blast Desc: alpha-L-rhamnosidase A [Stigmatella aurantiaca DW4/3-1] gi|115368600|gb|EAU67552.1| alpha-L-rhamnosidase A [Stigmatella aurantiaca DW4/3-1]
  misc_feature (63)..(714): NCBI GI: 119496565 Blast Desc: bacterial alpha-L-rhamnosidase domain protein [Neosartorya fischeri NRRL 181] gi|119413218|gb|EAW23159.1| bacterial alpha-L-rhamnosidase domain protein [Neosartorya NRRL
  misc_feature (69)..(695): NCBI GI: 256394410 Blast Desc: alpha-L-rhamnosidase [Catenulispora acidiphila DSM 44928] gi|256360636|gb|ACU74133.1| alpha-L-rhamnosidase [Catenulispora acidiphila DSM 44928]
  misc_feature (63)..(714): NCBI GI: 70991026 Blast Desc: alpha-L-rhamnosidase B [Aspergillus fumigatus Af293] gi|66847994|gb|EAL88324.1| alpha-L-rhamnosidase B, [Aspergillus fumigatus Af293] gi|159130836|gb|EDP55949.1| alpha-L-rhamnosidase
  misc_feature (63)..(722): NCBI GI: 189199902 Blast Desc: bacterial alpha-L-rhamnosidase domain containing protein [Pyrenophora tritici-repentis Pt-1C-BFP] gi|187983387|gb|EDU48875.1| bacterial alpha-L-rhamnosidase domain
  misc_feature (63)..(720): NCBI GI: 115389382 Blast Desc: conserved [Aspergillus terreus NIH2624] gi|114194592|gb|EAU36292.1| conserved [Aspergillus terreus NIH2624]
MLLTLASFFGIVSEKPCLVRTAPSRFTKEEESLDSNYLESRVLWPAALVLPSTVFAQDSPPSWQQYVRAPNSRIIRPKAILSDHTQGNITNPDGLITGDATTVFSRTANSDENTTLIVDFGQNVVGQVVIDFAGSTNGSSEGYPGMTLAFSEALEFLTDRSDYTRSDRASGIAVLNDPFTWIDEWGCQFNTYVCRDGLHAFRYVKISFHGDASDHPYVSSDGEISISSVGLQWVGYLGTADTYSGWFECSDTNLTQWWYDGTYTVEMGTAIFNSNDTEPRNAASETLLGKLVLQDGAKRDRDPYTGDLAVASLTSYLSHNDSHDATLNILEDLAKHQRDDGWLPPASINDYTLTLFDYPLWWVSVSYDYVLYTGNTSYISDYYQVLLNVLDNYYPANTDNTTNLLRRPSGYGDFAFLPRDGEAGYYSALYVLSLKRAAELATLISKDADAQRWTDRADTVSTSFQNTLWDSSVSAYFDRKCSDSGCDAHAQDGNSLAILAGIANETTAASALSYLANNNAHFWGNSFYDAAGDALGDGFSTRVYAFISYLEGAARFETGDAEGALDMIRRTWGWMASQDPGITHWEGIGDQGSKYEGPDTSLAHGWSTGVTPLLTQYVLGVKPTAPGFSQFVVRPVVTDDITWAKGVVPTPYGGISVSWERDDSGQIVVDIDAPSGTNGTVATDLSENRSLEVDGTETRGLVKGRYVEVAVHGGRRTIVRSVNIK

SEQ ID NO: 15895 - DNA, 3818 bp, Muscodor strobelii
  misc_feature: SGI EST ID NO. CUFF.37594.0
  misc_feature: Variant of the nucleotide sequence at SEQ ID NO 15893
ctgggacggatcatatcgctgtgctcaatgatccctttacttggatagacgaatggggctgtcagtttaacacttatgtctgccgcgatggactccatgcctttagatatgtcaagatctcattccatggtgacgcgtcagaccacccatacgtatcttccgatggagaaataagcatctcttccgtgggtctgcaatgggtcggttatttaggtacggcagatacgtattcgggctggtttgaatgctcagacaccaacttgactcagtggtggtatgatgggacctataccgtggagatgggcacagctattttcaattctaacgacacggagccacgcaacgcagctagcgaaacgctgttggggaaattagtcctacaagatggtgcgaaacgcgatagggacccttatacgggggatctagcggtcgcttcgttgacaagctacttatcacataatgactctcacgatgctaccttgaatatccttgaagatctagctaaacaccaaagagatgatggctggcttcctcctgcgagtatcaacgactatacgctcacgctcttcgattatcctctatggtgggtttccgtgagctacgactatgtcttgtatacaggcaacacatcatatatcagtgattactaccaagtcctactgaacgttctagacaactattatcccgccaacacagataacaccaccaacctgcttcgccgccctagcggatacggtgacttcgctttcttacctcgcgacggcgaggcaggctactacagcgctttatacgtcctatcactgaagcgcgccgccgagctcgcgaccctcatatctaaggacgcggacgcgcaacgttggaccgaccgcgccgacacggtctctaccagtttccagaacacgctatgggattcctcggtctcagcatatttcgaccggaaatgttccgacagtggatgtgacgcccacgcccaagacggcaacagtcttgcgatcctcgccggcatagcaaacgagacgacagccgcatccgctctgtcctatcttgcgaataataacgcccatttctggggtaactcgttctacgacgctgcaggtgatgcactgggcgatgggttctcaacgcgtgtgtatgcattcatatcgtacctcgagggcgcagcccgtttcgagaccggcgatgcggagggcgcgctggatatgattcggcggacatggggttggatggcctcgcaagacccaggcattacgcattgggagggaatcggagaccaagggtctaaatacgagggaccggataccagtctcgcgcacgggtggtcaactggcgttacacctcttttgacgcaatacgtcctcggtgtgaaaccgacggctcccggattcagccaatttgtcgtcaggcccgttgttacggatgatatcacgtgggctaagggtgttgttccgactccttatggtgggattagtgtcagttgggagagggatgacagtggacagattgtggttgatattgatgcgccatctggtactaatggtacagttgctacggacttgtctgagaatcgtagtcttgaagtcgatgggacggagacccgtggtctggtaaagggcagatatgttgaggttgcagttcatggggggaggcggactattgtgagatctgtaaatatcaaatagaagggtaaaagtagttatagaatgagagtggtgatcaacatttgagggaacgcatcatgacaatgaccgtgggtcagcacagattcgaaagtgtgatctgacaggcatgagggatgggttccaaatcttcattactatactacaggtggtgtacattctttcatatatgcttatatacttggtgcttggtcaacccaactttttacatctaattttacaacagccgctggagaaccctctataggcaggttcgggtgggtactcatatggtgccccgtcaaccgatctatcaaggactagaagaagtgttttacctcttaccaagaccccatctaaagatcctgtcttggatttcttcccacgtcatcggcttcgcactgaagcctggcgcatctgcctcttgtatcacaacggtgggggctccgctgcctttgccttcattattggcgaggccaccaaagatctgtttagcgacgcggcgcaagtcctgtacttctagttcctcgatcttgcggcacatctcatgaaccggaaccttgcggccatggacctggacttgtctgcccagatcctcgagctccaccatacggctctcgagattcatgagtaaactcgaccgaagctgattcttggcacgttggacctcaatctcgccgagcgctgaaaatccggtgtctaatgtcagcgctctgagttcctggcacataacatctagcatgtgttgtgtacgaccaggtacgcaaagtgctgaaatgccgaacagaccggaatctgtataggaatggttaaaggccatacaattctcgacccaagcgtgttgattcaatacatgggtatacaggcgggagtacatgcccttgccgggacctccggcggagaacgagccacccccaccaagtaatgtgttaagagtggcaagggcatagatgtcgtcagatgctattggcaacccctcgaatgctaagtgaatatggctaaatgttggttgcataggattttgggatggtggttgagtggggagagagatgaaaccgccagtatagtgtgctggtttcgtgatgtcttcaagcgtcgggattgtggcggtgttggttatgggtgtggggatgtttttcttgaacatggaaaagagaccggaggattgagatgagctcgcagacgatgatgaggagtcgcttgaagcagagtctaaagaatctatcgatgtttctgacccggaccttgccagtaacggcggcgcggtactcttcatatctccgaagaactgtgttgctaatcgaacagcctcagtatgaggaactccagcaaaagcaaccacggtacgctctgggcgataaaatgtgtccctataagtgttgatgacagatttattgatctcaggcacacgctccatgggacacagcagaggattgcccagggtgttgtccttgtaggcggccatgtgaacgagttcaggtattatcagctctggctttttccaaatctcagtgatctcgtattcagccgtggcaagctcctgctggacctcctcatcggtaatgctggggttctggacggtgtcggcgagaagctcggtagcaacgtcaaccgtcgagttaaaggtagcagcctggtacatgatggactctctggacgagacacattggatattgccaccaagggattcgacagcctgctggatatcatctgaggatttattggtggtggacttgaaggccagacggtcaacgatatggctcagtccgctgagttggggcgtttcgaatcgagagccggcctcgacgtagacaccgacgccggagaaggagccggggagagcctcagaggccacgcgaacgccatttggtagagtagtaatgcgatcgagttcggtgggctcctgtggagggatatcagcatatgcaatacgcagcagcaacgagattgcaatgaataactaccttagcttggggaacttggacggtcgcgaggttccgtcttagtggcagccgcgaagtgctggaccatggccgcgagacaagcgccctgtttaggcctctggatgcgcaggcgcgatacatgctgagttgaacgtcgtccgatgttggactagttctacgttatcgcagaatatgtcgccgtagtcgccggagcatttgc

SEQ ID NO: 15896 - DNA, 1689 bp, Muscodor strobelii
  misc_feature: SGI cDNA ID NO. 565274
  misc_feature: Reduced expression when VOC is produced
  misc_feature: Encodes the peptide sequence at SEQ ID NO 15897
atgtatcgcgcctgcgcatccagaggcctaaacagggcgcttgtctcgcggccatggtccagcacttcgcggctgccactaagacggaacctcgcgaccgtccaagttccccaagctaaggagcccaccgaactcgatcgcattactactctaccaaatggcgttcgcgtggcctctgaggctctccccggctccttctccggcgtcggtgtctacgtcgaggccggctctcgattcgaaacgccccaactcagcggactgagccatatcgttgaccgtctggccttcaagtccaccaccaataaatcctcagatgatatccagcaggctgtcgaatcccttggtggcaatatccaatgtgtctcgtccagagagtccatcatgtaccaggctgctacctttaactcgacggttgacgttgctaccgagcttctcgccgacaccgtccagaaccccagcattaccgatgaggaggtccagcaggagcttgccacggctgaatacgagatcactgagatttggaaaaagccagagctgataatacctgaactcgttcacatggccgcctacaaggacaacaccctgggcaatcctctgctgtgtcccatggagcgtgtgcctgagatcaataaatctgtcatcaacacttatagggacacattttatcgcccagagcgtaccgtggttgcttttgctggagttcctcatactgaggctgttcgattagcaacacagttcttcggagatatgaagagtaccgcgccgccgttactggcaaggtccgggtcagaaacatcgatagattctttagactctgcttcaagcgactcctcatcatcgtctgcgagctcatctcaatcctccggtctcttttccatgttcaagaaaaacatccccacacccataaccaacaccgccacaatcccgacgcttgaagacatcacgaaaccagcacactatactggcggtttcatctctctccccactcaaccaccatcccaaaatcctatgcaaccaacatttagccatattcacttagcattcgaggggttgccaatagcatctgacgacatctatgcccttgccactcttaacacattacttggtgggggtggctcgttctccgccggaggtcccggcaagggcatgtactcccgcctgtatacccatgtattgaatcaacacgcttgggtcgagaattgtatggcctttaaccattcctatacagattccggtctgttcggcatttcagcactttgcgtacctggtcgtacacaacacatgctagatgttatgtgccaggaactcagagcgctgacattagacaccggattttcagcgctcggcgagattgaggtccaacgtgccaagaatcagcttcggtcgagtttactcatgaatctcgagagccgtatggtggagctcgaggatctgggcagacaagtccaggtccatggccgcaaggttccggttcatgagatgtgccgcaagatcgaggaactagaagtacaggacttgcgccgcgtcgctaaacagatctttggtggcctcgccaataatgaaggcaaaggcagcggagcccccaccgttgtgatacaagaggcagatgcgccaggcttcagtgcgaagccgatgacgtgggaagaaatccaagacaggatctttagatggggtcttggtaagaggtaa

SEQ ID NO: 15897 - protein, 562 aa, Muscodor strobelii
  misc_feature: SGI Peptide ID NO. 565274
  misc_feature (208)..(460): Pfam Id: PF05193 Pfam Desc: Peptidase M16 inactive domain
  misc_feature (56)..(203): Pfam Id: PF00675 Pfam Desc: Insulinase (Peptidase family M16)
  misc_feature (12)..(560): NCBI GI: 46111363 Blast Desc: FG02563.1 [Gibberella zeae PH-1]
  misc_feature (1)..(560): NCBI GI: 256725780 Blast Desc: [Nectria haematococca mpVI 77-13-4]
  misc_feature (24)..(561): NCBI GI: 238842715 Blast Desc: mitochondrial-processing peptidase subunit alpha [Microsporum canis CBS 113480]
  misc_feature (1)..(560): NCBI GI: 154320037 Blast Desc: BC1G_01999 [Botryotinia fuckeliana B05.10] gi|150854738|gb|EDN29930.1| BC1G_01999 [Botryotinia fuckeliana B05.10]
  misc_feature (40)..(562): NCBI GI: 85109350 Blast Desc: mitochondrial processing peptidase alpha subunit [Neurospora crassa OR74A] gi|44888986|sp|P23955.2|MPPA_NEUCR RecName: Full=Mitochondrial-processing peptidase subunit alpha;
  misc_feature (40)..(562): NCBI GI: 168841 Blast Desc: matrix processing peptidase [Neurospora crassa]
  misc_feature (29)..(562): NCBI GI: 255936951 Blast Desc: Pc13g10820 [Penicillium chrysogenum Wisconsin 54-1255] gi|211584122|emb|CAP92151.1| Pc13g10820 [Penicillium chrysogenum Wisconsin 54-1255]
  misc_feature (23)..(562): NCBI GI: 119495585 Blast Desc: mitochondrial processing peptidase alpha subunit, [Neosartorya fischeri NRRL 181] gi|119412736|gb|EAW22677.1| mitochondrial processing peptidase alpha subunit, [Neosartorya
  misc_feature (1)..(561): NCBI GI: 116207592 Blast Desc: CHGG_03089 [Chaetomium globosum CBS 148.51] gi|88183686|gb|EAQ91154.1| CHGG_03089 [Chaetomium globosum CBS 148.51]
  misc_feature (29)..(562): NCBI GI: 145239755 Blast Desc: An08g04080 [Aspergillus niger] gi|134077036|emb|CAK39910.1| protein product [Aspergillus niger]
  misc_feature (40)..(562): SWISSPROT Homolog: EC 3.4.24.64 Mitochondrial processing peptidase
  misc_feature: Useful for introducing or modulating the production of volatile compounds
MYRACASRGLNRALVSRPWSSTSRLPLRRNLATVQVPQAKEPTELDRITTLPNGVRVASEALPGSFSGVGVYVEAGSRFETPQLSGLSHIVDRLAFKSTTNKSSDDIQQAVESLGGNIQCVSSRESIMYQAATFNSTVDVATELLADTVQNPSITDEEVQQELATAEYEITEIWKKPELIIPELVHMAAYKDNTLGNPLLCPMERVPEINKSVINTYRDTFYRPERTVVAFAGVPHTEAVRLATQFFGDMKSTAPPLLARSGSETSIDSLDSASSDSSSSSASSSQSSGLFSMFKKNIPTPITNTATIPTLEDITKPAHYTGGFISLPTQPPSQNPMQPTFSHIHLAFEGLPIASDDIYALATLNTLLGGGGSFSAGGPGKGMYSRLYTHVLNQHAWVENCMAFNHSYTDSGLFGISALCVPGRTQHMLDVMCQELRALTLDTGFSALGEIEVQRAKNQLRSSLLMNLESRMVELEDLGRQVQVHGRKVPVHEMCRKIEELEVQDLRRVAKQIFGGLANNEGKGSGAPTVVIQEADAPGFSAKPMTWEEIQDRIFRWGLGKR

SEQ ID NO: 15898 - DNA, 3742 bp, Muscodor strobelii
  misc_feature: SGI EST ID NO. CUFF.37595.1
  misc_feature: Variant of the nucleotide sequence at SEQ ID NO 15896
gcaaatgctccggcgactacggcgacatattctgcgataacgtagaactagtccaacatcggacgacgttcaactcagcatgtatcgcgcctgcgcatccagaggcctaaacagggcgcttgtctcgcggccatggtccagcacttcgcggctgccactaagacggaacctcgcgaccgtccaagttccccaagctaaggagcccaccgaactcgatcgcattactactctaccaaatggcgttcgcgtggcctctgaggctctccccggctccttctccggcgtcggtgtctacgtcgaggccggctctcgattcgaaacgccccaactcagcggactgagccatatcgttgaccgtctggccttcaagtccaccaccaataaatcctcagatgatatccagcaggctgtcgaatcccttggtggcaatatccaatgtgtctcgtccagagagtccatcatgtaccaggctgctacctttaactcgacggttgacgttgctaccgagcttctcgccgacaccgtccagaaccccagcattaccgatgaggaggtccagcaggagcttgccacggctgaatacgagatcactgagatttggaaaaagccagagctgataatacctgaactcgttcacatggccgcctacaaggacaacaccctgggcaatcctctgctgtgtcccatggagcgtgtgcctgagatcaataaatctgtcatcaacacttatagggacacattttatcgcccagagcgtaccgtggttgcttttgctggagttcctcatactgaggctgttcgattagcaacacagttcttcggagatatgaagagtaccgcgccgccgttactggcaaggtccgggtcagaaacatcgatagattctttagactctgcttcaagcgactcctcatcatcgtctgcgagctcatctcaatcctccggtctcttttccatgttcaagaaaaacatccccacacccataaccaacaccgccacaatcccgacgcttgaagacatcacgaaaccagcacactatactggcggtttcatctctctccccactcaaccaccatcccaaaatcctatgcaaccaacatttagccatattcacttagcattcgaggggttgccaatagcatctgacgacatctatgcccttgccactcttaacacattacttggtgggggtggctcgttctccgccggaggtcccggcaagggcatgtactcccgcctgtatacccatgtattgaatcaacacgcttgggtcgagaattgtatggcctttaaccattcctatacagattccggtctgttcggcatttcagcactttgcgtacctggtcgtacacaacacatgctagatgttatgtgccaggaactcagagcgctgacattagacaccggattttcagcgctcggcgagattgaggtccaacgtgccaagaatcagcttcggtcgagtttactcatgaatctcgagagccgtatggtggagctcgaggatctgggcagacaagtccaggtccatggccgcaaggttccggttcatgagatgtgccgcaagatcgaggaactagaagtacaggacttgcgccgcgtcgctaaacagatctttggtggcctcgccaataatgaaggcaaaggcagcggagcccccaccgttgtgatacaagaggcagatgcgccaggcttcagtgcgaagccgatgacgtgggaagaaatccaagacaggatctttagatggggtcttggtaagaggtaaaacacttcttctagtccttgatagatcggttgacggggcaccatatgagtacccacccgaacctgcctatagagggttctccagcggctgttgtaaaattagatgtaaaaagttgggttgaccaagcaccaagtatataagcatatatgaaagaatgtacaccacctgtagtatagtaatgaagatttggaacccatccctcatgcctgtcagatcacactttcgaatctgtgctgacccacggtcattgtcatgatgcgttccctcaaatgttgatcaccactctcattctataactacttttacccttctatttgatatttacagatctcacaatagtccgcctccccccatgaactgcaacctcaacatatctgccctttaccagaccacgggtctccgtcccatcgacttcaagactacgattctcagacaagtccgtagcaactgtaccattagtaccagatggcgcatcaatatcaaccacaatctgtccactgtcatccctctcccaactgacactaatcccaccataaggagtcggaacaacacccttagcccacgtgatatcatccgtaacaacgggcctgacgacaaattggctgaatccgggagccgtcggtttcacaccgaggacgtattgcgtcaaaagaggtgtaacgccagttgaccacccgtgcgcgagactggtatccggtccctcgtatttagacccttggtctccgattccctcccaatgcgtaatgcctgggtcttgcgaggccatccaaccccatgtccgccgaatcatatccagcgcgccctccgcatcgccggtctcgaaacgggctgcgccctcgaggtacgatatgaatgcatacacacgcgttgagaacccatcgcccagtgcatcacctgcagcgtcgtagaacgagttaccccagaaatgggcgttattattcgcaagataggacagagcggatgcggctgtcgtctcgtttgctatgccggcgaggatcgcaagactgttgccgtcttgggcgtgggcgtcacatccactgtcggaacatttccggtcgaaatatgctgagaccgaggaatcccatagcgtgttctggaaactggtagagaccgtgtcggcgcggtcggtccaacgttgcgcgtccgcgtccttagatatgagggtcgcgagctcggcggcgcgcttcagtgataggacgtataaagcgctgtagtagcctgcctcgccgtcgcgaggtaagaaagcgaagtcaccgtatccgctagggcggcgaagcaggttggtggtgttatctgtgttggcgggataatagttgtctagaacgttcagtaggacttggtagtaatcactgatatatgatgtgttgcctgtatacaagacatagtcgtagctcacggaaacccaccatagaggataatcgaagagcgtgagcgtatagtcgttgatactcgcaggaggaagccagccatcatctctttggtgtttagctagatcttcaaggatattcaaggtagcatcgtgagagtcattatgtgataagtagcttgtcaacgaagcgaccgctagatcccccgtataagggtccctatcgcgtttcgcaccatcttgtaggactaatttccccaacagcgtttcgctagctgcgttgcgtggctccgtgtcgttagaattgaaaatagctgtgcccatctccacggtataggtcccatcataccaccactgagtcaagttggtgtctgagcattcaaaccagcccgaatacgtatctgccgtacctaaataaccgacccattgcagacccacggaagagatgcttatttctccatcggaagatacgtatgggtggtctgacgcgtcaccatggaatgagatcttgacatatctaaaggcatggagtccatcgcggcagacataagtgttaaactgacagccccattcgtctatccaagtaaagggatcattgagcacagcga

SEQ ID NO: 15899 - DNA, 294 bp, Muscodor strobelii
  misc_feature: SGI cDNA ID NO. 565275
  misc_feature: Encodes the peptide sequence at SEQ ID NO 15900
atgaatctcgagagccgtatggtggagctcgaggatctgggcagacaagtccaggtccatggccgcaaggttccggttcatgagatgtgccgcaagatcgaggaactagaagtacaggacttgcgccgcgtcgctaaacagatctttggtggcctcgccaataatgaaggcaaaggcagcggagcccccaccgttgtgatacaagaggcagatgcgccaggcttcagtgcgaagccgatgacgtgggaagaaatccaagacaggatctttagatggggtcttggtaagaggtaa

SEQ ID NO: 15900 - protein, 97 aa, Muscodor strobelii
  misc_feature: SGI Peptide ID NO. 565275
  misc_feature (1)..(97): NCBI GI: 261361660 Blast Desc: mitochondrial-processing peptidase subunit alpha [Verticillium albo-atrum VaMs.102]
  misc_feature (1)..(96): NCBI GI: 116207592 Blast Desc: CHGG_03089 [Chaetomium globosum CBS 148.51] gi|88183686|gb|EAQ91154.1| CHGG_03089 [Chaetomium globosum CBS 148.51]
  misc_feature (1)..(97): NCBI GI: 145239755 Blast Desc: An08g04080 [Aspergillus niger] gi|134077036|emb|CAK39910.1| protein product [Aspergillus niger]
  misc_feature (1)..(97): NCBI GI: 255936951 Blast Desc: Pc13g10820 [Penicillium chrysogenum Wisconsin 54-1255] gi|211584122|emb|CAP92151.1| Pc13g10820 [Penicillium chrysogenum Wisconsin 54-1255]
  misc_feature (1)..(96): NCBI GI: 115491689 Blast Desc: mitochondrial processing peptidase alpha subunit [Aspergillus terreus NIH2624] gi|114197332|gb|EAU39032.1| mitochondrial processing peptidase alpha subunit [Aspergillus
  misc_feature (1)..(96): NCBI GI: 238842715 Blast Desc: mitochondrial-processing peptidase subunit alpha [Microsporum canis CBS 113480]
  misc_feature (1)..(97): NCBI GI: 85109350 Blast Desc: mitochondrial processing peptidase alpha subunit [Neurospora crassa OR74A] gi|44888986|sp|P23955.2|MPPA_NEUCR RecName: Full=Mitochondrial-processing peptidase subunit alpha;
  misc_feature (1)..(97): NCBI GI: 168841 Blast Desc: matrix processing peptidase [Neurospora crassa]
  misc_feature (1)..(96): NCBI GI: 156065023 Blast Desc: SS1G_00522 [Sclerotinia sclerotiorum 1980] gi|154691381|gb|EDN91119.1| SS1G_00522 [Sclerotinia sclerotiorum 1980]
  misc_feature (1)..(97): NCBI GI: 189199046 Blast Desc: mitochondrial-processing peptidase subunit alpha [Pyrenophora tritici-repentis Pt-1C-BFP] gi|187982959|gb|EDU48447.1| mitochondrial-processing peptidase
  misc_feature (1)..(97): SWISSPROT Homolog: EC 3.4.24.64 Mitochondrial processing peptidase
MNLESRMVELEDLGRQVQVHGRKVPVHEMCRKIEELEVQDLRRVAKQIFGGLANNEGKGSGAPTVVIQEADAPGFSAKPMTWEEIQDRIFRWGLGKR

SEQ ID NO: 15901 - DNA, 3742 bp, Muscodor strobelii; identical to SEQ ID NO: 15898
  misc_feature: SGI EST ID NO. CUFF.37595.1
  misc_feature: Variant of the nucleotide sequence at SEQ ID NO 15899

SEQ ID NO: 15902 - DNA, 1611 bp, Muscodor strobelii
  misc_feature: SGI cDNA ID NO. 565276
  misc_feature: Reduced expression when VOC is produced
  misc_feature: Encodes the peptide sequence at SEQ ID NO 15903
atgctgtctcaatcagcagccccctcggctgcgacctttcctctcgctccctccacctcctctccaccaacgtcatccgcccgcaaacgcctaagcggcctcatcaatttacgtagctacacatccaattccgtctccagcgcccgtgatcccagcacttcccgcaatcagagcaatcggcacagcatccacggtgccatattcggcagccgtaccaacagcacctcccgctcgcgagcccgtgcatccactcacgaggagtcatcgctcgcagccgcgctctctgtcgcttttgaccctgctgagtatctggccgagcccgtctctatcacgcttgacacacagctcatcgagcctctgtctgctgtcgaagctcacgacgatccttcagctagtaatcgcttcagcacccgcttctgcgaatctgccgccgaagccttgctgcgagagaggtcgtcgcagagctccagtcccgagttgggttcagccgatggagaaatgaccaggtcacgatccgcaacctcgtccaacgacatggcgcccgatgcactgccctccatccgcctctcggccttctacgatccacgctctacccgtccgtcgctgtcattcacccctatcacccgcaccttgccgacgggcacagaactgatcaaggtcggccgctactctgagagggagagccatgcaccgatccctgccaacgtcccgtcttcagccccggtcggcttcaagagcaaggtcgtcagtcgccgccactgcgagttttggttcgagaagggcaagtggtatgtcaaggatgtgaaaagctcatcaggcactttcttgaaccacattcggctaagcgctccgggaaccgagtctaagccatatcccatcagtgacggggacatggtgcagctgggaatagacttcaagggcggcgaggaaatgatttatagatgtgtcaaaatgcgtgttgagttgaatcgaggatggcagcagaagccaaacgctttcaatatgaccacgcacaagcggctgcgagacatcacagctggggcctcgaatggcgcagcggggtctcatgcccaagactgctcaatttgcctgaacgcaattgctccttgccaatccctttttgttgctccttgctcccatacatggcatttcaaatgcatccgggagatgcttcacgggccgtcttggccattgttcatgtgccccaattgccgggccacagctgatctggatgccgaggtggacgagcccgtagaggactggcagcagcttcccgaagacgtagctgaagaaaaggctgaggatggggcggagggggacgaagtgccagatatggccagtttggagttgcgtgagacgtcacagtcggaagacccggctgatgcgacgatgcaggtgaacgggcatacggcttccagtccggtaccgattcccgctggaaaccaaaggaggacgccttcgccggatgacagccgcgagggccccattacgcccagaaacgatgccggcccttgggtgtttgacggcaatccagggcgagtcagccaagagagcaggcgtggggcaatgcggagtctggacgcagctgcacaacagcctcacgccatgtga

SEQ ID NO: 15903 - protein, 536 aa, Muscodor strobelii
  misc_feature: SGI Peptide ID NO. 565276
  misc_feature (218)..(302): Pfam Id: PF00498 Pfam Desc: FHA domain
  misc_feature (167)..(509): NCBI GI: 85109348 Blast Desc: NCU06269 [Neurospora crassa OR74A] gi|28924514|gb|EAA33637.1| [Neurospora crassa OR74A]
  misc_feature (182)..(531): NCBI GI: 261361659 Blast Desc: RING finger protein [Verticillium albo-atrum VaMs.102]
  misc_feature (1)..(439): NCBI GI: 171686114 Blast Desc: protein product [Podospora anserina] gi|170943018|emb|CAP68671.1| protein product [Podospora anserina]
  misc_feature (124)..(531): NCBI GI: 256725779 Blast Desc: NECHADRAFT_43175 [Nectria haematococca mpVI 77-13-4]
  misc_feature (165)..(533): NCBI GI: 116207594 Blast Desc: CHGG_03090 [Chaetomium globosum CBS 148.51] gi|88183687|gb|EAQ91155.1| CHGG_03090 [Chaetomium globosum CBS 148.51]
  misc_feature (164)..(531): NCBI GI: 46111365 Blast Desc: FG02564.1 [Gibberella zeae PH-1]
  misc_feature (184)..(438): NCBI GI: 154320033 Blast Desc: BC1G_01997 [Botryotinia fuckeliana B05.10] gi|150854736|gb|EDN29928.1| BC1G_01997 [Botryotinia fuckeliana B05.10]
  misc_feature (184)..(515): NCBI GI: 189199048 Blast Desc: FHA domain containing protein [Pyrenophora tritici-repentis Pt-1C-BFP] gi|187982960|gb|EDU48448.1| FHA domain containing protein [Pyrenophora tritici-repentis
  misc_feature (184)..(515): NCBI GI: 156065021 Blast Desc: SS1G_00521 [Sclerotinia sclerotiorum 1980] gi|154691380|gb|EDN91118.1| SS1G_00521 [Sclerotinia sclerotiorum 1980]
  misc_feature (159)..(530): NCBI GI: 145602009 Blast Desc: MGG_05257 [Magnaporthe grisea 70-15] gi|145010462|gb|EDJ95118.1| MGG_05257 [Magnaporthe grisea 70-15]
  misc_feature: Useful for introducing or modulating the production of volatile compounds
MLSQSAAPSAATFPLAPSTSSPPTSSARKRLSGLINLRSYTSNSVSSARDPSTSRNQSNRHSIHGAIFGSRTNSTSRSRARASTHEESSLAAALSVAFDPAEYLAEPVSITLDTQLIEPLSAVEAHDDPSASNRFSTRFCESAAEALLRERSSQSSSPELGSADGEMTRSRSATSSNDMAPDALPSIRLSAFYDPRSTRPSLSFTPITRTLPTGTELIKVGRYSERESHAPIPANVPSSAPVGFKSKVVSRRHCEFWFEKGKWYVKDVKSSSGTFLNHIRLSAPGTESKPYPISDGDMVQLGIDFKGGEEMIYRCVKMRVELNRGWQQKPNAFNMTTHKRLRDITAGASNGAAGSHAQDCSICLNAIAPCQSLFVAPCSHTWHFKCIREMLHGPSWPLFMCPNCRATADLDAEVDEPVEDWQQLPEDVAEEKAEDGAEGDEVPDMASLELRETSQSEDPADATMQVNGHTASSPVPIPAGNQRRTPSPDDSREGPITPRNDAGPWVFDGNPGRVSQESRRGAMRSLDAAAQQPHAM

SEQ ID NO: 15904 - DNA, 2913 bp, Muscodor strobelii
  misc_feature: SGI EST ID NO. CUFF.37708.1
  misc_feature: Variant of the nucleotide sequence at SEQ ID NO 15902
ttttaggctttgatgtttgaacgagtccacgacttctcactattgtcatttcatatttcttttttatttgtcggaatcaactgataccctgttcctacttgtgtaatctctgtgattgtttgggctttcttcgaggtgtattctcgacgacacgattcatccttcgtatcggacagactctaactgtggacgacccctcccggttcgtgctgaatcgacttagaagtggtattcctatcgtgcctcgcattgcgtgacattcggcttggccttggatcaggatcaacaacggatatatcttcagcacacccatcctccttgccacaatcgaagtgattactgcccctcggcactacttcgattaccagctttatagattgtactattcttcgtctatcccatcttcctattcacactgcttttctacccctcttgtcttgctattggcagtacctaaagagctcattctgcgcgagctgaatcgtcaacctcggacattattacgagaccctaacgccaccgtctggaagggccccaggctcccctaactacgagtgccggccacccctaacggcgcccgctacagcgcccatagcacccgatctgcatccaggctctgctgcaccacacgactccaaaatgctgtctcaatcagcagccccctcggctgcgacctttcctctcgctccctccacctcctctccaccaacgtcatccgcccgcaaacgcctaagcggcctcatcaatttacgtagctacacatccaattccgtctccagcgcccgtgatcccagcacttcccgcaatcagagcaatcggcacagcatccacggtgccatattcggcagccgtaccaacagcacctcccgctcgcgagcccgtgcatccactcacgaggagtcatcgctcgcagccgcgctctctgtcgcttttgaccctgctgagtatctggccgagcccgtctctatcacgcttgacacacagctcatcgagcctctgtctgctgtcgaagctcacgacgatccttcagctagtaatcgcttcagcacccgcttctgcgaatctgccgccgaagccttgctgcgagagaggtcgtcgcagagctccagtcccgagttgggttcagccgatggagaaatgaccaggtcacgatccgcaacctcgtccaacgacatggcgcccgatgcactgccctccatccgcctctcggccttctacgatccacgctctacccgtccgtcgctgtcattcacccctatcacccgcaccttgccgacgggcacagaactgatcaaggtcggccgctactctgagagggagagccatgcaccgatccctgccaacgtcccgtcttcagccccggtcggcttcaagagcaaggtcgtcagtcgccgccactgcgagttttggttcgagaagggcaagtggtatgtcaaggatgtgaaaagctcatcaggcactttcttgaaccacattcggctaagcgctccgggaaccgagtctaagccatatcccatcagtgacggggacatggtgcagctgggaatagacttcaagggcggcgaggaaatgatttatagatgtgtcaaaatgcgtgttgagttgaatcgaggatggcagcagaagccaaacgctttcaatatgaccacgcacaagcggctgcgagacatcacagctggggcctcgaatggcgcagcggggtctcatgcccaagactgctcaatttgcctgaacgcaattgctgtatgtttctcctaagccaagcgtgacattgtctcacgtaactacttgttggtctaacatgctacagccttgccaatccctttttgttgctccttgctcccatacatggcatttcaaatgcatccgggagatgcttcacgggccgtcttggccattgttcatgtgccccaattgccgggccacagctgatctggatgccgaggtggacgagcccgtagaggactggcagcagcttcccgaagacgtagctgaagaaaaggctgaggatggggcggagggggacgaagtgccagatatggccagtttggagttgcgtgagacgtcacagtcggaagacccggctgatgcgacgatgcaggtgaacgggcatacggcttccagtccggtaccgattcccgctggaaaccaaaggaggacgccttcgccggatgacagccgcgagggccccattacgcccagaaacgatgccggcccttgggtgtttgacggcaatccagggcgagtcagccaagagagcaggcgtggggcaatgcggagtctggacgcagctgcacaacagcctcacgccatgtgaaggaactgaacgatgcgattgtcatggtaggacgagacctcttgggacagagataggaacaggatgcaatggtgtcggacgggcgatactgcgctttcgtgagtcaagtggcagccggcaaactgaaaaattgaaagaaggctgcggatttggcatttttaggcgtcccttgtgtttgcgggcgtttggagcgaagcatcctatgcatagacggagttggtataccttgagaaacatgcatttattcctacaggcgtggctgcaaatgtagcatgttcacggctgaaataacaatagtgttttctctctttctcaatcagcccttttcgtgtcctctcctttgcaagcaacacaatatccagtcaagaatagtatatcccgctctactatgcattactgtctgctacggagtattcggtggtggcttcaacattgggacggttgagaagtagtacgtttttgatgagttacaactgccgtagctaagcgccatgtctaaaaggccaattagtgtctgaacaacgagacctataagcaagaaaataatataaatccaataacagagagagatatagagttattttagtgttcctttc

SEQ ID NO: 15905 - DNA, 882 bp, Muscodor strobelii
  misc_feature: SGI cDNA ID NO. 565277
  misc_feature: Reduced expression when VOC is produced
  misc_feature: Encodes the peptide sequence at SEQ ID NO 15906
atgtcgacaactgctggagccttcatagctggcggcatcgccgcttgcggtgctgtcacggccactcaccccttcgaaacggtcaagcttcgcatgcagctgcaaggcgaactacagtctaagggccaccagccgcaacactaccgcggccccttccacggcatcaaggtcatcgtcggcaacgagggtgtgcgcggcatatatcggggtttctacgagccgatgcgccacagcctcgcctctctgctgctgaacgacagttccaagcagaatctttttatcaacatgacctgcggcgctgcgtcaggcgtaatgggcgccgcctgtggctctcccttcttcctcattaaaacgcgccttcaaagctactcgcctttcctacctgttggtgtacaacatcggtaccgcaatgccattgacggcatgcgtcagatctacaaaggtgagggcgtgaagggtctgtacaggggcgtgtctgcggcaatgatccggaccgccttgggcagctctgttcagctgcctacctatttctttgccaagaggaggctgcagaagcacctcggtatggaggaaggtgcaccgctgcatttgaccagcagtgcgattgctggtttcgtggtttgctgctttatgcatcccccagacactgttatgtcgcgtctctacaaccaaaacggcaacctctacaaaggtgtattcgactgtctgagcaagacaatccgcaccgaaggtttctttgccatctacaagggctttgttccccatttagcccgcatcttaccacacaccatcctcacgctcagctttgccgagcaaactaataagctcatgcggaaagttgagcagaagatattacctgattcggccttcgggaaagtctag

SEQ ID NO: 15906 - protein, 293 aa, Muscodor strobelii
  misc_feature: SGI Peptide ID NO. 565277
  misc_feature (192)..(281): Pfam Id: PF00153 Pfam Desc: Mitochondrial carrier protein
  misc_feature (97)..(187): Pfam Id: PF00153 Pfam Desc: Mitochondrial carrier protein
  misc_feature (3)..(96): Pfam Id: PF00153 Pfam Desc: Mitochondrial carrier protein
  misc_feature (91)..(187): Pfam Id: PF00153 Pfam Desc: Mitochondrial carrier protein
  misc_feature (3)..(71): Pfam Id: PF00153 Pfam Desc: Mitochondrial carrier protein
  misc_feature (1)..(285): NCBI GI: 171687068 Blast Desc: protein product [Podospora anserina] gi|170943495|emb|CAP69148.1| protein product [Podospora anserina]
  misc_feature (1)..(293): NCBI GI: 116191723 Blast Desc: conserved [Chaetomium globosum CBS 148.51] gi|88181492|gb|EAQ88960.1| conserved [Chaetomium globosum CBS 148.51]
  misc_feature (1)..(290): NCBI GI: 39977005 Blast Desc: MGG_06405 [Magnaporthe grisea 70-15] gi|145016183|gb|EDK00673.1| MGG_06405 [Magnaporthe grisea 70-15]
  misc_feature (1)..(286): NCBI GI: 256729942 Blast Desc: [Nectria haematococca mpVI 77-13-4]
  misc_feature (1)..(285): NCBI GI: 85109231 Blast Desc: mitochondrial oxaloacetate transport protein [Neurospora crassa OR74A] gi|28924453|gb|EAA33581.1| mitochondrial oxaloacetate transport protein [Neurospora crassa
  misc_feature (1)..(287): NCBI GI: 46122073 Blast Desc: FG05414.1 [Gibberella zeae PH-1]
  misc_feature (1)..(293): NCBI GI: 225561745 Blast Desc: mitochondrial carrier protein [Ajellomyces capsulatus G186AR]
  misc_feature (1)..(288): NCBI GI: 255954085 Blast Desc: Pc21g07550 [Penicillium chrysogenum Wisconsin 54-1255] gi|211589506|emb|CAP95652.1| Pc21g07550 [Penicillium chrysogenum Wisconsin 54-1255]
  misc_feature (1)..(293): NCBI GI: 225684488 Blast Desc: mitochondrial oxaloacetate transport protein [Paracoccidioides brasiliensis Pb03]
  misc_feature (1)..(288): NCBI GI: 259489744 Blast Desc: TPA: mitochondrial oxaloacetate transporter (Oac), (AFU_orthologue; AFUA_5G12360) [Aspergillus nidulans FGSC A4]
  misc_feature: Useful for introducing or modulating the production of volatile compounds
MSTTAGAFIAGGIAACGAVTATHPFETVKLRMQLQGELQSKGHQPQHYRGPFHGIKVIVGNEGVRGIYRGFYEPMRHSLASLLLNDSSKQNLFINMTCGAASGVMGAACGSPFFLIKTRLQSYSPFLPVGVQHRYRNAIDGMRQIYKGEGVKGLYRGVSAAMIRTALGSSVQLPTYFFAKRRLQKHLGMEEGAPLHLTSSAIAGFVVCCFMHPPDTVMSRLYNQNGNLYKGVFDCLSKTIRTEGFFAIYKGFVPHLARILPHTILTLSFAEQTNKLMRKVEQKILPDSAFGKV

SEQ ID NO: 15907 - DNA, 3107 bp, Muscodor strobelii
  misc_feature: SGI EST ID NO. CUFF.37701.0
  misc_feature: Variant of the nucleotide sequence at SEQ ID NO 15905
acggtgcaaatggaatgggaaatgtcggctcatcaacactccagatatgattatttatgttgctcaatattgacggtttaaccattagaatagaacctgcacaacagcacaatttcaacctcaaatgaaatgccctctgtcgattcgtctggcatacgtagactctgctagtacgaacatagtagtattttaagctccttagaccggcggtgacctctgccaaggcccactgaagaccgaccgctccttgttcgctcaccatcttacttatacttctcttctttctctgctgctttctcgcgccattgccattgtgatcgcagccgcactccttccctcgagctccgaccgacacgcgggtcgcctgccaacacacagcaccgcaccatgtcgacaactgctggagccttcatagctggcggcatcgccgcttgcggtgctgtcacggccactcaccccttcgaaacggtcaagcttcggtatgccttagttctccatcgatcctgttctcttccggagagtccgctcggtgttgcggactgcgagcgcgggttttgacatataatgcgccggagctgacatgaatggcgcaacagcatgcagctgcaaggcgaactacagtctaagggccaccagccgcaacactaccgcggccccttccacggcatcaaggtcatcgtcggcaacgagggtgtgcgcggcatatatcgggggtctgggatgcgcatatgcctaccagatcttgttgaacgggtgccgcttaagtttctacgagccgatgcgccacagcctcgcctctctgctgctgaacgacagttccaagcagaatctttttatcaacatgacctgcggcgctgcgtcaggcgtaatgggcgccgcctgtggctctcccttcttcctcattaaaacgcgccttcaaagctactcgcctttcctacctgttggtgtacaacatcggtaccgcaatgccattgacggcatgcgtcagatctacaaaggtgagggcgtgaagggtctgtacaggggcgtgtctgcggcaatgatccggaccgccttgggcagctctgttcagctgcctacctatttctttgccaagaggaggctgcagaagcacctcggtatggaggaaggtgcaccgctgcatttgaccagcagtgcgattgctggtttcgtggtttgctgctttatgcatcccccagacactgttatgtcgcgtctctacaaccaaaacggcaacctctacaaaggtgtattcgactgtctgagcaagacaatccgcaccgaaggtttctttgccatctacaagggctttgttccccatttagcccgcatcttaccacacaccatcctcacgctcagctttgccgagcaaactaataagctcatgcggaaagttgagcagaagatattacctgattcggccttcgggaaagtctagacaccagtgcaacgctgcaagaagcgacgtgtaaagagcccatcccggctcatcgcaaagagaagaaaaggaaagttttcgatatttagatcatgcaacccagagtggttcaggagtccggttctggcctatttctttcggatatatattcacggtgttcctaggaaactataccaaaatatactgggcaatgtgtttttcgcaagaaaatacaataggggaatgaacatgtacatgagagtagacgaggggtttcggagcgccattacttcctctgtccatatgtacaggcatagaggcgtgtaaatagaagaataaagttgataaagaccatattcctgacgcgactactttggcggaatcacgatcgtatgagctatcgtgaaagcaaattagtagaaggaagtgtcgcgacacacgtatcatcgctcatgccggcataactacacctacctatttcccaaacattgatcagtgttgctcagttctaatttcactttacttcattctattcccgacttcctcaccctctcaccgatctttcacacccataacataatctcgctctcctccttccctcggccgcaattccatcccccgcatcctcacctagctctcccttccaccgctcatcacccacgggatctaatctcacgccgcagagtccacactgctcagtctttccatcaccatgcccattttcgctacgcgtatcccgaccatgctgatgtgtagccggcgcagagcgattcagtttccccgtagtcctaacaacatttgcgacaacactcggataattctcctcgacatctccaaaatacctcgacaccacatcatcaagactcaactccctatgcgaaaccacagccctctgtccgccgttcttctcactcgaatcccgtgggaaaagatccgacaggggaccagcgggtgatatagcaagcgagacatacgtcaagacttctttccgaaggatctcccggataggactatacaccggtatatttttccgcgaattctcatccgtgtcgtcggtcgatgcgtcatcgacactcctgggtagaggaaactccccatcattaaccaaccacgggatcccgaaccccctccctttcgctgtttcggtgagcgtaagttcagcgagtgccgtggtattatacccgaataacagcgccgcgcacttgtactccgtacaagcctcgaagagcacatgccgaaccaacagccgctcgacatccgccctcgcgctcggagtcggaagtcttgagagcatatccttcagtcgctgcggtgggggtaaatcctcggtctgtttaggtaacgcagaccaatccaccgccctcaacccgagtacactggaaagcggtatgtcgtggatctgtatctcggggaaatgcttctcaaacttatctcctccctcttcattttcattttcttcccctttcgtttcatcacaatcaaccaccacagcacaaatctcaaacctcaccctctgccccaggcttctcaacctccttaaattttcacaaagaacatgcagcagtgccgtcgagcccgggccccgcgaaagcgcaagcaagtatctcaccgggggcgcattcaactcagcctttggccctcttgtctcgcggtgtaggatctctaggcgtttgatgactttgctgtttat

SEQ ID NO: 15908 - DNA, 1233 bp, Muscodor strobelii
  misc_feature: SGI cDNA ID NO. 565278
  misc_feature: Reduced expression when VOC is produced
  misc_feature: Encodes the peptide sequence at SEQ ID NO 15909
atggcgccgtgcgtacggtgtaaagaacgagacgcagtcgcctcgctgcgaactgagtccgtttgcgcacaatgcttcacgagttacataaacagcaaagtcatcaaacgcctagagatcctacaccgcgagacaagagggccaaaggctgagttgaatgcgcccccggtgagatacttgcttgcgctttcgcggggcccgggctcgacggcactgctgcatgttctttgtgaaaatttaaggaggttgagaagcctggggcagagggtgaggtttgagatttgtgctgtggtggttgattgtgatgaaacgaaaggggaagaaaatgaaaatgaagagggaggagataagtttgagaagcatttccccgagatacagatccacgacataccgctttccagtgtactcgggttgagggcggtggattggtctgcgttacctaaacagaccgaggatttacccccaccgcagcgactgaaggatatgctctcaagacttccgactccgagcgcgagggcggatgtcgagcggctgttggttcggcatgtgctcttcgaggcttgtacggagtacaagtgcgcggcgctgttattcgggtataataccacggcactcgctgaacttacgctcaccgaaacagcgaaagggagggggttcgggatcccgtggttggttaatgatggggagtttcctctacccaggagtgtcgatgacgcatcgaccgacgacacggatgagaattcgcggaaaaatataccggtgtatagtcctatccgggagatccttcggaaagaagtcttgacgtatgtctcgcttgctatatcacccgctggtcccctgtcggatcttttcccacgggattcgagtgagaagaacggcggacagagggctgtggtttcgcatagggagttgagtcttgatgatgtggtgtcgaggtattttggagatgtcgaggagaattatccgagtgttgtcgcaaatgttgttaggactacggggaaactgaatcgctctgcgccggctacacatcagcatggtcgggatacgcgtagcgaaaatgggcatggtgatggaaagactgagcagtgtggactctgcggcgtgagattagatcccgtgggtgatgagcggtggaagggagagctaggtgaggatgcgggggatggaattgcggccgagggaaggaggagagcgagattatgttatgggtgtgaaagatcggtgagagggtga

SEQ ID NO: 15909 - protein, 410 aa, Muscodor strobelii
  misc_feature: SGI Peptide ID NO. 565278
  misc_feature (3)..(410): NCBI GI: 39977003 Blast Desc: MGG_06404 [Magnaporthe grisea 70-15] gi|145016184|gb|EDK00674.1| MGG_06404 [Magnaporthe grisea 70-15]
  misc_feature (3)..(410): NCBI GI: 261358462 Blast Desc: conserved [Verticillium albo-atrum VaMs.102]
  misc_feature (3)..(410): NCBI GI: 256729754 Blast Desc: NECHADRAFT_62936 [Nectria haematococca mpVI 77-13-4]
  misc_feature (10)..(410): NCBI GI: 164424150 Blast Desc: NCU07877 [Neurospora crassa OR74A] gi|157070396|gb|EAA33574.2| [Neurospora crassa OR74A]
  misc_feature (1)..(410): NCBI GI: 116191721 Blast Desc: CHGG_05578 [Chaetomium globosum CBS 148.51] gi|88181491|gb|EAQ88959.1| CHGG_05578 [Chaetomium globosum CBS 148.51]
  misc_feature (3)..(410): NCBI GI: 46122075 Blast Desc: FG05415.1 [Gibberella zeae PH-1]
  misc_feature (4)..(375): NCBI GI: 171687066 Blast Desc: protein product [Podospora anserina] gi|170943494|emb|CAP69147.1| protein product [Podospora anserina]
  misc_feature (4)..(408): NCBI GI: 169614117 Blast Desc: SNOG_10193 [Phaeosphaeria nodorum SN15] gi|121746829|sp|Q0UDH1.1|CTU2_PHANO RecName: Full=Cytoplasmic tRNA 2-thiolation protein 2 gi|111061408|gb|EAT82528.1| nodorum
  misc_feature (2)..(357): NCBI GI: 156040764 Blast Desc: SS1G_11360 [Sclerotinia sclerotiorum 1980] gi|226711142|sp|A7F190.1|CTU2_SCLS1 RecName: Full=Cytoplasmic tRNA 2-thiolation protein 2 gi|154695744|gb|EDN95482.1| 1980]
  misc_feature (3)..(408): NCBI GI: 189199104 Blast Desc: conserved [Pyrenophora tritici-repentis Pt-1C-BFP] gi|226711141|sp|B2W6W8.1|CTU2_PYRTR RecName: Full=Cytoplasmic tRNA 2-thiolation protein 2 gi|187982988|gb|EDU48476.1| conserved
  misc_feature: Useful for introducing or modulating the production of volatile compounds
MAPCVRCKERDAVASLRTESVCAQCFTSYINSKVIKRLEILHRETRGPKAELNAPPVRYLLALSRGPGSTALLHVLCENLRRLRSLGQRVRFEICAVVVDCDETKGEENENEEGGDKFEKHFPEIQIHDIPLSSVLGLRAVDWSALPKQTEDLPPPQRLKDMLSRLPTPSARADVERLLVRHVLFEACTEYKCAALLFGYNTTALAELTLTETAKGRGFGIPWLVNDGEFPLPRSVDDASTDDTDENSRKNIPVYSPIREILRKEVLTYVSLAISPAGPLSDLFPRDSSEKNGGQRAVVSHRELSLDDVVSRYFGDVEENYPSVVANVVRTTGKLNRSAPATHQHGRDTRSENGHGDGKTEQCGLCGVRLDPVGDERWKGELGEDAGDGIAAEGRRRARLCYGCERSVRG

SEQ ID NO: 15910 - DNA, 2137 bp, Muscodor strobelii
  misc_feature: SGI EST ID NO. CUFF.37702.3
  misc_feature: Variant of the nucleotide sequence at SEQ ID NO 15908
cgaaacacagactacaaacatcaccaagttttgaaatatcaaaacatgaataagacataaatcttattgtactcatactccaattgtactgctctaccgtcgttgttcctgtggcctagaagacacgcgcgcctacaacatggcgccgtgcgtacggtgtaaagaacgagacgcagtcgcctcgctgcgaactgagtccgtttgcgcacaatgcttcacgagttacataaacagcaaagtcatcaaacgcctagagatcctacaccgcgagacaagagggccaaaggctgagttgaatgcgcccccggtgagatacttgcttgcgctttcgcggggcccgggctcgacggcactgctgcatgttctttgtgaaaatttaaggaggttgagaagcctggggcagagggtgaggtttgagatttgtgctgtggtggttgattgtgatgaaacgaaaggggaagaaaatgaaaatgaagagggaggagataagtttgagaagcatttccccgagatacagatccacgacataccgctttccagtgtactcgggttgagggcggtggattggtctgcgttacctaaacagaccgaggatttacccccaccgcagcgactgaaggatatgctctcaagacttccgactccgagcgcgagggcggatgtcgagcggctgttggttcggcatgtgctcttcgaggcttgtacggagtacaagtgcgcggcgctgttattcgggtataataccacggcactcgctgaacttacgctcaccgaaacagcgaaagggagggggttcgggatcccgtggttggttaatgatggggagtttcctctacccaggagtgtcgatgacgcatcgaccgacgacacggatgagaattcgcggaaaaatataccggtgtatagtcctatccgggagatccttcggaaagaagtcttgacgtatgtctcgcttgctatatcacccgctggtcccctgtcggatcttttcccacgggattcgagtgagaagaacggcggacagagggctgtggtttcgcatagggagttgagtcttgatgatgtggtgtcgaggtattttggagatgtcgaggagaattatccgagtgttgtcgcaaatgttgttaggactacggggaaactgaatcgctctgcgccggctacacatcagcatggtcgggatacgcgtagcgaaaatgggcatggtgatggaaagactgagcagtgtggactctgcggcgtgagattagatcccgtgggtgatgagcggtggaagggagagctaggtgaggatgcgggggatggaattgcggccgagggaaggaggagagcgagattatgttatgggtgtgaaagatcggtgagagggtgaggaagtcgggaatagaatgaagtaaagtgaaattagaactgagcaacactgatcaatgtttgggaaataggtaggtgtagttatgccggcatgagcgatgatacgtgtgtcgcgacacttccttctactaatttgctttcacgatagctcatacgatcgtgattccgccaaagtagtcgcgtcaggaatatggtctttatcaactttattcttctatttacacgcctctatgcctgtacatatggacagaggaagtaatggcgctccgaaacccctcgtctactctcatgtacatgttcattcccctattgtattttcttgcgaaaaacacattgcccagtatattttggtatagtttcctaggaacaccgtgaatatatatccgaaagaaataggccagaaccggactcctgaaccactctgggttgcatgatctaaatatcgaaaactttccttttcttctctttgcgatgagccgggatgggctctttacacgtcgcttcttgcagcgttgcactggtgtctagactttcccgaaggccgaatcaggtaatatcttctgctcaactttccgcatgagcttattagtttgctcggcaaagctgagcgtgaggatggtgtgtggtaagatgcgggctaaatggggaacaaagcccttgtagatggcaaagaaaccttcggtgcggattgtcttgctcagacagtcgaatacacctttgtagaggttgccgttttggttgtagagacgcgacataacagtgtctg

SEQ ID NO: 15911 - DNA, 3678 bp, Muscodor strobelii
  misc_feature: SGI cDNA ID NO. 565279
  misc_feature: Encodes the peptide sequence at SEQ ID NO 15912
atgaccgatctaacgactgcacccgagctgtcaaatcagaaaatacacccattcttctcggcgcctcaaccaactcttcttcccaactctgatgatgctacaacgcaccacacaaaagcccatgatgccgtgacaccacctactcccgacccgtcatgtagtccacggtctgatcggtccaacaatgctgaccacgccgaggatgagcatggcctgcctgatgagcacaagaggaaacgccgcaagaccgatccgcctgccctcatggcagaaggccacacgaagaagcctcggaggaaacgaactgcgcgagcatccgctggcggcaatataatggcacattttagcaaggatgggcgcggatcggtcgagcaagaaccggatgagccgcgcttgctaaacccaaccgtagcaaatacgcacaagccctcgacgccatcctcgactcctactgccagcacggtactgaacatagtacggaatcaagagaatgtacagcagagcccatcaattgattctgggagacctcaaagactgctcaagctgaaccccaaaacgggaacaattggaagccccccgcagcctagaccaacagcaatcgtctcagacatgatacccacgcgaactggctccaaacgcggccgaaagcccaaaaagctcatcgtctcgatcccatatggcgcggacgccgaatcacgcacgcgcatcggccaacgcatcaatcagattctagacggaagcttgaggctcaacttaccaccattaacgctcactgtcgcctcgacgccccctgcgagccaaacatctacaaaatccgaaccgagcaaaaccgccacgccgaagaagcgctcgccaagaaaagctagaaaccccgccaaacccgatcatccatttttccaacagaaaggcaaggcaagtggcaatgcggatgttgaaaaggagagcgttcccaaagaggataaggcatcgcccaaacgacgggtcatcttcacttcgactccatgctcgcccaagcgccctgtagctcgacagcctccctttacgataaaaaatatgggttccaagaacggaattctacgaacaccgggcgcaaaagatcctgcttggccctggcagggggcagctcacgtccgcggcactatagacctagacctcaacatgggcgaaagcttggacttgcttggacgaaaacgcaaatcaaagaggcaggaaatacgaatgggtcaggctgagagcattctggaaagaagcgctactgaactacacatcccaaaactggctcaggacttaaaattaacaagcagcgaagacctcaatccaatctccgacgtcgttcgcagacctgttaagcactttgagagtggtcgagagcttcggcggcgcgtgctacaacaactccgcacaattcgaaatccaggggcttcagtcagaacacatcccgctatcctaaatctctataacagcatcgaaacgactctctccgctttcgatagggctacatgcgaatcgtccgcctggactcagaagtatggcccgacgactgcgcaatgcgttcttcaagatggacgagaggtgcaccttttaagaaattggctacagacattgaaagtgcaatccgtagacaccggatcacttgacaatgtctcaaaggcgaatggtactcaaacacttaagaagaagcggcgacgcaagaatctggtcgactttgtggtctcaagcgacgaagaggcagatgatatggaccaagtttccgaggatgagcccgactggatggttcgtggaggtcgcggtgacactctcaaaactgtcttaagatccggtgatgttgcgagccgaggaggcaagaactctgctcgcttgacgaacgccgtactgcttagcggaccgcatgggtgcggcaagacagctgcggtctacgctatcgcaaaagaactcgactttgaggtgtttgagatccacgccggcgcacgtcggagtggtaaggatatattggaaagagtgggcgatatgacccggaatcacttggttcatcaccaacaaaaggacaatattcaaggtgatactccgtctgaagacgagacggagcgagacttgaagtctggtaaacaaggcaggatggactcgttcttcaaaccaaaggcgacagcagcgaagaaggaagctaagaagcccaatacgcaggagatgaagaaacccaccagtcaacttccagctcaacaagatatcaagaaaccaagcagggatcagaaacagtcgctgatcttattggaagaagtcgatatcctttacgacgaggacaagcaattttgggctactgtgatgactatgatcgcacagtcaaaacgacccttcattatgacttgcaatgatgagacggttgttccgttacaaagcctgaaactccacgggatctttagattttctcctccacctaccgatcttgcagttgatctcctactgtcggtggccgcgtgtgagggccatgctctggaccgtgactctgtggagacgctgtacgagtcacgcggtcatgatctccgtgcatcaataactgaactgaattattggtgccaaatcggtgttggtgcattaaggggtggcgtggattggttttttcccagatggccgaaagggtgcgacatcgatttggagggacagatcattcgggtggtcagccaaggaacataccagagaggtatgggttggttcaaccgggattcggaggccgcaatgcactcattgcgtccacacagggaagagatgcatagagaggcttgggatttctggggtctggacatctcagattccattgactcagacgaaattttatcccgtgccgccgaggccactcgcagctgcgcatcgaatgcagagcgccggatgctcttggatgatttcgcgacgttcgcaggtatcatgagtgattcagacctctgtggcccatttattgccgatgcctccaacaaagtccctcttgacgctacgttaccaacaatgcacaacaagaccttagatgattttacgattgggctcaaggtgctagaagcaccctcattgtgtcgatatagcacgacggctctggaaatggcatcttcgttgcgagacatgggtcaatctcgcctacagcatcgctcaagcgatatcgaagacagttctatgaggcgattgaatggggaggaaatggtcgctcgcatcaggaggagcctccaggattcctcgcattccaagctggcgattgttcgtagggactatagcatggccttcgatcctatcgcagcatccgacaagattctagctaacggctatctggatccctctgtgttcgaccgaacgatggcaactatctgcttggacatcgccccatacattcgaagcattgtggcgtatgatcaacgactccaaaacgaacgtcgggtgcggagcagtctacttagcgaagggggtaaaccggacaagaaacgcatgcgtacaacacgagctgccatgtctgctttggaaggcggtaccagatcaagtacacgtcgtgagaaatacttctcggctgatatcaacccctatcttgtgctacggactggaggaaagagttggcaggaattaggtctcgaggctattgccgcggatcaggtcccaatcgcaagttatgctagcgacatcaacatggatggaagctctgactag

SEQ ID NO: 15912 - protein, 1225 aa, Muscodor strobelii
  misc_feature: SGI Peptide ID NO. 565279
  misc_feature (623)..(652): Pfam Id: PF00004 Pfam Desc: ATPase family associated with various cellular activities (AAA)
  misc_feature (9)..(1204): NCBI GI: 256726119 Blast Desc: NECHADRAFT_100906 [Nectria haematococca mpVI 77-13-4]
  misc_feature (152)..(1205): NCBI GI: 85090464 Blast Desc: NCU10926 [Neurospora crassa OR74A] gi|28919791|gb|EAA29193.1| [Neurospora crassa OR74A]
  misc_feature (11)..(1211): NCBI GI: 171680928 Blast Desc: protein product [Podospora anserina] gi|170940422|emb|CAP65649.1| protein product [Podospora anserina]
  misc_feature (14)..(1211): NCBI GI: 39940382 Blast Desc: MGG_05049 [Magnaporthe grisea 70-15] gi|145010703|gb|EDJ95359.1| MGG_05049 [Magnaporthe grisea 70-15]
  misc_feature (5)..(1198): NCBI GI: 46111701 Blast Desc: FG02732.1 [Gibberella zeae PH-1]
  misc_feature (167)..(1196): NCBI GI: 116191529 Blast Desc: CHGG_05482 [Chaetomium globosum CBS 148.51] gi|88181395|gb|EAQ88863.1| CHGG_05482 [Chaetomium globosum CBS 148.51]
  misc_feature (172)..(1196): NCBI GI: 156065631 Blast Desc: SS1G_00826 [Sclerotinia sclerotiorum 1980] gi|154691685|gb|EDN91423.1| SS1G_00826 [Sclerotinia sclerotiorum 1980]
  misc_feature (13)..(1209): NCBI GI: 261359190 Blast Desc: conserved [Verticillium albo-atrum VaMs.102]
  misc_feature (73)..(1199): NCBI GI: 169775749 Blast Desc: [Aspergillus oryzae RIB40] gi|83771076|dbj|BAE61208.1| protein product [Aspergillus oryzae]
  misc_feature (73)..(1199): NCBI GI: 238502397 Blast Desc: conserved [Aspergillus flavus NRRL3357] gi|220691242|gb|EED47590.1| conserved [Aspergillus flavus NRRL3357]
MTDLTTAPELSNQKIHPFFSAPQPTLLPNSDDATTHHTKAHDAVTPPTPDPSCSPRSDRSNNADHAEDEHGLPDEHKRKRRKTDPPALMAEGHTKKPRRKRTARASAGGNIMAHFSKDGRGSVEQEPDEPRLLNPTVANTHKPSTPSSTPTASTVLNIVRNQENVQQSPSIDSGRPQRLLKLNPKTGTIGSPPQPRPTAIVSDMIPTRTGSKRGRKPKKLIVSIPYGADAESRTRIGQRINQILDGSLRLNLPPLTLTVASTPPASQTSTKSEPSKTATPKKRSPRKARNPAKPDHPFFQQKGKASGNADVEKESVPKEDKASPKRRVIFTSTPCSPKRPVARQPPFTIKNMGSKNGILRTPGAKDPAWPWQGAAHVRGTIDLDLNMGESLDLLGRKRKSKRQEIRMGQAESILERSATELHIPKLAQDLKLTSSEDLNPISDVVRRPVKHFESGRELRRRVLQQLRTIRNPGASVRTHPAILNLYNSIETTLSAFDRATCESSAWTQKYGPTTAQCVLQDGREVHLLRNWLQTLKVQSVDTGSLDNVSKANGTQTLKKKRRRKNLVDFVVSSDEEADDMDQVSEDEPDWMVRGGRGDTLKTVLRSGDVASRGGKNSARLTNAVLLSGPHGCGKTAAVYAIAKELDFEVFEIHAGARRSGKDILERVGDMTRNHLVHHQQKDNIQGDTPSEDETERDLKSGKQGRMDSFFKPKATAAKKEAKKPNTQEMKKPTSQLPAQQDIKKPSRDQKQSLILLEEVDILYDEDKQFWATVMTMIAQSKRPFIMTCNDETVVPLQSLKLHGIFRFSPPPTDLAVDLLLSVAACEGHALDRDSVETLYESRGHDLRASITELNYWCQIGVGALRGGVDWFFPRWPKGCDIDLEGQIIRVVSQGTYQRGMGWFNRDSEAAMHSLRPHREEMHREAWDFWGLDISDSIDSDEILSRAAEATRSCASNAERRMLLDDFATFAGIMSDSDLCGPFIADASNKVPLDATLPTMHNKTLDDFTIGLKVLEAPSLCRYSTTALEMASSLRDMGQSRLQHRSSDIEDSSMRRLNGEEMVARIRRSLQDSSHSKLAIVRRDYSMAFDPIAASDKILANGYLDPSVFDRTMATICLDIAPYIRSIVAYDQRLQNERRVRSSLLSEGGKPDKKRMRTTRAAMSALEGGTRSSTRREKYFSADINPYLVLRTGGKSWQELGLEAIAADQVPIASYASDINMDGSSD

SEQ ID NO: 15913 - DNA, 4282 bp, Muscodor strobelii
  misc_feature: SGI EST ID NO. CUFF.37618.0
  misc_feature: Variant of the nucleotide sequence at SEQ ID NO 15911
cctccttccgccttctgtaactcggtatagaatcgcgcttttagtgagcatttgaaatttagacttctgcttctcatacgacttatctctaatttatttttcatccaactcttccatatcccctctgcgtcacaagttgcaacctgcagtgataattgcttctctgctctggagaatatctatcccgcgtaaatatacatctgcattgcagcagctacagccccttcgatgcctcgcccacgccacgtctcatgatctcatgatacggctttggcttattgagtcgcttatcccccgacttgcgccaagatgaccgatctaacgactgcacccgagctgtcaaatcagaaaatacacccattcttctcggcgcctcaaccaactcttcttcccaactctgatgatgctacaacgcaccacacaaaagcccatgatgccgtgacaccacctactcccgacccgtcatgtagtccacggtctgatcggtccaacaatgctgaccacgccgaggatgagcatggcctgcctgatgagcacaagaggaaacgccgcaagaccgatccgcctgccctcatggcagaaggccacacgaagaagcctcggaggaaacgaactgcgcgagcatccgctggcggcaatataatggcacattttagcaaggatgggcgcggatcggtcgagcaagaaccggatgagccgcgcttgctaaacccaaccgtagcaaatacgcacaagccctcgacgccatcctcgactcctactgccagcacggtactgaacatagtacggaatcaagagaatgtacagcagagcccatcaattgattctgggagacctcaaagactgctcaagctgaaccccaaaacgggaacaattggaagccccccgcagcctagaccaacagcaatcgtctcagacatgatacccacgcgaactggctccaaacgcggccgaaagcccaaaaagctcatcgtctcgatcccatatggcgcggacgccgaatcacgcacgcgcatcggccaacgcatcaatcagattctagacggaagcttgaggctcaacttaccaccattaacgctcactgtcgcctcgacgccccctgcgagccaaacatctacaaaatccgaaccgagcaaaaccgccacgccgaagaagcgctcgccaagaaaagctagaaaccccgccaaacccgatcatccatttttccaacagaaaggcaaggcaagtggcaatgcggatgttgaaaaggagagcgttcccaaagaggataaggcatcgcccaaacgacgggtcatcttcacttcgactccatgctcgcccaagcgccctgtagctcgacagcctccctttacgataaaaaatatgggttccaagaacggaattctacgaacaccgggcgcaaaagatcctgcttggccctggcagggggcagctcacgtccgcggcactatagacctagacctcaacatgggcgaaagcttggacttgcttggacgaaaacgcaaatcaaagaggcaggaaatacgaatgggtcaggctgagagcattctggaaagaagcgctactgaactacacatcccaaaactggctcaggacttaaaattaacaagcagcgaagacctcaatccaatctccgacgtcgttcgcagacctgttaagcactttgagagtggtcgagagcttcggcggcgcgtgctacaacaactccgcacaattcgaaatccaggggcttcagtcagaacacatcccgctatcctaaatctctataacagcatcgaaacgactctctccgctttcgatagggctacatgcgaatcgtccgcctggactcagaagtatggcccgacgactgcgcaatgcgttcttcaagatggacgagaggtgcaccttttaagaaattggctacagacattgaaagtgcaatccgtagacaccggatcacttgacaatgtctcaaaggcgaatggtactcaaacacttaagaagaagcggcgacgcaagaatctggtcgactttgtggtctcaagcgacgaagaggcagatgatatggaccaagtttccgaggatgagcccgactggatggttcgtggaggtcgcggtgacactctcaaaactgtcttaagatccggtgatgttgcgagccgaggaggcaagaactctgctcgcttgacgaacgccgtactgcttagcggaccgcatgggtgcggcaagacagctgcggtctacgctatcgcaaaagaactcgactttgaggtgtttgagatccacgccggcgcacgtcggagtggtaaggatatattggaaagagtgggcgatatgacccggaatcacttggttcatcaccaacaaaaggacaatattcaaggtgatactccgtctgaagacgagacggagcgagacttgaagtctggtaaacaaggcaggatggactcgttcttcaaaccaaaggcgacagcagcgaagaaggaagctaagaagcccaatacgcaggagatgaagaaacccaccagtcaacttccagctcaacaagatatcaagaaaccaagcagggatcagaaacagtcgctgatcttattggaagaagtcgatatcctttacgacgaggacaagcaattttgggctactgtgatgactatgatcgcacagtcaaaacgacccttcattatgacttgcaatgatgagacggttgttccgttacaaagcctgaaactccacgggatctttagattttctcctccacctaccgatcttgcagttgatctcctactgtcggtggccgcgtgtgagggccatgctctggaccgtgactctgtggagacgctgtacgagtcacgcggtcatgatctccgtgcatcaataactgaactgaattattggtgccaaatcggtgttggtgcattaaggggtggcgtggattggttttttcccagatggccgaaagggtgcgacatcgatttggagggacagatcattcgggtggtcagccaaggaacataccagagaggtatgggttggttcaaccgggattcggaggccgcaatgcactcattgcgtccacacagggaagagatgcatagagaggcttgggatttctggggtctggacatctcagattccattgactcagacgaaattttatcccgtgccgccgaggccactcgcagctgcgcatcgaatgcagagcgccggatgctcttggatgatttcgcgacgttcgcaggtatcatgagtgattcagacctctgtggcccatttattgccgatgcctccaacaaagtccctcttgacgctacgttaccaacaatgcacaacaagaccttagatgattttacgattgggctcaaggtgctagaagcaccctcattgtgtcgatatagcacgacggctctggaaatggcatcttcgttgcgagacatgggtcaatctcgcctacagcatcgctcaagcgatatcgaagacagttctatgaggcgattgaatggggaggaaatggtcgctcgcatcaggaggagcctccaggattcctcgcattccaagctggcgattgttcgtagggactatagcatggccttcgatcctatcgcagcatccgacaagattctagctaacggctatctggatccctctgtgttcgaccgaacgatggcaactatctgcttggacatcgccccatacattcgaagcattgtggcgtatgatcaacgactccaaaacgaacgtcgggtgcggagcagtctacttagcgaagggggtaaaccggacaagaaacgcatgcgtacaacacgagctgccatgtctgctttggaaggcggtaccagatcaagtacacgtcgtgagaaatacttctcggctgatatcaacccctatcttgtgctacggactggaggaaagagttggcaggaattaggtctcgaggctattgccgcggatcaggtcccaatcgcaagttatgctagcgacatcaacatggatggaagctctgactagcttaagagcatgcagatctcgttcatgcgtacataaatgcatattatttcgagcattatttttaggcgtatacctggtgcatatcgtggcagcatttggcgttacgacgggaatgagacagactcagaggcatttacacaacgtatatatagtggcaatatatcttgctgatatgagtaatctactcccggagcgcttgttattgtgatagtgatcctagagatagtacggacacgaacccgagatctaaatgtgctgactgggaaagcctacccggcactaaatccaaggggca

SEQ ID NO: 15914 - DNA, 1941 bp, Muscodor strobelii
  misc_feature: SGI cDNA ID NO. 565280
  misc_feature: Encodes the peptide sequence at SEQ ID NO 15915
atggaccaagtttccgaggatgagcccgactggatggttcgtggaggtcgcggtgacactctcaaaactgtcttaagatccggtgatgttgcgagccgaggaggcaagaactctgctcgcttgacgaacgccgtactgcttagcggaccgcatgggtgcggcaagacagctgcggtctacgctatcgcaaaagaactcgactttgaggtgtttgagatccacgccggcgcacgtcggagtggtaaggatatattggaaagagtgggcgatatgacccggaatcacttggttcatcaccaacaaaaggacaatattcaaggtgatactccgtctgaagacgagacggagcgagacttgaagtctggtaaacaaggcaggatggactcgttcttcaaaccaaaggcgacagcagcgaagaaggaagctaagaagcccaatacgcaggagatgaagaaacccaccagtcaacttccagctcaacaagatatcaagaaaccaagcagggatcagaaacagtcgctgatcttattggaagaagtcgatatcctttacgacgaggacaagcaattttgggctactgtgatgactatgatcgcacagtcaaaacgacccttcattatgacttgcaatgatgagacggttgttccgttacaaagcctgaaactccacgggatctttagattttctcctccacctaccgatcttgcagttgatctcctactgtcggtggccgcgtgtgagggccatgctctggaccgtgactctgtggagacgctgtacgagtcacgcggtcatgatctccgtgcatcaataactgaactgaattattggtgccaaatcggtgttggtgcattaaggggtggcgtggattggttttttcccagatggccgaaagggtgcgacatcgatttggagggacagatcattcgggtggtcagccaaggaacataccagagaggtatgggttggttcaaccgggattcggaggccgcaatgcactcattgcgtccacacagggaagagatgcatagagaggcttgggatttctggggtctggacatctcagattccattgactcagacgaaattttatcccgtgccgccgaggccactcgcagctgcgcatcgaatgcagagcgccggatgctcttggatgatttcgcgacgttcgcaggtatcatgagtgattcagacctctgtggcccatttattgccgatgcctccaacaaagtccctcttgacgctacgttaccaacaatgcacaacaagaccttagatgattttacgattgggctcaaggtgctagaagcaccctcattgtgtcgatatagcacgacggctctggaaatggcatcttcgttgcgagacatgggtcaatctcgcctacagcatcgctcaagcgatatcgaagacagttctatgaggcgattgaatggggaggaaatggtcgctcgcatcaggaggagcctccaggattcctcgcattccaagctggcgattgttcgtagggactatagcatggccttcgatcctatcgcagcatccgacaagattctagctaacggctatctggatccctctgtgttcgaccgaacgatggcaactatctgcttggacatcgccccatacattcgaagcattgtggcgtatgatcaacgactccaaaacgaacgtcgggtgcggagcagtctacttagcgaagggggtaaaccggacaagaaacgcatgcgtacaacacgagctgccatgtctgctttggaaggcggtaccagatcaagtacacgtcgtgagaaatacttctcggctgatatcaacccctatcttgtgctacggactggaggaaagagttggcaggaattaggtctcgaggctattgccgcggatcaggtcccaatcgcaagttatgctagcgacatcaacatggatggaagctctgactag

SEQ ID NO: 15915 - protein, 646 aa, Muscodor strobelii
  misc_feature: SGI Peptide ID NO. 565280
  misc_feature (44)..(73): Pfam Id: PF00004 Pfam Desc: ATPase family associated with various cellular activities (AAA)
  misc_feature (1)..(625): NCBI GI: 256726119 Blast Desc: NECHADRAFT_100906 [Nectria haematococca mpVI 77-13-4]
  misc_feature (1)..(634): NCBI GI: 39940382 Blast Desc: MGG_05049 [Magnaporthe grisea 70-15] gi|145010703|gb|EDJ95359.1| MGG_05049 [Magnaporthe grisea 70-15]
  misc_feature (1)..(626): NCBI GI: 85090464 Blast Desc: NCU10926 [Neurospora crassa OR74A] gi|28919791|gb|EAA29193.1| [Neurospora crassa OR74A]
  misc_feature (4)..(619): NCBI GI: 46111701 Blast Desc: FG02732.1 [Gibberella zeae PH-1]
  misc_feature (1)..(632): NCBI GI: 171680928 Blast Desc: protein product [Podospora anserina] gi|170940422|emb|CAP65649.1| protein product [Podospora anserina]
  misc_feature (22)..(617): NCBI GI: 156065631 Blast Desc: SS1G_00826 [Sclerotinia sclerotiorum 1980] gi|154691685|gb|EDN91423.1| SS1G_00826 [Sclerotinia sclerotiorum 1980]
  misc_feature (5)..(618): NCBI GI: 116191529 Blast Desc: CHGG_05482 [Chaetomium globosum CBS 148.51] gi|88181395|gb|EAQ88863.1| CHGG_05482 [Chaetomium globosum CBS 148.51]
  misc_feature (2)..(630): NCBI GI: 261359190 Blast Desc: conserved [Verticillium albo-atrum VaMs.102]
  misc_feature (1)..(620): NCBI GI: 121717071 Blast Desc: conserved [Aspergillus clavatus NRRL 1] gi|119404156|gb|EAW14573.1| conserved [Aspergillus clavatus NRRL 1]
  misc_feature (1)..(620): NCBI GI: 238502397 Blast Desc: conserved [Aspergillus flavus NRRL3357] gi|220691242|gb|EED47590.1| conserved [Aspergillus flavus NRRL3357]
MDQVSEDEPDWMVRGGRGDTLKTVLRSGDVASRGGKNSARLTNAVLLSGPHGCGKTAAVYAIAKELDFEVFEIHAGARRSGKDILERVGDMTRNHLVHHQQKDNIQGDTPSEDETERDLKSGKQGRMDSFFKPKATAAKKEAKKPNTQEMKKPTSQLPAQQDIKKPSRDQKQSLILLEEVDILYDEDKQFWATVMTMIAQSKRPFIMTCNDETVVPLQSLKLHGIFRFSPPPTDLAVDLLLSVAACEGHALDRDSVETLYESRGHDLRASITELNYWCQIGVGALRGGVDWFFPRWPKGCDIDLEGQIIRVVSQGTYQRGMGWFNRDSEAAMHSLRPHREEMHREAWDFWGLDISDSIDSDEILSRAAEATRSCASNAERRMLLDDFATFAGIMSDSDLCGPFIADASNKVPLDATLPTMHNKTLDDFTIGLKVLEAPSLCRYSTTALEMASSLRDMGQSRLQHRSSDIEDSSMRRLNGEEMVARIRRSLQDSSHSKLAIVRRDYSMAFDPIAASDKILANGYLDPSVFDRTMATICLDIAPYIRSIVAYDQRLQNERRVRSSLLSEGGKPDKKRMRTTRAAMSALEGGTRSSTRREKYFSADINPYLVLRTGGKSWQELGLEAIAADQVPIASYASDINMDGSSD

SEQ ID NO: 15916 - DNA, 4282 bp, Muscodor strobelii; identical to SEQ ID NO: 15913
  misc_feature: SGI EST ID NO. CUFF.37618.0
  misc_feature: Variant of the nucleotide sequence at SEQ ID NO 15914

SEQ ID NO: 15917 - DNA, 2787 bp, Muscodor strobelii
  misc_feature: SGI cDNA ID NO. 565281
  misc_feature: Reduced expression when VOC is produced
  misc_feature: Encodes the peptide sequence at SEQ ID NO 15918
atggcttcacaatttcaagttcaaaagccatacgtgctgaccacactccctcgtcccctcgatccaagcaccgacgcatacgttgtgggagatgtctacggctatgcgcccgccgcccagagacggaagcgccgccgagccgaggtgactgtcggcgtcaatggagaggcgatcaatatatatgatgtgtcctcggcgaggcttgtcacatcctacccaattccgcccgagtcacgcctctcctgccctgccagttcttttcgagtaagagccgagtcgagtaaagatgtatcgcgcttcacatatgccgcaaccgacgagtctcgagtcaacaaaatcaccctgttcaaggacggcgtagattcctcaggcaaggctgaccagacaaaccgcaccgtctctcttggtcgtggccctcgtgttgcttggctctcgtcgctttataatgccgtgccatcgggctccgctacgggctcacctccagagaacgagcttctagtcgtaaaagcagatggccaaattctgtgtctcgatggagagagcttggaccaaaaatgggcctcgaatgccaccgtcatgctgcaagaccttgctgagaatgctagatctggcttcgatatcgaattctgccgctccgtagcactatcggagctgatcaaaggcattttcaagggaaacggagatgcttttagccttctagcaggctcagcagaggtgccgaaagaagataccgaggtcttagtactcgtgtcaagatctggctcgacagagcgaccgagccgacatcttcatgtcgtagctcgtgtaccgtcgacttcaaactcaacttcgggtcaggccggggtcctacaactccatatcatgccccttaagattcaaaacggaccgcacgatagcccaccgagctatcgtctggatgcgcgcaacggatctcttctggagcttcacaaccaggtcatcactattcacgatttgacagcaagcattcccacaatcacatcatcgatgcggctggatggaacgaattcgtttctaccgcttagcaagacatcgatcctctgctctaccgatactcaattgtctgtcttcaatccactctacagatctcaacaggaagcagtcgagattgatcttgcagctgatgcagacaaggcaccagccaccgcctcgagtcaactagttgcctactttccgcctttggagcgcgctatctcgatcgttgattttaatttagttgcgattcagcttgaagcacccaaagggcgacaagttaagcgacgggccgagggccttctcattgactccatcggccgtggaatcacaacggcaaaaaggagctccgtttcctctgcaaagctgtcttctaaaagctcagctttctcgaattaccttccaggttcgatgagaggtgattactgggagaaatggcaagcggatcaaaaggaagctgactctctctttggctctaacaacattcctgcattcgaaacactactggctgagaaattcggcattgtagtcgaccctgtgtcatcatcatcagacgaaggcaatgctgcgtctgcttccaaagcgtcaccacattggcaacttccgagatctcgcactggctacccgccgaccgatcgaaggtggatattatatgcaatcagcaggtcattcgagtggaatgcggctcattctcccgactcgacgatgtccagactgatatgttcactaccacagagtagcattgtgacatatcttgtggatgcaggttatctgacgctgtcaaatctcaaagccgcgttccgaggcaaactaactgagagggacgaagaagaagcgttcctcgccaaccaacttatcacacgtcttgcagatcttgacccatcgctagaactactagttgtctatctctctgcaacaaatttaggcgctatggaaattgtaacggtcttaaaaacgcttatgagtagcctcgaattaatgaacgataccagaaaggctcccccaaagcttttgactaatgggacgagtaaagaggccgcagatgaggatgaaactgccgaaaatgaagttattgggatggaactcgacaatttagaggaagagattcaaaagaccgtctcatatttgaacaatgaggacaatagcgtacggggccggggaatcagcctcgcgatggctaaactcggagcatgtccaagctcattgagcatcaaagcacttcgcgccatcttcaagcccgaagaaatactatcacttgcttatctgttacgtattgaactcatcaaagggggttggactgatagatatcttgatctagacaacgaggatcaggatatacctttcgatgcgccgcctgatggcatcattaagcttattgccgacttactaggacgttgtctcgattctctcggtcccggtggctggctgctcaatgatgcgacatcaggaggagatgacgcagcagattttgttagctctttgactcacgaagtcagtgctgctctggagggtatggaggagacagtttatctccgcaacttcctagttgatccgctcaaatactacgagagcttaagtaaacagcgcacgatggcggtcgacacttcgaaacctatcgcggttcgcctgaaagaacccggcgccgcggcactaccacttagcctcaagtctacggcttctgtctcgactcacaagattgtgtcgggtggtgaagtcgttcagagaagcctgagagagacgggccatttacttagtcagaaagtgggatcgtactccttggaaaggattgttatctag

SEQ ID NO: 15918 - protein, 928 aa, Muscodor strobelii
  misc_feature: SGI Peptide ID NO. 565281
  misc_feature (1)..(928): NCBI GI: 256725711 Blast Desc: NECHADRAFT_70241 [Nectria haematococca mpVI 77-13-4]
  misc_feature (1)..(928): NCBI GI: 145602266 Blast Desc: MGG_05048 [Magnaporthe grisea 70-15] gi|145010704|gb|EDJ95360.1| MGG_05048 [Magnaporthe grisea 70-15]
  misc_feature (1)..(926): NCBI GI: 116191527 Blast Desc: CHGG_05481 [Chaetomium globosum CBS 148.51] gi|88181394|gb|EAQ88862.1| CHGG_05481 [Chaetomium globosum CBS 148.51]
  misc_feature (1)..(928): NCBI GI: 46111703 Blast Desc: FG02733.1 [Gibberella zeae PH-1]
  misc_feature (1)..(926): NCBI GI: 171680930 Blast Desc: protein product [Podospora anserina] gi|170940423|emb|CAP65650.1| protein product [Podospora anserina]
  misc_feature (1)..(926): NCBI GI: 85090462 Blast Desc: NCU09499 [Neurospora crassa OR74A] gi|28919790|gb|EAA29192.1| [Neurospora crassa OR74A]
  misc_feature (1)..(928): NCBI GI: 261359191 Blast Desc: conserved [Verticillium albo-atrum VaMs.102]
  misc_feature (1)..(928): NCBI GI: 156065629 Blast Desc: SS1G_00825 [Sclerotinia sclerotiorum 1980] gi|154691684|gb|EDN91422.1| SS1G_00825 [Sclerotinia sclerotiorum 1980]
  misc_feature (355)..(928): NCBI GI: 154320289 Blast Desc: BC1G_02125 [Botryotinia fuckeliana B05.10] gi|150854864|gb|EDN30056.1| BC1G_02125 [Botryotinia fuckeliana B05.10]
  misc_feature (5)..(928): NCBI GI: 239612913 Blast Desc: conserved [Ajellomyces dermatitidis ER-3]
  misc_feature: Useful for introducing or modulating the production of volatile compounds
MASQFQVQKPYVLTTLPRPLDPSTDAYVVGDVYGYAPAAQRRKRRRAEVTVGVNGEAINIYDVSSARLVTSYPIPPESRLSCPASSFRVRAESSKDVSRFTYAATDESRVNKITLFKDGVDSSGKADQTNRTVSLGRGPRVAWLSSLYNAVPSGSATGSPPENELLVVKADGQILCLDGESLDQKWASNATVMLQDLAENARSGFDIEFCRSVALSELIKGIFKGNGDAFSLLAGSAEVPKEDTEVLVLVSRSGSTERPSRHLHVVARVPSTSNSTSGQAGVLQLHIMPLKIQNGPHDSPPSYRLDARNGSLLELHNQVITIHDLTASIPTITSSMRLDGTNSFLPLSKTSILCSTDTQLSVFNPLYRSQQEAVEIDLAADADKAPATASSQLVAYFPPLERAISIVDFNLVAIQLEAPKGRQVKRRAEGLLIDSIGRGITTAKRSSVSSAKLSSKSSAFSNYLPGSMRGDYWEKWQADQKEADSLFGSNNIPAFETLLAEKFGIVVDPVSSSSDEGNAASASKASPHWQLPRSRTGYPPTDRRWILYAISRSFEWNAAHSPDSTMSRLICSLPQSSIVTYLVDAGYLTLSNLKAAFRGKLTERDEEEAFLANQLITRLADLDPSLELLVVYLSATNLGAMEIVTVLKTLMSSLELMNDTRKAPPKLLTNGTSKEAADEDETAENEVIGMELDNLEEEIQKTVSYLNNEDNSVRGRGISLAMAKLGACPSSLSIKALRAIFKPEEILSLAYLLRIELIKGGWTDRYLDLDNEDQDIPFDAPPDGIIKLIADLLGRCLDSLGPGGWLLNDATSGGDDAADFVSSLTHEVSAALEGMEETVYLRNFLVDPLKYYESLSKQRTMAVDTSKPIAVRLKEPGAAALPLSLKSTASVSTHKIVSGGEVVQRSLRETGHLLSQKVGSYSLERIVI

SEQ ID NO: 15919 - DNA, 3512 bp, Muscodor strobelii
  misc_feature: SGI EST ID NO. CUFF.37662.0
  misc_feature: Variant of the nucleotide sequence at SEQ ID NO 15917
gtaacctggagcaatgttacctgctacggatggtggggcagtacgtcttttgatagtcggcgattgatggcttatcagaccgacgcgggaactttttttctacatggctcgaagctgttattgacacaaggcgatagcttcgtcccttcggcctgtcgtcgcccccctcgcaagccatagcagcgagacaaagtgatcccttgcgtccatggcttcacaatttcaagttcaaaagccatacgtgctgaccacactccctcgtcccctcgatccaagcaccgacgcatacgttgtgggagatgtctacggctatgcgcccgccgcccagagacggaagcgccgccgagccgaggtgactgtcggcgtcaatggagaggcgatcaatatatatgatgtgtcctcggcgaggcttgtcacatcctacccaattccgcccgagtcacgcctctcctgccctgccagttcttttcgagtaagagccgagtcgagtaaagatgtatcgcgcttcacatatgccgcaaccgacgagtctcgagtcaacaaaatcaccctgttcaaggacggcgtagattcctcaggcaaggctgaccagacaaaccgcaccgtctctcttggtcgtggccctcgtgttgcttggctctcgtcgctttataatgccgtgccatcgggctccgctacgggctcacctccagagaacgagcttctagtcgtaaaagcagatggccaaattctgtgtctcgatggagagagcttggaccaaaaatgggcctcgaatgccaccgtcatgctgcaagaccttgctgagaatgctagatctggcttcgatatcgaattctgccgctccgtagcactatcggagctgatcaaaggcattttcaagggaaacggagatgcttttagccttctagcaggctcagcagaggtgccgaaagaagataccgaggtcttagtactcgtgtcaagatctggctcgacagagcgaccgagccgacatcttcatgtcgtagctcgtgtaccgtcgacttcaaactcaacttcgggtcaggccggggtcctacaactccatatcatgccccttaagattcaaaacggaccgcacgatagcccaccgagctatcgtctggatgcgcgcaacggatctcttctggagcttcacaaccaggtcatcactattcacgatttgacagcaagcattcccacaatcacatcatcgatgcggctggatggaacgaattcgtttctaccgcttagcaagacatcgatcctctgctctaccgatactcaattgtctgtcttcaatccactctacagatctcaacaggaagcagtcgagattgatcttgcagctgatgcagacaaggcaccagccaccgcctcgagtcaactagttgcctactttccgcctttggagcgcgctatctcgatcgttgattttaatttagttgcgattcagcttgaagcacccaaagggcgacaagttaagcgacgggccgagggccttctcattgactccatcggccgtggaatcacaacggcaaaaaggagctccgtttcctctgcaaagctgtcttctaaaagctcagctttctcgaattaccttccaggttcgatgagaggtgattactgggagaaatggcaagcggatcaaaaggaagctgactctctctttggctctaacaacattcctgcattcgaaacactactggctgagaaattcggcattgtagtcgaccctgtgtcatcatcatcagacgaaggcaatgctgcgtctgcttccaaagcgtcaccacattggcaacttccgagatctcgcactggctacccgccgaccgatcgaaggtggatattatatgcaatcagcaggtcattcgagtggaatgcggctcattctcccgactcgacgatgtccagactgatatgttcactaccacagagtagcattgtgacatatcttgtggatgcaggttatctgacgctgtcaaatctcaaagccgcgttccgaggcaaactaactgagagggacgaagaagaagcgttcctcgccaaccaacttatcacacgtcttgcagatcttgacccatcgctagaactactagttgtctatctctctgcaacaaatttaggcgctatggaaattgtaacggtcttaaaaacgcttatgagtagcctcgaattaatgaacgataccagaaaggctcccccaaagcttttgactaatgggacgagtaaagaggccgcagatgaggatgaaactgccgaaaatgaagttattgggatggaactcgacaatttagaggaagagattcaaaagaccgtctcatatttgaacaatgaggacaatagcgtacggggccggggaatcagcctcgcgatggctaaactcggagcatgtccaagctcattgagcatcaaagcacttcgcgccatcttcaagcccgaagaaatactatcacttgcttatctgttacgtattgaactcatcaaagggggttggactgatagatatcttgatctagacaacgaggatcaggatatacctttcgatgcgccgcctgatggcatcattaagcttattgccgacttactaggacgttgtctcgattctctcggtcccggtggctggctgctcaatgatgcgacatcaggaggagatgacgcagcagattttgttagctctttgactcacgaagtcagtgctgctctggagggtatggaggagacagtttatctccgcaacttcctagttgatccgctcaaatactacgagagcttaagtaaacagcgcacgatggcggtcgacacttcgaaacctatcgcggttcgcctgaaagaacccggcgccgcggcactaccacttagcctcaagtctacggcttctgtctcgactcacaagattgtgtcgggtggtgaagtcgttcagagaagcctgagagagacgggccatttacttagtcagaaagtgggatcgtactccttggaaaggattgttatctaggtagatgtatgagaaattcgaagtcgcctacgacgatacccatacttctataatcttgcaatatgcaatatcttatgtgattaattactaataccgctgagtccataatcgaaggtggtaggggaaatgacagaaagagagaaggcggggttttataagcaggacataacacccatacttagtctgaaagaaagcttctcacagtcactcgtcataggcattgatataagggatatgcaagggatctagacttatcagtccgactactgcggagagacgaacatcggctattctctacgacggtttttcgaagtggttatgccagctactgcaggatagagaaaatagatcgatcaagcggcgatcttgcctccataatagtgtacatctgcaggacattgctatgaatcaatctgggtttcgacatgatcttgaacgtccacataaccatctcggtgatgttttctcgaatgctggtataactcctaccaggtttgaagtctctaggcgctatctc

SEQ ID NO: 15920 - DNA, 2559 bp, Muscodor strobelii
  misc_feature: SGI cDNA ID NO. 565282
  misc_feature: Reduced expression when VOC is produced
  misc_feature: Encodes the peptide sequence at SEQ ID NO 15921
atgacaagccaatatcctatcggcaatgccatcgctacatcgcctgtgatcttggcggccatcgataacgtggacacgtttgctcgtcggctttatcgacgagcacgtaatgctgggtccgaattcgaagacgtcgccgctgttgttcgagacatgcacacgatattgaaacacctcaaggttgaagctgacgatccggagtccttgcttaactgcgagaccagtgcggtctacaagcgccaagtcacgccgattcttgaggatgccgaatatcgactcaaggaattaaatacaatcttagagaagcattcggatgacggcgcaaacggacctctcatgaacgatagtgataaaggttggaccattttggacaatgtagaacttggcaaaatcgatatcattcgctccgagctcataagacaaaaagataaaatcacgctgtttctcgacaccattcagttgcacaatgacaggtcgcggaagatggtcgacactatgagcactgagatggaggcaatcaaggacaaggttgacgctattgcgtcgcgcatctgtcagcgaaagaattccggattcagtgaagacgaagaagaattatgggagcaattcagggatgctctcgaagccgaagggttttctaaagatgttcttcgaaagaatcagaccgtcttgcgcgcatacattcggcaactcgatgagcaggccgctgcatttggcggtggcacaccctcagtcaggggttttctcgaacactacaatcctcccaattctactgcccctacttcaacatacgccgactaccctgctgcggaagagcatagagatggagcatactatgaacctgctactgataacgagaaatactttccatcgatgcggatggagagacttcagcatgatgactactctcatcctgctcgcatatctaccgataatacggacttatcatacgatcgacaaagttccgacgataactattcgccaacatcagattcaatggcattaatttcgacgagagatctaatggcacttgacaagagagacgatgatctcgcaatcgcaatgggcaatatgaatcacttgggtaacgccggcaactataccactatgaattcgcagtcacaaaaatacttgccctcatcgtcgcaaccggcactcatcggatatgagcatcccactggcaaccatggcgaccattatgaatacgagcatgatgcgccaccgaggtacatgccttcactgccggcacctccagttggtaatggtggtagcccaccgcctgctcttcattttaactcgacttctgcaccctcagttattggagagcatcaggctctacctggatcagcccagaaacagagccttccggatcaaagtcgattaggtccagatagccacggcagagaaatcccactcgatgcgaaatggacacgcattcgtcgaagtctcatttcgcccgaggctttggctcaggagggctatcgctatgaagcaagacctgacttcgttgctgtccttggtgagctgactaaagagcaagtagtagacctagcacagaagagtaccgacatacgcaatggtcgccgaggagctcgccccaacggcaccaatttaggagccccaagtagtcctgagaaaaaggaacggagggcggaggaccggtatcatcccgacaagtatcgcaattgggatgttatcgaggggcagaaggaccgcaatggaggatccggatatgtggtcaatcccaacggtcgtcagcgggagaatagcaccgtgagctctgttagcgagctttgggattccagcgactatgagtcatctgatgatggctcagaaatcgacgacaggtatcgggagtttgcaagttcgtaccctccaccttcgcaccctcactcggcgccgtaccatcacaccttcccagcacgcaatgggtcaaaagtagactcagcctcagcctcagaaaacggtgacgaaaagggcacgaaggcctacccgttcatcgtttcaccccctaccaaagatgaaaaagccgggcccgataagactagtccttcggctacggtccaaccaaaacctatcttaaagaataagaatgacgatccccacgtcagatttgaccctgagccccaaatatttgacgaaagctcaagttcagtccctagaaatatgggccggcgcgatagagatgagcacagggatcgagaacgggacaaagtccgaaccaaggatagggatagggacagggacagggatagagacaagagataccgctcagatcgctacctagagcgagaacgccatccagagcgttacgcagagcgtgatcgcgatcgagaccgtgatcgtcgacagcatgggagcagcagtagtggcaggcattacagtaactcttcaagcagtcgaagagacgatggaagtcgtcgaaatcgcggtgaagaccgagacagggacagagcaacgaggaggaagtccaggggtgagacactcagagctgttggcattggcggtgccgccgcgagtctgttgagcgtgctgacggaggctgcggtcgggatatga

SEQ ID NO: 15921 - protein, 852 aa, Muscodor strobelii
  misc_feature: SGI Peptide ID NO. 565282
  misc_feature (16)..(531): NCBI GI: 261359192 Blast Desc: conserved [Verticillium albo-atrum VaMs.102]
  misc_feature (21)..(710): NCBI GI: 171680932 Blast Desc: protein product [Podospora anserina] gi|170940424|emb|CAP65651.1| protein product [Podospora anserina]
  misc_feature (20)..(526): NCBI GI: 116191523 Blast Desc: CHGG_05479 [Chaetomium globosum CBS 148.51] gi|88181392|gb|EAQ88860.1| CHGG_05479 [Chaetomium globosum CBS 148.51]
  misc_feature (21)..(521): NCBI GI: 46111705 Blast Desc: FG02734.1 [Gibberella zeae PH-1]
  misc_feature (21)..(531): NCBI GI: 85090468 Blast Desc: NCU09502 [Neurospora crassa OR74A] gi|28919793|gb|EAA29195.1| [Neurospora crassa OR74A]
  misc_feature (18)..(296): NCBI GI: 39940386 Blast Desc: MGG_05047 [Magnaporthe grisea 70-15] gi|145010707|gb|EDJ95363.1| MGG_05047 [Magnaporthe grisea 70-15]
  misc_feature: Useful for introducing or modulating the production of volatile compounds
MTSQYPIGNAIATSPVILAAIDNVDTFARRLYRRARNAGSEFEDVAAVVRDMHTILKHLKVEADDPESLLNCETSAVYKRQVTPILEDAEYRLKELNTILEKHSDDGANGPLMNDSDKGWTILDNVELGKIDIIRSELIRQKDKITLFLDTIQLHNDRSRKMVDTMSTEMEAIKDKVDAIASRICQRKNSGFSEDEEELWEQFRDALEAEGFSKDVLRKNQTVLRAYIRQLDEQAAAFGGGTPSVRGFLEHYNPPNSTAPTSTYADYPAAEEHRDGAYYEPATDNEKYFPSMRMERLQHDDYSHPARISTDNTDLSYDRQSSDDNYSPTSDSMALISTRDLMALDKRDDDLAIAMGNMNHLGNAGNYTTMNSQSQKYLPSSSQPALIGYEHPTGNHGDHYEYEHDAPPRYMPSLPAPPVGNGGSPPPALHFNSTSAPSVIGEHQALPGSAQKQSLPDQSRLGPDSHGREIPLDAKWTRIRRSLISPEALAQEGYRYEARPDFVAVLGELTKEQVVDLAQKSTDIRNGRRGARPNGTNLGAPSSPEKKERRAEDRYHPDKYRNWDVIEGQKDRNGGSGYVVNPNGRQRENSTVSSVSELWDSSDYESSDDGSEIDDRYREFASSYPPPSHPHSAPYHHTFPARNGSKVDSASASENGDEKGTKAYPFIVSPPTKDEKAGPDKTSPSATVQPKPILKNKNDDPHVRFDPEPQIFDESSSSVPRNMGRRDRDEHRDRERDKVRTKDRDRDRDRDRDKRYRSDRYLERERHPERYAERDRDRDRDRRQHGSSSSGRHYSNSSSSRRDDGSRRNRGEDRDRDRATRRKSRGETLRAVGIGGAAASLLSVLTEAAVGI

SEQ ID NO: 15922 - DNA, 3871 bp, Muscodor strobelii
  misc_feature: SGI EST ID NO. CUFF.37631.0
  misc_feature: Variant of the nucleotide sequence at SEQ ID NO 15920
aaatagtcctgtccctagtcacgatggacatctcaagacgaactgaaccctcgagctgccgatcgccacggcgtttgctctcatcactacggaataagggtcgaacttgtcgcaaacccctagctcatcgagtttatcacaaatcgctatgaatattcgagaaatgctgggcgggtactttcctgttattgtgtcgactgtccagtctgtgtatgcgtagcttgacgtgctgcttttttggtcaatgtttttgttcgaggctcagctggttatttgagccatgatagtgtaacatcatatttgcccaacgaggtattgtcgccgtcgatgacaattcattctgtaccaagttcccaccatctcgattcgcatcggtacgtaaccgagcactatcaagcattgaacgagaacaagtaacagacgcgtcttttctcttgccagcagcccttgcaccgcgaatcccttcagtgccaataatagatgacctgtctcgcctgtgacgatattgctcaagccagcatctcgtcccaataacttccacctatgaaaacaacccaactagtgccagcataacccattgttgtcttcttttgccttgtcgctgtactgagaggtatactttctttatttgttagtttcgcattagcggaaagttgcacacacgcatgtctgcctgtctcaggcactgaacacacacgtcaccgcgaaacgactacataccggcttgaggcgccaactactatcgacgtcacagcctcacacaccctagatcaatggatttttttgactaattgtacaacgatcgcaatagtcgcccacttccatacaggtgtattgtcaatatctcagacaatcagcgactcatgacaatcatcaatcttcgcccacatacttagaaaaattctctcaaaaacgttgcaactcgcgactcccaatagattacaagtcgtaatactaggggctaaaacccccgtctacctttacagaactgacgacttcataaagactggggaattagtcccccgaacttttcgtcatgacaagccaatatcctatcggcaatgccatcgctacatcgcctgtgatcttggcggccatcgataacgtggacacgtttgctcgtcggctttatcgacgagcacgtaatgctgggtccgaattcgaagacgtcgccgctgttgttcgagacatgcacacgatattgaaacacctcaaggttgaagctgacgatccggagtccttgcttaactgcgagaccagtgcggtctacaagcgccaagtcacgccgattcttgaggatgccgaatatcgactcaaggaattaaatacaatcttagagaagcattcggatgacggcgcaaacggacctctcatgaacgatagtgataaaggttggaccattttggacaatgtagaacttggcaaaatcgatatcattcgctccgagctcataagacaaaaagataaaatcacgctgtttctcgacaccattcagttgcacaatgacaggtcgcggaagatggtcgacactatgagcactgagatggaggcaatcaaggacaaggttgacgctattgcgtcgcgcatctgtcagcgaaagaattccggattcagtgaagacgaagaagaattatgggagcaattcagggatgctctcgaagccgaagggttttctaaagatgttcttcgaaagaatcagaccgtcttgcgcgcatacattcggcaactcgatgagcaggccgctgcatttggcggtggcacaccctcagtcaggggttttctcgaacactacaatcctcccaattctactgcccctacttcaacatacgccgactaccctgctgcggaagagcatagagatggagcatactatgaacctgctactgataacgagaaatactttccatcgatgcggatggagagacttcagcatgatgactactctcatcctgctcgcatatctaccgataatacggacttatcatacgatcgacaaagttccgacgataactattcgccaacatcagattcaatggcattaatttcgacgagagatctaatggcacttgacaagagagacgatgatctcgcaatcgcaatgggcaatatgaatcacttgggtaacgccggcaactataccactatgaattcgcagtcacaaaaatacttgccctcatcgtcgcaaccggcactcatcggatatgagcatcccactggcaaccatggcgaccattatgaatacgagcatgatgcgccaccgaggtacatgccttcactgccggcacctccagttggtaatggtggtagcccaccgcctgctcttcattttaactcgacttctgcaccctcagttattggagagcatcaggctctacctggatcagcccagaaacagagccttccggatcaaagtcgattaggtccagatagccacggcagagaaatcccactcgatgcgaaatggacacgcattcgtcgaagtctcatttcgcccgaggctttggctcaggagggctatcgctatgaagcaagacctgacttcgttgctgtccttggtgagctgactaaagagcaagtagtagacctagcacagaagagtaccgacatacgcaatggtcgccgaggagctcgccccaacggcaccaatttaggagccccaagtagtcctgagaaaaaggaacggagggcggaggaccggtatcatcccgacaagtatcgcaattgggatgttatcgaggggcagaaggaccgcaatggaggatccggatatgtggtcaatcccaacggtcgtcagcgggagaatagcaccgtgagctctgttagcgagctttgggattccagcgactatgagtcatctgatgatggctcagaaatcgacgacaggtatcgggagtttgcaagttcgtaccctccaccttcgcaccctcactcggcgccgtaccatcacaccttcccagcacgcaatgggtcaaaagtagactcagcctcagcctcagaaaacggtgacgaaaagggcacgaaggcctacccgttcatcgtttcaccccctaccaaagatgaaaaagccgggcccgataagactagtccttcggctacggtccaaccaaaacctatcttaaagaataagaatgacgatccccacgtcagatttgaccctgagccccaaatatttgacgaaagctcaagttcagtccctagaaatatgggccggcgcgatagagatgagcacagggatcgagaacgggacaaagtccgaaccaaggatagggatagggacagggacagggatagagacaagagataccgctcagatcgctacctagagcgagaacgccatccagagcgttacgcagagcgtgatcgcgatcgagaccgtgatcgtcgacagcatgggagcagcagtagtggcaggcattacagtaactcttcaagcagtcgaagagacgatggaagtcgtcgaaatcgcggtgaagaccgagacagggacagagcaacgaggaggaagtccaggggtgagacactcagagctgttggcattggcggtgccgccgcgagtctgttgagcgtgctgacggaggctgcggtcgggatatgacctgaaagagttgagaggagggtgtctgtattgtacgaagattgtctatttggcttggatgttttgagtaagacatgggatcgttttcgagatggatatatcagacgttttggtcgtcatgtactggttatattgacttctggcatgttttggtttttttgatttcctacccataccccttacgcgagcaacaatttgaagttttatttttctctgtacaatatgacctcagtgcctctgagatatatgttcacgatcaacatgagtgaagattcg

SEQ ID NO: 15923 - DNA, 2607 bp, Muscodor strobelii
  misc_feature: SGI cDNA ID NO. 565283
  misc_feature: Reduced expression when VOC is produced
  misc_feature: Encodes the peptide sequence at SEQ ID NO 15924
atgcagtcgccgcccacctcggacctcgctgtcgagccctttgactcgtcccggcccttccatggactcgtgctctgctgcaccagcatcgaagccgacctgcgtaacgagattgcccaacgcaccgctgacctgggcggcgtccatagatatgacttgacccccgacgtgacccatctgctcgtaggcgactacaacactcccaaataccgccatgtcgccaaagagcgaccagatatcaagcccatggccgccggctgggtagatgctgtgcgccagctgtgggtgcaggaccaggagatcgacatgcccgccctcgagagcacctggacgctgcgacctttcgagtcgagtggcggcattcccaatcatcccaaccccccgctacgagagagacaaagacttgtttgctgtctgacaggctttgaggatagcaccgttcgagccatgatcgaggacaaagtcaaagccaatggtggcgagtacgtcgctgacctctctcgccgtgtcacccacctgatatccttcaaacccgagggtaaaaaatacctggccgcccgcaagtgggacatccgttgcgtctccatcgaatggctgcacgacagcgccgagcgaaccatgattttgaacgaagactgctacgacccgagtcgaccaccagaagagcgaggcagagatgcatggtcaaggcgtgatcctcgacaactctccttaggcaaacggacgcgggaggggcccagcaccgccaccgatgaaagcaggcggaaactcaggaaaagcgccagcatgagaatgaccaagtcaagtagcaacttatggggggatattttgagccactcggccagcgacttgtctcgtccagttggtgctcagtccgagccacctccaccacctctccctgccaccgactcggagaaatccggggctcagccgcctcaacagatagcccgatctttcagcaatgtgagccgaatgaccgtcgacgctggtgtcctttctggttgtcggttcttcgtgtcgggtttctccgaggcaagagagggactcctatttaaacatttggcatcacatggcggacaaatctcctcgtcgctgaatgatgttgcgtccttgtcacacggagagccacttgatcaacgatatttgctcgtgccgcaatcatcacgccatggtgattatccaaaaccaccagaagggatccatgtcattaccgaatttttcatcgagcggtgcatccacaacaagaggctgtatcgtgctcaagaccacgttctgggacggccttttccgcattttccaattgatggatttcaagacctcaccgtcaatgcagccggcattttcaacgagcagttaaatcaagtggaaaaaacagtaacccagcttggggctacgtactctgagaagttgaataaagagatatcagtcctgatctgccctgatctagcttctctcagaatccagaagcgcgattttgcaatcctcaacaacatacctattgttaatatcgagtggttgtggcaatgcatagctgctggccgctctttgcccttgaagcaattttatttcgacgatttgttgcgcagtttaacctcgattcgagctaagctgcaacgtgcggaggatgaaaagaaaagagacaaacaccaaccccaagagtctcaatctaagtctttggtccagcaaccgagtgctccgaaagtcaatcaacaagcgccaccccttaatcacaatattgacaacagtgcattcgacgatgtccttgccaaggatcgtgtaaaggcaagtcgagcggatttaaaagagaaagagtcacaatacaagacggcaccaactcaccaagcagtggaaattggtgatgcattcacgcccgcgccggtgccattatcagagaaaactgcgaacaatgtgaacaaatctacttcaccaccgaaacaacctgagcaacgccaattgaagcggtttcctacggaaggtgaagtgggtgattctgaagcaggagacgaatcagatgctacaacaaacccgccacgtgaagcagtatcccgcgcccctaaaccaaaccacaaacgaaaacagggcatcagtaaccgcgagaaattagaacgtctagaaatggctaagaagttaaatgctcttatatctatttcaaatacgtctcaagagggaagcatattcagtttacaatcagaaccgaggcctcgtcgtaggcgcgaggtttttggtcgcgccaggagcaatgtgtctgctgcttctagcggaagcgctgggtctacatctggcatcgtcccttctaaagactatcagctcgcctccatccagaatgagtctacgtctgtagcatcagagtatgatactttcatcgagccaagtaatgagcaaggttcagacgaaaatccaccaccttcaacgcaactgggatatgaggtccctggggcaaaacaattccgccagatcatgatggatagactcaccggcaaggaaacacctcctgaaagtcatgttcaagaacctgagaaagttcgactctcagactttaaaccccatgatatagagccgagcgcgtctagacggactacgaggcgtcaagcccgcgagcatggatag

SEQ ID NO: 15924 - protein, 868 aa, Muscodor strobelii
  misc_feature: SGI Peptide ID NO. 565283
  misc_feature (126)..(203): Pfam Id: PF00533 Pfam Desc: BRCA1 C Terminus (BRCT) domain
  misc_feature (432)..(510): Pfam Id: PF00533 Pfam Desc: BRCA1 C Terminus (BRCT) domain
  misc_feature (15)..(72): Pfam Id: PF00533 Pfam Desc: BRCA1 C Terminus (BRCT) domain
  misc_feature (1)..(829): NCBI GI: 116191521 Blast Desc: CHGG_05478 [Chaetomium globosum CBS 148.51] gi|88181391|gb|EAQ88859.1| CHGG_05478 [Chaetomium globosum CBS 148.51]
  misc_feature (37)..(826): NCBI GI: 171680934 Blast Desc: protein product [Podospora anserina] gi|170940425|emb|CAP65652.1| protein product [Podospora anserina]
  misc_feature (2)..(639): NCBI GI: 261359193 Blast Desc: S-M checkpoint control protein rad4 [Verticillium albo-atrum VaMs.102]
  misc_feature (1)..(863): NCBI GI: 39940400 Blast Desc: MGG_05040 [Magnaporthe grisea 70-15] gi|145010715|gb|EDJ95371.1| MGG_05040 [Magnaporthe grisea 70-15]
  misc_feature (1)..(826): NCBI GI: 46111691 Blast Desc: FG02727.1 [Gibberella zeae PH-1]
  misc_feature (14)..(827): NCBI GI: 256725709 Blast Desc: NECHADRAFT_43760 [Nectria haematococca mpVI 77-13-4]
  misc_feature (15)..(521): NCBI GI: 154303916 Blast Desc: BC1G_08842 [Botryotinia fuckeliana B05.10] gi|150854426|gb|EDN29618.1| BC1G_08842 [Botryotinia fuckeliana B05.10]
  misc_feature (8)..(513): NCBI GI: 119174843 Blast Desc: CIMG_09370 [Coccidioides immitis RS]
  misc_feature (18)..(513): NCBI GI: 240106960 Blast Desc: BRCA1 C Terminus (BRCT) domain containing protein [Coccidioides posadasii C735 delta SOWgp]
  misc_feature (19)..(565): NCBI GI: 242761867 Blast Desc: BRCT domain protein [Talaromyces stipitatus ATCC 10500] gi|218723460|gb|EED22877.1| BRCT domain protein [Talaromyces stipitatus ATCC 10500]
  misc_feature: Useful for introducing or modulating the production of volatile compounds
MQSPPTSDLAVEPFDSSRPFHGLVLCCTSIEADLRNEIAQRTADLGGVHRYDLTPDVTHLLVGDYNTPKYRHVAKERPDIKPMAAGWVDAVRQLWVQDQEIDMPALESTWTLRPFESSGGIPNHPNPPLRERQRLVCCLTGFEDSTVRAMIEDKVKANGGEYVADLSRRVTHLISFKPEGKKYLAARKWDIRCVSIEWLHDSAERTMILNEDCYDPSRPPEERGRDAWSRRDPRQLSLGKRTREGPSTATDESRRKLRKSASMRMTKSSSNLWGDILSHSASDLSRPVGAQSEPPPPPLPATDSEKSGAQPPQQIARSFSNVSRMTVDAGVLSGCRFFVSGFSEAREGLLFKHLASHGGQISSSLNDVASLSHGEPLDQRYLLVPQSSRHGDYPKPPEGIHVITEFFIERCIHNKRLYRAQDHVLGRPFPHFPIDGFQDLTVNAAGIFNEQLNQVEKTVTQLGATYSEKLNKEISVLICPDLASLRIQKRDFAILNNIPIVNIEWLWQCIAAGRSLPLKQFYFDDLLRSLTSIRAKLQRAEDEKKRDKHQPQESQSKSLVQQPSAPKVNQQAPPLNHNIDNSAFDDVLAKDRVKASRADLKEKESQYKTAPTHQAVEIGDAFTPAPVPLSEKTANNVNKSTSPPKQPEQRQLKRFPTEGEVGDSEAGDESDATTNPPREAVSRAPKPNHKRKQGISNREKLERLEMAKKLNALISISNTSQEGSIFSLQSEPRPRRRREVFGRARSNVSAASSGSAGSTSGIVPSKDYQLASIQNESTSVASEYDTFIEPSNEQGSDENPPPSTQLGYEVPGAKQFRQIMMDRLTGKETPPESHVQEPEKVRLSDFKPHDIEPSASRRTTRRQAREHG

SEQ ID NO: 15925 - DNA, 3180 bp, Muscodor strobelii
  misc_feature: SGI EST ID NO. CUFF.37635.0
  misc_feature: Variant of the nucleotide sequence at SEQ ID NO 15923
ctggcagcttttctacattggcatacccatggccccgggcccgtgacttcaagtgacaaacatctgagaacagaaggatcatcaccgttctcttcttctgctatgctatgttctgtgctttggggtgcaattgttgaacctgctgccggccatgcagtcgccgcccacctcggacctcgctgtcgagccctttgactcgtcccggcccttccatggactcgtgctctgctgcaccagcatcgaagccgacctgcgtaacgagattgcccaacgcaccgctgacctgggcggcgtccatagatatgacttgacccccgacgtgacccatctgctcgtaggcgactacaacactcccaaataccgccatgtcgccaaagagcgaccagatatcaagcccatggccgccggctgggtagatgctgtgcgccagctgtgggtgcaggaccaggagatcgacatgcccgccctcgagagcacctggacgctgcgacctttcgagtcgagtggcggcattcccaatcatcccaaccccccgctacgagagagacaaagacttgtttgctgtctgacaggctttgaggatagcaccgttcgagccatgatcgaggacaaagtcaaagccaatggtggcgagtacgtcgctgacctctctcgccgtgtcacccacctgatatccttcaaacccgagggtaaaaaatacctggccgcccgcaagtgggacatccgttgcgtctccatcgaatggctgcacgacagcgccgagcgaaccatgattttgaacgaagactgctacgacccgagtcgaccaccagaagagcgaggcagagatgcatggtcaaggcgtgatcctcgacaactctccttaggcaaacggacgcgggaggggcccagcaccgccaccgatgaaagcaggcggaaactcaggaaaagcgccagcatgagaatgaccaagtcaagtagcaacttatggggggatattttgagccactcggccagcgacttgtctcgtccagttggtgctcagtccgagccacctccaccacctctccctgccaccgactcggagaaatccggggctcagccgcctcaacagatagcccgatctttcagcaatgtgagccgaatgaccgtcgacgctggtgtcctttctggttgtcggttcttcgtgtcgggtttctccgaggcaagagagggactcctatttaaacatttggcatcacatggcggacaaatctcctcgtcgctgaatgatgttgcgtccttgtcacacggagagccacttgatcaacgatatttgctcgtgccgcaatcatcacgccatggtgattatccaaaaccaccagaagggatccatgtcattaccgaatttttcatcgagcggtgcatccacaacaagaggctgtatcgtgctcaagaccacgttctgggacggccttttccgcattttccaattgatggatttcaagacctcaccgtcaatgcagccggcattttcaacgagcagttaaatcaagtggaaaaaacagtaacccagcttggggctacgtactctgagaagttgaataaagagatatcagtcctgatctgccctgatctagcttctctcagaatccagaagcgcgattttgcaatcctcaacaacatacctattgttaatatcgagtggttgtggcaatgcatagctgctggccgctctttgcccttgaagcaattttatttcgacgatttgttgcgcagtttaacctcgattcgagctaagctgcaacgtgcggaggatgaaaagaaaagagacaaacaccaaccccaagagtctcaatctaagtctttggtccagcaaccgagtgctccgaaagtcaatcaacaagcgccaccccttaatcacaatattgacaacagtgcattcgacgatgtccttgccaaggatcgtgtaaaggcaagtcgagcggatttaaaagagaaagagtcacaatacaagacggcaccaactcaccaagcagtggaaattggtgatgcattcacgcccgcgccggtgccattatcagagaaaactgcgaacaatgtgaacaaatctacttcaccaccgaaacaacctgagcaacgccaattgaagcggtttcctacggaaggtgaagtgggtgattctgaagcaggagacgaatcagatgctacaacaaacccgccacgtgaagcagtatcccgcgcccctaaaccaaaccacaaacgaaaacagggcatcagtaaccgcgagaaattagaacgtctagaaatggctaagaagttaaatgctcttatatctatttcaaatacgtctcaagagggaagcatattcagtttacaatcagaaccgaggcctcgtcgtaggcgcgaggtttttggtcgcgccaggagcaatgtgtctgctgcttctagcggaagcgctgggtctacatctggcatcgtcccttctaaagactatcagctcgcctccatccagaatgagtctacgtctgtagcatcagagtatgatactttcatcgagccaagtaatgagcaaggttcagacgaaaatccaccaccttcaacgcaactgggatatgaggtccctggggcaaaacaattccgccagatcatgatggatagactcaccggcaaggaaacacctcctgaaagtcatgttcaagaacctgagaaagttcgactctcagactttaaaccccatgatatagagccgagcgcgtctagacggactacgaggcgtcaagcccgcgagcatggatagctttgttgctttggatagtctcgcattggctgtagagcggtgttggggtactgtttggaattacatgttgctttggcatcgaagggccgttacggtatgacatttgggttggtagggtacatacaactcgctgttggtaaatgatgaggatgggtaagggaatactatatatattgcgtggctcgaacgtgtgggatatggggtaaggcgcatggcatttatatacaaaatagttaggtacggtcatgatcgagcgaatgataccaaatgatttacgatcatgacacgatttcatgagacccccatgctacgtccggattgccgttacttgcgtaacatgaaaacttgataagcggtagcaatacgcaacgtaatgacggtcacgaattagagagtcaaagggcaaaaaaagaagaaaattc

SEQ ID NO: 15926 - DNA, 798 bp, Muscodor strobelii
  misc_feature: SGI cDNA ID NO. 565284
  misc_feature: Encodes the peptide sequence at SEQ ID NO 15927
atgtctctgcggcaggccgccctgtcacttgtcttgttggcttctattgctacaaccaatgctcaaccaattactccaggattagcaacgtatgtacgtcgaggattaaatgatatcgaggcacagatagccgatgtccttcaaggtctaggtggaggccttttgggcgatgatcctgcagctgccgctgcaacgcaaactgctatagagacaccagcaactcctcccatacctggtgctacgcctccaccgcctcctggagcacttccagctccaccaccgccaccagcagcgaatatcactccaccaagtcctccaccgcctcccgccgatgcagcgaatggaactgctcctccgccggcccccggaaacgacacagcagcacctccagcacccgctggaaacgcaatacttccacctcctcaggctgcaaatggcacaggaatagtcgcggcagcaccacctccaccggccaatgctactagtcctccgccagctctggcgttaaacaataccgctgctgcggcgccaccaccgccgcccggcaacgctaccgcccttcctcctgctctaggtacaaaccaaactgctacacctcctcctcctcctggtgctgcgaataatacggctgcacctcctcctcctccctcggcacaaaatgggcaaaatcaacccatcattgtcgaaccgaatgaccaacccatcataattagcctcccagaccctggagcacagggcagcactcagcctatgatcattgaacttgtaggacgccgacaactacgtcgaaagtcttga

SEQ ID NO: 15927 - protein, 265 aa, Muscodor strobelii
  misc_feature: SGI Peptide ID NO. 565284
MSLRQAALSLVLLASIATTNAQPITPGLATYVRRGLNDIEAQIADVLQGLGGGLLGDDPAAAAATQTAIETPATPPIPGATPPPPPGALPAPPPPPAANITPPSPPPPPADAANGTAPPPAPGNDTAAPPAPAGNAILPPPQAANGTGIVAAAPPPPANATSPPPALALNNTAAAAPPPPPGNATALPPALGTNQTATPPPPPGAANNTAAPPPPPSAQNGQNQPIIVEPNDQPIIISLPDPGAQGSTQPMIIELVGRRQLRRKS

SEQ ID NO: 15928 - DNA, 1415 bp, Muscodor strobelii
  misc_feature: SGI EST ID NO. CUFF.37644.0
  misc_feature: Variant of the nucleotide sequence at SEQ ID NO 15926
caatgctcaaccaattactccaggattagcaacgtatgtacgtcgaggattaaatgatatcgaggcacagatagccgatgtccttcaaggtctaggtggaggccttttgggcgatgatcctgcagctgccgctgcaacgcaaactgctatagagacaccagcaactcctcgtatgttatagtgatatcccatctcagagacaactcactgacttgtcttcatcaagccatacctggtgctacgcctccaccgcctcctggagcacttccagctccaccaccgccaccagcagcgaatatcactccaccaagtcctccaccgcctcccgccgatgcagcgaatggaactgctcctccgccggcccccggaaacgacacagcagcacctccagcacccgctggaaacggtaagactctcaactcacttcccctccaagtttctgccgagaatgagtgttgcacataaatttgccttcgcctctaactgagacatatcaaagctctcctcttcctcctagctttagtagctgtgtctctcttatagaatgacgtccggctgatgcgggatgcatatatctagcaatacttccacctcctcaggctgcaaatggcacaggaatagtcgcggcagcaccacctccaccggccaatgctactagtcctccgccagctctggcgttaaacaataccgctgctgcggcgccaccaccgccgcccggcaacgctaccgcccttcctcctgctctaggtacaaaccaaactgctacacctcctcctcctcctggtgctgcgaataatacggctgcacctcctcctcctccctcggcacaaaatgggcaaaatcaacccatcattgtcgaaccgaatgaccaacccatcataattagcctcccagaccctggagcacagggcagcactcagcctatgatcattgaacttgtaggacgccgacaactacgtcgaaagtcttgaaaccacacttcgggaatagttgctggaaagcctatagttgagatgtatcaataaatgacaaatctacctgctatggacaggctccatatgtatataatagggtaggaccattgtaaaaacgtatcatggattatgataggcatgaatggatgataaaattagataggactatgagtgtcagccactctactacgcgagttcatgaattgtatatattgtgagcaacacacggaaagaaatccggaaatgggtatgaaatttcgcgaaatgcctaaaagcaaatttgtcgtcttcatgtggtactatctaggttgaacattgcgctggtgcgaaaagtgttgccaccgctacagcgcttgagtgacaggcacatcttatgcttaacaattatgatctaactagtcgattaatacataatcgcaacatatataggccatagctgag

SEQ ID NO: 15929 - DNA, 2145 bp, Muscodor strobelii
  misc_feature: SGI cDNA ID NO. 565285
  misc_feature: Encodes the peptide sequence at SEQ ID NO 15930
atgcatacttcaacaactccagccgccgtaacaaaggatcaggctcgttcaatatatcggaagctcagagaacctgactctatccgacttttcctcttacaaccgtctcatgataaaaatgccacgatctacggcacagtacttgaaactactctcggccaatgtaatgccgaccttattgatcgcttcacagccttatcgtatgtctggggggatgcttcgccaggagaagtagtgagacttgaagatgaggcaattagcgtcacccataatctcggcagagcgttaaaagaaattcgcgatgcgacacgggtgcatcgagtgtgggtagacgcactctgcatcaatcaagttgacatacaagagcgtaaccagcaggtcaaactgatggatcagatttactctagcgctggttgtactgtcatctttctcgggcctctcaccgccgatgtacaaatggtcttcgatgctgcatcgtcgacgatagatcctccactggagacaagcttcacagcccagcaggccagaccgaagtatctcgccgcgcccccgggccctgtattctcgacgagccacgcctctgtacattctcccgatagagataaatcccgcttgaacaaacttaacgagcgagatacagaggtcatcaaggctgcagagcgtgatctgcttcgacggccctggttccgccgtgtatgggtcttccaggaactcgtcatgtctagggatcctcgggtgcaatgtggtgatatgagaataagatgggccgatctgtgcgattacctgtcaccacgcctcgagaactggaatgaagccaatgccggtacggcactaacagaaatgaatcgagccagagtagaatcaactccgagggatctgctgagtcttctagacgcgaggcgtagttgtaaggcatcagacccgagagatatgatctttgcactcctaggcatagcatccgaccgccgggaagcccggagctctattgacatcgactatgccttatcacctgaagaggtatacatcgggaccgctcgctacttgttaaaacattttaacttgagtcggctagcgttatcgagtgccctatctgctcctcaaacaaacctaccatcttgggttcctagttggggagtcgactcaccttggtcacctccagagtggcactactatcagcaagattcgcggcattcgacgaccctgttcgaccccgtgctcatagtcgggagaacaaagaagcatgaaatcgtacaagaaatcagcgatgtcctccctccagcagccatgtatagcgaatggttcagaagccgtatttatgatataatagcatcgaaacgtaacgctgacaacttttacggcttgaacctgggaggcacacacggttttactcacgggacggaatctgtgcaatggaggaccgtgtggaatgccttcatctccgagtcgtttgccagtgcgaggacaccaaacacgcaggcttcctaccaagtcctgaagggcgccagctcgatgcagttcctatcgattagttcgaattcctctcgagggaagaaccgtcaatcatacaaatggcccaaggtcacaccctggctcgacgcaacgaacccctgggatgcgatgacgtctatgggagaccaagcgctagagttagtgtgcgattactttcaagaaggaggcgtgttctcgcacagccagcagtaccggttagccaggtcggtcaagataggtgtatgcatcgttcccgctgacaccgccgttggtgattccatcatggaccttttacatctcgagaggaagatggacagcatacatggatcatcctactcgatggatacaacgttcgttttacacgccatcacggggccagcaacacatgattgggacgaaaatacaatcaaggctcacttcgccggggagacaagctcgacagagtggcagcgctggaaatccatggcgcctccggacttagccaccagtgaagtcttccattgtcggttagtaggcgtgtgccatactggggctccagatagtcgcccaagcgagactgatggtcatttgccgtcgaatttatcacggagaagtcaaggtggctcatctgcaggttcaggatttcagaagctatcgggtctggtagcgatccattaa

SEQ ID NO: 15930 - protein, 714 aa, Muscodor strobelii
  misc_feature: SGI Peptide ID NO. 565285
  misc_feature (63)..(237): Pfam Id: PF06985 Pfam Desc: Heterokaryon incompatibility protein (HET)
  misc_feature (63)..(146): Pfam Id: PF06985 Pfam Desc: Heterokaryon incompatibility protein (HET)
  misc_feature (222)..(237): Pfam Id: PF06985 Pfam Desc: Heterokaryon incompatibility protein (HET)
  misc_feature (19)..(417): NCBI GI: 171676461 Blast Desc: protein product [Podospora anserina] gi|170936297|emb|CAP60955.1| protein product [Podospora anserina]
  misc_feature (19)..(397): NCBI GI: 154311542 Blast Desc: BC1G_06230 [Botryotinia fuckeliana B05.10] gi|150850741|gb|EDN25934.1| BC1G_06230 [Botryotinia fuckeliana B05.10]
  misc_feature (50)..(377): NCBI GI: 156061881 Blast Desc: SS1G_03086 [Sclerotinia sclerotiorum 1980] gi|154700487|gb|EDO00226.1| SS1G_03086 [Sclerotinia sclerotiorum 1980]
  misc_feature (19)..(593): NCBI GI: 256722966 Blast Desc: NECHADRAFT_86875 [Nectria haematococca mpVI 77-13-4]
  misc_feature (24)..(378): NCBI GI: 46127485 Blast Desc: FG08120.1 [Gibberella zeae PH-1]
  misc_feature (19)..(377): NCBI GI: 46111023 Blast Desc: FG02393.1 [Gibberella zeae PH-1] gi|82779921|gb|ABB90278.1| heterokaryon incompatibility protein [Gibberella zeae]
  misc_feature (22)..(404): NCBI GI: 256721799 Blast Desc: NECHADRAFT_53281 [Nectria haematococca mpVI 77-13-4]
  misc_feature (19)..(382): NCBI GI: 169619623 Blast Desc: SNOG_13010 [Phaeosphaeria nodorum SN15] gi|111058690|gb|EAT79810.1| SNOG_13010 [Phaeosphaeria nodorum SN15]
  misc_feature (19)..(377): NCBI GI: 256724619 Blast Desc: NECHADRAFT_95927 [Nectria haematococca mpVI 77-13-4]
  misc_feature (18)..(377): NCBI GI: 115449831 Blast Desc: [Aspergillus terreus NIH2624] gi|114187656|gb|EAU29356.1| [Aspergillus terreus NIH2624]
MHTSTTPAAVTKDQARSIYRKLREPDSIRLFLLQPSHDKNATIYGTVLETTLGQCNADLIDRFTALSYVWGDASPGEVVRLEDEAISVTHNLGRALKEIRDATRVHRVWVDALCINQVDIQERNQQVKLMDQIYSSAGCTVIFLGPLTADVQMVFDAASSTIDPPLETSFTAQQARPKYLAAPPGPVFSTSHASVHSPDRDKSRLNKLNERDTEVIKAAERDLLRRPWFRRVWVFQELVMSRDPRVQCGDMRIRWADLCDYLSPRLENWNEANAGTALTEMNRARVESTPRDLLSLLDARRSCKASDPRDMIFALLGIASDRREARSSIDIDYALSPEEVYIGTARYLLKHFNLSRLALSSALSAPQTNLPSWVPSWGVDSPWSPPEWHYYQQDSRHSTTLFDPVLIVGRTKKHEIVQEISDVLPPAAMYSEWFRSRIYDIIASKRNADNFYGLNLGGTHGFTHGTESVQWRTVWNAFISESFASARTPNTQASYQVLKGASSMQFLSISSNSSRGKNRQSYKWPKVTPWLDATNPWDAMTSMGDQALELVCDYFQEGGVFSHSQQYRLARSVKIGVCIVPADTAVGDSIMDLLHLERKMDSIHGSSYSMDTTFVLHAITGPATHDWDENTIKAHFAGETSSTEWQRWKSMAPPDLATSEVFHCRLVGVCHTGAPDSRPSETDGHLPSNLSRRSQGGSSAGSGFQKLSGLVAIH

SEQ ID NO: 15931 - DNA, 2897 bp, Muscodor strobelii
  misc_feature: SGI EST ID NO. CUFF.37650.0
  misc_feature: Variant of the nucleotide sequence at SEQ ID NO 15929
ccgaagtatctcgccgcgcccccgggccctgtattctcgacgagccacgcctctgtacattctcccgatagagataaatcccgcttgaacaaacttaacgagcgagatacagaggtcatcaaggctgcagagcgtgatctgcttcgacggccctggttccgccgtgtatgggtcttccaggaactcgtcatgtctagggatcctcgggtgcaatgtggtgatatgagaataagatgggccgatctgtgcgattacctgtcaccacgcctcgagaactggaatgaagccaatgccggtacggcactaacagaaatgaatcgagccagagtagaatcaactccgagggatctgctgagtcttctagacgcgaggcgtagttgtaaggcatcagacccgagagatatgatctttgcactcctaggcatagcatccgaccgccgggaagcccggagctctattgacatcgactatgccttatcacctgaagaggtatacatcgggaccgctcgctacttgttaaaacattttaacttgagtcggctagcgttatcgagtgccctatctgctcctcaaacaaacctaccatcttgggttcctagttggggagtcgactcaccttggtcacctccagagtggcactactatcagcaagattcgcggcattcgacgaccctgttcgaccccgtgctcatagtcgggagaacaaagaagcatgaaatcgtacaagaaatcagcgatgtcctccctccagcagccatgtatagcgaatggttcagaagccgtatttatgatataatagcatcgaaacgtaacgctgacaacttttacggcttgaacctgggaggcacacacggttttactcacgggacggaatctgtgcaatggaggaccgtgtggaatgccttcatctccgagtcgtttgccagtgcgaggacaccaaacacgcaggcttcctaccaagtcctgaagggcgccagctcgatgcagttcctatcgattagttcgaattcctctcgagggaagaaccgtcaatcatacaaatggcccaaggtcacaccctggctcgacgcaacgaacccctgggatgcgatgacgtctatgggagaccaagcgctagagttagtgtgcgattactttcaagaaggaggcgtgttctcgcacagccagcagtaccggttagccaggtcggtcaagataggtgtatgcatcgttcccgctgacaccgccgttggtgattccatcatggaccttttacatctcgagaggaagatggacagcatacatggatcatcctactcgatggatacaacgttcgttttacacgccatcacggggccagcaacacatgattgggacgaaaatacaatcaaggctcacttcgccggggagacaagctcgacagagtggcagcgctggaaatccatggcgcctccggacttagccaccagtgaagtcttccattgtcggttagtaggcgtgtgccatactggggctccagatagtcgcccaagcgagactgatggtcatttgccgtcgaatttatcacggagaagtcaaggtggctcatctgcaggttcaggatttcagaagctatcgggtctggtagcgatccattaacatacctcataatacgttgttgaagtaataacgaatctacatacgaaaagtattatttactggcactggaatactttaagcaacatacggaaggggatttgaaaatggatttaaaattctaagaaaaactcttgaaatgataatttttattaaaagaaagggtgaggttaaggagggtgtcaaatgcaagaaaaaagtgtggtggaatcttctataacaccagcttttcgtatttggtatgtataacacgcatcgccaaagcatcataaattattaattagtcgtggtggtgaagctggctacaggcgcgaaggtaggcgggtgggtgacgaggtgcgggtggttggcaccagcaacaccacagcacatcaccttcggcgacaacgcggcagtcttgccagcatgtgacaccggttgaatgtcggctgggtctctgggatatagaccagcttatggctcgctttaacaagtcacccgaagatggtacaatggtagtgaacgtccacgatgaccagaagaccgagggttcagaaacggtgcttgctgaagatgtcgcgggtttttcccgggcccccgggggagggacgcctccccccttgggcccggggacgatccgcgacatcgctgtggcgacagtgcaagaacaacactgcaacaaatacctaaggcgaaagctgggcgcgctggagatgtacgggacaacacgtacaaacagggcgattattttttttgccttttggtcaatttgtttatatatgccccatgtcgtcactccttattgctctccggttacatcactaccattttgtgacgtggtgggtgactatggttcgtatgatggattcaaggggccattactcttggtctatatgccattgacaagtcatatgtcgggatgagctagttcatggctaaaatcataggcaaacattgatcaattagaacgagtgagtatattgtttatctatccgtagtatattcagtgaaacgagagtcatgaggttttcagttctgagtctgttgtctggcgacgcagacgcccattttcaatactctggagttgcatggaatccgttaccgttacctagctccttagcgttggcttcgacgtgaacgtgaccattgccagtaccgttgccatggccattgcgataagcctttcgattgaccccattgccaacgtgggcttccagggatgacaggtcgatatcatctgctccttctagccactgccctatcttctcatacatatcaagccacaaatcatgagcagttccttt

SEQ ID NO: 15932 - DNA, 873 bp, Muscodor strobelii
  misc_feature: SGI cDNA ID NO. 565286
  misc_feature: Encodes the peptide sequence at SEQ ID NO 15933
atgaccacaccgatggacccccaggcggggatgtactctcacgccaatggtcgtgtggcagacctactcgatcgtctcgctgtttcggagatctgcaaagggtggccagtgtaccgagacgcttcggaatggaagaacttccgctcgctgttctgtgacgatgcttttgtctggacaacctggagcaaacgccagtccatagacagtttcattcgcgtttcgaaagaaggcaaagcacgtggagactttatcatgcaccgcgaatgtggcacaaccgctgagctcaacccagagaccggcagagctgtgggtaagatgaaggcaacaatcacgcaaagattcacaatcaagggtgatacggaccgtggtctagagcccattgtcttcgacgtcgactgtgactgtcgatttcacttcttctgcctcaagcaacagggcgattacccagagtggaaaattcggtacgtcaagcttatatacgagaaagataaggttgttcccgtcgatgggaaatcaatgcctactttcactcaggagatgcttcgccgctgcccggagggataccagtacttgggcgctgcacaacgcatgcttggtcatgatatcgatgaattcttgccgactattcagggtaaagggaaaggaactgctcatgatttgtggcttgatatgtatgagaagatagggcagtggctagaaggagcagatgatatcgacctgtcatccctggaagcccacgttggcaatggggtcaatcgaaaggcttatcgcaatggccatggcaacggtactggcaatggtcacgttcacgtcgaagccaacgctaaggagctaggtaacggtaacggattccatgcaactccagagtattga

SEQ ID NO: 15933 - protein, 290 aa, Muscodor strobelii
  misc_feature: SGI Peptide ID NO. 565286
  misc_feature (1)..(240): NCBI GI: 116191171 Blast Desc: CHGG_05303 [Chaetomium globosum CBS 148.51] gi|88181216|gb|EAQ88684.1| CHGG_05303 [Chaetomium globosum CBS 148.51]
  misc_feature (1)..(240): NCBI GI: 85109375 Blast Desc: NCU05730 [Neurospora crassa OR74A] gi|28924528|gb|EAA33650.1| [Neurospora crassa OR74A]
  misc_feature (1)..(240): NCBI GI: 171681194 Blast Desc: protein product [Podospora anserina] gi|170940555|emb|CAP65783.1| protein product [Podospora anserina]
  misc_feature (3)..(236): NCBI GI: 145231978 Blast Desc: An02g03200 [Aspergillus niger] gi|134056366|emb|CAK47600.1| protein product [Aspergillus niger]
  misc_feature (3)..(243): NCBI GI: 145259307 Blast Desc: An04g09720 [Aspergillus niger] gi|134074950|emb|CAK47979.1| protein product [Aspergillus niger]
  misc_feature (1)..(144): NCBI GI: 261359209 Blast Desc: catabolic 3-dehydroquinase [Verticillium albo-atrum VaMs.102]
  misc_feature (4)..(243): NCBI GI: 58262300 Blast Desc: [Cryptococcus neoformans var. neoformans JEC21] gi|134118702|ref|XP_771854.1| CNBN0350 [Cryptococcus neoformans var. neoformans B-3501A] gi|50254458|gb|EAL17207.1| CNBN0350 var.
  misc_feature (16)..(234): NCBI GI: 14290416 Blast Desc: AF315805_1 PEP2 [Nectria haematococca] gi|256725148|gb|EEU38514.1| [Nectria haematococca mpVI 77-13-4]
  misc_feature (16)..(236): NCBI GI: 70998845 Blast Desc: pathogenesis associated protein Pep2 [Aspergillus fumigatus Af293] gi|66851781|gb|EAL92106.1| pathogenesis associated protein Pep2, [Aspergillus fumigatus Af293] associated
  misc_feature (16)..(234): NCBI GI: 119490134 Blast Desc: NFIA_062450 [Neosartorya fischeri NRRL 181] gi|119411141|gb|EAW21084.1| conserved [Neosartorya fischeri NRRL 181]
MTTPMDPQAGMYSHANGRVADLLDRLAVSEICKGWPVYRDASEWKNFRSLFCDDAFVWTTWSKRQSIDSFIRVSKEGKARGDFIMHRECGTTAELNPETGRAVGKMKATITQRFTIKGDTDRGLEPIVFDVDCDCRFHFFCLKQQGDYPEWKIRYVKLIYEKDKVVPVDGKSMPTFTQEMLRRCPEGYQYLGAAQRMLGHDIDEFLPTIQGKGKGTAHDLWLDMYEKIGQWLEGADDIDLSSLEAHVGNGVNRKAYRNGHGNGTGNGHVHVEANAKELGNGNGFHATPEY

SEQ ID NO: 15934 - DNA, 627 bp, Muscodor strobelii
  misc_feature: SGI cDNA ID NO. 565287
  misc_feature: Encodes the peptide sequence at SEQ ID NO 15935
atgtcatcagccgccgcgggcgaatccgcgggcgctgacgagaagtcctcagcgcccgcctccccccagctcccacctctcagccccgccgactttcgcgccttcaaccacctagcagagcgcatggacgccttccacaaccactttcgccagacctggaacttgatgtacaacgctgcctcgacgggcaagcggccacagggcatgagcatccgctccttcatcaacgtcgggctgcagctcgtctctcacctcgagacacaccatggcatcgaggaggcctacatcttcccgcaccttgccatgcgcatgcccgagttccgtacgggaaaggagcggaatttgccgtctctgccaaacacgacagccgcagacaaggggaagcggaaggccgccgagctgctccagcagcacaaggagatacacgccggcatggagggtctgcaggactacctacgcaggtgcctctcaggtgagacggactttgaaatgagcgctctaaaagagcaactcgatacctggggtgacgttctctggagacacctcgatcaagaagtaaagacattgggtgccgaaaatatgcgtagatattggacattggatgaactgcgccagatacccttttag

SEQ ID NO: 15935 - protein, 208 aa, Muscodor strobelii
  misc_feature: SGI Peptide ID NO. 565287
  misc_feature (38)..(99): Pfam Id: PF01814 Pfam Desc: Hemerythrin HHE cation binding domain
  misc_feature (5)..(204): NCBI GI: 261358373 Blast Desc: conserved [Verticillium albo-atrum VaMs.102]
  misc_feature (19)..(207): NCBI GI: 256726192 Blast Desc: NECHADRAFT_94547 [Nectria haematococca mpVI 77-13-4]
  misc_feature (15)..(207): NCBI GI: 46111327 Blast Desc: FG02545.1 [Gibberella zeae PH-1]
  misc_feature (24)..(207): NCBI GI: 156064185 Blast Desc: SS1G_00100 [Sclerotinia sclerotiorum 1980] gi|154690962|gb|EDN90700.1| SS1G_00100 [Sclerotinia sclerotiorum 1980]
  misc_feature (2)..(208): NCBI GI: 212526210 Blast Desc: conserved [Penicillium marneffei ATCC 18224] gi|210072660|gb|EEA26747.1| conserved [Penicillium marneffei ATCC 18224]
  misc_feature (16)..(208): NCBI GI: 67541220 Blast Desc: AN6780.2 [Aspergillus nidulans FGSC A4] gi|40739408|gb|EAA58598.1| AN6780.2 [Aspergillus nidulans FGSC A4] gi|259480373|tpe|CBF71444.1| TPA: conserved [Aspergillus FGSC
  misc_feature (4)..(207): NCBI GI: 242780236 Blast Desc: conserved [Talaromyces stipitatus ATCC 10500] gi|218719700|gb|EED19119.1| conserved [Talaromyces stipitatus ATCC 10500]
  misc_feature (24)..(208): NCBI GI: 70982566 Blast Desc: conserved [Aspergillus fumigatus Af293] gi|66844435|gb|EAL84773.1| conserved [Aspergillus fumigatus Af293] gi|159122949|gb|EDP48069.1| conserved [Aspergillus A1163]
  misc_feature (25)..(208): NCBI GI: 145234761 Blast Desc: An03g01270 [Aspergillus niger] gi|134057702|emb|CAK38100.1| protein product [Aspergillus niger]
  misc_feature (5)..(208): NCBI GI: 119488618 Blast Desc: NFIA_113930 [Neosartorya fischeri NRRL 181] gi|119410917|gb|EAW20862.1| conserved [Neosartorya fischeri NRRL 181]
MSSAAAGESAGADEKSSAPASPQLPPLSPADFRAFNHLAERMDAFHNHFRQTWNLMYNAASTGKRPQGMSIRSFINVGLQLVSHLETHHGIEEAYIFPHLAMRMPEFRTGKERNLPSLPNTTAADKGKRKAAELLQQHKEIHAGMEGLQDYLRRCLSGETDFEMSALKEQLDTWGDVLWRHLDQEVKTLGAENMRRYWTLDELRQIPF

SEQ ID NO: 15936 - DNA, 2613 bp, Muscodor strobelii
  misc_feature: SGI cDNA ID NO. 565288
  misc_feature: Reduced expression when VOC is produced
  misc_feature: Encodes the peptide sequence at SEQ ID NO 15937
atgtctcgattcttccgcagtggcgaggacagctcctctgagagcagctccgacgaggaggagctctactccggagaggaggaggaagaggagaaagaagaggagtcagaggaggaatcctccgaggaagaagatgacgaagatgagtccagtgaggaggatagcgacgaggaaggtggcaagaagaccggtgcttcgcgtttcttgcgcggcgagtcctcagagagcgaagacagcgacgatgataaacccaagatgttcaagagcgccaaggacaagcgtttcgccgaactcgagtccaccattgatgccatcgagaagaagcagaagattaatgactggggtgctgtctctacagaattcgacaaattgaatcgacaagctctcaagatgaccgagcgcggtcaagtcccgaaattctacatcaaagccatcgtcgaactcgaggatgccatgaacgagacaatctcgaaacagaaagtcacccccaagaaaatgaacgctacctctgctcgtggtctcaatgccgtcaagcagaagatcaagaagctcaagcaggatcaccaggccgaagtcgaccgataccgggaagaccctctcgatttccttgcctccgatgaggaggaggatgaagctcccgcgcccaagcccaagaagaccaaggccgagatctataccgagcaggtggaacagcagcccgatgaggaaggcttcgaaactgtcatcaagggtggacgcactcttcagttcaccccggagagtatcttcaaacacctgcgcggcattatggaatcccgtggaaagaagaacactgacaggttggagcaaatccgcatcatggaaaagctccacaatgttgccgtcacgccttaccagactattcgcgttctcttgacccttgtctccgccagatttgatcttggtaccggcagctctggcacaactactatgcctctggaacaatggaaggccgcagaaaaggagctttcaactctgttcgaagtcctcgaacagaaccgggaccatatcattattgaaaacgcggaagagtgggaggatgacgacaaaccccccacgatccagcccggtgagaagtatctcaagattcctggaagcgtcgtctcatacgtagagcgtcttgatgacgagttgactcgttcactgcaaaatatcgaccctcacacgtccgagtacatcgaacgccttacggatgagggatcattgtacaatgtcatcttccgcggtctgctctactatgagaccttgggcaaggattcatctctgcagatttctcaggacagcttgaaccgaatcgtgatgcgaaggctagaacatgtctacttcaagcccgctcaagttgtcaaggtattagaggagaatgcctggaagccagtccccgctgatgttgagtctgtgatcactcctagaggcagtatcaccgatgcaacccagctgctgagcgttctctgcaactacctgttcactcacagtgagggcatcatccgagcgcgtgccatgctgtgccagatctacttccttgcactccacgatgaatactataaagctcgtgacatgatgctcatgtcccatttgcaagagactatcaacagcttcgatgtacagacacagattctttacaaccgtacccttgtgcaggttggtctctgtgctttccgtaagggtctagtctacgatgcccagaacactctacaagagatctgcggtagtggccggcagaaggaattattggcccaaggtgtcatgatccagcgctacgctcaagtttctccagaacaagagagacttgagaagcagcgacagcttcccttccacatgcacatcaacctggaactcctcgaatgtgtctacctcacatgcagcatgctcctcgaaattcctcttctcgcacacacaggatcctcgccagatatcaagaagcgtgtaatcagcaagacttaccgtcgcatgctcgagtatcacgagcgccagatcttcactggtcctccagagaacacccgagaccacgttatgcaagcgtctcgagctctcgctgctggtgagtggcagaagtccatcaactttgtgcacagcatcaaaatttgggacctcatgccgaacacggaagagatcaaggcgatgctctctaagcagatccaggaagagggtctgcgaacttacctcttcacctacgctcctttctacgataccctcgctgtctctaccttatcatccatgttccagctagaggaccgcaaggtagccgcaatcgttagcaaaatgatcagtcacgaagaattggctgctgctctggaccaggttacctccaccatcattttccgcaagggcgtcgagctatctcgtctccagagcctggcgctcacgctatcagacaaggcagcagccctcatcgagacgaatgagcgcacgctcgagcagaggacacagggcacagctaatgcctttgaccggagaggcggacagaaccaacgcggtggccgcggaggaggacagaagggcggccgcggtggcgctcggccgggtgggacgggacagagacaggcgggcggcacccaatttacgggaggtgtgctcggcggtgctgtccggggttag

SEQ ID NO: 15937 - protein, 870 aa, Muscodor strobelii
  misc_feature: SGI Peptide ID NO. 565288
  misc_feature (651)..(781): Pfam Id: PF01399 Pfam Desc: PCI domain
  misc_feature (67)..(642): Pfam Id: PF05470 Pfam Desc: Eukaryotic translation initiation factor 3 subunit 8 N-terminus (eIF3c_N)
  misc_feature (783)..(862): Pfam Id: PF05469 Pfam Desc: Eukaryotic translation initiation factor 3 subunit 8 C-terminus (eIF3c_C)
  misc_feature (251)..(642): Pfam Id: PF05470 Pfam Desc: Eukaryotic translation initiation factor 3 subunit 8 N-terminus (eIF3c_N)
  misc_feature (67)..(211): Pfam Id: PF05470 Pfam Desc: Eukaryotic translation initiation factor 3 subunit 8 N-terminus (eIF3c_N)
  misc_feature (58)..(844): NCBI GI: 242220530 Blast Desc: eukaryotic translation initiation factor 3 subunit 8 [Postia placenta Mad-698-R] gi|220724753|gb|EED78775.1| eukaryotic translation initiation factor 3 subunit 8 [Postia
  misc_feature (62)..(843): NCBI GI: 213410561 Blast Desc: eukaryotic translation initiation factor 3 subunit C [Schizosaccharomyces japonicus yFS275] gi|212004097|gb|EEB09757.1| eukaryotic translation initiation 3 C
  misc_feature (89)..(843): NCBI GI: 169847643 Blast Desc: 40S ribosomal protein S18 [Coprinopsis cinerea okayama7#130] gi|116508386|gb|EAU91281.1| 40S ribosomal protein S18 [Coprinopsis cinerea okayama7#130]
  misc_feature (373)..(823): NCBI GI: 145248786 Blast Desc: An14g01030 [Aspergillus niger] gi|134081401|emb|CAK41902.1| protein product [Aspergillus niger]
  misc_feature (1)..(840): NCBI GI: 170092183 Blast Desc: [Laccaria bicolor S238N-H82] gi|164647172|gb|EDR11416.1| [Laccaria bicolor S238N-H82]
  misc_feature (62)..(838): NCBI GI: 63054571 Blast Desc: translation initiation factor eIF3c [Schizosaccharomyces pombe 972h-] gi|13432169|sp|O14164.2|EIF3C_SCHPO RecName: Full=Eukaryotic 3 C;
  misc_feature (1)..(808): NCBI GI: 50551367 Blast Desc: YALI0D22572p [Yarrowia lipolytica] gi|74634274|sp|Q6C855.1|EIF3C_YARLI RecName: Full=Eukaryotic translation initiation factor 3 subunit C; Short=eIF3c; AltName:
  misc_feature (66)..(836): NCBI GI: 164660736 Blast Desc: MGL_1674 [Malassezia globosa CBS 7966] gi|159105391|gb|EDP44277.1| MGL_1674 [Malassezia globosa CBS 7966]
  misc_feature (60)..(813): NCBI GI: 71024481 Blast Desc: UM06323.1 [Ustilago maydis 521] gi|74698820|sp|Q4P0P0.1|EIF3C_USTMA RecName: Full=Eukaryotic translation initiation factor 3 subunit C; Short=eIF3c; AltName:
  misc_feature (59)..(870): NCBI GI: 256726193 Blast Desc: [Nectria haematococca mpVI 77-13-4]
  misc_feature: Useful for introducing or modulating the production of volatile compounds
MSRFFRSGEDSSSESSSDEEELYSGEEEEEEKEEESEEESSEEEDDEDESSEEDSDEEGGKKTGASRFLRGESSESEDSDDDKPKMFKSAKDKRFAELESTIDAIEKKQKINDWGAVSTEFDKLNRQALKMTERGQVPKFYIKAIVELEDAMNETISKQKVTPKKMNATSARGLNAVKQKIKKLKQDHQAEVDRYREDPLDFLASDEEEDEAPAPKPKKTKAEIYTEQVEQQPDEEGFETVIKGGRTLQFTPESIFKHLRGIMESRGKKNTDRLEQIRIMEKLHNVAVTPYQTIRVLLTLVSARFDLGTGSSGTTTMPLEQWKAAEKELSTLFEVLEQNRDHIIIENAEEWEDDDKPPTIQPGEKYLKIPGSVVSYVERLDDELTRSLQNIDPHTSEYIERLTDEGSLYNVIFRGLLYYETLGKDSSLQISQDSLNRIVMRRLEHVYFKPAQVVKVLEENAWKPVPADVESVITPRGSITDATQLLSVLCNYLFTHSEGIIRARAMLCQIYFLALHDEYYKARDMMLMSHLQETINSFDVQTQILYNRTLVQVGLCAFRKGLVYDAQNTLQEICGSGRQKELLAQGVMIQRYAQVSPEQERLEKQRQLPFHMHINLELLECVYLTCSMLLEIPLLAHTGSSPDIKKRVISKTYRRMLEYHERQIFTGPPENTRDHVMQASRALAAGEWQKSINFVHSIKIWDLMPNTEEIKAMLSKQIQEEGLRTYLFTYAPFYDTLAVSTLSSMFQLEDRKVAAIVSKMISHEELAAALDQVTSTIIFRKGVELSRLQSLALTLSDKAAALIETNERTLEQRTQGTANAFDRRGGQNQRGGRGGGQKGGRGGARPGGTGQRQAGGTQFTGGVLGGAVRG

SEQ ID NO: 15938 - DNA, 4525 bp, Muscodor strobelii
  misc_feature: SGI EST ID NO. CUFF.37763.0
  misc_feature: Variant of the nucleotide sequence at SEQ ID NO 15936
ctggatttgcccctccacccgcaaaagttgtgtcctcgtttctcgaccaactcaatccgccacagtccgtctactaacgccggggctgtcctattgtcgctgaatccgggtgtttcaacgacgactgaacagttcactaattaccaccactacctcgcatcgaccatcgcccgaccggcttgcggctgccaccatgtctcgattcttccgcagtggcgaggacagctcctctgagagcagctccgacgaggaggagctctactccggagaggaggaggaagaggagaaagaagaggagtcagaggaggaatcctccgaggaagaagatgacgaagatgagtccagtgaggaggatagcgacgaggaaggtggcaagaagaccggtgcttcgcgtttcttgcgcggcgagtcctcagagagcgaagacagcgacgatgataaacccaagatgttcaagagcgccaaggacaagcgtttcgccgaactcgagtccaccattgatgccatcgagaagaagcagaagattaatgactggggtgctgtctctacagaattcgacaaattgaatcgacaagctctcaagatgaccgagcgcggtcaagtcccgaaattctacatcaaagccatcgtcgaactcgaggatgccatgaacgagacaatctcgaaacagaaagtcacccccaagaaaatgaacgctacctctgctcgtggtctcaatgccgtcaagcagaagatcaagaagctcaagcaggatcaccaggccgaagtcgaccgataccgggaagaccctctcgatttccttgcctccgatgaggaggaggatgaagctcccgcgcccaagcccaagaagaccaaggccgagatctataccgagcaggtggaacagcagcccgatgaggaaggcttcgaaactgtcatcaagggtggacgcactcttcagttcaccccggagagtatcttcaaacacctgcgcggcattatggaatcccgtggaaagaagaacactgacaggttggagcaaatccgcatcatggaaaagctccacaatgttgccgtcacgccttaccagactattcgcgttctcttgacccttgtctccgccagatttgatcttggtaccggcagctctggcacaactactatgcctctggaacaatggaaggccgcagaaaaggagctttcaactctgttcgaagtcctcgaacagaaccgggaccatatcattattgaaaacgcggaagagtgggaggatgacgacaaaccccccacgatccagcccggtgagaagtatctcaagattcctggaagcgtcgtctcatacgtagagcgtcttgatgacgagttgactcgttcactgcaaaatatcgaccctcacacgtccgagtacatcgaacgccttacggatgagggatcattgtacaatgtcatcttccgcggtctgctctactatgagaccttgggcaaggattcatctctgcagatttctcaggacagcttgaaccgaatcgtgatgcgaaggctagaacatgtctacttcaagcccgctcaagttgtcaaggtattagaggagaatgcctggaagccagtccccgctgatgttgagtctgtgatcactcctagaggcagtatcaccgatgcaacccagctgctgagcgttctctgcaactacctgttcactcacagtgagggcatcatccgagcgcgtgccatgctgtgccagatctacttccttgcactccacgatgaatactataaagctcgtgacatgatgctcatgtcccatttgcaagagactatcaacagcttcgatgtacagacacagattctttacaaccgtacccttgtgcaggttggtctctgtgctttccgtaagggtctagtctacgatgcccagaacactctacaagagatctgcggtagtggccggcagaaggaattattggcccaaggtgtcatgatccagcgctacgctcaagtttctccagaacaagagagacttgagaagcagcgacagcttcccttccacatgcacatcaacctggaactcctcgaatgtgtctacctcacatgcagcatgctcctcgaaattcctcttctcgcacacacaggatcctcgccagatatcaagaagcgtgtaatcagcaagacttaccgtcgcatgctcgagtatcacgagcgccagatcttcactggtcctccagagaacacccgagaccacgttatgcaagcgtctcgagctctcgctgctggtgagtggcagaagtccatcaactttgtgcacagcatcaaaatttgggacctcatgccgaacacggaagagatcaaggcgatgctctctaagcagatccaggaagagggtctgcgaacttacctcttcacctacgctcctttctacgataccctcgctgtctctaccttatcatccatgttccagctagaggaccgcaaggtagccgcaatcgttagcaaaatgatcagtcacgaagaattggctgctgctctggaccaggttacctccaccatcattttccgcaagggcgtcgagctatctcgtctccagagcctggcgctcacgctatcagacaaggcagcagccctcatcgagacgaatgagcgcacgctcgagcagaggacacagggcacagctaatgcctttgaccggagaggcggacagaaccaacgcggtggccgcggaggaggacagaagggcggccgcggtggcgctcggccgggtgggacgggacagagacaggcgggcggcacccaatttacgggaggtgtgctcggcggtgctgtccggggttagacaggtcattcggcgtacttgttctggttttttattgtctcgtgtatcttgagtgcatatggccggggctgctttattaagggaattgcacagcggcaattgtcggtcgaaaagatcgaccggactggtcaaaaaagcatagttgctaggaaattgaccgttattttacaaataaaatgcattactatatatactggtgctcctacgctacatgttatatgctatatgctatacgctgtgtaaatcatgtgcccctgtgcgccgttaccgtcgcagagatctatagccttctatggacgaatgcattcccaaagctcgtatgcggttgcaatgtctttggccaccaagaatgagtagttcttggcctaattacacgtcacactaaaagggtatctggcgcagttcatccaatgtccaatatctacgcatattttcggcacccaatgtctttacttcttgatcgaggtgtctccagagaacgtcaccccaggtatcgagttgctcttttagagcgctcatttcaaagtccgtctcacctgagaggcacctgcgtaggtagtcctgcagaccctccatgccggcgtgtatctccttgtgctgctggagcagctcggcggccttccgcttccccttgtctgcggctgtcgtgtttggcagagacggcaaattccgctcctttcccgtacggaactcgggcatgcgcatggcaaggtgcgggaagatgtaggcctcctcgatgccatggtgtgtctcgaggtgagagacgagctgcagcccgacgttgatgaaggagcggatgctcatgccctgtggccgcttgcccgtcgaggcagcgttgtacatcaagttccaggtctggcgaaagtggttgtggaaggcgtccatgcgctctgctaggtggttgaaggcgcgaaagtcggcggggctgagaggtgggagctggggggaggcgggcgctgaggacttctcgtcagcgcccgcggattcgcccgcggcggctgatgacatcttggatctagggtcgtgtaatacgtgtgttctatgcacgcgaggaggtacggcgaagaggccgaaggcgcgacgggagcttgttcctgtgagcggcaggcggcgcatcgacttgtgttgctggactgaggtcgaacgaaggtgggatgttgttacttatcagtagctttccttatcgccactctaacggagttgtgccaatggaaaggaaacgctaggtagttcatttgtgaaataaggcagatacttagagaggcaagtgttttctatattcgttagtagtatcatcttactttgcttctagcgccgcatcaggttggattcatagcaccgcttttgctagccacgtgcttgtatcgtatctacatatccaagatgtgtgcggattcagagggtccaagtcggggcaagcaaatcctccgccgcgcggaggcgcgaagggaagggatgaatttcaagtcgtggattggaaatatgtcagctattggaaatcgttatagccttcatttcggcgattgttaggttgttagtgggcgggcgctatgcaatgtcaaggcaaggccgtggtcgattctttcaactcggatgcaattggctcgaaagtgcgaagtccgagtctggattctgaaacaccaaaatattgtcctattctccgcgcgcttgttagtcattccaacaccaccgcccatttacatcggaatcatgacttcg

SEQ ID NO: 15939 - DNA, 420 bp, Muscodor strobelii
  misc_feature: SGI cDNA ID NO. 565289
  misc_feature: Encodes the peptide sequence at SEQ ID NO 15940
atggctaccaatgggactcagatcaagcaggaaatcaagcaggaggcagattcctcaccaaacaaaggagacacctcagaagaagagcagattaagcaagctctgaagcatttggatcacttacatgtcaagtgtcgtggtcttcgaacgacactccctcgcatggttgagagtatcatgcctgaagcattgccggccgatctcatgactagcaagaacacgcaagaacaagtacttgcaatgataagtgatcgtactcaggctgccgggaatgaaatcaaggatttccgtgcattgtataccaatgaagaaagcaagaaggtattagaacaggcccagaagagccgtgaggcaaatccaaaaggcatcaagccttggcgatacaaagaccacccagactggtgggatcctgatcgatga

SEQ ID NO: 15940 - protein, 139 aa, Muscodor strobelii
  misc_feature: SGI Peptide ID NO. 565289
  misc_feature (4)..(138): NCBI GI: 154312360 Blast Desc: BC1G_06213 [Botryotinia fuckeliana B05.10] gi|150850176|gb|EDN25369.1| BC1G_06213 [Botryotinia fuckeliana B05.10]
  misc_feature (4)..(138): NCBI GI: 156064169 Blast Desc: SS1G_00092 [Sclerotinia sclerotiorum 1980] gi|154690954|gb|EDN90692.1| SS1G_00092 [Sclerotinia sclerotiorum 1980]
  misc_feature (27)..(137): NCBI GI: 261358073 Blast Desc: conserved [Verticillium albo-atrum VaMs.102]
  misc_feature (1)..(134): NCBI GI: 85109847 Blast Desc: NCU07856 [Neurospora crassa OR74A] gi|28924769|gb|EAA33881.1| [Neurospora crassa OR74A]
  misc_feature (24)..(139): NCBI GI: 46116612 Blast Desc: FG04148.1 [Gibberella zeae PH-1]
  misc_feature (1)..(139): NCBI GI: 116191673 Blast Desc: [Chaetomium globosum CBS 148.51] gi|88181467|gb|EAQ88935.1| [Chaetomium globosum CBS 148.51]
  misc_feature (14)..(139): NCBI GI: 256725749 Blast Desc: NECHADRAFT_100940 [Nectria haematococca mpVI 77-13-4]
  misc_feature (1)..(134): NCBI GI: 39939892 Blast Desc: [Magnaporthe grisea 70-15] gi|145010422|gb|EDJ95078.1| [Magnaporthe grisea 70-15]
MATNGTQIKQEIKQEADSSPNKGDTSEEEQIKQALKHLDHLHVKCRGLRTTLPRMVESIMPEALPADLMTSKNTQEQVLAMISDRTQAAGNEIKDFRALYTNEESKKVLEQAQKSREANPKGIKPWRYKDHPDWWDPDR

SEQ ID NO: 15941 - DNA, 1069 bp, Muscodor strobelii
  misc_feature: SGI EST ID NO. CUFF.37657.0
  misc_feature: Variant of the nucleotide sequence at SEQ ID NO 15939
agcaaatattgtgtgctcactattgcttatccaaaaatcttgctcaacgtgtatctgtgtactgtactgtattatcaagatacgacaattataagcatgacctattttgcccactgcccactggcgtaaagatccctgcacaggagcgccagttgtggcattggcaacggttacctggaaatttcagtaaagtcaaagcaccagaacaaatagcaacaagttgatcattagatgtactttgtcaaacagttcattggaattgacattatctctttaaattggattcttgtggctcaactatccaaagcactacctgatacaactgcctcggacctttacgaactgccacaaggcagcttcattgccgcaatggctaccaatgggactcagatcaagcaggaaatcaagcaggaggcagattcctcaccaaacaaaggagacacctcagaagaagagcagattaagcaagctctgaagcatttggatcacttacatgtcaagtgtcgtggtcttcgaacgacactccctcgcatggttgagagtatcatgcctgaagcattgccggccgatctcatgactagcaagaacacgcaagaacaagtacttgcaatgataagtgatcgtactcaggctgccgggaatgaaatcaaggatttccgtgcattgtataccaatgaagaaagcaagaaggtattagaacaggcccagaagagccgtgaggcaaatccaaaaggcatcaagccttggcgatacaaagaccacccagactggtgggatcctgatcgatgaagctcttggcccctcaactatctctctgacctcgcttcctcgacgtgggtcgtcaacatttcaagtaccatgcacttcttggttataattagcgtggcgttattcggtctgggaaaatcagcgtcttcaccaatctgagaaccccaggaaacattctagtgtatgtctagagagaacagatttcataggtggcatttacttagctatttattagcaatagtaatacatctagcactattttaggagcaggaaacaaatgcttgaccttcacgcaggtatc

SEQ ID NO: 15942 - DNA, 609 bp, Muscodor strobelii
  misc_feature: SGI cDNA ID NO. 565290
  misc_feature: Reduced expression when VOC is produced
  misc_feature: Encodes the peptide sequence at SEQ ID NO 15943
atgcgagtcactcaattgaggcggcccatcttggccgcagtctctgggatatcaagatcgacgacaactccctctctacgccaactacaggatgttttcgctcagatgaggataggaactggctcggctgttgagggtcgcagatccgcctccgtcaagtcccagggtgcctacaagatcaagagcacgaataccattccgaagaagctcggtgctaagaagactggtgactcctacgtaataacgggaaacatcatctacaagcagcgcggcaccaagtggcacccgggcgagaacgtcggcatgggccgcgaccacaccatcttcgccatgacctcgggatacgtgaaatactaccgcgatcccaagaagcaccccaagcgccagtacatcggcgtcgtcttcgacaaggatgactccctcccctacccagccaacgccatgcgcaagcgcaaactcaacatggtcgccgtccccatcacgccccccgaaccccagcccgagctctccgcatccggcatcccgaaccaagtcgtgcggcagggtctaggccgcaagcctaacccccgcgatgaacgaatcctcaagttgaggcaggatagcagctat

SEQ ID NO: 15943 - protein, 203 aa, Muscodor strobelii
  misc_feature: SGI Peptide ID NO. 565290
  misc_feature (50)..(134): Pfam Id: PF01016 Pfam Desc: Ribosomal L27 protein
  misc_feature (68)..(134): Pfam Id: PF01016 Pfam Desc: Ribosomal L27 protein
  misc_feature (1)..(203): NCBI GI: 256727871 Blast Desc: NECHADRAFT_70854 [Nectria haematococca mpVI 77-13-4]
  misc_feature (1)..(203): NCBI GI: 261357912 Blast Desc: 50S ribosomal protein L27 [Verticillium albo-atrum VaMs.102]
  misc_feature (1)..(203): NCBI GI: 46130866 Blast Desc: FG08988.1 [Gibberella zeae PH-1]
  misc_feature (1)..(181): NCBI GI: 85100571 Blast Desc: NCU08861 [Neurospora crassa OR74A] gi|18375957|emb|CAD21256.1| related to 60s ribosomal protein L2 (mitochondrial) [Neurospora crassa] gi|28922526|gb|EAA31755.1|
  misc_feature (29)..(181): NCBI GI: 116200474 Blast Desc: CHGG_10782 [Chaetomium globosum CBS 148.51] gi|88175496|gb|EAQ82964.1| CHGG_10782 [Chaetomium globosum CBS 148.51]
  misc_feature (8)..(203): NCBI GI: 39960774 Blast Desc: MGG_09464 [Magnaporthe grisea 70-15] gi|145010959|gb|EDJ95615.1| MGG_09464 [Magnaporthe grisea 70-15]
  misc_feature (1)..(180): NCBI GI: 171676390 Blast Desc: protein product [Podospora anserina] gi|170936261|emb|CAP60920.1| protein product [Podospora anserina]
  misc_feature (1)..(191): NCBI GI: 189209758 Blast Desc: 60S ribosomal protein L2, mitochondrial precursor [Pyrenophora tritici-repentis Pt-1C-BFP] gi|187977304|gb|EDU43930.1| 60S ribosomal protein L2, precursor
  misc_feature (48)..(159): NCBI GI: 238844270 Blast Desc: 60S ribosomal protein L2 [Microsporum canis CBS 113480]
  misc_feature (48)..(160): NCBI GI: 240109593 Blast Desc: ribosomal protein L27 family protein [Coccidioides posadasii C735 delta SOWgp]
  misc_feature: Useful for introducing or modulating the production of volatile compounds
MRVTQLRRPILAAVSGISRSTTTPSLRQLQDVFAQMRIGTGSAVEGRRSASVKSQGAYKIKSTNTIPKKLGAKKTGDSYVITGNIIYKQRGTKWHPGENVGMGRDHTIFAMTSGYVKYYRDPKKHPKRQYIGVVFDKDDSLPYPANAMRKRKLNMVAVPITPPEPQPELSASGIPNQVVRQGLGRKPNPRDERILKLRQDSSY

SEQ ID NO: 15944 - DNA, 714 bp, Muscodor strobelii
  misc_feature: SGI EST ID NO. CUFF.37666.0
  misc_feature: Variant of the nucleotide sequence at SEQ ID NO 15942
ccgaaattttaggaggacggtgctgcagccaaagctccgacgacaaaacaataaccgagacacgaaactccatcgacgaccaccccgtcacctcgacagcacatcatgcgagtcactcaattgaggcggcccatcttggccgcagtctctgggatatcaagatcgacgacaactccctctctacgccaactacaggatgttttcgctcagatgaggataggaactggctcggctgttgagggtcgcagatccgcctccgtcaagtcccagggtgcctacaagatcaagagcacgaataccattccgaagaagctcggtgctaagaagactggtgactcctacgtaataacgggaaacatcatctacaagcagcgcggcaccaagtggcacccgggcgagaacgtcggcatgggccgcgaccacaccatcttcgccatgacctcgggatacgtgaaatactaccgcgatcccaagaagcaccccaagcgccagtacatcggcgtcgtcttcgacaaggatgactccctcccctacccagccaacgccatgcgcaagcgcaaactcaacatggtcgccgtccccatcacgccccccgaaccccagcccgagctctccgcatccggcatcccgaaccaagtcgtgcggcagggtctaggccgcaagcctaacccccgcgatgaacgaatcctcaagttgaggcaggatagcagctat

SEQ ID NO: 15945 - DNA, 363 bp, Muscodor strobelii
  misc_feature: SGI cDNA ID NO. 565291
  misc_feature: Encodes the peptide sequence at SEQ ID NO 15946
atgcagctttcacacgggctttccctcctcctgctaggcctattcacatcactagcccacgcacaattcggcttcttcgaccagatgttcggcggcggacaccaacaggagcaccaaccacaaaacgtagcgagcgactcgtccttctaccagcagcacttcgacagcttccactgcgacaactacctatgtcccgacacactcgcatgcgtacacttcccccaccactgcccctgcgcctggcccgccaacgaggacaaattcgagacgggcgacggccacaagatctgcctctctaagggcggcttcaaggccggcgaggccgcccggaagctcgagttagctaggaagggcatgttataa

SEQ ID NO: 15946 - protein, 120 aa, Muscodor strobelii
  misc_feature: SGI Peptide ID NO. 565291
  misc_feature (1)..(120): NCBI GI: 261357913 Blast Desc: conserved [Verticillium albo-atrum VaMs.102]
  misc_feature (8)..(120): NCBI GI: 119183413 Blast Desc: CIMG_06642 [Coccidioides immitis RS]
  misc_feature (3)..(120): NCBI GI: 121718194 Blast Desc: ACLA_001130 [Aspergillus clavatus NRRL 1] gi|119404326|gb|EAW14702.1| ACLA_001130 [Aspergillus clavatus NRRL 1]
  misc_feature (7)..(120): NCBI GI: 169616169 Blast Desc: SNOG_11258 [Phaeosphaeria nodorum SN15] gi|111060637|gb|EAT81757.1| SNOG_11258 [Phaeosphaeria nodorum SN15]
  misc_feature (8)..(120): NCBI GI: 169776577 Blast Desc: [Aspergillus oryzae RIB40] gi|238503293|ref|XP_002382880.1| conserved [Aspergillus flavus NRRL3357] gi|83771490|dbj|BAE61622.1| protein product oryzae]
  misc_feature (12)..(120): NCBI GI: 119498745 Blast Desc: NFIA_038070 [Neosartorya fischeri NRRL 181] gi|119414294|gb|EAW24233.1| NFIA_038070 [Neosartorya fischeri NRRL 181]
  misc_feature (7)..(120): NCBI GI: 238844271 Blast Desc: conserved [Microsporum canis CBS 113480]
  misc_feature (12)..(120): NCBI GI: 70984868 Blast Desc: conserved [Aspergillus fumigatus Af293] gi|66845568|gb|EAL85902.1| conserved [Aspergillus fumigatus Af293] gi|159126135|gb|EDP51251.1| conserved [Aspergillus A1163]
  misc_feature (20)..(120): NCBI GI: 256728037 Blast Desc: NECHADRAFT_83432 [Nectria haematococca mpVI 77-13-4]
  misc_feature (3)..(120): NCBI GI: 115432984 Blast Desc: conserved [Aspergillus terreus NIH2624] gi|114189481|gb|EAU31181.1| conserved [Aspergillus terreus NIH2624]
MQLSHGLSLLLLGLFTSLAHAQFGFFDQMFGGGHQQEHQPQNVASDSSFYQQHFDSFHCDNYLCPDTLACVHFPHHCPCAWPANEDKFETGDGHKICLSKGGFKAGEAARKLELARKGML

SEQ ID NO: 15947 - DNA, 792 bp, Muscodor strobelii
  misc_feature: SGI EST ID NO. CUFF.37741.1
  misc_feature: Variant of the nucleotide sequence at SEQ ID NO 15945
cttggactttccattgtgacagctcgattgaagaggcacattcgcccataacccataacattcattcgcgactcgatgcactttacaatattaaactcagcgacctatcacgaaggatttacaactccagcgacgctcgcgccgagatagtagagcacataaaccgagccatatcttctcgcacggagcgagtagcgataggtcataacccgacgaaactccaagatgcagctttcacacgggctttccctcctcctgctaggcctattcacatcactagcccacgcacaattcggcttcttcgaccagatgttcggcggcggacaccaacaggagcaccaaccacaaaacgtagcgagcgactcgtccttctaccagcagcacttcgacagcttccactgcgacaactacctatgtcccgacacactcgcatgcgtacacttcccccaccactgcccctgcgcctggcccgccaacgaggacaaattcgagacgggcgacggccacaagatctgcctctctaagggcggcttcaaggccggcgaggccgcccggaagctcgagttagctaggaagggcatgttataacactagatacactagatcccaacttagacacgtttattatatacgggatgtaaccagatcacatagtgtttgagatatttggattggttgtacaaccattttgagatctgaattgtatcatttgatagcgatatagtggattgacgaatgatatacatgcatgacttaaagatctcaactgaccttggcacaatttcctcatcc

SEQ ID NO: 15948 - DNA, 681 bp, Muscodor strobelii
  misc_feature: SGI cDNA ID NO. 565292
  misc_feature: Encodes the peptide sequence at SEQ ID NO 15949
atggcgaccgtcgagactagccccaaggccattcacacgccagctactggcaatgctaggcgacccaaaggcatcttgaagaactcgtatcagaaatccccaccagagtcgcccaccaaggagagggagcacgatgtgacggacaaggagctcaccatcgccaacacgcaagccaacgcgggccaccgccgatcctccagcgccgccagccgacccgcgggctcccgtcgccagtcctcgcgcacgccctccaacgcgggagaggaggacatgaccaacagccagcgcctgcagtgggacgaggccaacctgtacctcacggagcaggagcggacgtcgacgatgaagatcacggagcccaagacgccctacgcacaccactacgagccgtcggaagacgaggacgacgagatggcggacggcgaggagggaacgatccccggtctgtcgctgggggagccggaggaggaggtccccgtgtcggatcgcaagagcaaggtgcacgttagcgacgaggacgcgacgccgcagcacgacgcggagaacgagtacatcggcatgacgcccgaggagcgggagaagcaccgcaagttcgagcaggcgaggaagaagcactacgagatgaaggacgtggctaagctcttgggtcatcccgaggatgtcgatgatgtacccgagtga

SEQ ID NO: 15949 - protein, 226 aa, Muscodor strobelii
  misc_feature: SGI Peptide ID NO. 565292
  misc_feature (1)..(217): NCBI GI: 46130862 Blast Desc: FG08986.1 [Gibberella zeae PH-1]
  misc_feature (1)..(221): NCBI GI: 256727870 Blast Desc: NECHADRAFT_70851 [Nectria haematococca mpVI 77-13-4]
  misc_feature (12)..(218): NCBI GI: 145602558 Blast Desc: MGG_09466 [Magnaporthe grisea 70-15] gi|145010961|gb|EDJ95617.1| MGG_09466 [Magnaporthe grisea 70-15]
  misc_feature (1)..(221): NCBI GI: 18375959 Blast Desc: related to Glc8 protein [Neurospora crassa]
  misc_feature (12)..(221): NCBI GI: 164423235 Blast Desc: NCU08859 [Neurospora crassa OR74A] gi|157070003|gb|EAA31753.2| conserved [Neurospora crassa OR74A]
  misc_feature (1)..(223): NCBI GI: 154316378 Blast Desc: BC1G_04120 [Botryotinia fuckeliana B05.10] gi|150845920|gb|EDN21113.1| BC1G_04120 [Botryotinia fuckeliana B05.10]
  misc_feature (2)..(218): NCBI GI: 116200474 Blast Desc: CHGG_10782 [Chaetomium globosum CBS 148.51] gi|88175496|gb|EAQ82964.1| CHGG_10782 [Chaetomium globosum CBS 148.51]
  misc_feature (4)..(218): NCBI GI: 171676394 Blast Desc: protein product [Podospora anserina] gi|170936263|emb|CAP60922.1| protein product [Podospora anserina]
  misc_feature (1)..(218): NCBI GI: 156059488 Blast Desc: SS1G_03756 [Sclerotinia sclerotiorum 1980] gi|154701543|gb|EDO01282.1| SS1G_03756 [Sclerotinia sclerotiorum 1980]
  misc_feature (2)..(131): NCBI GI: 261357914 Blast Desc: conserved [Verticillium albo-atrum VaMs.102]
MATVETSPKAIHTPATGNARRPKGILKNSYQKSPPESPTKEREHDVTDKELTIANTQANAGHRRSSSAASRPAGSRRQSSRTPSNAGEEDMTNSQRLQWDEANLYLTEQERTSTMKITEPKTPYAHHYEPSEDEDDEMADGEEGTIPGLSLGEPEEEVPVSDRKSKVHVSDEDATPQHDAENEYIGMTPEEREKHRKFEQARKKHYEMKDVAKLLGHPEDVDDVPE

SEQ ID NO: 15950 - DNA, 2181 bp, Muscodor strobelii
  misc_feature: SGI EST ID NO. CUFF.37669.0
  misc_feature: Variant of the nucleotide sequence at SEQ ID NO 15948
ctgctcgtggcattagtggttcccgtgcttgccccaactttaaatccaaccagaacccacgaccgccaggagataatgacgacaggcacaggatttggggaaacgcaaagcggttctattgagtttctgcggcgcatcgaggggctcacggacagttcacaatgcgaatgcagtcagcgagcgccgataaatcgtgggggcattgcatttaggagtcagaaaacctggggattgtagcatcgtcacgagcgccatgtgaggaggtctatcgtctcactgtggtctctcgtcgcctttatctgccactgggatcgcacaagacacgtcctgtccgatctacatctccaaaccttagtgctgtcattcctctgtaatcccttaaagaccctgcaacggacaactcaagtttctcaaccacagtcacatatgtttcccgtgacactgtccggctgttaaagattattctaattgcgatcccattataatcgcattctcacattcccattcccgttcttgggctgctgagcttggactcccaccaactccatcagtccccagacatcacctcattatagcctgcggagtctagtatctggatggcttactacctatagcatcgtcatcccgcgggttgcatgaaccatctatcttgaccattcctcgtcgtcccccatctccgattgggccttatctacagcgcgttaggaggggaatattcgatgcgctagtagaagtggaattggtgattcgcaggaaaaggcattgcgattgcgtctacctggcattggacgctgttccgcatcaccacatactcacgccccgccacccatttaacccattccttccgcctgcagggtccaaagctttccccgcggcgagctgaagctacagcccatgaactcataaacccttaacaatccccaattaccttcaaagtttgcgctacctgcctcgcctacctcattctggagtcgttttcaattctctacaagagacgcctttcgcattcgggttcccagtactgaatttttcttaccctcttgattactccacgacagcctcatcaacaaaccccgcctcgggccaatcttgtctttgttatcaccactcaaccccacaatctcgtgttttgtcgtgcgcatcgtcatcccgccacagctgtctgcattcctgcccacccaccagcgacaacaaacaccacactacccatccacaccactgcgtccaaaatggcgaccgtcgagactagccccaaggccattcacacgccagctactggcaatgctaggcgacccaaaggcatcttgaagaactcgtatcagaaatccccaccagagtcgcccaccaaggagagggagcacgatgtgacggacaaggagctcaccatcgccaacacgcaagccaacgcgggccaccgccgatcctccagcgccgccagccgacccgcgggctcccgtcgccagtcctcgcgcacgccctccaacgcgggagaggaggacatgaccaacagccagcgcctgcagtgggacgaggccaacctgtacctcacggagcaggagcggacgtcgacgatgaagatcacggagcccaagacgccctacgcacaccactacgagccgtcggaagacgaggacgacgagatggcggacggcgaggagggaacgatccccggtctgtcgctgggggagccggaggaggaggtccccgtgtcggatcgcaagagcaaggtgcacgttagcgacgaggacgcgacgccgcagcacgacgcggagaacgagtacatcggcatgacgcccgaggagcgggagaagcaccgcaagttcgagcaggcgaggaagaagcactacgagatgaaggacgtggctaagctcttgggtcatcccgaggatgtcgatgatgtacccgagtgatcatgcgcccaggtgcctgagagggcgtgactgtggaaagagaggcgcgggaacgtgatgaggaaagtgatagggaacacaggacattctgacggagccttcgttgctgtatctttattaatgaggagaaccatgatgcacttccccctttttcgcccggaacgtttgaggtggaatgcgtggcgcgatgaagggcaggagacgagaaagcatgaagcactgtaccatatcgtttctaagtcgcgtagacttgaatcaaattcgctgttga

SEQ ID NO: 15951 - DNA, 1923 bp, Muscodor strobelii
  misc_feature: SGI cDNA ID NO. 565293
  misc_feature: Encodes the peptide sequence at SEQ ID NO 15952
atggctcctaaacgcaagaattccgaaatggcgctcatgtcgccaatgtccccggcatactccacagcagggagtcaagctgatacaggcccaagacgatctggccggcttctggataagggtggacaaggtctcaaggactatgccgccgacatggaagaagtcgacatggcgtcagatgatagctcggcgactccaaagcgaagcgtgaagagaaaaagtggcgtcaaggtcgctataagcggtctcaaggaaatggagggccaactccagaatattgtcaaaagacagaagcttgctttagaagaaagttctatggatacaaaagacgcgcgcgatttacagacggctgtatttacgccaaaacccaataaggagaaaccggacacaatggagggtcgcaaaaagcagctgaaaagagcggcggagaaaataattgctgacaaaaaggaacccgcggagcagaccggccctgatgcgacagaagatcaaggccctacgcctcgggcagaagatgacgactatgtcccggaggagacagatattgggaatctcaagctggagggtgcccgaccgcccccagtgaacagcgactatctaccactaccttggaaaggaaggctaggctacgcatgcttgaatacgtatctgcgacagagcaatcctcccgtgtttagctcacggacttgtcggatagcttctattatagaacatcgtcacccgctcgctgatccatcgcagcccgagcatccgacgaagaaccgtcctgacaaagagcagccggcagatatcgctcgaggtcaacgatatgtcgagggcttggggttagcgaatgctcgcgatgtcgtgaagatgctgaggtggaacgacaaatatggcatcaagttcatgcgactgagctctgaaatgtttccgttcgctagtcacgaagattatgggtacaagctcgcaccttttgcctcagatgtcctcgcctcagccggtcaggtggctgcagaattgggtcatagacttacgacacatccaggacaattcacacagctcggctctcctcgtaaggaagtagttgtgaatgccgtgcgtgatttggaatatcataacgagatgctctcactcctcaagctgccagagcagcaaaacaaggatgcagtcatgattctacacatgggcggtgtattcggcgacaaagccgcaacgctcgatcgcttccgggagaactatgccaaactctcgcctgacgtgaaagccaggctggtactggagaacgacgatgtctcttggactgtgcacgatctccttcccatttgtgaggagctcaacatccctatggttctcgacttccatcaccacaatatcatgttcgacgaggataagatccgagaaggcaccaaagatatcatggacttgtatccacgaattaaagccacctgggatcggaagggcatcacgcagaaaatgcactacagtgagcaatgttccgaagccgtcacgcgccgccaacggcgcaagcatcgacctcgcgttatgactttaccgccatgttcagataccatggacctaatgatcgaagccaaagacaaggaacaggcagtctttgatctgatgaggacttaccgccttcctggatgggatcggatcaacgatgtcgtgccttatgaacgggaagatgaaaaccggcctgtgcctaaggctccgaagaaaaagcagaaaaagaggaagggtaaagaagaagcgaacgacgaggaggagacagaggagcaagtaaagccgctgccagaggtttccgaggcggagttggggatgggtggccctaacaaccgtgtgtactggcctattggtatggaggagtggttgcggccgaagaagagggaggttaagaaaaaggataaaggtaaaatggacaaggatgctacagaggactga

SEQ ID NO: 15952 - protein, 640 aa, Muscodor strobelii
  misc_feature: SGI Peptide ID NO. 565293
  misc_feature (208)..(515): Pfam Id: PF03851 Pfam Desc: UV-endonuclease UvdE
  misc_feature (181)..(628): NCBI GI: 156057735 Blast Desc: SS1G_04599 [Sclerotinia sclerotiorum 1980] gi|154702384|gb|EDO02123.1| SS1G_04599 [Sclerotinia sclerotiorum 1980]
  misc_feature (171)..(622): NCBI GI: 67516645 Blast Desc: AN0604.2 [Aspergillus nidulans FGSC A4] gi|40747547|gb|EAA66703.1| AN0604.2 [Aspergillus nidulans FGSC A4] gi|259489129|tpe|CBF89145.1| TPA: endonuclease (Eurofung) A4]
  misc_feature (1)..(626): NCBI GI: 261357931 Blast Desc: UV-damage endonuclease [Verticillium albo-atrum VaMs.102]
  misc_feature (171)..(622): NCBI GI: 121699856 Blast Desc: UV-endonuclease UVE-1 [Aspergillus clavatus NRRL 1] gi|119396335|gb|EAW06767.1| UV-endonuclease UVE-1 [Aspergillus clavatus NRRL 1]
  misc_feature (73)..(634): NCBI GI: 171676376 Blast Desc: protein product [Podospora anserina] gi|170936254|emb|CAP60913.1| protein product [Podospora anserina]
  misc_feature (152)..(622): NCBI GI: 159124545 Blast Desc: UV-endonuclease UVE-1 [Aspergillus fumigatus A1163]
  misc_feature (152)..(622): NCBI GI: 119471777 Blast Desc: UV-endonuclease UVE-1 [Neosartorya fischeri NRRL 181] gi|119406366|gb|EAW16317.1| UV-endonuclease UVE-1 [Neosartorya fischeri NRRL 181]
  misc_feature (152)..(622): NCBI GI: 70992259 Blast Desc: UV-endonuclease UVE-1 [Aspergillus fumigatus Af293] gi|66848611|gb|EAL88940.1| UV-endonuclease UVE-1 [Aspergillus fumigatus Af293]
  misc_feature (171)..(632): NCBI GI: 212545901 Blast Desc: UV-endonuclease UVE-1 [Penicillium marneffei ATCC 18224] gi|210064624|gb|EEA18719.1| UV-endonuclease UVE-1 [Penicillium marneffei ATCC 18224]
  misc_feature (171)..(639): NCBI GI: 242820745 Blast Desc: UV-endonuclease UVE-1 [Talaromyces stipitatus ATCC 10500] gi|218714033|gb|EED13457.1| UV-endonuclease UVE-1 [Talaromyces stipitatus ATCC 10500]
MAPKRKNSEMALMSPMSPAYSTAGSQADTGPRRSGRLLDKGGQGLKDYAADMEEVDMASDDSSATPKRSVKRKSGVKVAISGLKEMEGQLQNIVKRQKLALEESSMDTKDARDLQTAVFTPKPNKEKPDTMEGRKKQLKRAAEKIIADKKEPAEQTGPDATEDQGPTPRAEDDDYVPEETDIGNLKLEGARPPPVNSDYLPLPWKGRLGYACLNTYLRQSNPPVFSSRTCRIASIIEHRHPLADPSQPEHPTKNRPDKEQPADIARGQRYVEGLGLANARDVVKMLRWNDKYGIKFMRLSSEMFPFASHEDYGYKLAPFASDVLASAGQVAAELGHRLTTHPGQFTQLGSPRKEVVVNAVRDLEYHNEMLSLLKLPEQQNKDAVMILHMGGVFGDKAATLDRFRENYAKLSPDVKARLVLENDDVSWTVHDLLPICEELNIPMVLDFHHHNIMFDEDKIREGTKDIMDLYPRIKATWDRKGITQKMHYSEQCSEAVTRRQRRKHRPRVMTLPPCSDTMDLMIEAKDKEQAVFDLMRTYRLPGWDRINDVVPYEREDENRPVPKAPKKKQKKRKGKEEANDEEETEEQVKPLPEVSEAELGMGGPNNRVYWPIGMEEWLRPKKREVKKKDKGKMDKDATED

SEQ ID NO: 15953 - DNA, 3194 bp, Muscodor strobelii
  misc_feature: SGI EST ID NO. CUFF.37672.0
  misc_feature: Variant of the nucleotide sequence at SEQ ID NO 15951
cgactagggtcgacaggcgagactggttcatggcccagccagagtcacgcccatctcgaatctacagtagatcgaggtcctggatcgcagcattgcttaagcaccgaactgtgtcgtctgtttagcgacctggattagccacttaaatggaattgtcaattgagctcaagcggctgcaccccttgctagtatatgtggtagctggcaatgcacgccatactgacctaccacactgcccgcagagagacaaagcacaaagggaccggaggcaaagctccctctatacgtgtcacgacgccgcgttatgacgcgctcattgttaccccttcccgaggacccttggcgatggtttcctgcgggcttcttggtgccacagattttgaacctcctgtgttgtttaatctctttgtaccagcagcagtttccacctcgtgctgtacaagctggaccgcatcccgtgcttttcgctacctagtcaggcgtgtgaccatttgacactgcaaaagtcagatttgcataattgacactccgtcgtacttctctttccaccattggacttggatgggtggcactcagcggcatctgattcgctggtatcgaataaaacctactggtcgcggtcgtttctctccgggcatagtgcactatatacatagctactctcgggtcgccaacccaaagttcctcgtcatggctcctaaacgcaagaattccgaaatggcgctcatgtcgccaatgtccccggcatactccacagcagggagtcaagctgatacaggcccaagacgatctggccggcttctggataagggtggacaaggtctcaaggactatgccgccgacatggaagaagtcgacatggcgtcagatgatagctcggcgactccaaagcgaagcgtgaagagaaaaagtggcgtcaaggtcgctataagcggtctcaaggaaatggagggccaactccagaatattgtcaaaagacagaagcttgctttagaagaaagttctatggatacaaaagacgcgcgcgatttacagacggctgtatttacgccaaaacccaataaggagaaaccggacacaatggagggtcgcaaaaagcagctgaaaagagcggcggagaaaataattgctgacaaaaaggaacccgcggagcagaccggccctgatgcgacagaagatcaaggccctacgcctcgggcagaagatgacgactatgtcccggaggagacagatattgggaatctcaagctggagggtgcccgaccgcccccagtgaacagcgactatctaccactaccttggaaaggaaggctaggctacgcatgcttgaatacgtatctgcgacagagcaatcctcccgtgtttagctcacggacttgtcggatagcttctattatagaacatcgtcacccgctcgctgatccatcgcagcccgagcatccgacgaagaaccgtcctgacaaagagcagccggcagatatcgctcgaggtcaacgatatgtcgagggcttggggttagcgaatgctcgcgatgtcgtgaagatgctgaggtggaacgacaaatatggcatcaagttcatgcgactgagctctgaaatgtttccgttcgctagtcacgaagattatgggtacaagctcgcaccttttgcctcagatgtcctcgcctcagccggtcaggtggctgcagaattgggtcatagacttacgacacatccaggacaattcacacagctcggctctcctcgtaaggaagtagttgtgaatgccgtgcgtgatttggaatatcataacgagatgctctcactcctcaagctgccagagcagcaaaacaaggatgcagtcatgattctacacatgggcggtgtattcggcgacaaagccgcaacgctcgatcgcttccgggagaactatgccaaactctcgcctgacgtgaaagccaggctggtactggagaacgacgatgtctcttggactgtgcacgatctccttcccatttgtgaggagctcaacatccctatggttctcgacttccatcaccacaatatcatgttcgacgaggataagatccgagaaggcaccaaagatatcatggacttgtatccacgaattaaagccacctgggatcggaagggcatcacgcagaaaatgcactacagtgagcaatgttccgaagccgtcacgcgccgccaacggcgcaagcatcgacctcgcgttatgactttaccgccatgttcagataccatggacctaatgatcgaagccaaagacaaggaacaggcagtctttgatctgatgaggacttaccgccttcctggatgggatcggatcaacgatgtcgtgccttatgaacgggaagatgaaaaccggcctgtgcctaaggctccgaagaaaaagcagaaaaagaggaagggtaaagaagaagcgaacgacgaggaggagacagaggagcaagtaaagccgctgccagaggtttccgaggcggagttggggatgggtggccctaacaaccgtgtgtactggcctattggtatggaggagtggttgcggccgaagaagagggaggttaagaaaaaggataaaggtaaaatggacaaggatgctacagaggactgaggctccaatggcctttatcgttggagtccataacgatgtacgataatattgccttcttcgcgctgcgcgcatgtctatagaactgtacaaatatgccaccttgtactctagattcgtcgaaatgaacgagaaatgatacgcgcgatgtatataacgtggtctttgttcaatggtcagatcgcaggtacaggcgcctcggcattatcagtgattggagccacttgcgactcgcgatgccattcgattccgcgagtagccaacccgagataagcgacgctaattccaatttcatgcacccatgtcgtcgacggtactatggcgcgatacgaagctgagtgaagtatcgtgagccgtgtggaagtatcatgaggtcatcatgcacgtggaatatagagggccccgcgctaccccaaagaggcccatggggttgtaccgaatattcggatgcctggggaatctcacgatggcagagatgtgtttgccgagcgatgatgtcagctggccgagaaggagtctttgactagagatggcgcggggttgagtgtacaaaatgttatgatgggcttgtgtctgcagcaagg

SEQ ID NO: 15954 - DNA, 1506 bp, Muscodor strobelii
  misc_feature: SGI cDNA ID NO. 565294
  misc_feature: Encodes the peptide sequence at SEQ ID NO 15955
atgtctgaccctcaatttgagcagaggtccgcctctttcttgaattggttcaaggcgcagccaggtgcgaccttccatcccgatattgaaattcaagacttccgaaatagggcagctggcagaggaattgttgctaaggtcgatattcctgaagacacggtgctttttacaataccgagagcttcaatcattaatactcaaacatcgaatctcgcaaagagggttcctgcactctttgctactacaggccttgaggatgccgacaacgaggcagatgaagatggcggtgcgacaagcggccctccagacaattggatctcgctcattctagtcatgatctatgagtatctgcaaggaggaaattctaggtggaagccctacttcgacgtgcttcctgacgacttcgagaccctgatatggtggggcgacaaggatctcgagcagctgcaagccagctcaatcgtatcgaagatcggcaaggatgaagccgattcgatgtttcggatcaaggtcctccccgtggtcgaacaaaactctgacgtcttctatccggaaggatcacgaaaactcacagaagcagaattgatacacctcgcacatcgtatggggagtgttatcatggcatatgcattcgatctcgagaacgaagaggaagaagctggcggcgatgacgacgacgaatgggttgaagataaagaaggaaagatactcatgggaatggtcccaatggcagacattctgaatgctgatgccgaattcaacgtaagcttttgtcctccctacatgaaatatagagcaatacctcattatcaaaaggcacatgtcaatcacgaagaagacagcctttctgtcacatcaattaggccgataactgcgggccaagaaattctaaactactacggtcctcttggtaatagtgagcttttgcgtcgttatggctatgttacggatcaccacgcacgctacgatgtagtagaaatatcatgggaatgtgttctatctgctttaaagagcgttgtcggcctggacgattctatctgggggaaagcaatcagtcaattggaccccgaagagatagaagacgccttcgtgattgaccgcgatttggatgaaccaaattcacaaggacaatttctcggccccaaaaatttaaagcacctcccaaaggatctccgagagcagatcaatcaattacttgctggtattagagaattgagcccaagcactataccagacaaaatagcaagagacgagatctgcctcaatgtcatgcgtcgcgcctttgaacaaaagcttgcagaatatcagacaagcgccaatgacgacatgcgactgttgaacgaggctcctagtcgccaacgggccagaatggctttgattgtgcgatgcggcgaaaaactcttgctccaagaagcactcagtctatgcgacgacaaaatcaacgaactgaagacagtacagggcgagaatggccagccctctgcaaaaaggttgaagacacagtaa

SEQ ID NO: 15955 - protein, 501 aa, Muscodor strobelii
  misc_feature: SGI Peptide ID NO. 565294
  misc_feature (23)..(307): Pfam Id: PF00856 Pfam Desc: SET domain
  misc_feature (99)..(163): Pfam Id: PF00856 Pfam Desc: SET domain
  misc_feature (6)..(497): NCBI GI: 261357909 Blast Desc: SET domain-containing protein RMS1 [Verticillium albo-atrum VaMs.102]
  misc_feature (13)..(496): NCBI GI: 256728035 Blast Desc: SET domain protein [Nectria haematococca mpVI 77-13-4]
  misc_feature (2)..(484): NCBI GI: 171676308 Blast Desc: protein product [Podospora anserina] gi|170936220|emb|CAP60879.1| protein product [Podospora anserina]
  misc_feature (16)..(499): NCBI GI: 46130858 Blast Desc: FG08984.1 [Gibberella zeae PH-1]
  misc_feature (6)..(499): NCBI GI: 85090666 Blast Desc: NCU09827 [Neurospora crassa OR74A] gi|28919896|gb|EAA29290.1| [Neurospora crassa OR74A]
  misc_feature (2)..(499): NCBI GI: 116200550 Blast Desc: CHGG_10820 [Chaetomium globosum CBS 148.51] gi|88175534|gb|EAQ83002.1| CHGG_10820 [Chaetomium globosum CBS 148.51]
  misc_feature (44)..(497): NCBI GI: 145602462 Blast Desc: MGG_04887 [Magnaporthe grisea 70-15] gi|145010883|gb|EDJ95539.1| MGG_04887 [Magnaporthe grisea 70-15]
  misc_feature (6)..(501): NCBI GI: 255945819 Blast Desc: Pc20g11910 [Penicillium chrysogenum Wisconsin 54-1255] gi|211588412|emb|CAP86520.1| Pc20g11910 [Penicillium chrysogenum Wisconsin 54-1255]
  misc_feature (5)..(478): NCBI GI: 225554758 Blast Desc: SET domain-containing protein [Ajellomyces capsulatus G186AR]
  misc_feature (6)..(478): NCBI GI: 240276868 Blast Desc: SET domain-containing protein [Ajellomyces capsulatus H143]
  misc_feature (40)..(487): SWISSPROT Homolog: EC 2.1.1.127 [Ribulose-bisphosphate carboxylase]-lysine N-methyltransferase
MSDPQFEQRSASFLNWFKAQPGATFHPDIEIQDFRNRAAGRGIVAKVDIPEDTVLFTIPRASIINTQTSNLAKRVPALFATTGLEDADNEADEDGGATSGPPDNWISLILVMIYEYLQGGNSRWKPYFDVLPDDFETLIWWGDKDLEQLQASSIVSKIGKDEADSMFRIKVLPVVEQNSDVFYPEGSRKLTEAELIHLAHRMGSVIMAYAFDLENEEEEAGGDDDDEWVEDKEGKILMGMVPMADILNADAEFNVSFCPPYMKYRAIPHYQKAHVNHEEDSLSVTSIRPITAGQEILNYYGPLGNSELLRRYGYVTDHHARYDVVEISWECVLSALKSVVGLDDSIWGKAISQLDPEEIEDAFVIDRDLDEPNSQGQFLGPKNLKHLPKDLREQINQLLAGIRELSPSTIPDKIARDEICLNVMRRAFEQKLAEYQTSANDDMRLLNEAPSRQRARMALIVRCGEKLLLQEALSLCDDKINELKTVQGENGQPSAKRLKTQ

SEQ ID NO: 15956 - DNA, 1986 bp, Muscodor strobelii
  misc_feature: SGI EST ID NO. CUFF.37681.0
  misc_feature: Variant of the nucleotide sequence at SEQ ID NO 15954
gtgggaacgaagaacaatcgttcagacaattgctcttgacacttcgacatgtctgaccctcaatttgagcagaggtccgcctctttcttgaattggttcaaggcgcagccaggtgcgaccttccatcccgatattgaaattcaagacttccgaaatagggcagctggcagaggaattgttgctaaggtcgatattcctgaagacacggtgctttttacaataccgagagcttcaatcattaatactcaaacatcgaatctcgcaaagagggttcctgcactctttgctactacaggccttgaggatgccgacaacgaggcagatgaagatggcggtgcgacaagcggccctccagacaattggatctcgctcattctagtcatgatctatgagtatctgcaaggaggaaattctaggtggaagccctacttcgacgtgcttcctgacgacttcgagaccctgatatggtggggcgacaaggatctcgagcagctgcaagccagctcaatcgtatcgaagatcggcaaggatgaagccgattcgatgtttcggatcaaggtcctccccgtggtcgaacaaaactctgacgtcttctatccggaaggatcacgaaaactcacagaagcagaattgatacacctcgcacatcgtatggggagtgttatcatggcatatgcattcgatctcgagaacgaagaggaagaagctggcggcgatgacgacgacgaatgggttgaagataaagaaggaaagatactcatgggaatggtcccaatggcagacattctgaatgctgatgccgaattcaacgcacatgtcaatcacgaagaagacagcctttctgtcacatcaattaggccgataactgcgggccaagaaattctaaactactacggtcctcttggtaatagtgagcttttgcgtcgttatggctatgttacggatcaccacgcacgctacgatgtagtagaaatatcatgggaatgtgttctatctgctttaaagagcgttgtcggcctggacgattctatctgggggaaagcaatcagtcaattggaccccgaagagatagaagacgccttcgtgattgaccgcgatttggatgaaccaaattcacaaggacaatttctcggccccaaaaatttaaagcacctcccaaaggatctccgagagcagatcaatcaattacttgctggtattagagaattgagcccaagcactataccagacaaaatagcaagagacgagatctgcctcaatgtcatgcgtcgcgcctttgaacaaaagcttgcagaatatcagacaagcgccaatgacgacatgcgactgttgaacgaggctcctagtcgccaacgggccagaatggctttgattgtgcgatgcggcgaaaaactcttgctccaagaagcactcagtctatgcgacgacaaaatcaacgaactgaagacagtacagggcgagaatggccagccctctgcaaaaaggttgaagacacagtaaaagcaacgctgtagagtctgcaaggacactgtaccgcagaggtcgcgtatcgaatgggagcggcagtgtggcgcactgaaatttgtcatactctgccagttaacggaatgtagtactattgcctgtggtatgcattatttggatgctctaatactggcaattggacacgcacgtctcatccgacacatgattcattgaaattctgcagtctgatcgagcgtgaaagctatcagcttgctacagacattacctcacggcaagtgcttcgaaagggagttaaacggaaggcctcgagatggggagggaggttgcaaaggcgccatggggttctttctaatctctgagactcaacttctctaattctacaattttaagttcaatgaaatttccgtatgcacatactacatttccaccatattaccaaaattccacgtgaatgcgcgctaaggacttgcgcacactacaaggaacacgagctagaaaaac

SEQ ID NO: 15957 - DNA, 1452 bp, Muscodor strobelii
  misc_feature: SGI cDNA ID NO. 565295
  misc_feature: Encodes the peptide sequence at SEQ ID NO 15958
atgtctgaccctcaatttgagcagaggtccgcctctttcttgaattggttcaaggcgcagccaggtgcgaccttccatcccgatattgaaattcaagacttccgaaatagggcagctggcagaggaattgttgctaaggtcgatattcctgaagacacggtgctttttacaataccgagagcttcaatcattaatactcaaacatcgaatctcgcaaagagggttcctgcactctttgctactacaggccttgaggatgccgacaacgaggcagatgaagatggcggtgcgacaagcggccctccagacaattggatctcgctcattctagtcatgatctatgagtatctgcaaggaggaaattctaggtggaagccctacttcgacgtgcttcctgacgacttcgagaccctgatatggtggggcgacaaggatctcgagcagctgcaagccagctcaatcgtatcgaagatcggcaaggatgaagccgattcgatgtttcggatcaaggtcctccccgtggtcgaacaaaactctgacgtcttctatccggaaggatcacgaaaactcacagaagcagaattgatacacctcgcacatcgtatggggagtgttatcatggcatatgcattcgatctcgagaacgaagaggaagaagctggcggcgatgacgacgacgaatgggttgaagataaagaaggaaagatactcatgggaatggtcccaatggcagacattctgaatgctgatgccgaattcaacgcacatgtcaatcacgaagaagacagcctttctgtcacatcaattaggccgataactgcgggccaagaaattctaaactactacggtcctcttggtaatagtgagcttttgcgtcgttatggctatgttacggatcaccacgcacgctacgatgtagtagaaatatcatgggaatgtgttctatctgctttaaagagcgttgtcggcctggacgattctatctgggggaaagcaatcagtcaattggaccccgaagagatagaagacgccttcgtgattgaccgcgatttggatgaaccaaattcacaaggacaatttctcggccccaaaaatttaaagcacctcccaaaggatctccgagagcagatcaatcaattacttgctggtattagagaattgagcccaagcactataccagacaaaatagcaagagacgagatctgcctcaatgtcatgcgtcgcgcctttgaacaaaagcttgcagaatatcagacaagcgccaatgacgacatgcgactgttgaacgaggctcctagtcgccaacgggccagaatggctttgattgtgcgatgcggcgaaaaactcttgctccaagaagcactcagtctatgcgacgacaaaatcaacgaactgaagacagtacagggcgagaatggccagccctctgcaaaaaggttgaagacacagtaa

SEQ ID NO: 15958 - protein, 483 aa, Muscodor strobelii
  misc_feature: SGI Peptide ID NO. 565295
  misc_feature (23)..(289): Pfam Id: PF00856 Pfam Desc: SET domain
  misc_feature (99)..(289): Pfam Id: PF00856 Pfam Desc: SET domain
  misc_feature (6)..(479): NCBI GI: 261357909 Blast Desc: SET domain-containing protein RMS1 [Verticillium albo-atrum VaMs.102]
  misc_feature (13)..(478): NCBI GI: 256728035 Blast Desc: SET domain protein [Nectria haematococca mpVI 77-13-4]
  misc_feature (2)..(466): NCBI GI: 171676308 Blast Desc: protein product [Podospora anserina] gi|170936220|emb|CAP60879.1| protein product [Podospora anserina]
  misc_feature (16)..(481): NCBI GI: 46130858 Blast Desc: FG08984.1 [Gibberella zeae PH-1]
  misc_feature (6)..(481): NCBI GI: 85090666 Blast Desc: NCU09827 [Neurospora crassa OR74A] gi|28919896|gb|EAA29290.1| [Neurospora crassa OR74A]
  misc_feature (2)..(481): NCBI GI: 116200550 Blast Desc: CHGG_10820 [Chaetomium globosum CBS 148.51] gi|88175534|gb|EAQ83002.1| CHGG_10820 [Chaetomium globosum CBS 148.51]
  misc_feature (44)..(479): NCBI GI: 145602462 Blast Desc: MGG_04887 [Magnaporthe grisea 70-15] gi|145010883|gb|EDJ95539.1| MGG_04887 [Magnaporthe grisea 70-15]
  misc_feature (6)..(483): NCBI GI: 255945819 Blast Desc: Pc20g11910 [Penicillium chrysogenum Wisconsin 54-1255] gi|211588412|emb|CAP86520.1| Pc20g11910 [Penicillium chrysogenum Wisconsin 54-1255]
  misc_feature (5)..(460): NCBI GI: 225554758 Blast Desc: SET domain-containing protein [Ajellomyces capsulatus G186AR]
  misc_feature (6)..(454): NCBI GI: 189189204 Blast Desc: SET domain-containing protein RMS1 [Pyrenophora tritici-repentis Pt-1C-BFP] gi|187972547|gb|EDU40046.1| SET domain-containing protein RMS1 [Pyrenophora tritici-repentis
  misc_feature (40)..(469): SWISSPROT Homolog: EC 2.1.1.127 [Ribulose-bisphosphate carboxylase]-lysine N-methyltransferase
MSDPQFEQRSASFLNWFKAQPGATFHPDIEIQDFRNRAAGRGIVAKVDIPEDTVLFTIPRASIINTQTSNLAKRVPALFATTGLEDADNEADEDGGATSGPPDNWISLILVMIYEYLQGGNSRWKPYFDVLPDDFETLIWWGDKDLEQLQASSIVSKIGKDEADSMFRIKVLPVVEQNSDVFYPEGSRKLTEAELIHLAHRMGSVIMAYAFDLENEEEEAGGDDDDEWVEDKEGKILMGMVPMADILNADAEFNAHVNHEEDSLSVTSIRPITAGQEILNYYGPLGNSELLRRYGYVTDHHARYDVVEISWECVLSALKSVVGLDDSIWGKAISQLDPEEIEDAFVIDRDLDEPNSQGQFLGPKNLKHLPKDLREQINQLLAGIRELSPSTIPDKIARDEICLNVMRRAFEQKLAEYQTSANDDMRLLNEAPSRQRARMALIVRCGEKLLLQEALSLCDDKINELKTVQGENGQPSAKRLKTQ

SEQ ID NO: 15959 - DNA, 1986 bp, Muscodor strobelii; identical to SEQ ID NO: 15956
  misc_feature: SGI EST ID NO. CUFF.37681.0
  misc_feature: Variant of the nucleotide sequence at SEQ ID NO 15957

SEQ ID NO: 15960 - DNA, 639 bp, Muscodor strobelii
  misc_feature: SGI cDNA ID NO. 565296
  misc_feature: Encodes the peptide sequence at SEQ ID NO 15961
atggcaccaaatttatccgaagacgaaattgacgatctgatctatctggctcgagctggagatgatgcggaacttgacgacatgctccaaagcttgagcgcccgtgattctgcgacacctgcagatgtattggctgccgcacgggatgaacaagggaaagccacttgtctgcatatggcagcagccaatggtcacggaaaaacggtcactgtcattctttcacatctgccactggccaccacgacatcggtgacagcggcgccatcatcagccacatccccagagcagctggacccggcgggcgcccagctagctccgcagcagacatacattgatgcacaaaatgcattcggaaactccgcgctacactgggcttgtctcggagggcacctggacatcgtcaagcttctcttgtcgagaggcgcctcgcccaccatcgcaaatgacaaagaccaaatcccgcttgacctggccgccttcaacaaccacatgcacgtcgttgaatacttcttagcacagagcaaggatctcgaaggcgataatgcccaggctggaggcctgcaaacccaagttgaaggtctggaagttgcagacggtgacgaggctgatactgataataaaaccgaggagggaggatag

SEQ ID NO: 15961 - protein, 212 aa, Muscodor strobelii
  misc_feature: SGI Peptide ID NO. 565296
  misc_feature (117)..(149): Pfam Id: PF00023 Pfam Desc: Ankyrin repeat
  misc_feature (1)..(197): NCBI GI: 39970113 Blast Desc: MGG_10665 [Magnaporthe grisea 70-15] gi|145013102|gb|EDJ97743.1| MGG_10665 [Magnaporthe grisea 70-15]
  misc_feature (1)..(198): NCBI GI: 85100795 Blast Desc: NCU01121 [Neurospora crassa OR74A] gi|16416052|emb|CAB88595.2| related to ankyrin repeat-containing YAR1 [Neurospora crassa] gi|28922565|gb|EAA31792.1| conserved
  misc_feature (1)..(207): NCBI GI: 46123141 Blast Desc: FG05948.1 [Gibberella zeae PH-1]
  misc_feature (5)..(210): NCBI GI: 171693219 Blast Desc: protein product [Podospora anserina] gi|170946558|emb|CAP73359.1| protein product [Podospora anserina]
  misc_feature (1)..(174): NCBI GI: 116199069 Blast Desc: CHGG_07690 [Chaetomium globosum CBS 148.51] gi|88178969|gb|EAQ86437.1| CHGG_07690 [Chaetomium globosum CBS 148.51]
  misc_feature (1)..(185): NCBI GI: 256731473 Blast Desc: NECHADRAFT_96336 [Nectria haematococca mpVI 77-13-4]
  misc_feature (1)..(171): NCBI GI: 156063120 Blast Desc: SS1G_01676 [Sclerotinia sclerotiorum 1980] gi|154697012|gb|EDN96750.1| SS1G_01676 [Sclerotinia sclerotiorum 1980]
  misc_feature (1)..(173): NCBI GI: 154313253 Blast Desc: BC1G_05628 [Botryotinia fuckeliana B05.10] gi|150849713|gb|EDN24906.1| BC1G_05628 [Botryotinia fuckeliana B05.10]
  misc_feature (5)..(210): NCBI GI: 189209930 Blast Desc: ankyrin repeat containing protein YAR1 [Pyrenophora tritici-repentis Pt-1C-BFP] gi|187977390|gb|EDU44016.1| ankyrin repeat containing protein YAR1 [Pyrenophora tritici-repentis
  misc_feature (5)..(210): NCBI GI: 50547375 Blast Desc: YALI0B20900p [Yarrowia lipolytica] gi|49647023|emb|CAG83410.1| YALI0B20900p [Yarrowia lipolytica]
  misc_feature (41)..(181): SWISSPROT Homolog: EC 2.1.1.43 Histone-lysine N-methyltransferase
MAPNLSEDEIDDLIYLARAGDDAELDDMLQSLSARDSATPADVLAAARDEQGKATCLHMAAANGHGKTVTVILSHLPLATTTSVTAAPSSATSPEQLDPAGAQLAPQQTYIDAQNAFGNSALHWACLGGHLDIVKLLLSRGASPTIANDKDQIPLDLAAFNNHMHVVEYFLAQSKDLEGDNAQAGGLQTQVEGLEVADGDEADTDNKTEEGG

SEQ ID NO: 15962 - DNA, 2416 bp, Muscodor strobelii
  misc_feature: SGI EST ID NO. CUFF.37811.1
  misc_feature: Variant of the nucleotide sequence at SEQ ID NO 15960
gtgatagaaaaagaggcaacttttcgcgggctggtgtcttctgggtttcacaggactgcaacactcggtcgcggtatactgattacggccaagggctaccctgacctctcaacacggcagttctgtcatgcattgcatagggcgtacacacggatacccatgtatgctctagtagatttcgacccggatggacttaaaatcatgctcacctacaagaatgggagtcgcgctttgcaacatgaagagggtgtaacggtgccagaacttttgtggattggcccaaagagcgatcacattttgggccgaagcagcgggagaactgttgagcacgagtatcaatcaccaatgcctgtttctcagtccagtcagtctagtcagcggttatcggcatccttgtcattcaacagagcaagcagtcatgtgccagtcaaagaaacactggccctcagagtgggcgatcgcagtatggcgaaccggcttttagtttctatagtcgcagacggtagtcggagctcgccgagcatagatctcaaacgtgaggtacaagtcatgctcttcctcaacacgaaggccgagattcaggctgtcgatgaggcaggggatttgacgggttggctagagagcgagctctctcaagggagtccacatacctatggtggatcggcatctggaacgtataggctctagaccaccacttcacgggcgaaaagaatctggatgagcatttgtggcatcacgtggttctatcgcctcgacttcgtgatggagatgatggtggtagcccaaataccaagtacatcaagtatatgcaagaactcttgtatagtggttagttatttgtccgcactttcgtagagattggctggaattgacatcggacgagctcaaaggcatccaatcaattgataccgacggacaatgaacacagtctaggctcaaatgcacctgcatcacgtgattatttctagtcaacagcccgcaattttggactacaatgacctcgcacccccaataatcagaaacccaaacaaattcgatcatcaaatagctcattgcgacacggagtattagtagcaactatcttacggcgaattttgagacataaggcgaaattatctaccccaacgttaagaaactgtttcactgttctacgctcacaaaaatttcccgggcgcaaatcgcaaattttactacaaccagtgagagcgggcgcaattctgacactgacggcaaggcaacaaccacaacagcacaggtgcagccacctacgtatctggagctcgtcgccatctgctgtcaagacgtctggtgacccctcggcatttctacgtcgacttttggtctcgccactatcgagcgcattcacagggctggaaacgccaataccaagaagaagaaaaatggcaccaaatttatccgaagacgaaattgacgatctgatctatctggctcgagctggagatgatgcggaacttgacgacatgctccaaagcttgagcgcccgtgattctgcgacacctgcagatgtattggctgccgcacgggatgaacaagggaaagccacttgtctgcatatggcagcagccaatggtcacggaaaaacggtcactgtcattctttcacatctgccactggccaccacgacatcggtgacagcggcgccatcatcagccacatccccagagcagctggacccggcgggcgcccagctagctccgcagcagacatacattgatgcacaaaatgcattcggaaactccgcgctacactgggcttgtctcggagggcacctggacatcgtcaagcttctcttgtcgagaggcgcctcgcccaccatcgcaaatgacaaagaccaaatcccgcttgacctggccgccttcaacaaccacatgcacgtcgttgaatacttcttagcacagagcaaggatctcgaaggcgataatgcccaggctggaggcctgcaaacccaagttgaaggtctggaagttgcagacggtgacgaggctgatactgataataaaaccgaggagggaggatagcggttcggctcaccgctgaatacaaccaatagatgaatctacgatagcttgtgttacgttgcaactcggctcgggctcactaaagcgcaaagcataattatacccacaattccagagattcgagcccgcaccatcgtgttgagattcatcccagtaaagacaacaggatcgtccaggtcactatttcccttcgatggaaaatcccggattattgtcgtcgataatacttaactttgagcgtgagtctatggcctggtagcagttatttcaatttccggccgtttaatcttccgtaaatttttaaatgtagaagatatagaggaaacaaaacatatttagatttacctgccgtcgggacgtttcagacatgctccgcg

SEQ ID NO: 15963 - DNA, 1281 bp, Muscodor strobelii
  misc_feature: SGI cDNA ID NO. 565297
  misc_feature: Elevated expression when VOC is produced
  misc_feature: Encodes the peptide sequence at SEQ ID NO 15964
atggaaggtcggcttgactccgcaagctcagacatcggccctagctcacctccgcaatttcaagttcaacattcagtgaatcatgcgccatatgagaacgtacggactattacgatagctaaaatccgaagcatactcgccaatgtggctggggacctactcgcgacccgtgtcatgactatccggctgcgcaataggactacgacacgagtgcaactcgtgtcgtttccggccagagctgaggctgaggtcaagaagtttaccgcttccatcgtaattcttcgcttatcactcgaggctctcatcgctggtacagttatcacgaagagggcgatattctatcaaaatccgcagttgttcggcagccagcaatatgtcgacagcctagttgatgatatcgcctacactctaggacttggaagagacgcgctcagtattgttgctgctagcaagggacttatcgccggggcaatcaggatagctatccagaatggatcgaccatttgctgcgatgaagagaatgcccaaggtgttctcctccctgacgtgggagctgtcgcccgtatcgacgctagaggcgcacggtgggttcttgtgatagaaaaagaggcaacttttcgcgggctggtgtcttctgggtttcacaggactgcaacactcggtcgcggtatactgattacggccaagggctaccctgacctctcaacacggcagttctgtcatgcattgcatagggcgtacacacggatacccatgtatgctctagtagatttcgacccggatggacttaaaatcatgctcacctacaagaatgggagtcgcgctttgcaacatgaagagggtgtaacggtgccagaacttttgtggattggcccaaagagcgatcacattttgggccgaagcagcgggagaactgttgagcacgagtatcaatcaccaatgcctgtttctcagtccagtcagtctagtcagcggttatcggcatccttgtcattcaacagagcaagcagtcatgtgccagtcaaagaaacactggccctcagagtgggcgatcgcagtatggcgaaccggcttttagtttctatagtcgcagacggtagtcggagctcgccgagcatagatctcaaacgtgaggtacaagtcatgctcttcctcaacacgaaggccgagattcaggctgtcgatgaggcaggggatttgacgggttggctagagagcgagctctctcaagggagtccacatacctatggtggatcggcatctggaacgtataggctctag

SEQ ID NO: 15964 - protein, 426 aa, Muscodor strobelii
  misc_feature: SGI Peptide ID NO. 565297
  misc_feature (76)..(147): Pfam Id: PF04406 Pfam Desc: Type IIB DNA topoisomerase
  misc_feature (74)..(408): NCBI GI: 33304618 Blast Desc: meiosis-specific topoisomerase Spo11 [Sordaria macrospora]
  misc_feature (73)..(408): NCBI GI: 171693223 Blast Desc: protein product [Podospora anserina] gi|170946560|emb|CAP73361.1| protein product [Podospora anserina]
  misc_feature (39)..(408): NCBI GI: 256731116 Blast Desc: NECHADRAFT_85034 [Nectria haematococca mpVI 77-13-4]
  misc_feature (74)..(412): NCBI GI: 7635881 Blast Desc: related to MEIOTIC RECOMBINATION PROTEIN REC12 [Neurospora crassa]
  misc_feature (75)..(410): NCBI GI: 238844274 Blast Desc: meiotic recombination protein spo11 [Microsporum canis CBS 113480]
  misc_feature (75)..(409): NCBI GI: 119498739 Blast Desc: meiotic recombination protein spo11 [Neosartorya fischeri NRRL 181] gi|119414291|gb|EAW24230.1| meiotic recombination protein spo11 [Neosartorya fischeri NRRL 181]
  misc_feature (70)..(408): NCBI GI: 212535386 Blast Desc: meiosis-specific topoisomerase Spo11, [Penicillium marneffei ATCC 18224] gi|210070248|gb|EEA24338.1| meiosis-specific topoisomerase Spo11, [Penicillium marneffei ATCC
  misc_feature (68)..(408): NCBI GI: 242792903 Blast Desc: meiosis-specific topoisomerase Spo11, [Talaromyces stipitatus ATCC 10500] gi|218718639|gb|EED18059.1| meiosis-specific topoisomerase Spo11, [Talaromyces stipitatus
  misc_feature (129)..(410): NCBI GI: 116199071 Blast Desc: CHGG_07691 [Chaetomium globosum CBS 148.51] gi|88178970|gb|EAQ86438.1| CHGG_07691 [Chaetomium globosum CBS 148.51]
  misc_feature (99)..(410): NCBI GI: 240109597 Blast Desc: meiotic recombination protein SPO11, [Coccidioides posadasii C735 delta SOWgp]
  misc_feature (83)..(304): SWISSPROT Homolog: EC 5.99.1.3 DNA topoisomerase (ATP-hydrolyzing)
  misc_feature: Useful for introducing or modulating the production of volatile compounds
MEGRLDSASSDIGPSSPPQFQVQHSVNHAPYENVRTITIAKIRSILANVAGDLLATRVMTIRLRNRTTTRVQLVSFPARAEAEVKKFTASIVILRLSLEALIAGTVITKRAIFYQNPQLFGSQQYVDSLVDDIAYTLGLGRDALSIVAASKGLIAGAIRIAIQNGSTICCDEENAQGVLLPDVGAVARIDARGARWVLVIEKEATFRGLVSSGFHRTATLGRGILITAKGYPDLSTRQFCHALHRAYTRIPMYALVDFDPDGLKIMLTYKNGSRALQHEEGVTVPELLWIGPKSDHILGRSSGRTVEHEYQSPMPVSQSSQSSQRLSASLSFNRASSHVPVKETLALRVGDRSMANRLLVSIVADGSRSSPSIDLKREVQVMLFLNTKAEIQAVDEAGDLTGWLESELSQGSPHTYGGSASGTYRL

SEQ ID NO: 15965 - DNA, 2416 bp, Muscodor strobelii; identical to SEQ ID NO: 15962
  misc_feature: SGI EST ID NO. CUFF.37811.1
  misc_feature: Variant of the nucleotide sequence at SEQ ID NO 15963

SEQ ID NO: 15966 - DNA, 2262 bp, Muscodor strobelii
  misc_feature: SGI cDNA ID NO. 565298
  misc_feature: Encodes the peptide sequence at SEQ ID NO 15967
atggtaacaactagatcaagtaacagcgggaaacccgtgactaatggaactacacattcggattctaagtcgtcctcgaagaagcgcgccagcagtggtactatcgacatcgatgcaaaacgagcccgacgcacagagcctacaaggtggcgtatgcttgacgagaacggtcgtctgacatggcattacctagagagtgacaaggaggtgaaagaatggccacaatctatcgctgacaagtggtatcttggcttagagctgaatctcccagatctcccgaagccgaaaaagccccttgattccgtcagcaatggcctcgagttcttcgaaaagctgcaactgccatcaggtacttggggctgcgaatacggcggccccatgtttctattgcctggagttgtcatcgcctggtatgccaccaagaccccaatcccgtggtacgttgccaccgagatccagaactacctattcgcacgggcgaatccccaagatggaggctggggtcttcacacagccggagagagcactgtctttggcacatcgctaaactacactgtcttgcgcctggttggtgtcgagccagaccatcccgctatggtcaaggcccgaaaagcgctgcaccagctaggaggggctactcatgcacctcactgggccaagttctggctttctgtccttggtgtgtgcaaatgggacattgttaaccccataccacctgagctctggctgcttccagattgggtaccatttgcgccgtggcggtggtggattcacattcgtcaggttttcttgcccatgggttacctcttcgaccagaaatggtcatgtgaggagacggacgttatccgcggtctgcgtgaggaactatttcctgaaaaatgggagacaatcaactgggctgccaaccggaacagcatatgccctattgataactaccatcccaaatcctggctattgaatacggcaaattgggcattggtcaatgtttggccatacttccggcctaacttcattcgaagtagagcacttgactggacaaacaagctcatagatatggaagatgcgaacacagactatgccgacctcgctcccgtcaatgctgctctgaacacaatcgtttgctatgtacgagatggtccggatgcctactctttcaaacgacatatcgagcgattagaggatgctatgtgggtcaacgcagaaggcatgttctgtaacggaaccaatggagtccagtgctgggatacgtcattccttattcaagctgtcatggatgctggactggagcaggatcctagatggcgtccgatgctcgtcaaggctctcacttttcttgagcagcagcagattcgcgaaaactgcaaagatcaggtgaagtgctatcgtcaacagaggaagggtgcgtgggccttcagcaacaaagatcagggctatgccgtgtgcgattgcgtgtcggaagcacttaagtcagttatcttactgcaaaaaacgaaaggcttcccggagttgcttgacgacgagcgaatctttgatgcagtagacaccatcttgacttatcaaaatcaaagcggcgcttgttcctcttatgagcccacacggggaagtgagaagctagaaatgctaaacgccgcggaagtgtttggcaagatcatggtcgaatatgactacgtggagtgcacgacagctgtagtgactgccctctctttgttcaagaaacactggccagatcatcgcgccaaagaaatcgatgcctttgtcggaagggctgtctcttggatcaagacagcacagcgccctgaaggtgcatggtatggcagctgggctatctgtttcacgtatgcgaccatgtttgccttggagagcttaggtagcatcggggaggattacagcaatagcaactacgcaaagcgcggttgcgattttctgattagcaagcagagagaagacggaggctggtccgaaagctacaggtcttgcgaaaggtccgagtatattgagcacgccacaggatctcaagtcgtgatgacggcctgggcactgattggtttgatgaaagccaagtaccccgatgttgagcgcatcaagaagggcatcaggctcatcatggagcgccaacaatcaaatggcgagtggaaacaggaggcaattgagggtgtgttcaacaagagctgcatgatatcgtaccccaactacaagtacaccttcaccatgaaggcgttggggatgtttgccaataagtaccctaacgagaccgtgatttaa

SEQ ID NO: 15967 - protein, 753 aa, Muscodor strobelii
  misc_feature: SGI Peptide ID NO. 565298
  misc_feature (633)..(682): Pfam Id: PF00432 Pfam Desc: Prenyltransferase and squalene oxidase repeat
  misc_feature (147)..(191): Pfam Id: PF00432 Pfam Desc: Prenyltransferase and squalene oxidase repeat
  misc_feature (151)..(191): Pfam Id: PF00432 Pfam Desc: Prenyltransferase and squalene oxidase repeat
  misc_feature (588)..(626): Pfam Id: PF00432 Pfam Desc: Prenyltransferase and squalene oxidase repeat
  misc_feature (13)..(753): NCBI GI: 171693225 Blast Desc: protein product [Podospora anserina] gi|170946561|emb|CAP73362.1| protein product [Podospora anserina]
  misc_feature (22)..(753): NCBI GI: 85100788 Blast Desc: lanosterol synthase [Neurospora crassa OR74A] gi|16416053|emb|CAB88598.2| related to lanosterol synthase [Neurospora crassa] gi|28922563|gb|EAA31790.1| lanosterol crassa
  misc_feature (9)..(753): NCBI GI: 145605265 Blast Desc: MGG_11702 [Magnaporthe grisea 70-15] gi|145013099|gb|EDJ97740.1| MGG_11702 [Magnaporthe grisea 70-15]
  misc_feature (23)..(753): NCBI GI: 116199073 Blast Desc: CHGG_07692 [Chaetomium globosum CBS 148.51] gi|88178971|gb|EAQ86439.1| CHGG_07692 [Chaetomium globosum CBS 148.51]
  misc_feature (23)..(753): NCBI GI: 256731511 Blast Desc: [Nectria haematococca mpVI 77-13-4]
  misc_feature (24)..(752): NCBI GI: 160419856 Blast Desc: oxidosqualene:lanosterol cyclase [Hypocrea lixii]
  misc_feature (44)..(749): NCBI GI: 169780168 Blast Desc: [Aspergillus oryzae RIB40] gi|83773288|dbj|BAE63415.1| protein product [Aspergillus oryzae]
  misc_feature (44)..(749): NCBI GI: 238505760 Blast Desc: lanosterol synthase, [Aspergillus flavus NRRL3357] gi|220690201|gb|EED46551.1| lanosterol synthase, [Aspergillus flavus NRRL3357]
  misc_feature (40)..(752): NCBI GI: 18028346 Blast Desc: AF327881_1 oxidosqualene:lanosterol cyclase [Cephalosporium caerulens]
  misc_feature (40)..(749): NCBI GI: 119500146 Blast Desc: lanosterol synthase, [Neosartorya fischeri NRRL 181] gi|119414995|gb|EAW24933.1| lanosterol synthase, [Neosartorya fischeri NRRL 181]
  misc_feature (40)..(749): SWISSPROT Homolog: EC 5.4.99.7 Lanosterol synthase
MVTTRSSNSGKPVTNGTTHSDSKSSSKKRASSGTIDIDAKRARRTEPTRWRMLDENGRLTWHYLESDKEVKEWPQSIADKWYLGLELNLPDLPKPKKPLDSVSNGLEFFEKLQLPSGTWGCEYGGPMFLLPGVVIAWYATKTPIPWYVATEIQNYLFARANPQDGGWGLHTAGESTVFGTSLNYTVLRLVGVEPDHPAMVKARKALHQLGGATHAPHWAKFWLSVLGVCKWDIVNPIPPELWLLPDWVPFAPWRWWIHIRQVFLPMGYLFDQKWSCEETDVIRGLREELFPEKWETINWAANRNSICPIDNYHPKSWLLNTANWALVNVWPYFRPNFIRSRALDWTNKLIDMEDANTDYADLAPVNAALNTIVCYVRDGPDAYSFKRHIERLEDAMWVNAEGMFCNGTNGVQCWDTSFLIQAVMDAGLEQDPRWRPMLVKALTFLEQQQIRENCKDQVKCYRQQRKGAWAFSNKDQGYAVCDCVSEALKSVILLQKTKGFPELLDDERIFDAVDTILTYQNQSGACSSYEPTRGSEKLEMLNAAEVFGKIMVEYDYVECTTAVVTALSLFKKHWPDHRAKEIDAFVGRAVSWIKTAQRPEGAWYGSWAICFTYATMFALESLGSIGEDYSNSNYAKRGCDFLISKQREDGGWSESYRSCERSEYIEHATGSQVVMTAWALIGLMKAKYPDVERIKKGIRLIMERQQSNGEWKQEAIEGVFNKSCMISYPNYKYTFTMKALGMFANKYPNETVI

SEQ ID NO: 15968 - DNA, 2742 bp, Muscodor strobelii
  misc_feature: SGI EST ID NO. CUFF.37838.0
  misc_feature: Variant of the nucleotide sequence at SEQ ID NO 15966
gtcgagcgccatgagaatcgccatctccatgcccgttagagagggcgggactacagtagtcgatggcgctacgagtgggttgggatagtgctgatgactgtgagtgtgagaccttttgggttacagtagattctcccatgtggcattgtcaggcagtagattgacgatcggccgttcaattgatctgtcttgattacaatccggcgttccaattccaattcccatcacgagtacgagccgtgtctctcacgctagtcgagaatatctctttcgcctgtccaagttttgtctggcttccatctcataaccacatagtctccccattacccgttcgctataatcgctgcccctcttctcgccatggtaacaactagatcaagtaacagcgggaaacccgtgactaatggaactacacattcggattctaagtcgtcctcgaagaagcgcgccagcagtggtactatcgacatcgatgcaaaacgagcccgacgcacagagcctacaaggtggcgtatgcttgacgagaacggtcgtctgacatggcattacctagagagtgacaaggaggtgaaagaatggccacaatctatcgctgacaagtggtatcttggcttagagctgaatctcccagatctcccgaagccgaaaaagccccttgattccgtcagcaatggcctcgagttcttcgaaaagctgcaactgccatcaggtacttggggctgcgaatacggcggccccatgtttctattgcctggagttgtcatcgcctggtatgccaccaagaccccaatcccgtggtacgttgccaccgagatccagaactacctattcgcacgggcgaatccccaagatggaggctggggtcttcacacagccggagagagcactgtctttggcacatcgctaaactacactgtcttgcgcctggttggtgtcgagccagaccatcccgctatggtcaaggcccgaaaagcgctgcaccagctaggaggggctactcatgcacctcactgggccaagttctggctttctgtccttggtgtgtgcaaatgggacattgttaaccccataccacctgagctctggctgcttccagattgggtaccatttgcgccgtggcggtggtggattcacattcgtcaggttttcttgcccatgggttacctcttcgaccagaaatggtcatgtgaggagacggacgttatccgcggtctgcgtgaggaactatttcctgaaaaatgggagacaatcaactgggctgccaaccggaacagcatatgccctattgataactaccatcccaaatcctggctattgaatacggcaaattgggcattggtcaatgtttggccatacttccggcctaacttcattcgaagtagagcacttgactggacaaacaagctcatagatatggaagatgcgaacacagactatgccgacctcgctcccgtcaatgctgctctgaacacaatcgtttgctatgtacgagatggtccggatgcctactctttcaaacgacatatcgagcgattagaggatgctatgtgggtcaacgcagaaggcatgttctgtaacggaaccaatggagtccagtgctgggatacgtcattccttattcaagctgtcatggatgctggactggagcaggatcctagatggcgtccgatgctcgtcaaggctctcacttttcttgagcagcagcagattcgcgaaaactgcaaagatcaggtgaagtgctatcgtcaacagaggaagggtgcgtgggccttcagcaacaaagatcagggctatgccgtgtgcgattgcgtgtcggaagcacttaagtcagttatcttactgcaaaaaacgaaaggcttcccggagttgcttgacgacgagcgaatctttgatgcagtagacaccatcttgacttatcaaaatcaaagcggcgcttgttcctcttatgagcccacacggggaagtgagaagctagaaatgctaaacgccgcggaagtgtttggcaagatcatggtcgaatatgactacgtggagtgcacgacagctgtagtgactgccctctctttgttcaagaaacactggccagatcatcgcgccaaagaaatcgatgcctttgtcggaagggctgtctcttggatcaagacagcacagcgccctgaaggtgcatggtatggcagctgggctatctgtttcacgtatgcgaccatgtttgccttggagagcttaggtagcatcggggaggattacagcaatagcaactacgcaaagcgcggttgcgattttctgattagcaagcagagagaagacggaggctggtccgaaagctacaggtcttgcgaaaggtccgagtatattgagcacgccacaggatctcaagtcgtgatgacggcctgggcactgattggtttgatgaaagccaagtaccccgatgttgagcgcatcaagaagggcatcaggctcatcatggagcgccaacaatcaaatggcgagtggaaacaggaggcaattgagggtgtgttcaacaagagctgcatgatatcgtaccccaactacaagtacaccttcaccatgaaggcgttggggatgtttgccaataagtaccctaacgagaccgtgatttaatgaggaagcacaaggcagctgtcccgaatcccaacctgcaatgtcattatagagcgaaataacgatttagctaatctatgcttaatgtaatgaatgagaaacaaatcatgattaatttct

SEQ ID NO: 15969 - DNA, 1587 bp, Muscodor strobelii
  misc_feature: SGI cDNA ID NO. 565299
  misc_feature: Encodes the peptide sequence at SEQ ID NO 15970
atgtcttccgtggccaacaagggcatccaggccatccaggatcgccaatacgatgatgccatcgacaaactgactgctgccttgaagagccaacctgctcccctatggtatctcgagcgttccaaggcccatctcagaagcagtcatttcgacagtgccttgtacgatgccgagatggctcttcgcattgcctacgatcgtgccaaccgtgatcttatggctgaggctcagacgcgacgtgctatcacactgtttcgtatgggtcgctatgctgatgccgacatctgcgccttctgggctatgcagcttgtccagggtgccaaggcgaatgcagacgatggccgtttgacaaaagtagacgacaagggcgactacgtggaagatcttgatgctgtacaagaggcagagaaagctaagaacaaggatgggctctctgatacactgaagggcgctagcgagcgatcacagaagactgccacgtacaatcaggctttcacttggcgcattcaggccttgacgcagatgcaagcgcttccttcaggcgatgacggtcgcaaaattcacatcagttccaaatatcccacacctgagtctcccgaggactctgcaaagaaggtatcacagaagaacgtgagccacacagcgaaccctgtggcaaccgatggccagagcggtggcaacgacgaagcctgggatcagacctggaagcgatggtccgatcttgacgcgaagaacaagactcgatgcagcttttaccagacagacaaggctattaccattgacattttcatcaagaatgtaccacaggaccttcttgttgttgagactggtgttcgcaccgttactcttcgacccaaagagggtcattccatcagcgggattcatggcaatttgaagctgtttctctatgagaagatcaaacaagagacgacatgcactataaagtcaatgaagatttccttagagctccagaaagagacacccggcaaatggcccacctttcgacacaaagggacagagcttctagatggcctctattacgatagccgtcctgctcccatcagccgtgagcctttcgttacttatgtgaaggcgatggggtacaaagatgtcagcgaactcggactccctgatttcgacaaggatcccgatgcgtggtacacaagcttgaccgagtctttgaaggcaaagctcgaccccagtccggatgaagacacagacacccaacttgacaaatctacttctcctctcatcgatatctctccggttgcacctcaagctaagcctatatccgagagtgccacagagaagaaagagtctgctcctatctatccaacttcgtccaggaaggggcctgtcaactgggacaagatagatgacggcgaagacgagaacgacgatgcgaacgatcccaatgcacttttccagcgactctaccaaggcgcagatgagaaatccaggatggccatgaagaagagcatgcaagagagcaatggtactgttctgactaccaactgggaggaggcaaagaacaagacgtttgagacgctacctccagatggtgcagaggccaagagatacgaatag

SEQ ID NO: 15970 - protein, 528 aa, Muscodor strobelii
  misc_feature: SGI Peptide ID NO. 565299
  misc_feature (247)..(325): Pfam Id: PF04969 Pfam Desc: CS domain
  misc_feature (452)..(527): Pfam Id: PF05002 Pfam Desc: SGS domain
  misc_feature (2)..(528): NCBI GI: 116198817 Blast Desc: CHGG_07564 [Chaetomium globosum CBS 148.51] gi|88178843|gb|EAQ86311.1| CHGG_07564 [Chaetomium globosum CBS 148.51]
  misc_feature (3)..(527): NCBI GI: 256731076 Blast Desc: NECHADRAFT_84953 [Nectria haematococca mpVI 77-13-4]
  misc_feature (2)..(527): NCBI GI: 46123149 Blast Desc: FG05952.1 [Gibberella zeae PH-1]
  misc_feature (2)..(331): NCBI GI: 164426177 Blast Desc: NCU01118 [Neurospora crassa OR74A] gi|16416054|emb|CAB88599.2| related to SGT1 protein [Neurospora crassa] gi|157071229|gb|EAA31789.2| [Neurospora crassa OR74A]
  misc_feature (2)..(334): NCBI GI: 171693227 Blast Desc: protein product [Podospora anserina] gi|170946562|emb|CAP73363.1| protein product [Podospora anserina]
  misc_feature (5)..(334): NCBI GI: 145605263 Blast Desc: MGG_11701 [Magnaporthe grisea 70-15] gi|145013098|gb|EDJ97739.1| MGG_11701 [Magnaporthe grisea 70-15]
  misc_feature (5)..(518): NCBI GI: 259481050 Blast Desc: TPA: SGT1 and CS domain protein (AFU_orthologue; AFUA_5G04090) [Aspergillus nidulans FGSC A4]
  misc_feature (3)..(520): NCBI GI: 67902546 Blast Desc: AN8260.2 [Aspergillus nidulans FGSC A4] gi|40739808|gb|EAA58998.1| AN8260.2 [Aspergillus nidulans FGSC A4]
  misc_feature (5)..(519): NCBI GI: 240109599 Blast Desc: SGS domain containing protein [Coccidioides posadasii C735 delta SOWgp]
  misc_feature (440)..(528): NCBI GI: 238883789 Blast Desc: conserved [Candida albicans WO-1]
MSSVANKGIQAIQDRQYDDAIDKLTAALKSQPAPLWYLERSKAHLRSSHFDSALYDAEMALRIAYDRANRDLMAEAQTRRAITLFRMGRYADADICAFWAMQLVQGAKANADDGRLTKVDDKGDYVEDLDAVQEAEKAKNKDGLSDTLKGASERSQKTATYNQAFTWRIQALTQMQALPSGDDGRKIHISSKYPTPESPEDSAKKVSQKNVSHTANPVATDGQSGGNDEAWDQTWKRWSDLDAKNKTRCSFYQTDKAITIDIFIKNVPQDLLVVETGVRTVTLRPKEGHSISGIHGNLKLFLYEKIKQETTCTIKSMKISLELQKETPGKWPTFRHKGTELLDGLYYDSRPAPISREPFVTYVKAMGYKDVSELGLPDFDKDPDAWYTSLTESLKAKLDPSPDEDTDTQLDKSTSPLIDISPVAPQAKPISESATEKKESAPIYPTSSRKGPVNWDKIDDGEDENDDANDPNALFQRLYQGADEKSRMAMKKSMQESNGTVLTTNWEEAKNKTFETLPPDGAEAKRYE

SEQ ID NO: 15971 - DNA, 3832 bp, Muscodor strobelii
  misc_feature: SGI EST ID NO. CUFF.37714.0
  misc_feature: Variant of the nucleotide sequence at SEQ ID NO 15969
caatcacggtagctagcgggtggcagtattgggaagctaccctgcctccattgtgcctgacgtccgctgtgcctgatgaatgtttcgatagaagctcaaagaagatcagccgagctctattagaaagaaccattcaattctcaggtttcctacatcatttgcttctctgatgcagctttgaagtgacagctttttctccggcacggtcggcgttatttaccttccccgccattgtgcatcgtctgaacgttagcaagatcattacactgcttgcttcgcgccgcgcaaaacaacgcaaagcttcagagttggagcttctaaacgccttccaatgtcattcatctcttgtgcgccttaagcttctggtgctcacttcacacgcctatcgttccttccgctggagcacgtgacttgccatcatgtcttccgtggccaacaagggcatccaggccatccaggatcgccaatacgatgatgccatcgacaaactgactgctgccttgaagagccaacctgctcccctatggtatctcgagcgttccaaggcccatctcagaagcagtcatttcgacagtgccttgtacgatgccgagatggctcttcgcattgcctacgatcgtgccaaccgtgatcttatggctgaggctcagacgcgacgtgctatcacactgtttcgtatgggtcgctatgctgatgccgacatctgcgccttctgggctatgcagcttgtccagggtgccaaggcgaatgcagacgatggccgtttgacaaaagtagacgacaagggcgactacgtggaagatcttgatgctgtacaagaggcagagaaagctaagaacaaggatgggctctctgatacactgaagggcgctagcgagcgatcacagaagactgccacgtacaatcaggctttcacttggcgcattcaggccttgacgcagatgcaagcgcttccttcaggcgatgacggtcgcaaaattcacatcagttccaaatatcccacacctgagtctcccgaggactctgcaaagaaggtatcacagaagaacgtgagccacacagcgaaccctgtggcaaccgatggccagagcggtggcaacgacgaagcctgggatcagacctggaagcgatggtccgatcttgacgcgaagaacaagactcgatgcagcttttaccagacagacaaggctattaccattgacattttcatcaagaatgtaccacaggaccttcttgttgttgagactggtgttcgcaccgttactcttcgacccaaagagggtcattccatcagcgggattcatggcaatttgaagctgtttctctatgagaagatcaaacaagagacgacatgcactataaagtcaatgaagatttccttagagctccagaaagagacacccggcaaatggcccacctttcgacacaaagggacagagcttctagatggcctctattacgatagccgtcctgctcccatcagccgtgagcctttcgttacttatgtgaaggcgatggggtacaaagatgtcagcgaactcggactccctgatttcgacaaggatcccgatgcgtggtacacaagcttgaccgagtctttgaaggcaaagctcgaccccagtccggatgaagacacagacacccaacttgacaaatctacttctcctctcatcgatatctctccggttgcacctcaagctaagcctatatccgagagtgccacagagaagaaagagtctgctcctatctatccaacttcgtccaggaaggggcctgtcaactgggacaagatagatgacggcgaagacgagaacgacgatgcgaacgatcccaatgcacttttccagcgactctaccaaggcgcagatgagaaatccaggatggccatgaagaagagcatgcaagagagcaatggtactgttctgactaccaactgggaggaggcaaagaacaagacgtttgagacgctacctccagatggtgcagaggccaagagatacgaatagggcttctgggattgaggggtttggagttttgaggattcgagataccacccattgctttacctgtagccgcctctactgccctccttgtctcgagtagagacttgattgctgaggcccgatctagtatctgatcagtatatcatttcctagatcaagtaacggatttgcgatcatggaggttgcttcctagctttgcatgcacatgaattacgcaagttttatgatatcagagaataagaaaacatgccagccaacgaacaagcgtcatagacttttgacaggtctaagtcgtttcaatgtaacgctgcaacttcacgtgggaagcatgcagggcacgataagtaggttcccgtacgattgtagattgattccggtcctaccggtagtggtggttgccatcctcgccggtactaagtatagggaaggtgggaaaccaggtgtgcggacaaacagctgctacctatagtgatgacatataggcgagtcgggccagtgagcgatgcgcgatagattaaatgtatacacccatgctgcatctacagaccggtgtgcgtcgcattagtgtcatcaagaacacgtcgaatgagaaatcgcactacaatgattttcgtcgcacgccaagtacaaccaagatcggattgggtttcagcaccaggtcttgacatacgtaagtagggttgtgatatggagatttttctagtgccgatggtttgatatcgaaactgtgatgactgcgccatgcaggtgtgatttcgaacctcaatcgatggactagttctcgatctcaattacgcacgcctgtacacccgatttgcattagaccacactagcggctatcttctaccatcgctgcccccgcatcgaccccgagaacttgcgtgcccgccagttactgtatctcccccttgatccacttctcgccgcgagaacgttcctagactcgtttctccctcgcttctgcgtgatcctctcattcggcagttcattgattggtcgaggagtcaattgcggcgttttggagtcggcgcccggaggtgttgctattattaagctgcaggtaagccgtttcgaccaagacacggcatgttatcttcgggatgggaggttttatattagcccggaggtctggcctttgggatctgcgctgttgtgcgttgaaatatcggaagatgcgggtttaatatatttttttcctcagatctgtgaagacaacacctgttcaatcgtgacattctgattgttgcgctaatcacaagttttgtctaagaaatcctatgcttttcaacgtcgttccagtattctacggaattaagtgacgaactatccgtcagagtgcttacagttgccgtccgtctaccttttcaccaagtcttcatcatggattctatgctcagtgacataaacatggagacccccgaggggactatctcgcctgtccgtgccttcttcaatctcgcattgagatttatcagtcgatactgggcaattcttatcccgtcactcatcattacgcgcatgatatatagacgatatgcatctcctcttcgctcgatccccggccctttcgccgcatcatttacacgcctctggaaactgaggtcaacgttgacagaaaacacgcagtgggaacatgtagagctacataagaaatatggccccatagtacggattgggcccaacgaggtctctttttcatcaccgcaggtagcacggaacatcctctcagcgggaaaacgattttacaagacagacttttacaccgtgttcccaccgccagagcaccccgatatcttcaccgagatacgggaggatgtacacgcaatgaa

SEQ ID NO: 15972 - DNA, 1671 bp, Muscodor strobelii
  misc_feature: SGI cDNA ID NO. 565300
  misc_feature: Encodes the peptide sequence at SEQ ID NO 15973
atggattctatgctcagtgacataaacatggagacccccgaggggactatctcgcctgtccgtgccttcttcaatctcgcattgagatttatcagtcgatactgggcaattcttatcccgtcactcatcattacgcgcatgatatatagacgatatgcatctcctcttcgctcgatccccggccctttcgccgcatcatttacacgcctctggaaactgaggtcaacgttgacagaaaacacgcagtgggaacatgtagagctacataagaaatatggccccatagtacggattgggcccaacgaggtctctttttcatcaccgcaggtagcacggaacatcctctcagcgggaaaacgattttacaagacagacttttacaccgtgttcccaccgccagagcaccccgatatcttcaccgagatacgggaggatgtacacgcaatgaaaaagaaggtggctaatgtgccgtactcgatggccgctatgaaacaactcagtcccttcatcgacgacactatcgagtttctcgtttcccgactaggcggcttctgcactgatccatcgactaagacgcttggctctgaccgccaagggaaccaaagctttgctgtccggggaggcacaaaaccccaacccatactcgatcttggcaattggctccactacttcgccttcgacgtcctcggcgaagtggcgttcggccggtccttcgggtttctagcggcgggcgccgacaaggaggatgctataaagacgatcgataatagtcagaagtacaacggcatcgtgggtcagatccccgaagtcgatattttcctacgtaggaacccgctatgcaaattcgtccctgcacttgatcccgccaacaatcttattacgcggattgccaaggaggagatggcgaaacgaagaccgtttgcagttgagcgagaggggaaagatgcgggtggtgatggcagagaagacttgatggcaagtttgattaagggccatcttaaagatccggcaaaatttgaagagggtgacatattcgccgtcgcgcatggtgcaatcttcgcaggttccgactcgacagcttcaacaatgcaatctttcttttggctaacactgaccgcaccacgagtctacgcacaactcaaatcggaaatcgatactgccgtgacacagggtacggttcctcgcagtggcaatattgaatggacacaagcacaaactctaccgtacttccaagcttgtcttaaagaagctatgcgtcttcgtcctgctgttggtctcaatataacgcgatatgctcctgcacccgacggtgttgagattgatggtcgacattaccctgctggaacacgtattgcagtcaatggttgggtattgcatagagacaagagtatctttggggaggatgcagacttctttcggcctgagcggtggctcgaggacgaggagaatgctagggttatggaaagatttatgtttcagtttggtggcggagctcatgtttgtatcggtcgtaatctcgctttgctcgagattaacaaggtttgcccaagactactgcgtgattttgatttccagctcgttaatcccacatgcgagctcaaggccaaggtcacattcttcgtcgtgcaagatgggttggaagtgtacatttcacgaagatctgctgattag

SEQ ID NO: 15973 - protein, 556 aa, Muscodor strobelii
  misc_feature: SGI Peptide ID NO. 565300
  misc_feature (60)..(552): Pfam Id: PF00067 Pfam Desc: Cytochrome P450
  misc_feature (215)..(552): Pfam Id: PF00067 Pfam Desc: Cytochrome P450
  misc_feature (30)..(553): NCBI GI: 39940010 Blast Desc: MGG_05235 [Magnaporthe grisea 70-15] gi|145010489|gb|EDJ95145.1| MGG_05235 [Magnaporthe grisea 70-15]
  misc_feature (8)..(552): NCBI GI: 85104738 Blast Desc: NCU06526 [Neurospora crassa OR74A] gi|28923373|gb|EAA32562.1| conserved [Neurospora crassa OR74A]
  misc_feature (34)..(552): NCBI GI: 116195012 Blast Desc: CHGG_04104 [Chaetomium globosum CBS 148.51] gi|88180017|gb|EAQ87485.1| CHGG_04104 [Chaetomium globosum CBS 148.51]
  misc_feature (30)..(552): NCBI GI: 171679169 Blast Desc: protein product [Podospora anserina] gi|170937656|emb|CAP62314.1| protein product [Podospora anserina]
  misc_feature (15)..(553): NCBI GI: 256722941 Blast Desc: NECHADRAFT_52492 [Nectria haematococca mpVI 77-13-4]
  misc_feature (35)..(553): NCBI GI: 154287998 Blast Desc: [Ajellomyces capsulatus NAm1] gi|150408435|gb|EDN03976.1| [Ajellomyces capsulatus NAm1]
  misc_feature (35)..(553): NCBI GI: 240278833 Blast Desc: benzoate 4-monooxygenase cytochrome P450 [Ajellomyces capsulatus H143]
  misc_feature (25)..(553): NCBI GI: 226281574 Blast Desc: pisatin demethylase [Paracoccidioides brasiliensis Pb01]
  misc_feature (38)..(553): NCBI GI: 261203485 Blast Desc: cytochrome P450 oxidoreductase [Ajellomyces dermatitidis SLH14081] gi|239586741|gb|EEQ69384.1| cytochrome P450 oxidoreductase [Ajellomyces dermatitidis SLH14081]
  misc_feature (35)..(553): NCBI GI: 225560082 Blast Desc: benzoate 4-monooxygenase cytochrome P450 [Ajellomyces capsulatus G186AR]
  misc_feature (56)..(553): SWISSPROT Homolog: EC 1.14.13.12 Benzoate 4-monooxygenase
MDSMLSDINMETPEGTISPVRAFFNLALRFISRYWAILIPSLIITRMIYRRYASPLRSIPGPFAASFTRLWKLRSTLTENTQWEHVELHKKYGPIVRIGPNEVSFSSPQVARNILSAGKRFYKTDFYTVFPPPEHPDIFTEIREDVHAMKKKVANVPYSMAAMKQLSPFIDDTIEFLVSRLGGFCTDPSTKTLGSDRQGNQSFAVRGGTKPQPILDLGNWLHYFAFDVLGEVAFGRSFGFLAAGADKEDAIKTIDNSQKYNGIVGQIPEVDIFLRRNPLCKFVPALDPANNLITRIAKEEMAKRRPFAVEREGKDAGGDGREDLMASLIKGHLKDPAKFEEGDIFAVAHGAIFAGSDSTASTMQSFFWLTLTAPRVYAQLKSEIDTAVTQGTVPRSGNIEWTQAQTLPYFQACLKEAMRLRPAVGLNITRYAPAPDGVEIDGRHYPAGTRIAVNGWVLHRDKSIFGEDADFFRPERWLEDEENARVMERFMFQFGGGAHVCIGRNLALLEINKVCPRLLRDFDFQLVNPTCELKAKVTFFVVQDGLEVYISRRSAD

SEQ ID NO: 15974 - DNA, 476 bp, Muscodor strobelii
  misc_feature: SGI EST ID NO. CUFF.37717.0
  misc_feature: Variant of the nucleotide sequence at SEQ ID NO 15972
gcggattgccaaggaggagatggcgaaacgaagaccgtttgcagttgagcgagaggggaaagatgcgggtggtgatggcagagaagacttgatggcaagtttgattaagggccatcttaaagatccggcaaaatttgaagagggtgacatattcgccgtcgcgcatggtgcaatcttcgcaggttccgactcgacagcttcaacaatgcaatctttcttttggctaacactgaccgcaccacgagtctacgcacaactcaaatcggaaatcgatactgccgtgacacagggtacggttcctcgcagtggcaatattgaatggacacaagcacaaactctaccgtacttccaagcttgtcttaaagaagctatgcgtcttcgtcctgctgttggtctcaatataacgcgatatgctcctgcacccgacggtgttgagattgatggtcgacattaccctgctggaacacgtattgcag

SEQ ID NO: 15975 - DNA, 879 bp, Muscodor strobelii
  misc_feature: SGI cDNA ID NO. 565301
  misc_feature: Encodes the peptide sequence at SEQ ID NO 15976
atgccttcccgatcagtgtttgcttctgctcttctcgccagctctgcggctgcgaacccaatgttcttccagcgggatactagttgcggcgctacggatggtgatcagctttatgttgctgaagttggattcttctctgatgacaactgtcagacccaaatttcaaaccaatgcatatacactactcaggaggccatcgacgacggtcccggctggtatatctgccagtccaacagcctccccaccgacacaccgtattatgcgaaggtcaacgatgctgcacagcctgatatccaaatggactacacacaggacaagtcgtgcccacccacgggccctggtgcagtcgtcgctacattagacaacggcggcggatgtgttgaaatgaacgttggcggcgacatgcctggtttgaccatctggcccagcggtggctctactatcgcaaagaaggcaaagcgtgacacaaccagctgcagcggtttcaatattgccagccaagagtcaagctattcgaactcagtccaagtttcaaacatcgttgactgtaccaacagtgccgacaacggatgcacagtcacagagggcgagcagcacactgagtccgtgagcacttcattctcgaccacagctggctttgaagtcgagggtctcagcctcggcgcaaccttcggtacagagtatacaacttcagaaactagcagtcttcaggaaggtttcaccatcgacgctggtcagaagggttacttgtccgcttactcgactgctactctgttcaagggtacattcacaggatgtgacgacggtgaccaagatggcgaggtccttgccattaaggagaatggtttcacttattccgtcatctatacgaacgcctaa

SEQ ID NO: 15976 - protein, 292 aa, Muscodor strobelii
  misc_feature: SGI Peptide ID NO. 565301
  misc_feature (1)..(290): NCBI GI: 189190996 Blast Desc: conserved [Pyrenophora tritici-repentis Pt-1C-BFP] gi|187973443|gb|EDU40942.1| conserved [Pyrenophora tritici-repentis Pt-1C-BFP]
  misc_feature (87)..(287): NCBI GI: 71017274 Blast Desc: UM02821.1 [Ustilago maydis 521] gi|46098634|gb|EAK83867.1| [Ustilago maydis 521]
MPSRSVFASALLASSAAANPMFFQRDTSCGATDGDQLYVAEVGFFSDDNCQTQISNQCIYTTQEAIDDGPGWYICQSNSLPTDTPYYAKVNDAAQPDIQMDYTQDKSCPPTGPGAVVATLDNGGGCVEMNVGGDMPGLTIWPSGGSTIAKKAKRDTTSCSGFNIASQESSYSNSVQVSNIVDCTNSADNGCTVTEGEQHTESVSTSFSTTAGFEVEGLSLGATFGTEYTTSETSSLQEGFTIDAGQKGYLSAYSTATLFKGTFTGCDDGDQDGEVLAIKENGFTYSVIYTNA

SEQ ID NO: 15977 - DNA, 247 bp, Muscodor strobelii
  misc_feature: SGI EST ID NO. CUFF.37726.0
  misc_feature: Variant of the nucleotide sequence at SEQ ID NO 15975
cggcgctacggatggtgatcagctttatgttgctgaagttggattcttctctgatgacaactgtcagacccaaatttcaaaccaatgcatatacactactcaggaggccatcgacgacggtcccggctggtatatctgccagtccaacagcctccccaccgacacaccgtattatgcgaaggtcaacgatgctgcacagcctgatatccaaatggactacacacaggacaagtcgtgcccacccacg

SEQ ID NO: 15978 - DNA, 1383 bp, Muscodor strobelii
  misc_feature: SGI cDNA ID NO. 565302
  misc_feature: Elevated expression when VOC is produced
  misc_feature: Encodes the peptide sequence at SEQ ID NO 15979
atggaggcgttcgacgaagccagcagaggggtctggggtgctgtcaagttattagcacgagccggtggcggttttcttggctttttcggggctacgatcactctagttgcgctcttgctcggaccattcgctcagcaagtcgtcacgtaccagagtagaatcatcgaaagtcataacggcgcgaacgtacctcgagctctaaacttcacgccagcacttccaggaacaacgtcgtcgaccggttacgtccctatcctacccttgaaatccgccgtttacaatggtctcttcgccgagaatggccgaccaggggcagccctctcttttgaatgtcagagtggtaactgcacttgggagcactacgacacactcgccgtctgtggtagctgcattgatctcacaccatacgttgtttcgtattgtgccgatgacaaaaagtcagactgtggatggcaagttccacaaggggcaaaattgacaaatagctccgaagtcttcagtatgacatctcttattcccagcgcgaaaggcgatcagccacattcctctataatgcggctgatattcatgggcaccgagagctggaacggaactgccggcgaaacaaaaccatgggcgcgacagtgcacattatcggcatgtctacagactctcgcaacaaatgtctccaacggagtcctgggagagaatgttacccatgtgcagataaataacacggtggtggataataccaatctcactgatggtaaagatcacaatgtgtacgtcaccggtgcggatggcacatcctatgaactcgggatcgaagcaatgcttagcatgcgcggatggttctcctcgctctttgcaaacgggtcagccagtcgcagcactgccacttataaccggaccatcacggatagcagcgtcgttgtaaatttgacagtcggcatatcaagtggcgaaacgtttttcgactcggatattgtgactgcgttttattggaattactacgagtacgcagaaggacttgatcttctaatcagcgacatggcaacgtccatgactgtcgcatttcgcagtttctcgggagcgatacccgtctctgggcagtcactcttcacagagtcctacgtccatgttcgatggggtttcgctatcttgcctatcatcgttgttgtaagcactgctttgttcctcgctgcgacgatattccaatcgaggagaaaggaaacacatgcctggaagagtagcgctctcgcgatgctgcttcatggtcttgacgatacagcgaagcttcaattcagtatgtctgaggacttaagcaagcaaaagtgccaagcgaagaatgtgagggtacatcttgaagaggcagaaagcggggatgcacttctaaggctgtaa

SEQ ID NO: 15979 - protein, 460 aa, Muscodor strobelii
  misc_feature: SGI Peptide ID NO. 565302
  misc_feature (1)..(458): NCBI GI: 169612752 Blast Desc: SNOG_09502 [Phaeosphaeria nodorum SN15] gi|111061647|gb|EAT82767.1| SNOG_09502 [Phaeosphaeria nodorum SN15]
  misc_feature (1)..(445): NCBI GI: 164425452 Blast Desc: NCU05801 [Neurospora crassa OR74A] gi|157070931|gb|EAA30825.2| NCU05801 [Neurospora crassa OR74A]
  misc_feature (1)..(454): NCBI GI: 159125812 Blast Desc: conserved [Aspergillus fumigatus A1163]
  misc_feature (1)..(454): NCBI GI: 70985502 Blast Desc: conserved [Aspergillus fumigatus Af293] gi|66845885|gb|EAL86219.1| conserved [Aspergillus fumigatus Af293]
  misc_feature (3)..(457): NCBI GI: 169599855 Blast Desc: SNOG_02753 [Phaeosphaeria nodorum SN15] gi|111068364|gb|EAT89484.1| SNOG_02753 [Phaeosphaeria nodorum SN15]
  misc_feature (1)..(455): NCBI GI: 225560573 Blast Desc: conserved [Ajellomyces capsulatus G186AR]
  misc_feature (1)..(454): NCBI GI: 242787121 Blast Desc: conserved [Talaromyces stipitatus ATCC 10500] gi|218721087|gb|EED20506.1| conserved [Talaromyces stipitatus ATCC 10500]
  misc_feature (1)..(455): NCBI GI: 240280136 Blast Desc: conserved [Ajellomyces capsulatus H143]
  misc_feature (26)..(455): NCBI GI: 240111281 Blast Desc: CPC735_071160 [Coccidioides posadasii C735 delta SOWgp]
  misc_feature (1)..(457): NCBI GI: 115400213 Blast Desc: [Aspergillus terreus NIH2624] gi|114191361|gb|EAU33061.1| [Aspergillus terreus NIH2624]
  misc_feature: Useful for introducing or modulating the production of volatile compounds
MEAFDEASRGVWGAVKLLARAGGGFLGFFGATITLVALLLGPFAQQVVTYQSRIIESHNGANVPRALNFTPALPGTTSSTGYVPILPLKSAVYNGLFAENGRPGAALSFECQSGNCTWEHYDTLAVCGSCIDLTPYVVSYCADDKKSDCGWQVPQGAKLTNSSEVFSMTSLIPSAKGDQPHSSIMRLIFMGTESWNGTAGETKPWARQCTLSACLQTLATNVSNGVLGENVTHVQINNTVVDNTNLTDGKDHNVYVTGADGTSYELGIEAMLSMRGWFSSLFANGSASRSTATYNRTITDSSVVVNLTVGISSGETFFDSDIVTAFYWNYYEYAEGLDLLISDMATSMTVAFRSFSGAIPVSGQSLFTESYVHVRWGFAILPIIVVVSTALFLAATIFQSRRKETHAWKSSALAMLLHGLDDTAKLQFSMSEDLSKQKCQAKNVRVHLEEAESGDALLRL

SEQ ID NO: 15980 - DNA, 4674 bp, Muscodor strobelii
  misc_feature: SGI EST ID NO. CUFF.37738.0
  misc_feature: Variant of the nucleotide sequence at SEQ ID NO 15978
actagctccaactccctaggactgggtagcatatgctgaatattagtattgcttctcgttttatatcgattcgctgtgtgctcgcgcaatcccaggctacatctctgtagcttctaaggatagatcatattccaaaatgtcatacaatccaatccatgatagtcgacacgatcccccggtcatgtttcaatttggcactgaaaatgactacactttctattctcaggaagccgtccacgcaccaaacgcgcaaacattcacacctagctatttgcatatagccaatccgcagaaaactctcgacactgaaaccgtcactccttaccccaaatattccaactctactcccggcggtccattacatcaaagaggatggagcgaaagcacaatcgcgtcggaaaaatcgtctgcaaagggattcctaccatctacaataagaactttacaaaaaagtcgctcttcgaccattgtccgcccatgggctcatgaagccgtcactattatcatagccctagccgcagtaggagcaattctaggagttttggcgaagttcaacggccatgcattaccggactggccctactatattacactcaatgctctcattgccgtattagctgcagtggctacagcaaatatttccgtcagtctccagagcagcatgagccaacttaaatggattcgtttcacagaaacacgcgcacctcttatcgaaatggaggcgttcgacgaagccagcagaggggtctggggtgctgtcaagttattagcacgagccggtggcggttttcttggctttttcggggctacgatcactctagttgcgctcttgctcggaccattcgctcagcaagtcgtcacgtaccagagtagaatcatcgaaagtcataacggcgcgaacgtacctcgagctctaaacttcacgccagcacttccaggaacaacgtcgtcgaccggttacgtccctatcctacccttgaaatccgccgtttacaatggtctcttcgccgagaatggccgaccaggggcagccctctcttttgaatgtcagagtggtaactgcacttgggagcactacgacacactcgccgtctgtggtagctgcattgatctcacaccatacgttgtttcgtattgtgccgatgacaaaaagtcagactgtggatggcaagttccacaaggggcaaaattgacaaatagctccgaagtcttcagtatgacatctcttattcccagcgcgaaaggcgatcagccacattcctctataatgcggctgatattcatgggcaccgagagctggaacggaactgccggcgaaacaaaaccatgggcgcgacagtgcacattatcggcatgtctacagactctcgcaacaaatgtctccaacggagtcctgggagagaatgttacccatgtgcagataaataacacggtggtggataataccaatctcactgatggtaaagatcacaatgtgtacgtcaccggtgcggatggcacatcctatgaactcgggatcgaagcaatgcttagcatgcgcggatggttctcctcgctctttgcaaacgggtcagccagtcgcagcactgccacttataaccggaccatcacggatagcagcgtcgttgtaaatttgacagtcggcatatcaagtggcgaaacgtttttcgactcggatattgtgactgcgttttattggaattactacgagtacgcagaaggacttgatcttctaatcagcgacatggcaacgtccatgactgtcgcatttcgcagtttctcgggagcgatacccgtctctgggcagtcactcttcacagagtcctacgtccatgttcgatggggtttcgctatcttgcctatcatcgttgttgtaagcactgctttgttcctcgctgcgacgatattccaatcgaggagaaaggaaacacatgcctggaagagtagcgctctcgcgatgctgcttcatggtcttgacgatacagcgaagcttcaattcagtatgtctgaggacttaagcaagcaaaagtgccaagcgaagaatgtgagggtacatcttgaagaggcagaaagcggggatgcacttctaaggctgtaaggctgacgacgatcgtacatacatggggccgtagccttcactgtttttgatgctgctgttgcgtttctcatgcgtatgaaatatatcggcggtgattttcgggttccgttggatacgcacgcaatagttgcggcgcggtgcaacagacagttttttgtattatcattggacttgtatcagatccattgggttaaatacctttcactgtcgctctttaatacaatctaccgcattattcctagctatccagcatttataaatgcagatcccattcattatatcgtatccatggctgacgatactgcccattaagcgatgcattttgccataagaattaaactcttcgcccaaaagatcatgagcttgaatcttcttcttttccgttcaagtgatagcatctcgatgttcctgaagcaaattcctcatcgaatacagctgttgttcctcggccatttttacgacctcatcgaaagatgtttgataaaatttgacgctcttggacatcagaagtctgactgcaagttcagctgcataatcgcccatcattgagttcataggtggattacagtccacatctaatattttgttcggcgttgaccggtagagcttcgcgccgtttgccacaagcagacggaataatggctcgtcttcccttctcattgcctcgagcagagcttcctgcgccacaatttggtctttcatcgccccgtgatcaagaagaagctgcacgatttttggcgagccaccgactactgccgcgtgtaaagacgtgcctaagggcgctcctttttccaataaccatctaacagcattttgctgacatttcaatgccgctccacagatagggctccaaaatcggcctggtatgtccttggtgccaccgtcgacggatgcaccaagctggaagagatagtccagtaggtccactgcacccttttcggcaactgggcgtattcgtgcagttagccacgcatgcatggagcggcggctctttgcgtgcggtgcagtgtcttgtatctcatggcgaacaatcgcaaaaattcgtttgaatacgtcgacgttcgtagtagcttccagaccttcaatcaaagaatctcgtagactatcatagttcggatgagcattattgaaagaaggccctagcacgagatcgatcggcccaagctgattgccccatgccgcatgataaagaatggttttgatatgtcttttgctgcgaatgaccttcttcgattcgttctctattaggtatgataaaaactccacgttgcccttgaatgctgctgctgaatatggatcgatgggaagaacgggcatgtccccttttttacgctgtagatgcatatgaatgggaggtgatcttcgcgggttggttatgcttgaagtgtcaccagactgcgacgataatacctcgcgtgctacatgtatatcattggtataggcagccgcagcaagaagagaccgtttgaagctgacgccattttcatcgattccagcggtgatttcacacttagaaaccgcttgggtgtctgcatggtcataggatcttgggaacaagagggaagcataacagatctgagcggtgatatctttcaaagctttctgtgttggaggttcgccggatgccaagctacgcatttccagcatacgctcagctaccttgcgtatcgtgactagctgtaacgataagggtttagtgttgtgaagcgctctgtaagtgagatatcgctgtaaaaacgcgcagtcgttctggacagtcgatatgatggggccgagtggggacgcgccctcaagaatgcctgagttgaagatgcaccactctatggcggcgcaccagcctcgactcacaaggcgacaacgcagtgctcgaccaatcagactaacgccttcatgtgtcaaaaccctccggtcgcgtacgacgtcgaccaagatctggtggatgacctcatttgggaggtcgcaaatacagagaaacatgggtactggatgtgatctttttttgatccgcgtcttagaagaaagagaggaatgcgaaaggaggggtcaattcatgagtcaaaggatgctgtcttgttcatgtcccgaggagttgtcaagtcctgtgatgagtgccgatctagcatggcttgggggacctggtcattttgttatcgcacaaattgaggcggtctgtgaggcaacatgccctatcgaaagcgcttgtctttccagcaagcttgagcttgagcaatgcgggtaacaatgcacaacgataaaggcaggtttctgaccgttatgactttggggggtcctactaagatgctaataataagaacgggtttcggttgagcagacataagcgtgccatactctctcgaccaaatgatgggggcgagtacccgatgataaggatcgggtgggctgatttgacatctagacaggcactcgcccggtgctatatgcatgtgtcggctactaggtaggtactccagttgctccttggggactggtccactacgcaactgcgcctggcatgctacagtacctaggcgcttgggcgcagatggccagggatgttggtactgtggagataccgc

SEQ ID NO: 15981 - DNA, 933 bp, Muscodor strobelii
  misc_feature: SGI cDNA ID NO. 565303
  misc_feature: Elevated expression when VOC is produced
  misc_feature: Encodes the peptide sequence at SEQ ID NO 15982
atgcccgttcttcccatcgatccatattcagcagcagcattcaagggcaacgtggagtttttatcatacctaatagagaacgaatcgaagaaggtcattcgcagcaaaagacatatcaaaaccattctttatcatgcggcatggggcaatcagcttgggccgatcgatctcgtgctagggccttctttcaataatgctcatccgaactatgatagtctacgagattctttgattgaaggtctggaagctactacgaacgtcgacgtattcaaacgaatttttgcgattgttcgccatgagatacaagacactgcaccgcacgcaaagagccgccgctccatgcatgcgtggctaactgcacgaatacgcccagttgccgaaaagggtgcagtggacctactggactatctcttccagcttggtgcatccgtcgacggtggcaccaaggacataccaggccgattttggagccctatctgtggagcggcattgaaatgtcagcaaaatgctgttagatggttattggaaaaaggagcgcccttaggcacgtctttacacgcggcagtagtcggtggctcgccaaaaatcgtgcagcttcttcttgatcacggggcgatgaaagaccaaattgtggcgcaggaagctctgctcgaggcaatgagaagggaagacgagccattattccgtctgcttgtggcaaacggcgcgaagctctaccggtcaacgccgaacaaaatattagatgtggactgtaatccacctatgaactcaatgatgggcgattatgcagctgaacttgcagtcagacttctgatgtccaagagcgtcaaattttatcaaacatctttcgatgaggtcgtaaaaatggccgaggaacaacagctgtattcgatgaggaatttgcttcaggaacatcgagatgctatcacttga

SEQ ID NO: 15982 - protein, 310 aa, Muscodor strobelii
  misc_feature: SGI Peptide ID NO. 565303
  misc_feature (2)..(238): NCBI GI: 189199064 Blast Desc: conserved [Pyrenophora tritici-repentis Pt-1C-BFP] gi|187982968|gb|EDU48456.1| conserved [Pyrenophora tritici-repentis Pt-1C-BFP]
  misc_feature (2)..(259): NCBI GI: 169594874 Blast Desc: SNOG_00167 [Phaeosphaeria nodorum SN15] gi|111070542|gb|EAT91662.1| SNOG_00167 [Phaeosphaeria nodorum SN15]
  misc_feature (10)..(244): NCBI GI: 115915274 Blast Desc: : similar to ankyrin 2,3/unc44, partial [Strongylocentrotus purpuratus] gi|115972908|ref|XP_001187944.1| : similar to ankyrin 2,3/unc44, partial [Strongylocentrotus
  misc_feature (8)..(255): NCBI GI: 115752641 Blast Desc: : similar to ankyrin 2,3/unc44 [Strongylocentrotus purpuratus] gi|115954125|ref|XP_001193628.1| : similar to ankyrin 2,3/unc44 [Strongylocentrotus purpuratus]
  misc_feature (107)..(304): NCBI GI: 239780230 Blast Desc: ankyrin 2,3/unc44-like protein [uncultured bacterium FLS12]
  misc_feature (12)..(264): NCBI GI: 115772433 Blast Desc: : similar to ankyrin 2,3/unc44 [Strongylocentrotus purpuratus] gi|115928953|ref|XP_001193458.1| : similar to ankyrin 2,3/unc44 [Strongylocentrotus purpuratus]
  misc_feature (8)..(271): NCBI GI: 119483910 Blast Desc: Ankyrin repeat protein [Neosartorya fischeri NRRL 181] gi|119410014|gb|EAW19961.1| Ankyrin repeat protein [Neosartorya fischeri NRRL 181]
  misc_feature (8)..(271): NCBI GI: 159123877 Blast Desc: ankyrin repeat protein [Aspergillus fumigatus A1163]
  misc_feature (8)..(271): NCBI GI: 70982929 Blast Desc: ankyrin repeat protein [Aspergillus fumigatus Af293] gi|66844617|gb|EAL84954.1| ankyrin repeat protein [Aspergillus fumigatus Af293]
  misc_feature (19)..(238): NCBI GI: 123492835 Blast Desc: ankyrin repeat protein [Trichomonas vaginalis G3] gi|121909067|gb|EAY13934.1| ankyrin repeat protein, [Trichomonas vaginalis G3]
  misc_feature: Useful for introducing or modulating the production of volatile compounds
MPVLPIDPYSAAAFKGNVEFLSYLIENESKKVIRSKRHIKTILYHAAWGNQLGPIDLVLGPSFNNAHPNYDSLRDSLIEGLEATTNVDVFKRIFAIVRHEIQDTAPHAKSRRSMHAWLTARIRPVAEKGAVDLLDYLFQLGASVDGGTKDIPGRFWSPICGAALKCQQNAVRWLLEKGAPLGTSLHAAVVGGSPKIVQLLLDHGAMKDQIVAQEALLEAMRREDEPLFRLLVANGAKLYRSTPNKILDVDCNPPMNSMMGDYAAELAVRLLMSKSVKFYQTSFDEVVKMAEEQQLYSMRNLLQEHRDAIT

SEQ ID NO: 15983 - DNA, 1500 bp, Muscodor strobelii
  misc_feature: SGI cDNA ID NO. 565304
  misc_feature: Reduced expression when VOC is produced
  misc_feature: Encodes the peptide sequence at SEQ ID NO 15984
atgcttcttgaggagcagaggtacctccacgaggatctcgagcgtctcgagcagggcatcgctgagcgcattggtgaagagcacaaaaacattcgcgacaggttagcgcgcgaccaccagatctctaccttccttgaccgcatctcctcacaatctgcaaagcttctcgacctctaccgcgatgccgacggcgccagatcacgtgagatccagcagatcggtaccggcgaagccatggatgagttctacaagcagctgtccgaggtgaaggccttccatgccaagtatcccaacatgccggccgagaatctcgagcgcgcatacaagccgcacaccggccccgaaataatgcccagcgtcgttgataccatgttcaccggcgaagaggcttttggccgcttcttcgacttacacatctgccacgagttatatctgaatctccccaatgcgaagagactctcttatctgcaattcctcgatttgttcgacaacttctctccatcggtagcaggcttgaagaggtccgagaaactgacagacgaatacttcaagtatgttgctcagctggccaccgatctcgagaccttcatgcgaaagacgcgcccgctcgaggacacggacaaggttctcgccgattttgataaggagttcgagatggcatgggaaaatgacgaagtcgaggattggaaactggaggagccggtgacgaagaatggcaaaccagccggtgatggtatctactgcgaggcctgcgagaaggagttcacgaacgagaatgtctataagaaccatctgaacggcaagaaacacatccgagcagaggccgaactgaagaagagggaagaagcaggcgaagtgagctctacgaatggtgcaggaaagggtggaccttccacaacgcgattaaaagaacggtcagtcgccgcacgagagttccgagtcaaaaaacttgccggtgccatgagtacggagcgaagcgacacgcgagtcaacgtcgagcgaaaacagggtatgacggagcgcgagcgtcaacaagaactcgacaatcactttagctctaccgcatcggcatcacacgcaatggagatggaagagggcgaagagggagacgacgacgacaagatctataaccctctcaagctaccactggcttgggatggcaagcctattccattttggctctacaagcttcacggattaggggtcgagttcccatgcgaggtctgtggcaacttcgtctacatgggtcgcagggcattcgacaagcacttcaacgagggcaggcatatctacggtttgaaatgtctgggtatcacgaacaccgcgctcttcagagatattacgaggattgacgaggcgttgcggctatgggagaagattcagaaggataagcggagtggcaaggttgaggatggcagcgtcatccagatggaggatgcggagggtaatgtcatgcccgagaaagtgtactatgacttgcagaagcagggtctgttgtaa

SEQ ID NO: 15984 - protein, 499 aa, Muscodor strobelii
  misc_feature: SGI Peptide ID NO. 565304
  misc_feature (1)..(499): NCBI GI: 46122959 Blast Desc: FG05857.1 [Gibberella zeae PH-1]
  misc_feature (1)..(499): NCBI GI: 156052537 Blast Desc: SS1G_06434 [Sclerotinia sclerotiorum 1980] gi|154704214|gb|EDO03953.1| SS1G_06434 [Sclerotinia sclerotiorum 1980]
  misc_feature (1)..(499): NCBI GI: 154308884 Blast Desc: BC1G_07970 [Botryotinia fuckeliana B05.10] gi|150852596|gb|EDN27788.1| BC1G_07970 [Botryotinia fuckeliana B05.10]
  misc_feature (1)..(499): NCBI GI: 145602468 Blast Desc: MGG_12972 [Magnaporthe grisea 70-15] gi|145010886|gb|EDJ95542.1| MGG_12972 [Magnaporthe grisea 70-15]
  misc_feature (1)..(499): NCBI GI: 171693101 Blast Desc: protein product [Podospora anserina] gi|170946499|emb|CAP73300.1| protein product [Podospora anserina]
  misc_feature (1)..(499): NCBI GI: 116199005 Blast Desc: CHGG_07658 [Chaetomium globosum CBS 148.51] gi|88178937|gb|EAQ86405.1| CHGG_07658 [Chaetomium globosum CBS 148.51]
  misc_feature (1)..(499): NCBI GI: 212534918 Blast Desc: splicing factor 3a subunit 3, [Penicillium marneffei ATCC 18224] gi|210070014|gb|EEA24104.1| splicing factor 3a subunit 3, [Penicillium marneffei ATCC 18224]
  misc_feature (1)..(499): NCBI GI: 169776163 Blast Desc: [Aspergillus oryzae RIB40] gi|83771283|dbj|BAE61415.1| protein product [Aspergillus oryzae]
  misc_feature (1)..(499): NCBI GI: 240109438 Blast Desc: splicing factor, [Coccidioides posadasii C735 delta SOWgp]
  misc_feature (1)..(499): NCBI GI: 115437512 Blast Desc: conserved [Aspergillus terreus NIH2624] gi|114188644|gb|EAU30344.1| conserved [Aspergillus terreus NIH2624]
  misc_feature: Useful for introducing or modulating the production of volatile compounds
MLLEEQRYLHEDLERLEQGIAERIGEEHKNIRDRLARDHQISTFLDRISSQSAKLLDLYRDADGARSREIQQIGTGEAMDEFYKQLSEVKAFHAKYPNMPAENLERAYKPHTGPEIMPSVVDTMFTGEEAFGRFFDLHICHELYLNLPNAKRLSYLQFLDLFDNFSPSVAGLKRSEKLTDEYFKYVAQLATDLETFMRKTRPLEDTDKVLADFDKEFEMAWENDEVEDWKLEEPVTKNGKPAGDGIYCEACEKEFTNENVYKNHLNGKKHIRAEAELKKREEAGEVSSTNGAGKGGPSTTRLKERSVAAREFRVKKLAGAMSTERSDTRVNVERKQGMTERERQQELDNHFSSTASASHAMEMEEGEEGDDDDKIYNPLKLPLAWDGKPIPFWLYKLHGLGVEFPCEVCGNFVYMGRRAFDKHFNEGRHIYGLKCLGITNTALFRDITRIDEALRLWEKIQKDKRSGKVEDGSVIQMEDAEGNVMPEKVYYDLQKQGLL

SEQ ID NO: 15985 - DNA, 2046 bp, Muscodor strobelii
  misc_feature: SGI EST ID NO. CUFF.37855.1
  misc_feature: Variant of the nucleotide sequence at SEQ ID NO 15983
cagcagttcattgtgccttcccttctgtaacattacatccagcctcacaaccgcaaccaccacgaccgcccgccgtcttgtcacgtatcttgcataacgttccgtcattgtcgcaaacattagtctcgaaatatacggcttcggaaatcaagatcaatccacttaatcctagttgagctcatcctttaccatgcttcttgaggagcagaggtacctccacgaggatctcgagcgtctcgagcagggcatcgctgagcgcattggtgaagagcacaaaaacattcgcgacaggttagcgcgcgaccaccagatctctaccttccttgaccgcatctcctcacaatctgcaaagcttctcgacctctaccgcgatgccgacggcgccagatcacgtgagatccagcagatcggtaccggcgaagccatggatgagttctacaagcagctgtccgaggtgaaggccttccatgccaagtatcccaacatgccggccgagaatctcgagcgcgcatacaagccgcacaccggccccgaaataatgcccagcgtcgttgataccatgttcaccggcgaagaggcttttggccgcttcttcgacttacacatctgccacgagttatatctgaatctccccaatgcgaagagactctcttatctgcaattcctcgatttgttcgacaacttctctccatcggtagcaggcttgaagaggtccgagaaactgacagacgaatacttcaagtatgttgctcagctggccaccgatctcgagaccttcatgcgaaagacgcgcccgctcgaggacacggacaaggttctcgccgattttgataaggagttcgagatggcatgggaaaatgacgaagtcgaggattggaaactggaggagccggtgacgaagaatggcaaaccagccggtgatggtatctactgcgaggcctgcgagaaggagttcacgaacgagaatgtctataagaaccatctgaacggcaagaaacacatccgagcagaggccgaactgaagaagagggaagaagcaggcgaagtgagctctacgaatggtgcaggaaagggtggaccttccacaacgcgattaaaagaacggtcagtcgccgcacgagagttccgagtcaaaaaacttgccggtgccatgagtacggagcgaagcgacacgcgagtcaacgtcgagcgaaaacagggtatgacggagcgcgagcgtcaacaagaactcgacaatcactttagctctaccgcatcggcatcacacgcaatggagatggaagagggcgaagagggagacgacgacgacaagatctataaccctctcaagctaccactggcttgggatggcaagcctattccattttggctctacaagcttcacggattaggggtcgagttcccatgcgaggtctgtggcaacttcgtctacatgggtcgcagggcattcgacaagcacttcaacgagggcaggcatatctacggtttgaaatgtctgggtatcacgaacaccgcgctcttcagagatattacgaggattgacgaggcgttgcggctatgggagaagattcagaaggataagcggagtggcaaggttgaggatggcagcgtcatccagatggaggatgcggagggtaatgtcatgcccgagaaagtgtactatgacttgcagaagcagggtctgttgtaaaatcttgtgtatactcccttcactacgaggtaagatgatatcagcttgaggtgttataagcaggcaatattggattccatgatggaatgctatctatattgaatgtctatatgctcatgtgactcgaattattcattcgggctttgctaaagcccggccgcgttgacttgatcaactagaatagcggtccatccaagcaaccaattggcctgtactagttggttaagtatcgggatctcgctcttgagatcaatgggctcgattcccgtgtgtgctgacgaaaatggatgtggttagccgtgtcaactacgcaagccctgatcttcgctgacacttcaaggggtccttgatgcaca

SEQ ID NO: 15986 - DNA, 1206 bp, Muscodor strobelii
  misc_feature: SGI cDNA ID NO. 565305
  misc_feature: Reduced expression when VOC is produced
  misc_feature: Encodes the peptide sequence at SEQ ID NO 15987
atggctgaaggcggtggcatcgatcgtcgcgccgacgagaagatggagttctccacctccaaggaggtcactgtccatcccacattcgaggccatgtcgctgaaggagaaccttcttcgaggcatctatgcttatggctacgagtctccctcggccgtccagtcccgagccattgttcaggtctgcaagggtcgcgataccatcgcccaggctcagtcaggaacgggtaaaacagccaccttctccatctccatgctccaggtcatcgataccgcggttcgcgagacccaagctctcgtgctctcgcctacgcgtgagctggccacccagatccagtccgtcgtcatggctcttggcgactacatgaacgtccaatgccatgcctgcattggcggcaccaacgtcggcgaggacatccgcaagctcgactatggccagcacattgtttccggcaccccgggtcgagttgctgacatgattcgacgtcgtcacctccgttgcaagaacatcaagatgctggttcttgacgaggctgatgagctcctcaatcagggtttccgtgagcagatctacgatgtctaccgatatcttccacccgctacccaggttgtcgtcgtatccgccacgctgccatacgacgtcttggacatgactaccaagttcatgaccgacccagtccgtatcctggtcaagcgtgatgagttgaccctcgaaggtctgaagcagtacttcatcgctgtagagaaggaggactggaagttcgacaccttgtgtgatctctacgataccctaactattacccaggccgtcatcttctgcaacacgagacgaaaggtcgactggttgaccgacaagatgcgcgaagccaacttcactgtcagcagcatgcacggtgacatgcctcagaaggaacgagacagcattatgcaagatttcaggcagggcaacagcagagtgctcatctcaaccgatgtatgggcacgtggtatcgatgttcagcaagtcagcttggtcatcaactacgatcttccaagcaatcgtgagaactacatccaccgcatcggccgtagtgggcgttttggtcgaaagggtgtggctatcaacttcgttactagcgaagatgttcgtattcttcgggatattgagttgtattactctacccagattgacgagatgccgatgaacgtcgccgatctcattgcttaa

SEQ ID NO: 15987 - protein, 401 aa, Muscodor strobelii
  misc_feature: SGI Peptide ID NO. 565305
  misc_feature (51)..(218): Pfam Id: PF00270 Pfam Desc: DEAD/DEAH box helicase
  misc_feature (285)..(361): Pfam Id: PF00271 Pfam Desc: Helicase conserved C-terminal domain
  misc_feature (6)..(401): NCBI GI: 115437508 Blast Desc: eukaryotic initiation factor 4A-12 [Aspergillus terreus NIH2624] gi|121734188|sp|Q0CAS8.1|FAL1_ASPTN RecName: Full=ATP-dependent RNA helicase fal1 gi|114188643|gb|EAU30343.1|
  misc_feature (1)..(395): NCBI GI: 226281299 Blast Desc: ATP-dependent RNA helicase FAL1 [Paracoccidioides brasiliensis Pb01]
  misc_feature (6)..(395): NCBI GI: 154285130 Blast Desc: eukaryotic initiation factor 4A-12 [Ajellomyces capsulatus NAm1] gi|160385733|sp|A6QSQ0.1|FAL1_AJECN RecName: Full=ATP-dependent RNA helicase FAL1 gi|150407001|gb|EDN02542.1|
  misc_feature (15)..(401): NCBI GI: 242791510 Blast Desc: eukaryotic translation initiation factor eIF-4A subunit, [Talaromyces stipitatus ATCC 10500] gi|218718360|gb|EED17780.1| eukaryotic translation initiation
  misc_feature (1)..(385): NCBI GI: 116199007 Blast Desc: eukaryotic initiation factor 4A-12 [Chaetomium globosum CBS 148.51] gi|118573324|sp|Q2GWJ5.1|FAL1_CHAGB RecName: Full=ATP-dependent RNA helicase FAL1 gi|88178938|gb|EAQ86406.1|
  misc_feature (6)..(395): NCBI GI: 145233589 Blast Desc: An02g10390 [Aspergillus niger] gi|134057099|emb|CAK44387.1| protein product [Aspergillus niger]
  misc_feature (13)..(401): NCBI GI: 169776161 Blast Desc: [Aspergillus oryzae RIB40] gi|91206663|sp|Q2UAK1.1|FAL1_ASPOR RecName: Full=ATP-dependent RNA helicase fal1 gi|83771282|dbj|BAE61414.1| protein product
  misc_feature (6)..(395): NCBI GI: 255955551 Blast Desc: Pc21g15180 [Penicillium chrysogenum Wisconsin 54-1255] gi|211590239|emb|CAP96415.1| Pc21g15180 [Penicillium chrysogenum Wisconsin 54-1255]
  misc_feature (2)..(401): NCBI GI: 91206662 Blast Desc: Pc21g15180 [Penicillium chrysogenum Wisconsin 54-1255] gi|211590239|emb|CAP96415.1| Pc21g15180 [Penicillium chrysogenum Wisconsin 54-1255]
  misc_feature (6)..(395): NCBI GI: 159125976 Blast Desc: inositol 5-phosphatase, [Aspergillus fumigatus A1163]
  misc_feature: Useful for introducing or modulating the production of volatile compounds
MAEGGGIDRRADEKMEFSTSKEVTVHPTFEAMSLKENLLRGIYAYGYESPSAVQSRAIVQVCKGRDTIAQAQSGTGKTATFSISMLQVIDTAVRETQALVLSPTRELATQIQSVVMALGDYMNVQCHACIGGTNVGEDIRKLDYGQHIVSGTPGRVADMIRRRHLRCKNIKMLVLDEADELLNQGFREQIYDVYRYLPPATQVVVVSATLPYDVLDMTTKFMTDPVRILVKRDELTLEGLKQYFIAVEKEDWKFDTLCDLYDTLTITQAVIFCNTRRKVDWLTDKMREANFTVSSMHGDMPQKERDSIMQDFRQGNSRVLISTDVWARGIDVQQVSLVINYDLPSNRENYIHRIGRSGRFGRKGVAINFVTSEDVRILRDIELYYSTQIDEMPMNVADLIA

SEQ ID NO: 15988 - DNA, 2165 bp, Muscodor strobelii
  misc_feature: SGI EST ID NO. CUFF.37919.1
  misc_feature: Variant of the nucleotide sequence at SEQ ID NO 15986
tttgcgactgcctcattcctgcacctcacttgcttgcccattgccacgctgatacttatctatttgtcgcgcttgtgccaattctcttctcttcaccttccatccacatactcaaccccaagcatcgtcatcatggctgaaggcggtggcatcgatcgtcgcgccgacgagaagatggagttctccacctccaaggaggtcactgtccatcccacattcgaggccatgtcgctgaaggagaaccttcttcgaggcatctatgcttatggctacgagtctccctcggccgtccagtcccgagccattgttcaggtctgcaagggtcgcgataccatcgcccaggctcagtcaggaacgggtaaaacagccaccttctccatctccatgctccaggtcatcgataccgcggttcgcgagacccaagctctcgtgctctcgcctacgcgtgagctggccacccagatccagtccgtcgtcatggctcttggcgactacatgaacgtccaatgccatgcctgcattggcggcaccaacgtcggcgaggacatccgcaagctcgactatggccagcacattgtttccggcaccccgggtcgagttgctgacatgattcgacgtcgtcacctccgttgcaagaacatcaagatgctggttcttgacgaggctgatgagctcctcaatcagggtttccgtgagcagatctacgatgtctaccgatatcttccacccgctacccaggttgtcgtcgtatccgccacgctgccatacgacgtcttggacatgactaccaagttcatgaccgacccagtccgtatcctggtcaagcgtgatgagttgaccctcgaaggtctgaagcagtacttcatcgctgtagagaaggaggactggaagttcgacaccttgtgtgatctctacgataccctaactattacccaggccgtcatcttctgcaacacgagacgaaaggtcgactggttgaccgacaagatgcgcgaagccaacttcactgtcagcagcatgcacggtgacatgcctcagaaggaacgagacagcattatgcaagatttcaggcagggcaacagcagagtgctcatctcaaccgatgtatgggcacgtggtatcgatgttcagcaagtcagcttggtcatcaactacgatcttccaagcaatcgtgagaactacatccaccgcatcggccgtagtgggcgttttggtcgaaagggtgtggctatcaacttcgttactagcgaagatgttcgtattcttcgggatattgagttgtattactctacccagattgacgagatgccgatgaacgtcgccgatctcattgcttaaccaagcagatatatcaggtgcaatgaattgcacgcgcactaatgagaggtccaagcgacaatgtctatggatgagaaatgcaaaggtcacttcaaggcagtgggaggaaaaagggcatgttttttagcaggctgtatctgaaatatactctacgatcgcttccgaccgccgattccgaaatacgatttggagaattgatcgttcttctctgcttacatgctaactgactgaagtgattgacttggaccttcctgtcgctctcaatttgctgcaggcgcgacagcctgtccactttgcatacagttgtgcagctcggagcatagcttacatacagattccatcatgcaacctatcacttcgacatatttgtgtgctcaagcgactttgggcatgacatcggcttctattcagcacaacagcatttactgttcctcgcacgctgtgcctggtgtagcacatacgaggcgccaagtctcacccaatgtcgagaagagaggtaaagaggttgtttcccatgtcttctttccacttcatcactggattattgcaatgggcaatgctctggtacggcgagtgatgtgttcggccccagttccaatgattattggaatgtcggggatatggtgggtaagtatgaagcgtgctcatgtagctttcgtgtataatacgtgaagccctctacttgtctgtgactgttgcattcatctcgaattttcgagtccggacaggtaggtgtaaggaactagcaaactaaaacaccggattagcagcttgtcttgcctaggaacatgatagagatatagcaaacaaagaaacttgatcaaaca

SEQ ID NO: 15989 - DNA, 951 bp, Muscodor strobelii
  misc_feature: SGI cDNA ID NO. 565306
  misc_feature: Encodes the peptide sequence at SEQ ID NO 15990
atggtcgtgctaccaaaaccgataccacccctctacacagtctacatcctgcgctcaaccgtgcaccatgcgtccctatatatcggctcgacgccaaacccgccgcgtcggctgaagcaacataatggagaggcgaagggtggagctgcgaggacgtcgaggagttcgctgaggccgtgggagatgattgggcttgtgtctgggtttcctgggatggtcgctgcgcttaaatttgaatgggcactaaacaactcccacttatccctccacatcccgcagtcatcccgtatatcacactcgacgcagcggaagcgaaacggtgcgccgaaacgcccgcgtcatagtctgtcttccattctgtcgaatgtgcatttactcctatctgtaccgagtttcaagcgttggcctttgaagttacatttttttgcgccggatgcatataagggttgggagaaatggtgcactggtgctggaaatgtgagggagggcgttgatgttgttaccgactttggacccggagatggtgaaccagagagggattggggcatacatgcactacccctagattacgcgccggcgaaagaatatgtccggaagacgaaagagttatatgcttttgagcgagagggaaattgtgtattctgtcatgagaagctagagcctgggaatggactctatgccacgtgctctaatgggggttgtgaagggacgggacatttgacttgttggagtcagagctttctgaaagagggaaagggcgaagacgaagagatcctgccggttgaaggacagtgtcctgagtgtgatgggagggtcacttggggtgagatgatgagggaggtcacgctcagggttcggggacagaaggatgttgatcggttgttgaaagtgagaaggaagaggaaagtcaggactgaagaagaggaggaggaagtcgtagctttggagtga

SEQ ID NO: 15990 - protein, 316 aa, Muscodor strobelii
  misc_feature: SGI Peptide ID NO. 565306
  misc_feature (11)..(96): Pfam Id: PF01541 Pfam Desc: GIY-YIG catalytic domain
  misc_feature (11)..(82): Pfam Id: PF01541 Pfam Desc: GIY-YIG catalytic domain
  misc_feature (1)..(311): NCBI GI: 171693099 Blast Desc: protein product [Podospora anserina] gi|259511446|sp|B2B674.1|SLX1_PODAN RecName: Full=Structure-specific endonuclease subunit SLX1 protein product
  misc_feature (1)..(295): NCBI GI: 116199003 Blast Desc: CHGG_07657 [Chaetomium globosum CBS 148.51] gi|121780905|sp|Q2GWJ7.1|SLX1_CHAGB RecName: Full=Structure-specific endonuclease subunit SLX1 CHGG_07657 CBS
  misc_feature (1)..(303): NCBI GI: 256731560 Blast Desc: NECHADRAFT_49413 [Nectria haematococca mpVI 77-13-4]
  misc_feature (4)..(302): NCBI GI: 259511470 Blast Desc: NECHADRAFT_49413 [Nectria haematococca mpVI 77-13-4]
  misc_feature (1)..(305): NCBI GI: 261359049 Blast Desc: GIY-YIG catalytic domain containing protein [Verticillium albo-atrum VaMs.102]
  misc_feature (3)..(292): NCBI GI: 85103789 Blast Desc: NCU01236 [Neurospora crassa OR74A] gi|74625335|sp|Q9P737.1|SLX1_NEUCR RecName: Full=Structure-specific endonuclease subunit SLX1 conserved
  misc_feature (36)..(302): NCBI GI: 154313021 Blast Desc: BC1G_05512 [Botryotinia fuckeliana B05.10] gi|150849597|gb|EDN24790.1| BC1G_05512 [Botryotinia fuckeliana B05.10]
  misc_feature (7)..(295): NCBI GI: 261202490 Blast Desc: GIY-YIG catalytic domain-containing protein [Ajellomyces dermatitidis SLH14081] gi|239590556|gb|EEQ73137.1| GIY-YIG catalytic domain-containing protein [Ajellomyces
  misc_feature (6)..(300): NCBI GI: 259511442 Blast Desc: SLX1_PARBP RecName: Full=Structure-specific endonuclease subunit SLX1 gi|225683577|gb|EEH21861.1| conserved [Paracoccidioides brasiliensis Pb03]
  misc_feature (7)..(295): NCBI GI: 239612283 Blast Desc: GIY-YIG catalytic domain-containing protein [Ajellomyces dermatitidis ER-3]
MVVLPKPIPPLYTVYILRSTVHHASLYIGSTPNPPRRLKQHNGEAKGGAARTSRSSLRPWEMIGLVSGFPGMVAALKFEWALNNSHLSLHIPQSSRISHSTQRKRNGAPKRPRHSLSSILSNVHLLLSVPSFKRWPLKLHFFAPDAYKGWEKWCTGAGNVREGVDVVTDFGPGDGEPERDWGIHALPLDYAPAKEYVRKTKELYAFEREGNCVFCHEKLEPGNGLYATCSNGGCEGTGHLTCWSQSFLKEGKGEDEEILPVEGQCPECDGRVTWGEMMREVTLRVRGQKDVDRLLKVRRKRKVRTEEEEEEVVALE

SEQ ID NO: 15991 - DNA, 1426 bp, Muscodor strobelii
  misc_feature: SGI EST ID NO. CUFF.37756.0
  misc_feature: Variant of the nucleotide sequence at SEQ ID NO 15989
tgtcgtagatcaacacgacatctttggagtctctcatgaaccatcatctcttcaccttcgggaagcagcaagaaaagtggatgagctagcggcccacctatatgcaggaacaccccaccaaccattctccctgatgtcaacaacgtcgatgcctgtcgcaacttaacatcaacaaatttatatgtggaaacagcacgatatatcattcactatcgcgtaaaataatcgactctagaatgtgatgcaatggcaacagctcaaatacctcttacaacctttctctgcataaagtatccaaagcacccgcatcgttgaagaatctccacgcgcccagtaaacgtcatacataaaatggtcgtgctaccaaaaccgataccacccctctacacagtctacatcctgcgctcaaccgtgcaccatgcgtccctatatatcggctcgacgccaaacccgccgcgtcggctgaagcaacataatggagaggcgaagggtggagctgcgaggacgtcgaggagttcgctgaggccgtgggagatgattgggcttgtgtctgggtttcctgggatggtcgctgcgcttaaatttgaatgggcactaaacaactcccacttatccctccacatcccgcagtcatcccgtatatcacactcgacgcagcggaagcgaaacggtgcgccgaaacgcccgcgtcatagtctgtcttccattctgtcgaatgtgcatttactcctatctgtaccgagtttcaagcgttggcctttgaagttacatttttttgcgccggatgcatataagggttgggagaaatggtgcactggtgctggaaatgtgagggagggcgttgatgttgttaccgactttggacccggagatggtgaaccagagagggattggggcatacatgcactacccctagattacgcgccggcgaaagaatatgtccggaagacgaaagagttatatgcttttgagcgagagggaaattgtgtattctgtcatgagaagctagagcctgggaatggactctatgccacgtgctctaatgggggttgtgaagggacgggacatttgacttgttggagtcagagctttctgaaagagggaaagggcgaagacgaagagatcctgccggttgaaggacagtgtcctgagtgtgatgggagggtcacttggggtgagatgatgagggaggtcacgctcagggttcggggacagaaggatgttgatcggttgttgaaagtgagaaggaagaggaaagtcaggactgaagaagaggaggaggaagtcgtagctttggagtgaagatgggtatcgtgatggatctaaacgtaaacatgagaaagcgagaagagggaagggggcaacgagaagaaacgcagctttacaaaaattaaaaataagtaaaaatgaaaaatgtagtcatttc

SEQ ID NO: 15992 - DNA, 5301 bp, Muscodor strobelii
  misc_feature: SGI cDNA ID NO. 565307
  misc_feature: Reduced expression when VOC is produced
  misc_feature: Encodes the peptide sequence at SEQ ID NO 15993
atgggccccaacccgctcgtcggccagaatgccggcggacccgttaccagtgccaacgggagctctcgcgcctctcccgccactggtcctgccaacgcgagcgcttccacgaacggtgccaaggccaagagccaagccaatggcaatggcatccatccctccaaccctcagctgccgctcagtgccatgcagagcgcccccctagatctacgatccgtcgagcgaagaggccaaccgacagcgagccgcgaacatgtcaaggaaaacaggctgtttggccttcaagacgcacccacgttcagaccgacagaggaggagtttagggatccgttagagtacatccgcaagatcacaccagaggcgcaagcctatggcttatgcaagattatacctccagactcgtggaatccggattttgcgatcgacacccagagatttcacttcagaacccgaaagcaagagctgaactctgtcgaaggcagcacacgtgcaaacctgacgtatctcgatgctctcgccaagtttcacaagcagcaagggacgaatcttaaccggttgccctacgtggataagaagccattggacctcttccgtcttaagaaagctgtggaatctcgagggggatttgacaaggtctgcaagacaaagaaatgggcagagatcgggcgggatctcggctacagcggcaagatcatgtcctctttatcgacctcactgaagaattcatacgagcgatggctcaagccctacgagaactatcttcgacaagcaagacccggtgtctaccaacaactcgaatatgaatatggcggtccactcacacccagcccagccccgagcccgatgaagcgatccaatgtcaacaccccgtccagcttcagagccgaatcacctgctcgacatgccaccgacgccttacaatcaagtttaggaggccagagacaagatgccgatcgtgatattgtcatgaccgatgttcctccgctcgcccccaaacccagtggcgggttcaccgctatcaatacaggtggctttaccgcagtcaatgctggaggatttaccagtgtaaatcgtcccactccaccggaagcgaagagtttcacgccgccgccgagacggcatgacagtccatcttcaaccccgagggagatcagcgagctgcgtgcctctgcccttggtccggccaatgttctcaagcgccagatgagcttcgatagcatcgactctcttcgcaaagacgcgagtgccgacctggacgactcggacaatggcaataggagaagtaagaggatcaagaaagagagtgtgcctaccgttgctggttctcacatgtcgttatttcgcccttcggcacctcgcgctcctcgggatgagtcctcagtaccaggcgagaaatgtgactcctgcggtaagggtgaagaagctgggttcctggccatttgcgaatcttgtgattatggctatcatggctcatgcttagacccaccactgaaggtcaagcctgacggagaatggaactgtccccgatgtctcgttggtgacggccaattcggtttcgaagaaggaggtctatactccctcaagcaattccaggagaaggccgcagaattcaagcaaaactacttcgagaatcgcatgccatacgatgcacttaacaaatgcgcccggccggtgactgaagacgatatcgaacgggaattctggaaactcgttgcaagtatcgaagagacagtggaagttgagtacggcgctgatattcactgtaccacccacggatctgggtttccaaccccggagcggcatccctacaacccgtattccagcgatccgtggaatcttaacaacatgccgctacatcctgatagcctcttccggcacatcaagacggatatctcaggaatgacagtgccgtgggtgtatgtgggcatgatattctctacgttctgttggcataacgaagatcacttcgcatactctgtcaactaccaacatttcggtgccaccaagacttggtacgggatacctgccgaggacactgagaaattcgagaatgccatgcgagaagctgtaccagaactgtttgagacacagcctgatttgttgtttcaacttgtgactctactcacgcctgagcatctgaaaaaggctggtgttcgtgtgtacgcattggaccagcgagcgggccagatggtcatcacgttcccgcaagcgtatcacgcaggtttcaatcatggcttcaacttcaacgaagcagtcaattttgcgccatctgactgggaaccttttggtcttgctggtgttgaacgcttgcaacaattccggagacagtcgtgcttttctcatgatgagcttctctggacagcggcagaaggacccataagtgcactgacaatacagacggcgaaatggctcgctcccgcgctcgagaagatccacaaacgggagcacgagcagcgagaagctttccttgttaagcacctggaaaacaaccagcacacttgtcctttggcgtccgactctactgagcaaccgtgttcgatcttgtttcaaattcaagacgaagatgtatcggaagatgaatatcaatgttcttattgcaaatcgtttgcttatctctcaagatacaaatgtattaaatctgggaaagtattatgtttgttacatgcaggatatcacgcttgttgcgacatgaccgaatcccaacgctttgccggagatcagcattctctgatctatcgcaagacaagagaggaactcgacgagacgtaccggaaggtcgcggagaaggcgaacatgccggaagcgtggcaggagaaatatgacaagttgctcgatgagggaggaacgccagcgctgaagacgctgcgaactctgctcaacgagggcgaacgcatcccgtacgagctcccctccttaccagatctcaggagttttgttgatcggtgtaatgagtgggtcgaagaggcgactaattatacggtgcgcaaacagcagaatcgccgcaagaacgacaagatctggcagagtgggcttcgccgacaaagcggtggcatctggcaggaccacaaggagcgcgagctacggagggtcgataacatctggcgcctgattgaggacgcggaccgcattgggttcgattgcccagagatccaccaattgagagagcggtctgacgccatacggagctttcagaagaacgccgaacaagctctggaacatatccttgtgcataatcaggaatccatcgaggagctcattgaggaaggccgtgtctttaatgttgacattccggagcttgacaagcttaccgcgactctgatgcaaatacgctggagcaataacgcgaaggccagacgcaccgacgttttaaccctggccgaagttcgtgccattttggaagaggctaatcgcctggagattcccatctacaacgatcataggaaatggtataacgacaaataccaggccgccttgcaatgggagaccaaggccaaagaactcatcaatgctgataccattcattatcctcaactggaagcgctctctaaccaagtccaaatcaacgggctcccggtcacaccagaaactctggctgcagtggatcagatccttcataagcaacgcgaagctcatcgacaagtcgttgatcttaccgagcggtcacgtgaggccgattacaccaagcgaccgcgatacagtgaggtttccgaagtgttacgtaaagttgacgagctgaattctaaacctgccgggacgctggatctcgaaaaggaacaaagacgacacgaagactggatgcgaaagggaaaaaagctgttcggcaagacaaatgcccctcttcatatcctcaaaagccacatggattatgttttggaccgcaacgtcgactgcttcgatattgttagtgacaaacctcgaacgccggcggagcccgcgtctagagctgggagtgaggaaccagatcaacaatcatcctcccgcacttgggatgatccaactttccgggaggtgttctgcatttgccgccgcacagaggccggcttgatgattgagtgtgagctgtgccatgagtggtatcatggcaagtgtctgaaaattgctcgtggcaaagtcaaggaagatgataagtacacatgcccaatttgcgattggcgagtcaagatccctcgagatgccgcgcggcccaagctggaggatcttgtcggttggcaagacgagattccctcgctccctttccagccagacgaggaggaggtcctacggaagatcattgataatgcgcaagactttagagctcatgtcagttccatctgcactgcttcagtactgtcgacggcggccgaggccgatacgcaacggttttatctgcggaaaattgaaggtgctgagattctcctatcctacgaaacaaacttcttccgtcaagaactgcacaaatggagcccagtagcacctaccgcaccaccactcttggattcttccaagagcacaaggaaaccgcgccctacgaagctccagaagatgctcattcaatatggtgtcgataacccggacgatctccccgagagcgtgaaaggcaaggctaacagtctgaaacggaaagctatcaatgcagaggccaatgccgccgccgcggcggctgctgctcaatcgtccgcggcctcggcacttatccctcctcagtcaagtccatccacgcactcttttggctccagtggtcacccttttttcaggacttcgcagccctcgacaccgacactgactggaactgcgcacggtcatcctgcggccagtgccggcggttcgtcaaattctagccgacctggttcctcgttacgtcccaactccatggacgagggcattcatcccgacttcttcatgtcaaatggctccagcggccagggcccgcgactcatgccttctgagcaaaatacatctatagaagatcgcattctgcaaggcgaagatgaagatctcattcatgctacaggtgctgatcgtgaaaagatactggagatcctcagcaagactgacactggtcgacgccgtgccgaggatgtatacgggtctgatatatggacttcgagaggcgagaagtctttcgaaaggcgtcattctaccgcggaggaaagccacgcggatgacgacaacgaagtcgataagatgtttcacgatttgacgaatgccgacgaggacgacccggcaaagaaacagagacagcgagaggaggaacagcaacacatcactactgagagcttcgatgcagagcgcaacacgatggacatggaggattccgattaa

SEQ ID NO: 15993 - protein, 1766 aa, Muscodor strobelii
  misc_feature: SGI Peptide ID NO. 565307
  misc_feature (465)..(513): Pfam Id: PF00628 Pfam Desc: PHD-finger
  misc_feature (1338)..(1385): Pfam Id: PF00628 Pfam Desc: PHD-finger
  misc_feature (159)..(270): Pfam Id: PF01388 Pfam Desc: ARID/BRIGHT DNA binding domain
  misc_feature (638)..(754): Pfam Id: PF02373 Pfam Desc: JmjC domain
  misc_feature (98)..(142): Pfam Id: PF02375 Pfam Desc: jmjN domain
  misc_feature (934)..(1284): Pfam Id: PF08429 Pfam Desc: PLU-1-like protein
  misc_feature (863)..(923): Pfam Id: PF02928 Pfam Desc: C5HC2 zinc finger
  misc_feature (159)..(255): Pfam Id: PF01388 Pfam Desc: ARID/BRIGHT DNA binding domain
  misc_feature (10)..(1736): NCBI GI: 171693097 Blast Desc: protein product [Podospora anserina] gi|170946497|emb|CAP73298.1| protein product [Podospora anserina]
  misc_feature (11)..(1653): NCBI GI: 85103796 Blast Desc: NCU01238 [Neurospora crassa OR74A] gi|16944479|emb|CAC28652.2| related to regulator protein rum1 [Neurospora crassa] gi|28923151|gb|EAA32368.1| NCU01238 crassa
  misc_feature (15)..(1611): NCBI GI: 156062722 Blast Desc: SS1G_01477 [Sclerotinia sclerotiorum 1980] gi|154696813|gb|EDN96551.1| SS1G_01477 [Sclerotinia sclerotiorum 1980]
  misc_feature (40)..(1761): NCBI GI: 256731559 Blast Desc: jumonji superfamily protein [Nectria haematococca mpVI 77-13-4]
  misc_feature (87)..(1728): NCBI GI: 116198999 Blast Desc: CHGG_07655 [Chaetomium globosum CBS 148.51] gi|88178934|gb|EAQ86402.1| CHGG_07655 [Chaetomium globosum CBS 148.51]
  misc_feature (5)..(1761): NCBI GI: 46122955 Blast Desc: FG05855.1 [Gibberella zeae PH-1]
  misc_feature (15)..(1616): NCBI GI: 154313017 Blast Desc: BC1G_05510 [Botryotinia fuckeliana B05.10] gi|150849595|gb|EDN24788.1| BC1G_05510 [Botryotinia fuckeliana B05.10]
  misc_feature (26)..(1687): NCBI GI: 239612284 Blast Desc: PHD transcription factor [Ajellomyces dermatitidis ER-3]
  misc_feature (26)..(1597): NCBI GI: 225557100 Blast Desc: conserved [Ajellomyces capsulatus G186AR]
  misc_feature (24)..(1635): NCBI GI: 242792103 Blast Desc: PHD transcription factor (Rum1), [Talaromyces stipitatus ATCC 10500] gi|218718473|gb|EED17893.1| PHD transcription factor (Rum1), [Talaromyces stipitatus ATCC 10500]
  misc_feature: Useful for introducing or modulating the production of volatile compounds
MGPNPLVGQNAGGPVTSANGSSRASPATGPANASASTNGAKAKSQANGNGIHPSNPQLPLSAMQSAPLDLRSVERRGQPTASREHVKENRLFGLQDAPTFRPTEEEFRDPLEYIRKITPEAQAYGLCKIIPPDSWNPDFAIDTQRFHFRTRKQELNSVEGSTRANLTYLDALAKFHKQQGTNLNRLPYVDKKPLDLFRLKKAVESRGGFDKVCKTKKWAEIGRDLGYSGKIMSSLSTSLKNSYERWLKPYENYLRQARPGVYQQLEYEYGGPLTPSPAPSPMKRSNVNTPSSFRAESPARHATDALQSSLGGQRQDADRDIVMTDVPPLAPKPSGGFTAINTGGFTAVNAGGFTSVNRPTPPEAKSFTPPPRRHDSPSSTPREISELRASALGPANVLKRQMSFDSIDSLRKDASADLDDSDNGNRRSKRIKKESVPTVAGSHMSLFRPSAPRAPRDESSVPGEKCDSCGKGEEAGFLAICESCDYGYHGSCLDPPLKVKPDGEWNCPRCLVGDGQFGFEEGGLYSLKQFQEKAAEFKQNYFENRMPYDALNKCARPVTEDDIEREFWKLVASIEETVEVEYGADIHCTTHGSGFPTPERHPYNPYSSDPWNLNNMPLHPDSLFRHIKTDISGMTVPWVYVGMIFSTFCWHNEDHFAYSVNYQHFGATKTWYGIPAEDTEKFENAMREAVPELFETQPDLLFQLVTLLTPEHLKKAGVRVYALDQRAGQMVITFPQAYHAGFNHGFNFNEAVNFAPSDWEPFGLAGVERLQQFRRQSCFSHDELLWTAAEGPISALTIQTAKWLAPALEKIHKREHEQREAFLVKHLENNQHTCPLASDSTEQPCSILFQIQDEDVSEDEYQCSYCKSFAYLSRYKCIKSGKVLCLLHAGYHACCDMTESQRFAGDQHSLIYRKTREELDETYRKVAEKANMPEAWQEKYDKLLDEGGTPALKTLRTLLNEGERIPYELPSLPDLRSFVDRCNEWVEEATNYTVRKQQNRRKNDKIWQSGLRRQSGGIWQDHKERELRRVDNIWRLIEDADRIGFDCPEIHQLRERSDAIRSFQKNAEQALEHILVHNQESIEELIEEGRVFNVDIPELDKLTATLMQIRWSNNAKARRTDVLTLAEVRAILEEANRLEIPIYNDHRKWYNDKYQAALQWETKAKELINADTIHYPQLEALSNQVQINGLPVTPETLAAVDQILHKQREAHRQVVDLTERSREADYTKRPRYSEVSEVLRKVDELNSKPAGTLDLEKEQRRHEDWMRKGKKLFGKTNAPLHILKSHMDYVLDRNVDCFDIVSDKPRTPAEPASRAGSEEPDQQSSSRTWDDPTFREVFCICRRTEAGLMIECELCHEWYHGKCLKIARGKVKEDDKYTCPICDWRVKIPRDAARPKLEDLVGWQDEIPSLPFQPDEEEVLRKIIDNAQDFRAHVSSICTASVLSTAAEADTQRFYLRKIEGAEILLSYETNFFRQELHKWSPVAPTAPPLLDSSKSTRKPRPTKLQKMLIQYGVDNPDDLPESVKGKANSLKRKAINAEANAAAAAAAAQSSAASALIPPQSSPSTHSFGSSGHPFFRTSQPSTPTLTGTAHGHPAASAGGSSNSSRPGSSLRPNSMDEGIHPDFFMSNGSSGQGPRLMPSEQNTSIEDRILQGEDEDLIHATGADREKILEILSKTDTGRRRAEDVYGSDIWTSRGEKSFERRHSTAEESHADDDNEVDKMFHDLTNADEDDPAKKQRQREEEQQHITTESFDAERNTMDMEDSD

SEQ ID NO: 15994 - DNA, 8615 bp, Muscodor strobelii
  misc_feature: SGI EST ID NO. CUFF.38067.0
  misc_feature: Variant of the nucleotide sequence at SEQ ID NO 15992
catgtgcgaaaattgtttgattgaaattgcaatcggggccgaggaaaatttcgtcttatgcatcatgactgtatacgatggcactgagtgctgattttttgttatttagaagtttgtaaaagggagtgcctggacaagcatgtgctcggaagcggacccttatgaatcagatcaacagggacaatcccagcctgaagccgtatcgatatttatgcatcgctcgctttccatactcttgagaattatcgcaaaaactgataatgagattcctgattgtatttgagactgctattgtctgttgacgagctttctatgacgaaagttcccctctcgaccaatgcgcggggacgactccggaaagtgttgtgggagaagtggataagtgaggtttgcgccggcccactgttggctctccacgcagactctcagcaggtgccatgctgcccacaatagaacccctgtcggccacaagttccgacgacattccacggtgcaccgtagcgtcgaggggcgccgtaatggacgacacccactggagaatgcgactacatctggccgtgcgcgacaggtgactgcaacggcgcattccgtttccgtcctgcgggacagtcgcaacatacacctcattcccctcaactagtcggattttgttgcttagccatttctgtgtaccatctgcaggaagcaatatcatttatatgtgaaataggggccttaagtaatgctcaatctaggatgccaaacaattgacgcgtggtcgtgccgatattttggatcgtactagcgcattaacttatatcccatgtcatactcggcggtgattgacgaagacttatgtatcttcacgtgagattttcatggcatgcgcaacgatcactatacagccaagccgcgatgtgacattccaatgtcagatggaagtcgaggatcaatgtttcaatgtacgttatttgctctccgagtggtctatctacctctactgcggcggatgattgataaccccaatgcaaggattccgtagatcgtggcgggataaaaaaagaaaacagaaggcagggccgaggacagatgagacaagcttgatgattgaaatgaagtcaggcaaaagcagcctcaaagtgacgcatagaccacccagggcaacgacacatcgcatggccctagggcgaaaaggccaataaggttggggctgctgcattcacacccactatagtctgcacaatagcacacacattgcacccactgcatccagacgagccagatgttactcaatgagggcggtctcaggaagagcctattgccaggtcatgtaatgtgacgtgaatagaagttaggggcggccaaagtcgacgagtttagcagtgcagcaggcagctggaggctctacttagtgcagcacacaagttccatttggctcaagctggcctctctggcagcagggcggccggttcgctacccacacccttggcccattcgggcaaagtagctcgcccatcgacttgttcgcccactccccggttgcatgtcccatcgtctttctctctctccctgtccccaatatcgacaatattcgatcccgtcgagatatctctcgatttcccttcattctcacctcacccgcccaccgccaatctcacactcaccacacacccattctccaccccggccgtacttaattcgtaactctaattctcacatttcacatttcacatcctgccacggctgagatcggttctcgtcgtcgatatactctctccctctctgacgttgctcacggctcaatatcaaagtaatagcatttgatgtccactcgtcccatgggcgtcgagtgcattgggggaactgggacgactcaccgatactatcctcgccgtcatccgatcacatcaacggaactcatcaagccgaagacggctcatctgttcaactcgcctgcctcactgtcctgaatgtcctgctgaacccgccagccctgtcgtatatcacgggcttttgatacattgtgtgcacctgtaggctgcgcatgggatccattgagagccttgaccattcatcatcgccgccgataggactgtatagaggacattgtacttcactgtcgactgtagacgggcatatcaggatcgccactgtcgagactccacactgcgcattcgatactaagggaggtgtctagcacgctgtcgcctgagtacgattcactgccatgtacgacgtgtgaaagggttccatcgatccagccgagattggagcgtgtgccgctcccaaccccacgacgtcagcgcgcaaactgtttaccgatccactcttccacgaactatttcccgatcgcctcgacataggccatgggccccaacccgctcgtcggccagaatgccggcggacccgttaccagtgccaacgggagctctcgcgcctctcccgccactggtcctgccaacgcgagcgcttccacgaacggtgccaaggccaagagccaagccaatggcaatggcatccatccctccaaccctcagctgccgctcagtgccatgcagagcgcccccctagatctacgatccgtcgagcgaagaggccaaccgacagcgagccgcgaacatgtcaaggaaaacaggctgtttggccttcaagacgcacccacgttcagaccgacagaggaggagtttagggatccgttagagtacatccgcaagatcacaccagaggcgcaagcctatggcttatgcaagattatacctccagactcgtggaatccggattttgcgatcgacacccagagatttcacttcagaacccgaaagcaagagctgaactctgtcgaaggcagcacacgtgcaaacctgacgtatctcgatgctctcgccaagtttcacaagcagcaagggacgaatcttaaccggttgccctacgtggataagaagccattggacctcttccgtcttaagaaagctgtggaatctcgagggggatttgacaaggtctgcaagacaaagaaatgggcagagatcgggcgggatctcggctacagcggcaagatcatgtcctctttatcgacctcactgaagaattcatacgagcgatggctcaagccctacgagaactatcttcgacaagcaagacccggtgtctaccaacaactcgaatatgaatatggcggtccactcacacccagcccagccccgagcccgatgaagcgatccaatgtcaacaccccgtccagcttcagagccgaatcacctgctcgacatgccaccgacgccttacaatcaagtttaggaggccagagacaagatgccgatcgtgatattgtcatgaccgatgttcctccgctcgcccccaaacccagtggcgggttcaccgctatcaatacaggtggctttaccgcagtcaatgctggaggatttaccagtgtaaatcgtcccactccaccggaagcgaagagtttcacgccgccgccgagacggcatgacagtccatcttcaaccccgagggagatcagcgagctgcgtgcctctgcccttggtccggccaatgttctcaagcgccagatgagcttcgatagcatcgactctcttcgcaaagacgcgagtgccgacctggacgactcggacaatggcaataggagaagtaagaggatcaagaaagagagtgtgcctaccgttgctggttctcacatgtcgttatttcgcccttcggcacctcgcgctcctcgggatgagtcctcagtaccaggcgagaaatgtgactcctgcggtaagggtgaagaagctgggttcctggccatttgcgaatcttgtgattatggctatcatggctcatgcttagacccaccactgaaggtcaagcctgacggagaatggaactgtccccgatgtctcgttggtgacggccaattcggtttcgaagaaggaggtctatactccctcaagcaattccaggagaaggccgcagaattcaagcaaaactacttcgagaatcgcatgccatacgatgcacttaacaaatgcgcccggccggtgactgaagacgatatcgaacgggaattctggaaactcgttgcaagtatcgaagagacagtggaagttgagtacggcgctgatattcactgtaccacccacggatctgggtttccaaccccggagcggcatccctacaacccgtattccagcgatccgtggaatcttaacaacatgccgctacatcctgatagcctcttccggcacatcaagacggatatctcaggaatgacagtgccgtgggtgtatgtgggcatgatattctctacgttctgttggcataacgaagatcacttcgcatactctgtcaactaccaacatttcggtgccaccaagacttggtacgggatacctgccgaggacactgagaaattcgagaatgccatgcgagaagctgtaccagaactgtttgagacacagcctgatttgttgtttcaacttgtgactctactcacgcctgagcatctgaaaaaggctggtgttcgtgtgtacgcattggaccagcgagcgggccagatggtcatcacgttcccgcaagcgtatcacgcaggtttcaatcatggcttcaacttcaacgaagcagtcaattttgcgccatctgactgggaaccttttggtcttgctggtgttgaacgcttgcaacaattccggagacagtcgtgcttttctcatgatgagcttctctggacagcggcagaaggacccataagtgcactgacaatacagacggcgaaatggctcgctcccgcgctcgagaagatccacaaacgggagcacgagcagcgagaagctttccttgttaagcacctggaaaacaaccagcacacttgtcctttggcgtccgactctactgagcaaccgtgttcgatcttgtttcaaattcaagacgaagatgtatcggaagatgaatatcaatgttcttattgcaaatcgtttgcttatctctcaagatacaaatgtattaaatctgggaaagtattatgtttgttacatgcaggatatcacgcttgttgcgacatgaccgaatcccaacgctttgccggagatcagcattctctgatctatcgcaagacaagagaggaactcgacgagacgtaccggaaggtcgcggagaaggcgaacatgccggaagcgtggcaggagaaatatgacaagttgctcgatgagggaggaacgccagcgctgaagacgctgcgaactctgctcaacgagggcgaacgcatcccgtacgagctcccctccttaccagatctcaggagttttgttgatcggtgtaatgagtgggtcgaagaggcgactaattatacggtgcgcaaacagcagaatcgccgcaagaacgacaagatctggcagagtgggcttcgccgacaaagcggtggcatctggcaggaccacaaggagcgcgagctacggagggtcgataacatctggcgcctgattgaggacgcggaccgcattgggttcgattgcccagagatccaccaattgagagagcggtctgacgccatacggagctttcagaagaacgccgaacaagctctggaacatatccttgtgcataatcaggaatccatcgaggagctcattgaggaaggccgtgtctttaatgttgacattccggagcttgacaagcttaccgcgactctgatgcaaatacgctggagcaataacgcgaaggccagacgcaccgacgttttaaccctggccgaagttcgtgccattttggaagaggctaatcgcctggagattcccatctacaacgatcataggaaatggtataacgacaaataccaggccgccttgcaatgggagaccaaggccaaagaactcatcaatgctgataccattcattatcctcaactggaagcgctctctaaccaagtccaaatcaacgggctcccggtcacaccagaaactctggctgcagtggatcagatccttcataagcaacgcgaagctcatcgacaagtcgttgatcttaccgagcggtcacgtgaggccgattacaccaagcgaccgcgatacagtgaggtttccgaagtgttacgtaaagttgacgagctgaattctaaacctgccgggacgctggatctcgaaaaggaacaaagacgacacgaagactggatgcgaaagggaaaaaagctgttcggcaagacaaatgcccctcttcatatcctcaaaagccacatggattatgttttggaccgcaacgtcgactgcttcgatattgttagtgacaaacctcgaacgccggcggagcccgcgtctagagctgggagtgaggaaccagatcaacaatcatcctcccgcacttgggatgatccaactttccgggaggtgttctgcatttgccgccgcacagaggccggcttgatgattgagtgtgagctgtgccatgagtggtatcatggcaagtgtctgaaaattgctcgtggcaaagtcaaggaagatgataagtacacatgcccaatttgcgattggcgagtcaagatccctcgagatgccgcgcggcccaagctggaggatcttgtcggttggcaagacgagattccctcgctccctttccagccagacgaggaggaggtcctacggaagatcattgataatgcgcaagactttagagctcatgtcagttccatctgcactgcttcagtactgtcgacggcggccgaggccgatacgcaacggttttatctgcggaaaattgaaggtgctgagattctcctatcctacgaaacaaacttcttccgtcaagaactgcacaaatggagcccagtagcacctaccgcaccaccactcttggattcttccaagagcacaaggaaaccgcgccctacgaagctccagaagatgctcattcaatatggtgtcgataacccggacgatctccccgagagcgtgaaaggcaaggctaacagtctgaaacggaaagctatcaatgcagaggccaatgccgccgccgcggcggctgctgctcaatcgtccgcggcctcggcacttatccctcctcagtcaagtccatccacgcactcttttggctccagtggtcacccttttttcaggacttcgcagccctcgacaccgacactgactggaactgcgcacggtcatcctgcggccagtgccggcggttcgtcaaattctagccgacctggttcctcgttacgtcccaactccatggacgagggcattcatcccgacttcttcatgtcaaatggctccagcggccagggcccgcgactcatgccttctgagcaaaatacatctatagaagatcgcattctgcaaggcgaagatgaagatctcattcatgctacaggtgctgatcgtgaaaagatactggagatcctcagcaagactgacactggtcgacgccgtgccgaggatgtatacgggtctgatatatggacttcgagaggcgagaagtctttcgaaaggcgtcattctaccgcggaggaaagccacgcggatgacgacaacgaagtcgataagatgtttcacgatttgacgaatgccgacgaggacgacccggcaaagaaacagagacagcgagaggaggaacagcaacacatcactactgagagcttcgatgcagagcgcaacacgatggacatggaggattccgattaagcgaggtgtggagatttgtgttgtaattctatgcggctttatcatgtgaaaaaaacagaggaatggcgtctaaacaaacaaggctgggatggggctgcattagatggggcgttgtttcttttatcaggtttcggaaacctctcggtagcctgctgattgaccggctagctgactgactgactgagtggattgtatgtgtatgatatgatatggggatctatgatgggtatgaatggtgttggtgtgttgcgtttaattagatggtctacgtatacttatacctgatacctgatacctgatacctcattgtttatcctttgagttttggacttggttttttagaattgagtgtggtgatgatgtgagagaggctgtgatgagttgctttggtcatgtggtatgtgtttcgtttcgtcctaggtgtgttgtaggaagtaagatgttgagtgatgggtggctcggaatgaccttcgtatttggagacttgtaggagagatttggtatgctctgtggagtatgatgtagggggttaggtgtgtgtatcggagtttgtatttgttgaattacttggtaggtactgtgaaagttatgagggttttgatacccgtgagttatcgtgtatggtgtttttgaaaggttatatgattatttgtctttacgctctgtgagattggataagtatggcgtgtgatgatgagattgcgacttggaggggcttgttagattgaggggttggtgcttatcagttgttgagatttgggtttgaattggaacactacgattttgaagttaggctgttggggggcggttgtttggattttgaagctgacgtgagggtaggtcgctagatattaggtgtgtgaggtgatgagtgcgtaatgtgctagtctgagtctttaacagtactggactcctccgatcggggacgttaacttgagtttcttgttgtgggtggcgcgtgtgtcgttg

SEQ ID NO: 15995 - DNA, 2409 bp, Muscodor strobelii
  misc_feature: SGI cDNA ID NO. 565308
  misc_feature: Encodes the peptide sequence at SEQ ID NO 15996
atgaagtcaatgaaggaatcagtactgacggtctgcggattgatgggtctttgtaatgcaaagcagctctggtcgaggaatccagcggagtttggctcgagtgattccaatgcgtatatcctcaagactggatatcttcttggaaatggcaaactaggcgtcatcccattcggtccaccaggcgcagagaaaataaatctcaatgtcgactcgttatggtcaggcgggccgttcgaaatatctaattacaccggcggtaatccatcagcgcctgtttacgatgcattaccggacattcgctcttacattttcgagaatggaactggggaaatggatgccctccttggcactggcgctaattatggttcgaaccgtgtccttggaaacatcactgtctccatctcggacattgaatcttatacggattacaagagaagccttgacttgacgacaggagttcatacgaccgtctttacatcgggtgatgctaattttacaagcaatatactgtgttcataccccgatcaagtatgtttgtataatatccagtcgacgagccaactgcctacaattacgattggattggaagatctcctggacgctccgaatttgaccaccattgcgtgttcaggtggctcaactacaatcaccggctatacacaactggggccgcctcgtggcatgaaattttatgctgtcgctaagcccttaggcggactcaatacgacttcctgctcgactcaaggaaagctgatcgtgtcttcaaatgctggaaagaaatcacagacaatcatcattgcggctggaacagattacgatcagaccaagggtaacgctgagaacaacttcagcttccgaggcgaagatccggttccggttgttgacgcaactgtgtcgcaggcaactagaaagacttatgagaaactactgtcagctcacatacgtgattaccaagctcttcaaggtgctttcagtctcgacctaccggatatcgacaactcgtcgttagtagagacggcaattgccatttcgagttacaattggaatgatactgccggggacccatttgtcgaatcactactcttcgattactcgcgtcatcttctcatttcatcatcccgcgacaactccttaccagcgaatttggcaggacgatggacggagcttttatcctctgcttggagtgctgattatcacactaacatcaatattcaaatgaactactgggcagcagagcaaaccggattgtgggccacagaagatgctctttggaattacatgcaagacacctgggttcctcgtggcacggaaactgctcagctactgtataatggtagtggttgggttgttcataatgagattaatatctttggtcatacagcgatgaaggaggatgctctttgggctgattaccctgccgctgccgcgtggatgatgcaacatgtgtgggaccacttcgactatacccaagacaccacctggttcaaagcccaggggtatccgctcatcaaaggcattgcacagttctggttatcacaactacaagacgacgagttctttgatgacggcactctagtagctaacccctgtaatagccctgaaactggtccaacgactttcggttgtgctcattatcaacaactcattcatcaagtctttgactccgctctagcaggtgcgagtctagttggtgaagcagacgaagaattccttgatgatgtgaccgcgagcctggaaaagctcgataaagggatccatttcacagactggggcggcatcaaggaatggaaaatgccagattcttacggattcgacgttcagagcactcatcgccatctatcgcatctcgtagggtggtatcccggatactctatgtcatcttacgcagacggttacaccaactcgacgcttcagtctgcagtcgagactactttgatctcccgtggcttaggagacggcgcagacgcaaacgctggttgggagaaagtgtggcgcgccgcttgctgggcaagacttaataatacagagatggcttataaggaactgcgctttgccattgatgcaaattttgctgataatgggctgagcatgtactccgcgacgaacccaccatttcaaatcgatgcaaattttgggcttgcaggagcgatgctcagcatgctcgtagtcgacttaccgcttccgtataattccaaagctggggagaggatcgtcgtcttgggtcctgctattccggcttcttgggctaatggaagtgtgactgggttgaagattcggggtggtgcttcggttaacttcaaatgggattcggaggggatagtgacggaggcgtctccgactgcgtcgaccgttgcgggacgaagaatcgttttcgtaaatgtccaaggagagaaactggctgagatatga

SEQ ID NO: 15996 - protein, 802 aa, Muscodor strobelii
  misc_feature: SGI Peptide ID NO. 565308
  misc_feature (482)..(512): Pfam Id: PF03632 Pfam Desc: Glycosyl hydrolase family 65 central catalytic domain
  misc_feature (4)..(802): NCBI GI: 67902324 Blast Desc: AN8149.2 [Aspergillus nidulans FGSC A4] gi|40739981|gb|EAA59171.1| AN8149.2 [Aspergillus nidulans FGSC A4] gi|95025957|gb|ABF50892.1| alpha-fucosidase [Emericella TPA:
  misc_feature (8)..(802): NCBI GI: 46140003 Blast Desc: FG11516.1 [Gibberella zeae PH-1]
  misc_feature (1)..(801): NCBI GI: 256721342 Blast Desc: NECHADRAFT_122680 [Nectria haematococca mpVI 77-13-4]
  misc_feature (9)..(799): NCBI GI: 238482581 Blast Desc: alpha-L-fucosidase 2 precursor, [Aspergillus flavus NRRL3357] gi|220700579|gb|EED56917.1| alpha-L-fucosidase 2 precursor, [Aspergillus flavus NRRL3357]
  misc_feature (18)..(801): NCBI GI: 189208288 Blast Desc: alpha-fucosidase [Pyrenophora tritici-repentis Pt-1C-BFP] gi|187976570|gb|EDU43196.1| alpha-fucosidase [Pyrenophora tritici-repentis Pt-1C-BFP]
  misc_feature (7)..(800): NCBI GI: 154305361 Blast Desc: BC1G_08975 [Botryotinia fuckeliana B05.10] gi|150853717|gb|EDN28909.1| BC1G_08975 [Botryotinia fuckeliana B05.10]
  misc_feature (7)..(799): NCBI GI: 156041112 Blast Desc: SS1G_11535 [Sclerotinia sclerotiorum 1980] gi|154695918|gb|EDN95656.1| SS1G_11535 [Sclerotinia sclerotiorum 1980]
  misc_feature (7)..(774): NCBI GI: 145252152 Blast Desc: An16g02760 [Aspergillus niger] gi|134083134|emb|CAK48586.1| protein product [Aspergillus niger]
  misc_feature (20)..(792): NCBI GI: 115384756 Blast Desc: conserved [Aspergillus terreus NIH2624] gi|114196617|gb|EAU38317.1| conserved [Aspergillus terreus NIH2624]
  misc_feature (94)..(799): NCBI GI: 169765966 Blast Desc: [Aspergillus oryzae RIB40] gi|83765309|dbj|BAE55452.1| protein product [Aspergillus oryzae]
  misc_feature (47)..(794): SWISSPROT Homolog: EC 3.2.1.51 Alpha-L-fucosidase
MKSMKESVLTVCGLMGLCNAKQLWSRNPAEFGSSDSNAYILKTGYLLGNGKLGVIPFGPPGAEKINLNVDSLWSGGPFEISNYTGGNPSAPVYDALPDIRSYIFENGTGEMDALLGTGANYGSNRVLGNITVSISDIESYTDYKRSLDLTTGVHTTVFTSGDANFTSNILCSYPDQVCLYNIQSTSQLPTITIGLEDLLDAPNLTTIACSGGSTTITGYTQLGPPRGMKFYAVAKPLGGLNTTSCSTQGKLIVSSNAGKKSQTIIIAAGTDYDQTKGNAENNFSFRGEDPVPVVDATVSQATRKTYEKLLSAHIRDYQALQGAFSLDLPDIDNSSLVETAIAISSYNWNDTAGDPFVESLLFDYSRHLLISSSRDNSLPANLAGRWTELLSSAWSADYHTNINIQMNYWAAEQTGLWATEDALWNYMQDTWVPRGTETAQLLYNGSGWVVHNEINIFGHTAMKEDALWADYPAAAAWMMQHVWDHFDYTQDTTWFKAQGYPLIKGIAQFWLSQLQDDEFFDDGTLVANPCNSPETGPTTFGCAHYQQLIHQVFDSALAGASLVGEADEEFLDDVTASLEKLDKGIHFTDWGGIKEWKMPDSYGFDVQSTHRHLSHLVGWYPGYSMSSYADGYTNSTLQSAVETTLISRGLGDGADANAGWEKVWRAACWARLNNTEMAYKELRFAIDANFADNGLSMYSATNPPFQIDANFGLAGAMLSMLVVDLPLPYNSKAGERIVVLGPAIPASWANGSVTGLKIRGGASVNFKWDSEGIVTEASPTASTVAGRRIVFVNVQGEKLAEI

SEQ ID NO: 15997 - DNA, 331 bp, Muscodor strobelii
  misc_feature: SGI EST ID NO. CUFF.37777.0
  misc_feature: Variant of the nucleotide sequence at SEQ ID NO 15995
ggaaactgctcagctactgtataatggtagtggttgggttgttcataatgagattaatatctttggtcatacagcgatgaaggaggatgctctttgggctgattaccctgccgctgccgcgtggatgatgcaacatgtgtgggaccacttcgactatacccaagacaccacctggttcaaagcccaggggtatccgctcatcaaaggcattgcacagttctggttatcacaactacaagacgacgagttctttgatgacggcactctagtagctaacccctgtaatagccctgaaactggtccaacgactttcggttgtgctcattatcaa

SEQ ID NO: 15998 - DNA, 1284 bp, Muscodor strobelii
  misc_feature: SGI cDNA ID NO. 565309
  misc_feature: Encodes the peptide sequence at SEQ ID NO 15999
atgctgttcatcttatccgcagctgcccacctgagggcctcggccagaaccgtcacgaacccttggcagcagacgtcaccctccccgagcacaggctccacccacctctcaaggggtccggccggtcttacattagccagactattgcagaaggccaacattcactgtattctatttgagggctcgcctaatcgttcaagtcgcgatcaaggcgggtcgcttgacctgcacgaggacgctggtctattggctctcagagatgctggcctttatgaggagttcatcaagtacgcgagacctgaaggtgaagtcttacacattgtatcggacgatggtcaggttctcatggatgagggtggaggccacggagaccagcgaccacgtgagctacaaggccgaccagaaatcaatcgattgcatcttctacagatccttgacgcctcactcgaggtcgggtcaatgaaatggggtcacagtctagtgtctgtcgaggagcaatccaacagaagtggacctccgcttaagctcacatttggcaacgggagcatcgagtatttcgacttagtcattggggctgatggagcgtggtcggtgatccggcctgtgctcaccgatcagaagcccttttatacgggaatcgctggtctcgacgtgcagatctcagactccgagacccgtttccctcgcctctcagagagatgcggaaacggaacatgtctgactgtgggcaaggacaaagccctcatctgtcagaagaatagcggcggcgtgattcgcacgtatgccttcatgcgtcttgacaaagcttgggaaaaggaatttgacatgacgaatgtaaagaccgccatccttgaattcgtcacaaatcactacaatgagtgggaacaggacgccaaggatatgattctccaggccgacattgagacagctactaagcgttctatctgggcactgccggttggcatgtcatggaagagccatccacgaatgactattattggtgatgcggcacacctcatgtcaccatttgctggagctggagtcaatgtggcaatgcaagacgctctcgtattggctaagaatatcacccaatcgctgcgcacggacgacaatgtcgggggtatcgcagaggcgatagccaggtacgaagtagagatggtccccagagcccaaaagtccgctgaacagagctcaatgtacctcaatctactgttcagccaaagaggtgccgtgtccttggtggaggttttcgacaaaatgcggcaggcggaatccaacgcctag

SEQ ID NO: 15999 - protein, 427 aa, Muscodor strobelii
  misc_feature: SGI Peptide ID NO. 565309
  misc_feature (39)..(397): Pfam Id: PF01494 Pfam Desc: FAD binding domain
  misc_feature (332)..(360): Pfam Id: PF01494 Pfam Desc: FAD binding domain
  misc_feature (39)..(422): NCBI GI: 145241462 Blast Desc: An09g00530 [Aspergillus niger] gi|134077915|emb|CAL00313.1| protein product [Aspergillus niger]
  misc_feature (39)..(426): NCBI GI: 154309097 Blast Desc: BC1G_07443 [Botryotinia fuckeliana B05.10] gi|150852486|gb|EDN27678.1| BC1G_07443 [Botryotinia fuckeliana B05.10]
  misc_feature (39)..(424): NCBI GI: 156049711 Blast Desc: SS1G_08562 [Sclerotinia sclerotiorum 1980] gi|154692961|gb|EDN92699.1| SS1G_08562 [Sclerotinia sclerotiorum 1980]
  misc_feature (39)..(413): NCBI GI: 170106989 Blast Desc: [Laccaria bicolor S238N-H82] gi|164640267|gb|EDR04533.1| [Laccaria bicolor S238N-H82]
  misc_feature (39)..(409): NCBI GI: 242811478 Blast Desc: monooxygenase, [Talaromyces stipitatus ATCC 10500] gi|218714096|gb|EED13519.1| monooxygenase, [Talaromyces stipitatus ATCC 10500]
  misc_feature (39)..(422): NCBI GI: 154312037 Blast Desc: BC1G_06052 [Botryotinia fuckeliana B05.10] gi|150850702|gb|EDN25895.1| BC1G_06052 [Botryotinia fuckeliana B05.10]
  misc_feature (39)..(409): NCBI GI: 156060047 Blast Desc: SS1G_02161 [Sclerotinia sclerotiorum 1980] gi|154699570|gb|EDN99308.1| SS1G_02161 [Sclerotinia sclerotiorum 1980]
  misc_feature (25)..(405): NCBI GI: 145605577 Blast Desc: MGG_09171 [Magnaporthe grisea 70-15] gi|145013394|gb|EDJ98035.1| MGG_09171 [Magnaporthe grisea 70-15]
  misc_feature (25)..(424): NCBI GI: 148554358 Blast Desc: monooxygenase, FAD-binding [Sphingomonas wittichii RW1] gi|148499548|gb|ABQ67802.1| monooxygenase, FAD-binding [Sphingomonas wittichii RW1]
  misc_feature (39)..(424): NCBI GI: 229011854 Blast Desc: Monooxygenase FAD-binding [Bacillus mycoides DSM 2048] gi|228749485|gb|EEL99329.1| Monooxygenase FAD-binding [Bacillus mycoides DSM 2048]
  misc_feature (132)..(400): SWISSPROT Homolog: EC 1.14.13.1 Salicylate 1-monooxygenase
MLFILSAAAHLRASARTVTNPWQQTSPSPSTGSTHLSRGPAGLTLARLLQKANIHCILFEGSPNRSSRDQGGSLDLHEDAGLLALRDAGLYEEFIKYARPEGEVLHIVSDDGQVLMDEGGGHGDQRPRELQGRPEINRLHLLQILDASLEVGSMKWGHSLVSVEEQSNRSGPPLKLTFGNGSIEYFDLVIGADGAWSVIRPVLTDQKPFYTGIAGLDVQISDSETRFPRLSERCGNGTCLTVGKDKALICQKNSGGVIRTYAFMRLDKAWEKEFDMTNVKTAILEFVTNHYNEWEQDAKDMILQADIETATKRSIWALPVGMSWKSHPRMTIIGDAAHLMSPFAGAGVNVAMQDALVLAKNITQSLRTDDNVGGIAEAIARYEVEMVPRAQKSAEQSSMYLNLLFSQRGAVSLVEVFDKMRQAESNA

SEQ ID NO: 16000 - DNA, 1386 bp, Muscodor strobelii
  misc_feature: SGI cDNA ID NO. 565310
  misc_feature: Encodes the peptide sequence at SEQ ID NO 16001
atgggtatcgcctcactctttgttcttgcgttgttgctattccattggacaccgcacgggatagtacatgtgagccagaagggtgcgccatgttcaggtctacaggccttcacatggacccaaggaaaggaaaagtggcaggaaagctgcatcaagcatcaaatagttgcaagcggagattcgacgtccctctctggacttgaatccgctgacgtggcggtactcgtctcgccacattacgatatttcttgtttccagtgcaaagactaccctcgatcctggttcgacttcgttcccctatggtgggagcctgcaatcattgacagtaacggcgcctttcatcacattgatgaatatgacaaggaaggcaagttgactgcaaaaggaacatgggttaagttcttaatccaccacatctcggaccaccatgacgcagggaaagaaccaaagcacaactgggaaggcatcgttatgtttacacactggtccaaagactcaaacaggacacgcatctacttcattgacaccgactcgcatttcgttacccgcatactcgcggcaatactcgacaagctcttgcatacggggagcccaccctgcgaccccttgtggatgtacccgctggtgctgacagattacctgaacctgcagcacattgcgacctacgcaattcgcgacctggtgcggttcgaagaaaagaaggccgagtcagagaagaatgctgcagcagtaaccctggcaagtaggacgcgtgttgattacacgcggatgcataaaatcgcgcgcttcgcaatggtcgtctgtgaagtgctgcacgtcaacatcaaaaccatggagtatatcgtggcatgccacgagaactttttgaagcagcatgccgagcaacaatccaaagtagaggtcgaatcaacagctacagtacataagatccaccagcagctccggactttcgcccatgtcatctttagtatacacaatcggtgcacctcgtacctaggatgcttacagaacgagatccagctcgtattcaacgttgcctcacaggacgaagcacgtgcctctgttgccattgcgcgagcaacaaaatctgataacgagattatgaaaacgacgtcgtttattgcgctagttttcttaccgcctactttcatctcggccatcttcagcacgagcttctttagctttggtgatgacgagaagggctggaaggtctcagataagttctggtggtattgggtcgtcgtggttcctgttactcttctgtctttgtttttgtggtataaagtcttctttcgccgtgcgcctgtctatggggttgaccttacgatgggatcaaggttcgacgcgaagttggatgatctggcaaagcaggatcgtctagtttag

SEQ ID NO: 16001 - protein, 461 aa, Muscodor strobelii
  misc_feature: SGI Peptide ID NO. 565310
  misc_feature (31)..(428): NCBI GI: 261355101 Blast Desc: conserved [Verticillium albo-atrum VaMs.102]
  misc_feature (84)..(426): NCBI GI: 46137951 Blast Desc: FG10490.1 [Gibberella zeae PH-1]
  misc_feature (31)..(427): NCBI GI: 256734930 Blast Desc: NECHADRAFT_75673 [Nectria haematococca mpVI 77-13-4]
  misc_feature (89)..(433): NCBI GI: 255935275 Blast Desc: Pc13g02230 [Penicillium chrysogenum Wisconsin 54-1255] gi|211583284|emb|CAP91292.1| Pc13g02230 [Penicillium chrysogenum Wisconsin 54-1255]
  misc_feature (100)..(430): NCBI GI: 157382494 Blast Desc: [Penicillium lilacinoechinulatum]
  misc_feature (100)..(426): NCBI GI: 145602189 Blast Desc: MGG_05123 [Magnaporthe grisea 70-15] gi|145010621|gb|EDJ95277.1| MGG_05123 [Magnaporthe grisea 70-15]
  misc_feature (108)..(426): NCBI GI: 171695844 Blast Desc: protein product [Podospora anserina] gi|170948164|emb|CAP60328.1| protein product [Podospora anserina]
  misc_feature (108)..(426): NCBI GI: 119479373 Blast Desc: NFIA_077580 [Neosartorya fischeri NRRL 181] gi|119407869|gb|EAW17818.1| NFIA_077580 [Neosartorya fischeri NRRL 181]
  misc_feature (97)..(426): NCBI GI: 242774008 Blast Desc: conserved [Talaromyces stipitatus ATCC 10500] gi|218721975|gb|EED21393.1| conserved [Talaromyces stipitatus ATCC 10500]
  misc_feature (102)..(426): NCBI GI: 225679451 Blast Desc: conserved [Paracoccidioides brasiliensis Pb03]
MGIASLFVLALLLFHWTPHGIVHVSQKGAPCSGLQAFTWTQGKEKWQESCIKHQIVASGDSTSLSGLESADVAVLVSPHYDISCFQCKDYPRSWFDFVPLWWEPAIIDSNGAFHHIDEYDKEGKLTAKGTWVKFLIHHISDHHDAGKEPKHNWEGIVMFTHWSKDSNRTRIYFIDTDSHFVTRILAAILDKLLHTGSPPCDPLWMYPLVLTDYLNLQHIATYAIRDLVRFEEKKAESEKNAAAVTLASRTRVDYTRMHKIARFAMVVCEVLHVNIKTMEYIVACHENFLKQHAEQQSKVEVESTATVHKIHQQLRTFAHVIFSIHNRCTSYLGCLQNEIQLVFNVASQDEARASVAIARATKSDNEIMKTTSFIALVFLPPTFISAIFSTSFFSFGDDEKGWKVSDKFWWYWVVVVPVTLLSLFLWYKVFFRRAPVYGVDLTMGSRFDAKLDDLAKQDRLV

SEQ ID NO: 16002 - DNA, 1710 bp, Muscodor strobelii
  misc_feature: SGI cDNA ID NO. 565311
  misc_feature: Encodes the peptide sequence at SEQ ID NO 16003
atggatatcgcacggcgctcgccgtccgggtacaacagggaagagcctgcgtcaggcagaacggctcttccctcgcgacctatcgtatcaagagagaatagtagtcgaccatccgagcgcagtggtttcaatagaacggcttccacagtatcgagaagtccggcagctcaaagtgttgcgttatcttcggcaggcccaagtccttctttagacggatcagatggagcatattccaaaagcccctcccccttcgatgcaaatttgcatgatgccatcacttcgctcaagacttctccttcaaattccggccagcaaggcggtcaagtgtgcagcaattgtgggacgacgagaacaccgctttggagacgttcaccccaaggcgccacgatatgtaatgcttgtgggctgtatttgaaagcacggaattctgctcgaccgacgaatctgaaacgcccgccgtccgtagttacgacaacacaaacgaaaccctcagatcatgcagcaccttcgtcctgttcccgatccgatgggagtaatatgccaggcgctacgtatgttgcggctgaccagactccctccggatcatgtccaggtggtggaaaatgtaatggtacgggaggtgcagaagggtgcagcggctgtcctgcatataacaacagaatcgcaaagagtgctcaactccaaagtcagctgcctggacaatctgccgaagaagggccaggaagcggaccaatgcctattgatataaatgcgcaagagagtcaggcgcagaacccaaataccactgtagtgatagcttgtcacaactgcggaacgactattactcctctgtggcgtcgtgacgaagctggccataccatctgcaatgcttgtggattgtactacaagcttcacggtgtacacaggccagttgctatgatgaagtccgtgatcaaacgaaggaaacgagttatacccgcaaaccaagacgaagacgaggccatggctgaaggctcatcggaagagacagtgcccgcagattctatggagactcagagccaatacacggaatccagtacagggcgtgggagtatgaatgatgatggatcggtgaacctcggcctgcgacgcaaaccagattacaatcctgcgcttctccccgaacctatccgctccgggcaggggtctacgccggtaccgagcgcaaatctcatggactatcattcttcccagacgttacaacctctcggatcccgggattcgtttaacgaagataaccgattaccgcccttgacgtcgatcatgagcgaccggcagacgtccatctcgccctctcccttcctgacaccaggcgggaggaaacgatcgttttcgacaaccgactccgacgcgccgatgagcgactttagccaggaaaataccaaacggttgtcctccatcaaatcgattttgaaccccgccggcggatctagccaaaattggggctcagtgacagatgacggttctgaaatattgcgaaaccgctctccggcgactccgttgatgtctatgccgagtccgagtaacttttcgatcacgacaagcatgattccgagtatgaattcacgagagacgacagtagagagcgagaggtcaaaagcagataggcgggcagctcttcaacatgaggctgagcgcatgcgcgaaatgcttgcggccaaggagcgggagttggcggcgttaggagattag

SEQ ID NO: 16003 - protein, 569 aa, Muscodor strobelii
  misc_feature: SGI Peptide ID NO. 565311
  misc_feature (267)..(301): Pfam Id: PF00320 Pfam Desc: GATA zinc finger
  misc_feature (110)..(144): Pfam Id: PF00320 Pfam Desc: GATA zinc finger
  misc_feature (13)..(568): NCBI GI: 46136099 Blast Desc: FG09565.1 [Gibberella zeae PH-1]
  misc_feature (92)..(568): NCBI GI: 85105503 Blast Desc: NCU07728 [Neurospora crassa OR74A] gi|3552028|gb|AAC64946.1| siderophore regulation protein [Neurospora crassa] gi|28923567|gb|EAA32742.1| [Neurospora crassa
  misc_feature (11)..(567): NCBI GI: 39952507 Blast Desc: MGG_01840 [Magnaporthe grisea 70-15] gi|145020295|gb|EDK04424.1| MGG_01840 [Magnaporthe grisea 70-15]
  misc_feature (2)..(567): NCBI GI: 261352203 Blast Desc: siderophore regulation protein [Verticillium albo-atrum VaMs.102]
  misc_feature (105)..(568): NCBI GI: 156049633 Blast Desc: SS1G_08523 [Sclerotinia sclerotiorum 1980] gi|154692922|gb|EDN92660.1| SS1G_08523 [Sclerotinia sclerotiorum 1980]
  misc_feature (97)..(568): NCBI GI: 154292043 Blast Desc: BC1G_14396 [Botryotinia fuckeliana B05.10] gi|150846313|gb|EDN21506.1| BC1G_14396 [Botryotinia fuckeliana B05.10]
  misc_feature (20)..(567): NCBI GI: 171690816 Blast Desc: protein product [Podospora anserina] gi|170945356|emb|CAP71468.1| protein product [Podospora anserina]
  misc_feature (97)..(373): NCBI GI: 13620173 Blast Desc: GATA transcription factor [Botryotinia fuckeliana]
  misc_feature (107)..(318): NCBI GI: 50552360 Blast Desc: YALI0E05555p [Yarrowia lipolytica] gi|49649459|emb|CAG79171.1| YALI0E05555p [Yarrowia lipolytica]
  misc_feature (79)..(567): NCBI GI: 164685140 Blast Desc: siderophore uptake regulator [Ajellomyces capsulatus]
MDIARRSPSGYNREEPASGRTALPSRPIVSRENSSRPSERSGFNRTASTVSRSPAAQSVALSSAGPSPSLDGSDGAYSKSPSPFDANLHDAITSLKTSPSNSGQQGGQVCSNCGTTRTPLWRRSPQGATICNACGLYLKARNSARPTNLKRPPSVVTTTQTKPSDHAAPSSCSRSDGSNMPGATYVAADQTPSGSCPGGGKCNGTGGAEGCSGCPAYNNRIAKSAQLQSQLPGQSAEEGPGSGPMPIDINAQESQAQNPNTTVVIACHNCGTTITPLWRRDEAGHTICNACGLYYKLHGVHRPVAMMKSVIKRRKRVIPANQDEDEAMAEGSSEETVPADSMETQSQYTESSTGRGSMNDDGSVNLGLRRKPDYNPALLPEPIRSGQGSTPVPSANLMDYHSSQTLQPLGSRDSFNEDNRLPPLTSIMSDRQTSISPSPFLTPGGRKRSFSTTDSDAPMSDFSQENTKRLSSIKSILNPAGGSSQNWGSVTDDGSEILRNRSPATPLMSMPSPSNFSITTSMIPSMNSRETTVESERSKADRRAALQHEAERMREMLAAKERELAALGD

SEQ ID NO: 16004 - DNA, 4070 bp, Muscodor strobelii
  misc_feature: SGI EST ID NO. CUFF.38127.1
  misc_feature: Variant of the nucleotide sequence at SEQ ID NO 16002
tatcaccccgccaaattaaaccctccctgcatctctacaaccatcaagcagagatcccaacatatatgccgatatactacaccttcaatcttgctccgtcatcacatcattgcccctgggcgtagtccgaactcttacaccgaggcagctccgacgccgtctaaccccgagtgtttcttgcagccccggattttccttggtttcttttcttggaacgagacagacacgtaggaattcgagacgcttaactcttctcacaggtcctcgctataatcagaacccgcgccttggagctatttcgcgtcaagaaggtcactaacacacatttgtcgactcggtaccacttcgctacgtgcgatggatatcgcacggcgctcgccgtccgggtacaacagggaagagcctgcgtcaggcagaacggctcttccctcgcgacctatcgtatcaagagagaatagtagtcgaccatccgagcgcagtggtttcaatagaacggcttccacagtatcgagaagtccggcagctcaaagtgttgcgttatcttcggcaggcccaagtccttctttagacggatcagatggagcatattccaaaagcccctcccccttcgatgcaaatttgcatgatgccatcacttcgctcaagacttctccttcaaattccggccagcaaggcggtcaagtgtgcagcaattgtgggacgacgagaacaccgctttggagacgttcaccccaaggcgccacgatatgtaatgcttgtgggctgtatttgaaagcacggaattctgctcgaccgacgaatctgaaacgcccgccgtccgtagttacgacaacacaaacgaaaccctcagatcatgcagcaccttcgtcctgttcccgatccgatgggagtaatatgccaggcgctacgtatgttgcggctgaccagactccctccggatcatgtccaggtggtggaaaatgtaatggtacgggaggtgcagaagggtgcagcggctgtcctgcatataacaacagaatcgcaaagagtgctcaactccaaagtcagctgcctggacaatctgccgaagaagggccaggaagcggaccaatgcctattgatataaatgcgcaagagagtcaggcgcagaacccaaataccactgtagtgatagcttgtcacaactgcggaacgactattactcctctgtggcgtcgtgacgaagctggccataccatctgcaatgcttgtggattgtactacaagcttcacggtgtacacaggccagttgctatgatgaagtccgtgatcaaacgaaggaaacgagttatacccgcaaaccaagacgaagacgaggccatggctgaaggctcatcggaagagacagtgcccgcagattctatggagactcagagccaatacacggaatccagtacagggcgtgggagtatgaatgatgatggatcggtgaacctcggcctgcgacgcaaaccagattacaatcctgcgcttctccccgaacctatccgctccgggcaggggtctacgccggtaccgagcgcaaatctcatggactatcattcttcccagacgttacaacctctcggatcccgggattcgtttaacgaagataaccgattaccgcccttgacgtcgatcatgagcgaccggcagacgtccatctcgccctctcccttcctgacaccaggcgggaggaaacgatcgttttcgacaaccgactccgacgcgccgatgagcgactttagccaggaaaataccaaacggttgtcctccatcaaatcgattttgaaccccgccggcggatctagccaaaattggggctcagtgacagatgacggttctgaaatattgcgaaaccgctctccggcgactccgttgatgtctatgccgagtccgagtaacttttcgatcacgacaagcatgattccgagtatgaattcacgagagacgacagtagagagcgagaggtcaaaagcagataggcgggcagctcttcaacatgaggctgagcgcatgcgcgaaatgcttgcggccaaggagcgggagttggcggcgttaggagattagctcagagggtattcacacgataagactctcctcaaatttgatttgctttgggagctcgacaggaacgatacgaaactttttacggattaatgactgaggacacgcgaatgaatgttgggtaaggatatggaacgatgcatctatggcgtacgaggcacagtgtttcatgcatgatggtttacgtatgagtgtatggcggattatgaggcgcttttcgacagtcttctggaaaaggacggtggcttaaatctggcctagagatgcttgatatggagttctacgggggtataccccagcaaaactgagcctgcgttggctgatactcgagtggattaatgaatgagaatattgcatgaagaagttgaatccacggtctgattatggttgtgcgatgaataaactagtaccccaggcaagattccttgggctagagtaccccgaaacccatttctacgacggtgaatgggtagcgacataacataccagaaagaacggtgttttctgtattcttggcataccaagcttagagtacgaatttgaagttatcgtgcattttatgtttagatatacagatctagctctgttcgctccaattttgcgtaccagtgcctgccttctccagccacatcccatttacacttccagtcgttcgttgattccgcaaacccgtactcactcacagttcactccacctttggtatacaggacataacgtacactaacgtatcagagggaagataagctctctctatcttatttccacctctcccctaggtaagtcatgacactttttggactttcaataactcctcagttctcgatcaaccggtgttccatcgcttgaacgcaaaacgagtcgtggggatttatttagtgtgtggtgtttcggtaattcggggttttgggggaggagggcggggttctagacctgctcggcgccccaaccggcgtcggcctcgcgcatgttggccggcggctcgatggaggggatgaactcgagggctacgtagctcacgcccgtcaggccgatgatggcgcctgcgatgtagcgggaccagtggctcgagaggaggatcgagccgatgaatatgtagacttttttttgggagggtttatgttagtttgttggtttgggagattttgggagatgagatgggtgtgtggtggtggaagacgaagacgaagacgtacagataccgcggccgatgaaggagaacatgaaggaggcgtatcgcgagacttggggcgggatctggaattcgaggaggccgacgaaggcgccgaagattattacgtagacgccgatgattatcgattggctggaattgggctttgttagtttttaggtatttttctgagggattggctttcgtggttgaagggatgtggtatggtcagagaggacaaggcctcattcgatcaacttccgtatcaggactcggtgatgagggctaagagagaaatggagactcgtatgagacgtacaaggaggctccgaagaattgggagataccaccgagtatcatgacaacacctacgacgaggttgacgatgcggctgcgatgagcgataggttagcgcaaagtgcttcatagtagctgattgtgcagagactagggatcgtagtcgcattggctggagggcaactggccatgggattcggatatattgccagtcggaataggtagcacatacaaagagtctgagaagtccatcttgacggttttgatagtcgatttggcttgctgtggaataggttctctgatgcgttgaagtctcgatgcgactattcaggggaacgcgcgatcgcaaagcagaaacaatgcttctcgactattggagagggatccgagaaatggaatcgcaatgtcagacggggtggtcggttatgaagatgccggcgcgtgacaacggcgaggctaggcagatgctttttgatgtctggagatggatggttgaaagttgtcagctgaaaaagcttggaagatgggagctctctcctt

SEQ ID NO: 16005 - DNA, 393 bp, Muscodor strobelii
  misc_feature: SGI cDNA ID NO. 565312
  misc_feature: Reduced expression when VOC is produced
  misc_feature: Encodes the peptide sequence at SEQ ID NO 16006
atggacttctcagactctttccgcatcgtcaacctcgtcgtaggtgttgtcatgatactcggtggtatctcccaattcttcggagcctccttccaatcgataatcatcggcgtctacgtaataatcttcggcgccttcgtcggcctcctcgaattccagatcccgccccaagtctcgcgatacgcctccttcatgttctccttcatcggccgcggtatcttctacatattcatcggctcgatcctcctctcgagccactggtcccgctacatcgcaggcgccatcatcggcctgacgggcgtgagctacgtagccctcgagttcatcccctccatcgagccgccggccaacatgcgcgaggccgacgccggttggggcgccgagcaggtctag

SEQ ID NO: 16006 - protein, 130 aa, Muscodor strobelii
  misc_feature: SGI Peptide ID NO. 565312
  misc_feature (2)..(130): Pfam Id: PF08507 Pfam Desc: COPI associated protein
  misc_feature (1)..(130): NCBI GI: 116195824 Blast Desc: CHGG_04510 [Chaetomium globosum CBS 148.51] gi|88180423|gb|EAQ87891.1| CHGG_04510 [Chaetomium globosum CBS 148.51]
  misc_feature (1)..(130): NCBI GI: 261352204 Blast Desc: conserved [Verticillium albo-atrum VaMs.102]
  misc_feature (1)..(130): NCBI GI: 145613149 Blast Desc: MGG_01845 [Magnaporthe grisea 70-15] gi|145020289|gb|EDK04418.1| MGG_01845 [Magnaporthe grisea 70-15]
  misc_feature (1)..(130): NCBI GI: 85105499 Blast Desc: NCU07727 [Neurospora crassa OR74A] gi|28923566|gb|EAA32741.1| conserved [Neurospora crassa OR74A]
  misc_feature (1)..(130): NCBI GI: 154292045 Blast Desc: BC1G_14397 [Botryotinia fuckeliana B05.10] gi|150846314|gb|EDN21507.1| BC1G_14397 [Botryotinia fuckeliana B05.10]
  misc_feature (1)..(130): NCBI GI: 46121407 Blast Desc: FG05082.1 [Gibberella zeae PH-1]
  misc_feature (1)..(130): NCBI GI: 256726911 Blast Desc: [Nectria haematococca mpVI 77-13-4]
  misc_feature (1)..(130): NCBI GI: 238496049 Blast Desc: COPI-coated vesicle protein, [Aspergillus flavus NRRL3357] gi|220694140|gb|EED50484.1| COPI-coated vesicle protein, [Aspergillus flavus NRRL3357]
  misc_feature (1)..(130): NCBI GI: 115401496 Blast Desc: conserved [Aspergillus terreus NIH2624] gi|114190277|gb|EAU31977.1| conserved [Aspergillus terreus NIH2624]
  misc_feature (1)..(130): NCBI GI: 70997555 Blast Desc: COPI-coated vesicle protein [Aspergillus fumigatus Af293] gi|119479077|ref|XP_001259567.1| COPI-coated vesicle protein, [Neosartorya fischeri NRRL 181] COPI-coated vesicle NRRL
  misc_feature: Useful for introducing or modulating the production of volatile compounds
MDFSDSFRIVNLVVGVVMILGGISQFFGASFQSIIIGVYVIIFGAFVGLLEFQIPPQVSRYASFMFSFIGRGIFYIFIGSILLSSHWSRYIAGAIIGLTGVSYVALEFIPSIEPPANMREADAGWGAEQV

SEQ ID NO: 16007 - DNA, 3978 bp, Muscodor strobelii
  misc_feature: SGI EST ID NO. CUFF.38128.0
  misc_feature: Variant of the nucleotide sequence at SEQ ID NO 16005
aaggagagagctcccatcttccaagctttttcagctgacaactttcaaccatccatctccagacatcaaaaagcatctgcctagcctcgccgttgtcacgcgccggcatcttcataaccgaccaccccgtctgacattgcgattccatttctcggatccctctccaatagtcgagaagcattgtttctgctttgcgatcgcgcgttcccctgaatagtcgcatcgagacttcaacgcatcagagaacctattccacagcaagccaaatcgactatcaaaaccgtcaagatggacttctcagactctttccgcatcgtcaacctcgtcgtaggtgttgtcatgatactcggtggtatctcccaattcttcggagcctccttccaatcgataatcatcggcgtctacgtaataatcttcggcgccttcgtcggcctcctcgaattccagatcccgccccaagtctcgcgatacgcctccttcatgttctccttcatcggccgcggtatcttctacatattcatcggctcgatcctcctctcgagccactggtcccgctacatcgcaggcgccatcatcggcctgacgggcgtgagctacgtagccctcgagttcatcccctccatcgagccgccggccaacatgcgcgaggccgacgccggttggggcgccgagcaggtctagaaccccgccctcctcccccaaaaccccgaattaccgaaacaccacacactaaataaatccccacgactcgttttgcgttcaagcgatggaacaccggttgatcgagaactgaggagttattgaaagtccaaaaagtgtcatgacttacctaggggagaggtggaaataagatagagagagcttatcttccctctgatacgttagtgtacgttatgtcctgtataccaaaggtggagtgaactgtgagtgagtacgggtttgcggaatcaacgaacgactggaagtgtaaatgggatgtggctggagaaggcaggcactggtacgcaaaattggagcgaacagagctagatctgtatatctaaacataaaatgcacgataacttcaaattcgtactctaagcttggtatgccaagaatacagaaaacaccgttctttctggtatgttatgtcgctacccattcaccgtcgtagaaatgggtttcggggtactctagcccaaggaatcttgcctggggtactagtttattcatcgcacaaccataatcagaccgtggattcaacttcttcatgcaatattctcattcattaatccactcgagtatcagccaacgcaggctcagttttgctggggtatacccccgtagaactccatatcaagcatctctaggccagatttaagccaccgtccttttccagaagactgtcgaaaagcgcctcataatccgccatacactcatacgtaaaccatcatgcatgaaacactgtgcctcgtacgccatagatgcatcgttccatatccttacccaacattcattcgcgtgtcctcagtcattaatccgtaaaaagtttcgtatcgttcctgtcgagctcccaaagcaaatcaaatttgaggagagtcttatcgtgtgaataccctctgagctaatctcctaacgccgccaactcccgctccttggccgcaagcatttcgcgcatgcgctcagcctcatgttgaagagctgcccgcctatctgcttttgacctctcgctctctactgtcgtctctcgtgaattcatactcggaatcatgcttgtcgtgatcgaaaagttactcggactcggcatagacatcaacggagtcgccggagagcggtttcgcaatatttcagaaccgtcatctgtcactgagccccaattttggctagatccgccggcggggttcaaaatcgatttgatggaggacaaccgtttggtattttcctggctaaagtcgctcatcggcgcgtcggagtcggttgtcgaaaacgatcgtttcctcccgcctggtgtcaggaagggagagggcgagatggacgtctgccggtcgctcatgatcgacgtcaagggcggtaatcggttatcttcgttaaacgaatcccgggatccgagaggttgtaacgtctgggaagaatgatagtccatgagatttgcgctcggtaccggcgtagacccctgcccggagcggataggttcggggagaagcgcaggattgtaatctggtttgcgtcgcaggccgaggttcaccgatccatcatcattcatactcccacgccctgtactggattccgtgtattggctctgagtctccatagaatctgcgggcactgtctcttccgatgagccttcagccatggcctcgtcttcgtcttggtttgcgggtataactcgtttccttcgtttgatcacggacttcatcatagcaactggcctgtgtacaccgtgaagcttgtagtacaatcctagacaatttagcgcacaaatcctcgtttggatgtctcatatcttaccacaagcattgcagatggtatggccagcttcgtcacgacgccacagaggagtaatagtcgttccgcagttgtgacaagctatcactacagtggtatttgggttctgcgcctgactctcttgcgcatttatatcaataggcattggtccgcttcctggcccttcttcggcagattgtccaggcagctgactttggagttgagcactctttgcgattctgttgttatatgcaggacagccgctgcacccttctgcacctcccgtaccattacattttccaccacctggacatgatccggagggagtctggtcagccgcaacatacgtagcgcctggcatattactcccatcggatcgggaacaggacgaaggtgctgcatgatctgagggtttcgtttgtgttgtcgtaactacggacggcgggcgtttcagattcgtcggtcgagcagaattccgtgctttcaaatacagcccacaagcattacatatcgtggcgccttggggtgaacgtctccaaagcggtgttctcgtcgtcccacaattgctgatggccgttagttttgatgatcattcagggttacagctaaacttacctgcacacttgaccgccttgctggccggaatttgaaggagaagtcttgagcgaagtgatggcatcatgcaaatttgcatcgaagggggaggggcttttggaatatgctccatctgatccgtctaaagaaggacttgggcctgccgaagataacgcaacactttgagctgccggacttctcgatactgtggaagccgttctattgaaaccactgcgctcggatggtcgactactattctctcttgatacgataggtcgcgagggaagagccgttctgcctgacgcaggctcttccctgttgtacccggacggcgagcgccgtgcgatatccatcgcacgtagcgaagtggtaccgagtcgacaaatgtgtgttagtgaccttcttgacgcgaaatagctccaaggcgcgggttctgattatagcgaggacctgtgagaagagttaagcgtctcgaattcctacgtgtctgtctcgttccaagaaaagaaaccaaggaaaatccggggctgcaagaaacactcggggttagacggcgtcggagctgcctcggtgtaagagttcggactacgcccaggggcaatgatgtgatgacggagcaagattgaaggtgtagtatatcggcatatatgttgggatctctgcttgatggttgtagagatgcagggagggtttaatttggcggggtgatatggcatggccacaagtggcgtgagtacagaaacgggggtatcaatatggaattcccgacagagtagtacatatgcaagatggctgtagttaagcatccagggcagaatccttcatgctatatgtccggtgtctaaaccggaggagcatttgcctagcaaataccctgctgtagaattgacaatgtgatgtgctcaagttcatgacccacaa

SEQ ID NO: 16008 - DNA, 750 bp, Muscodor strobelii
  misc_feature: SGI cDNA ID NO. 565313
  misc_feature: Encodes the peptide sequence at SEQ ID NO 16009
atggacgaccataccaatcgtcctcgtcgcggcccccggagagctgctagagacaattctaagaaaaatctaagtgacaccatggccgcgaaagttcgccctgcagcgagcggagtaaagaaaccaaagggcactagcagccggaatgcaaccaatcgcaaaagcaagaaaacgcgagaaaagctgaaaacggagctcatcaagaaggtcgatagtcgggatccagctgaagcctatgcggagcagcttcagctattgaatttcactgaaccatcaagtcccaccaaatctatgtctcccgccagcccgaaatcaccaagactcgacagaaagcgcaagtggaagaagcgcgagaagaaatacatggatgacgaatctgaaatatcgcagacagccggaaatgcagagggtcgatggatcccacctccgatgtatcgcaggcgtccaactgtgcggcctgaaaatattccctttggattgtggcggtcgtatgaattattagatgagcatatatatcgacagtcactctcgttggagcagttggaggctctgcctcttgagagcgatgtacatacttatgaggatgagggcgaagagccatcaccatgcctgccggaaggattctattgggatgagaatcggaaccccgttcctgatgaagcgtactggcggacacggagctggttgaacgacttcgaggatgaggaggcacagaccgacactccgcattggctggagggcaatgcctaa

SEQ ID NO: 16009 - protein, 249 aa, Muscodor strobelii
  misc_feature: SGI Peptide ID NO. 565313
MDDHTNRPRRGPRRAARDNSKKNLSDTMAAKVRPAASGVKKPKGTSSRNATNRKSKKTREKLKTELIKKVDSRDPAEAYAEQLQLLNFTEPSSPTKSMSPASPKSPRLDRKRKWKKREKKYMDDESEISQTAGNAEGRWIPPPMYRRRPTVRPENIPFGLWRSYELLDEHIYRQSLSLEQLEALPLESDVHTYEDEGEEPSPCLPEGFYWDENRNPVPDEAYWRTRSWLNDFEDEEAQTDTPHWLEGNA

SEQ ID NO: 16010 - DNA, 609 bp, Muscodor strobelii
  misc_feature: SGI EST ID NO. CUFF.37820.0
  misc_feature: Variant of the nucleotide sequence at SEQ ID NO 16008
tttcacccaagcttaatcctcaatattgctaattatttcagcatcccactaggccactaaggatccagggaaatctagtcaaagcctttcaatctctctcgcgacttaggaacctatttggaagaaatggacgaccataccaatcgtcctcgtcgcggcccccggagagctgctagagacaattctaagaaaaatctaagtgacaccatggccgcgaaagttcgccctgcagcgagcggagtaaagaaaccaaagggcactagcagccggaatgcaaccaatcgcaaaagcaagaaaacgcgagaaaagctgaaaacggagctcatcaagaaggtcgatagtcgggatccagctgaagcctatgcggagcagcttcagctattgaatttcactgaaccatcaagtcccaccaaatctatgtctcccgccagcccgaaatcaccaagactcgacagaaagcgcaagtggaagaagcgcgagaagaaatacatggatgacgaatctgaaatatcgcagacagccggaaatgcagagggtcgatggatcccacctccgatgtatcgcaggcgtccaactgtgcggcctgaaaatattccctttggattgtgg

SEQ ID NO: 16011 - DNA, 2265 bp, Muscodor strobelii
  misc_feature: SGI cDNA ID NO. 565314
  misc_feature: Encodes the peptide sequence at SEQ ID NO 16012
atgcctaccctcgacgaccttgcgggagccttggaggccaaggcccttgagaccactactgagagaggcatactggacgatgaacagcacttctatggcctcgaactgctagacttatacagcacagataagcactcgataacacagactttcatcattcctcagttgattcgagtcctcgctcctttcttgaattcgcttccatatgtttccgttctggagatcggccaagcaacaaggtccgttcttatgtatttgcctccagaagtacgaaacaagattgagagagacgcaatggagccagcacattttctaatggaccacgcacgcttgaaccgggacaaaaggttcggagtacagttcaatcagtatgggaagaaaaagtatgatgtcattctcttctgccacagcatctggaaaatgcactctcaacacgaaatgatccgccgcgccatgcgcttgctttccgatcgtccatgcgatggcatcgttgtgcttttcaaccgagatgggtcgttgaacattggtgacctggtctgccaacaaaccgcttctttctcggatggcgttgttagcttggtgaaccaggattgtgtcatcgataccttctgctcattcatagctggacattccaaagcagaacgggcccctgggcatgctgttcaggcgaaatggcgcaaggtgtgctacgacttggccgagaagaaagacggtcgactcttgtttagagacaaccaatttatggggacgttcaccaagcacgcaacggcgctgccagaactaattacacaggtgccagtaacgacgacgagagtaattcgaaatcgtgagcttgatcccacccgctccgcagcgatcgtccgacctacaaccattgcagagatccagatctgtgtaaagtgggcattgaagcataagctgtcattagccattatcgccggtggccacagcgatcactgtgttcgaccgggtatcgtgtccgttgacctgagcgcctttaacacaatcgatactgtcgttgatgaatcagagacgaaggcagagctagagcaaacttcagataagaagtatctgatcgtcgctagggcaggctgcacctcaggggaaattttccaggcagcgaaagaaaaaggacttacggtacctctgggatgttgtccgactgtgggcatgggagagtggcttcaaggcggcattggacggctaggtcgacagcatggactgaccagcgataacattgtcggtgctgtcgtggtcggtgtaaacgatggagatgttcactacgttggaaatgtgccaagtgaataccgacctcccaatgccacacgcccggattttgacgacaatctgttatgggctttgaagggagcaggtaccaatttcgctattgtcgtcgccgttgtcttcagagctcaccagactggggtatgccgaaattggggctggaaatccatgacaacctatactgagggtgtccgcgatatgctttgcgagtttgatgctaacgtcggtggcatgctacatccctcgtgcactgtcgatacctacataagctcctcagcagagctgcacgaattgagcatcaatatttccagagccttcccttcagaccttgaaggttctttgcaacacagcagcgttagtatggcgggtccactaccaggacaaactttcaaccctactgatcctcttaacgactcaagtctctttgacagagacatcgctgtaccccgccgcacgtatggacacagaagaagcttcatatcgtcattcgagcgatgcgtctttttcaccaacatccaatctcaggaagtcgcagatgttttaaaggcagctatggagaaccgtctctcacagctttgctgtctgcatctcatacaaggtggtggtgcgatcaaagaagtctcctccacacagacagcatttgggtgtcgagactgggactttgcatgtgtgatcagtggaggttggcccggcgagcaggatcgtactgacctggctcatgacgttaaaggatgggtgtacaaagttgtcgacaagctcttgcctctgagcagcggcgtctatggtgctgatctaggatctgatcgtcgagatgctgcacttgtggccagagcctttgggccgaacctggaacgactagcacatctcaaattgcactttgacccttgcaatgtgttggcgcatgcttgtcctctcccggagccgtcgatggagtcaggtagcaggcacctgggccgtcgagaagtagagagccgcaggtaa

SEQ ID NO: 16012 - protein, 754 aa, Muscodor strobelii
  misc_feature: SGI Peptide ID NO. 565314
  misc_feature (283)..(430): Pfam Id: PF01565 Pfam Desc: FAD binding domain
  misc_feature (703)..(734): Pfam Id: PF08031 Pfam Desc: Berberine and berberine like
  misc_feature (1)..(739): NCBI GI: 238497936 Blast Desc: conserved [Aspergillus flavus NRRL3357] gi|220693477|gb|EED49822.1| conserved [Aspergillus flavus NRRL3357]
  misc_feature (1)..(739): NCBI GI: 169768616 Blast Desc: [Aspergillus oryzae RIB40] gi|83766636|dbj|BAE56776.1| protein product [Aspergillus oryzae]
  misc_feature (1)..(740): NCBI GI: 121704481 Blast Desc: phosphoribosyl transferase domain protein [Aspergillus clavatus NRRL 1] gi|119398649|gb|EAW09078.1| phosphoribosyl transferase domain protein [Aspergillus clavatus NRRL 1]
  misc_feature (1)..(733): NCBI GI: 256727831 Blast Desc: NECHADRAFT_46300 [Nectria haematococca mpVI 77-13-4]
  misc_feature (1)..(739): NCBI GI: 39940388 Blast Desc: MGG_05046 [Magnaporthe grisea 70-15] gi|145010708|gb|EDJ95364.1| MGG_05046 [Magnaporthe grisea 70-15]
  misc_feature (25)..(735): NCBI GI: 154320251 Blast Desc: BC1G_02106 [Botryotinia fuckeliana B05.10] gi|150854845|gb|EDN30037.1| BC1G_02106 [Botryotinia fuckeliana B05.10]
  misc_feature (1)..(735): NCBI GI: 255944473 Blast Desc: Pc20g04610 [Penicillium chrysogenum Wisconsin 54-1255] gi|211587739|emb|CAP85790.1| Pc20g04610 [Penicillium chrysogenum Wisconsin 54-1255]
  misc_feature (1)..(733): NCBI GI: 46115522 Blast Desc: FG03603.1 [Gibberella zeae PH-1]
  misc_feature (1)..(737): NCBI GI: 258568164 Blast Desc: conserved [Uncinocarpus reesii 1704] gi|237906272|gb|EEP80673.1| conserved [Uncinocarpus reesii 1704]
  misc_feature (1)..(736): NCBI GI: 171684633 Blast Desc: protein product [Podospora anserina] gi|170942277|emb|CAP67929.1| protein product [Podospora anserina]
MPTLDDLAGALEAKALETTTERGILDDEQHFYGLELLDLYSTDKHSITQTFIIPQLIRVLAPFLNSLPYVSVLEIGQATRSVLMYLPPEVRNKIERDAMEPAHFLMDHARLNRDKRFGVQFNQYGKKKYDVILFCHSIWKMHSQHEMIRRAMRLLSDRPCDGIVVLFNRDGSLNIGDLVCQQTASFSDGVVSLVNQDCVIDTFCSFIAGHSKAERAPGHAVQAKWRKVCYDLAEKKDGRLLFRDNQFMGTFTKHATALPELITQVPVTTTRVIRNRELDPTRSAAIVRPTTIAEIQICVKWALKHKLSLAIIAGGHSDHCVRPGIVSVDLSAFNTIDTVVDESETKAELEQTSDKKYLIVARAGCTSGEIFQAAKEKGLTVPLGCCPTVGMGEWLQGGIGRLGRQHGLTSDNIVGAVVVGVNDGDVHYVGNVPSEYRPPNATRPDFDDNLLWALKGAGTNFAIVVAVVFRAHQTGVCRNWGWKSMTTYTEGVRDMLCEFDANVGGMLHPSCTVDTYISSSAELHELSINISRAFPSDLEGSLQHSSVSMAGPLPGQTFNPTDPLNDSSLFDRDIAVPRRTYGHRRSFISSFERCVFFTNIQSQEVADVLKAAMENRLSQLCCLHLIQGGGAIKEVSSTQTAFGCRDWDFACVISGGWPGEQDRTDLAHDVKGWVYKVVDKLLPLSSGVYGADLGSDRRDAALVARAFGPNLERLAHLKLHFDPCNVLAHACPLPEPSMESGSRHLGRREVESRR

SEQ ID NO: 16013 - DNA, 393 bp, Muscodor strobelii
  misc_feature: SGI EST ID NO. CUFF.37829.0
  misc_feature: Variant of the nucleotide sequence at SEQ ID NO 16011
cgataacattgtcggtgctgtcgtggtcggtgtaaacgatggagatgttcactacgttggaaatgtgccaagtgaataccgacctcccaatgccacacgcccggattttgacgacaatctgttatgggctttgaagggagcaggtaccaatttcgctattgtcgtcgccgttgtcttcagagctcaccagactggggtatgccgaaattggggctggaaatccatgacaacctatactgagggtgtccgcgatatgctttgcgagtttgatgctaacgtcggtggcatgctacatccctcgtgcactgtcgatacctacataagctcctcagcagagctgcacgaattgagcatcaatatttccagagccttcccttcagaccttgaaggttc

SEQ ID NO: 16014 - DNA, 1587 bp, Muscodor strobelii
  misc_feature: SGI cDNA ID NO. 565315
  misc_feature: Encodes the peptide sequence at SEQ ID NO 16015
atggcatcagagagcgcggaaacgcggcctctactcgctgaccagagtgagccagccaaccatacgaccaactccgataatgtgactccagcagccaccgacagcgaaggacagagaggttcattctctaagaatcttggaacccttgaggcgttctccatcattatcagcatcgttgttggcagtggtatttttacttcgcctggctcaattgacactaatgtgccgtctccgggcgccgcactgattatatggcttgttgggggcatgctcgcttggacgggagcggtcacgatgggtgagcttggcacggcaatccagggtgaaggaggtgtccaaccgtatctgcggtacatttttggcgatgtcttcgggttcttggctgcctggacttggattgttgctgtgatgcctgctactttagcaattctcagcatcgtatttgttgaaagcatctactcagctgctggtatcaccgaccaagccgaccgtatagagcacaaactgctttcgattataatcctagtcgtcattagcatagcgaattccattagcacgaaggcaactacgcgtctcaacagtgttttcgttagtctgaaattcctcagtatcgcggccattgtcattgctggaatcgtcgttgctatcattcagggcacgcatcccaagagagaagatattggaggacgggattggttcacaaagccatggtttgataaccggccaacggtcaatcccgatgggagcaccactcactggggtagtttaagcgaatgggagctacttggacactactcagctgccctttatggcgcactttgggcatattcaggctgggacaaggcgatctacatttcagctgagctatcttcaccagcaaagcaactccctcttgccatcaactcggccataccaacgatcatattgtgctttattgcttcgaatgcagcatactatatcttgcttccctggaacgttgtatcgactacggacagtgttgcggtgactgcaatcactcgcctcttaggacaaggatttggaattgttgcagcgattatgatctgcttagtcgttgcgggatcactgcttggtaactccttcgtttccggtcgtatggcagtagctgcttcaaatgcaggttggttcccgcgagagttcggcattcttggcaaaatcgggagacgtgacgatgagtctgaaactccacacaactcaacaccagctcaacacgtgagcaagtcagatgcgcccataaacgccatcattctatcagccatactatccactctctacatcctcttaggcaacttccgtgccttgctcaccttcaatggtctcggcgagtactcatttttcttcctcaccgtcctcggagcaatcatcctcagataccgagagcctgatttgcaaagaccatacaagccgtttctgctggttccagtgatattcgcaatagttagtgggttcgtcgtcataagaggtgctatatttgctcctgtgcttgcaatcgtgctcattgcactctggatcattggcgggctgttctattttggacgtattcagtacgctcggcgaagagcagactga

SEQ ID NO: 16015 - protein, 528 aa, Muscodor strobelii
  misc_feature: SGI Peptide ID NO. 565315
  misc_feature (50)..(524): Pfam Id: PF00324 Pfam Desc: Amino acid permease
  misc_feature (284)..(395): Pfam Id: PF00324 Pfam Desc: Amino acid permease
  misc_feature (2)..(526): NCBI GI: 261354347 Blast Desc: conserved [Verticillium albo-atrum VaMs.102]
  misc_feature (1)..(528): NCBI GI: 171695686 Blast Desc: protein product [Podospora anserina] gi|170948085|emb|CAP60249.1| protein product [Podospora anserina]
  misc_feature (2)..(526): NCBI GI: 145247582 Blast Desc: An12g09900 [Aspergillus niger] gi|134080779|emb|CAL00893.1| protein product [Aspergillus niger]
  misc_feature (9)..(526): NCBI GI: 169772179 Blast Desc: [Aspergillus oryzae RIB40] gi|83768418|dbj|BAE58557.1| protein product [Aspergillus oryzae]
  misc_feature (2)..(485): NCBI GI: 116181242 Blast Desc: CHGG_01249 [Chaetomium globosum CBS 148.51] gi|88185546|gb|EAQ93014.1| CHGG_01249 [Chaetomium globosum CBS 148.51]
  misc_feature (1)..(525): NCBI GI: 46126367 Blast Desc: FG07561.1 [Gibberella zeae PH-1]
  misc_feature (3)..(516): NCBI GI: 67903102 Blast Desc: AN8538.2 [Aspergillus nidulans FGSC A4] gi|40747807|gb|EAA66963.1| AN8538.2 [Aspergillus nidulans FGSC A4] gi|259484489|tpe|CBF80753.1| TPA: amino acid transporter FGSC
  misc_feature (18)..(519): NCBI GI: 256724656 Blast Desc: NECHADRAFT_95971 [Nectria haematococca mpVI 77-13-4]
  misc_feature (5)..(527): NCBI GI: 189206023 Blast Desc: solute carrier family 7 protein [Pyrenophora tritici-repentis Pt-1C-BFP] gi|187975439|gb|EDU42065.1| solute carrier family 7 protein [Pyrenophora tritici-repentis Pt-1C-BFP]
  misc_feature (33)..(526): NCBI GI: 145236954 Blast Desc: An07g00310 [Aspergillus niger] gi|134075589|emb|CAK39255.1| protein product [Aspergillus niger]
MASESAETRPLLADQSEPANHTTNSDNVTPAATDSEGQRGSFSKNLGTLEAFSIIISIVVGSGIFTSPGSIDTNVPSPGAALIIWLVGGMLAWTGAVTMGELGTAIQGEGGVQPYLRYIFGDVFGFLAAWTWIVAVMPATLAILSIVFVESIYSAAGITDQADRIEHKLLSIIILVVISIANSISTKATTRLNSVFVSLKFLSIAAIVIAGIVVAIIQGTHPKREDIGGRDWFTKPWFDNRPTVNPDGSTTHWGSLSEWELLGHYSAALYGALWAYSGWDKAIYISAELSSPAKQLPLAINSAIPTIILCFIASNAAYYILLPWNVVSTTDSVAVTAITRLLGQGFGIVAAIMICLVVAGSLLGNSFVSGRMAVAASNAGWFPREFGILGKIGRRDDESETPHNSTPAQHVSKSDAPINAIILSAILSTLYILLGNFRALLTFNGLGEYSFFFLTVLGAIILRYREPDLQRPYKPFLLVPVIFAIVSGFVVIRGAIFAPVLAIVLIALWIIGGLFYFGRIQYARRRAD

SEQ ID NO: 16016 - DNA, 1846 bp, Muscodor strobelii
  misc_feature: SGI EST ID NO. CUFF.37835.0
  misc_feature: Variant of the nucleotide sequence at SEQ ID NO 16014
cttttcttctattcccttcattgactctcatagacaatccgaaccccattgtcttgtctgggtctaggcattatggcatcagagagcgcggaaacgcggcctctactcgctgaccagagtgagccagccaaccatacgaccaactccgataatgtgactccagcagccaccgacagcgaaggacagagaggttcattctctaagaatcttggaacccttgaggcgttctccatcattatcagcatcgttgttggcagtggtatttttacttcgcctggctcaattgacactaatgtgccgtctccgggcgccgcactgattatatggcttgttgggggcatgctcgcttggacgggagcggtcacgatgggtgagcttggcacggcaatccagggtgaaggaggtgtccaaccgtatctgcggtacatttttggcgatgtcttcgggttcttggctgcctggacttggattgttgctgtgatgcctgctactttagcaattctcagcatcgtatttgttgaaagcatctactcagctgctggtatcaccgaccaagccgaccgtatagagcacaaactgctttcgattataatcctagtcgtcattagcatagcgaattccattagcacgaaggcaactacgcgtctcaacagtgttttcgttagtctgaaattcctcagtatcgcggccattgtcattgctggaatcgtcgttgctatcattcagggcacgcatcccaagagagaagatattggaggacgggattggttcacaaagccatggtttgataaccggccaacggtcaatcccgatgggagcaccactcactggggtagtttaagcgaatgggagctacttggacactactcagctgccctttatggcgcactttgggcatattcaggctgggacaaggcgatctacatttcagctgagctatcttcaccagcaaagcaactccctcttgccatcaactcggccataccaacgatcatattgtgctttattgcttcgaatgcagcatactatatcttgcttccctggaacgttgtatcgactacggacagtgttgcggtgactgcaatcactcgcctcttaggacaaggatttggaattgttgcagcgattatgatctgcttagtcgttgcgggatcactgcttggtaactccttcgtttccggtcgtatggcagtagctgcttcaaatgcaggttggttcccgcgagagttcggcattcttggcaaaatcgggagacgtgacgatgagtctgaaactccacacaactcaacaccagctcaacacgtgagcaagtcagatgcgcccataaacgccatcattctatcagccatactatccactctctacatcctcttaggcaacttccgtgccttgctcaccttcaatggtctcggcgagtactcatttttcttcctcaccgtcctcggagcaatcatcctcagataccgagagcctgatttgcaaagaccatacaagccgtttctgctggttccagtgatattcgcaatagttagtgggttcgtcgtcataagaggtgctatatttgctcctgtgcttgcaatcgtgctcattgcactctggatcattggcgggctgttctattttggacgtattcagtacgctcggcgaagagcagactgagacaaagattcacacatctaagaatattggagctgtctggttcatacagcagggtgctcaagcatcatattgtgataaacactagatactactctctatattgtgtcaaatctcttatggatcagacgcctgattagggtagaatataaggcaagtgctattgcaaagatcacttgtcggatttcca

SEQ ID NO: 16017 - DNA, 1569 bp, Muscodor strobelii
  misc_feature: SGI cDNA ID NO. 565316
  misc_feature: Encodes the peptide sequence at SEQ ID NO 16018
atggcatcagagagcgcggaaacgcggcctctactcgctgaccagagtgagccagccaaccatacgaccaactccgataatgtgactccagcagccaccgacagcgaaggacagagaggttcattctctaagaatcttggaacccttgaggcgttctccatcattatcagcatcgttgttggcagtggtatttttacttcgcctggctcaattgacactaatgtgccgtctccgggcgccgcactgattatatggcttgttgggggcatgctcgcttggacgggagcggtcacgatgggtgagcttggcacggcaatccagggtgaaggaggtgtccaaccgtatctgcggtacatttttggcgatgtcttcgggttcttggctgcctggacttggattgttgctgtgatgcctgctactttagcaattctcagcatcgtatttgttgaaagcatctactcagctgctggtatcaccgaccaagccgaccgtatagagcacaaactgctttcgattataatcctagtcgtcattagcatagcgaattccattagcacgaaggcaactacgcgtctcaacagtgttttcgttagtctgaaattcctcagtatcgcggccattgtcattgctggaatcgtcgttgctatcattcagggcacgcatcccaagagagaagatattggaggacgggattggttcacaaagccatggtttgataaccggccaacggtcaatcccgatgggagcaccactcactggggtagtttaagcgaatgggagctacttggacactactcagctgccctttatggcgcactttgggcatattcaggctgggacaaggcgatctacatttcagctgagctatcttcaccagcaaagcaactccctcttgccatcaactcggccataccaacgatcatattgtgctttattgcttcgaatgcagcatactatatcttgcttccctggaacgttgtatcgactacggacagtgttgcggtggtaggacaaggatttggaattgttgcagcgattatgatctgcttagtcgttgcgggatcactgcttggtaactccttcgtttccggtcgtatggcagtagctgcttcaaatgcaggttggttcccgcgagagttcggcattcttggcaaaatcgggagacgtgacgatgagtctgaaactccacacaactcaacaccagctcaacacgtgagcaagtcagatgcgcccataaacgccatcattctatcagccatactatccactctctacatcctcttaggcaacttccgtgccttgctcaccttcaatggtctcggcgagtactcatttttcttcctcaccgtcctcggagcaatcatcctcagataccgagagcctgatttgcaaagaccatacaagccgtttctgctggttccagtgatattcgcaatagttagtgggttcgtcgtcataagaggtgctatatttgctcctgtgcttgcaatcgtgctcattgcactctggatcattggcgggctgttctattttggacgtattcagtacgctcggcgaagagcagactga

SEQ ID NO: 16018 - protein, 522 aa, Muscodor strobelii
  misc_feature: SGI Peptide ID NO. 565316
  misc_feature (50)..(518): Pfam Id: PF00324 Pfam Desc: Amino acid permease
  misc_feature (284)..(389): Pfam Id: PF00324 Pfam Desc: Amino acid permease
  misc_feature (2)..(520): NCBI GI: 261354347 Blast Desc: conserved [Verticillium albo-atrum VaMs.102]
  misc_feature (1)..(522): NCBI GI: 171695686 Blast Desc: protein product [Podospora anserina] gi|170948085|emb|CAP60249.1| protein product [Podospora anserina]
  misc_feature (2)..(520): NCBI GI: 145247582 Blast Desc: An12g09900 [Aspergillus niger] gi|134080779|emb|CAL00893.1| protein product [Aspergillus niger]
  misc_feature (9)..(520): NCBI GI: 169772179 Blast Desc: [Aspergillus oryzae RIB40] gi|83768418|dbj|BAE58557.1| protein product [Aspergillus oryzae]
  misc_feature (2)..(479): NCBI GI: 116181242 Blast Desc: CHGG_01249 [Chaetomium globosum CBS 148.51] gi|88185546|gb|EAQ93014.1| CHGG_01249 [Chaetomium globosum CBS 148.51]
  misc_feature (1)..(519): NCBI GI: 46126367 Blast Desc: FG07561.1 [Gibberella zeae PH-1]
  misc_feature (3)..(510): NCBI GI: 67903102 Blast Desc: AN8538.2 [Aspergillus nidulans FGSC A4] gi|40747807|gb|EAA66963.1| AN8538.2 [Aspergillus nidulans FGSC A4] gi|259484489|tpe|CBF80753.1| TPA: amino acid transporter FGSC
  misc_feature (18)..(513): NCBI GI: 256724656 Blast Desc: NECHADRAFT_95971 [Nectria haematococca mpVI 77-13-4]
  misc_feature (5)..(521): NCBI GI: 189206023 Blast Desc: solute carrier family 7 protein [Pyrenophora tritici-repentis Pt-1C-BFP] gi|187975439|gb|EDU42065.1| solute carrier family 7 protein [Pyrenophora tritici-repentis Pt-1C-BFP]
  misc_feature (33)..(520): NCBI GI: 145236954 Blast Desc: An07g00310 [Aspergillus niger] gi|134075589|emb|CAK39255.1| protein product [Aspergillus niger]
MASESAETRPLLADQSEPANHTTNSDNVTPAATDSEGQRGSFSKNLGTLEAFSIIISIVVGSGIFTSPGSIDTNVPSPGAALIIWLVGGMLAWTGAVTMGELGTAIQGEGGVQPYLRYIFGDVFGFLAAWTWIVAVMPATLAILSIVFVESIYSAAGITDQADRIEHKLLSIIILVVISIANSISTKATTRLNSVFVSLKFLSIAAIVIAGIVVAIIQGTHPKREDIGGRDWFTKPWFDNRPTVNPDGSTTHWGSLSEWELLGHYSAALYGALWAYSGWDKAIYISAELSSPAKQLPLAINSAIPTIILCFIASNAAYYILLPWNVVSTTDSVAVVGQGFGIVAAIMICLVVAGSLLGNSFVSGRMAVAASNAGWFPREFGILGKIGRRDDESETPHNSTPAQHVSKSDAPINAIILSAILSTLYILLGNFRALLTFNGLGEYSFFFLTVLGAIILRYREPDLQRPYKPFLLVPVIFAIVSGFVVIRGAIFAPVLAIVLIALWIIGGLFYFGRIQYARRRAD

SEQ ID NO: 16019 - DNA, 1846 bp, Muscodor strobelii; identical to SEQ ID NO: 16016
  misc_feature: SGI EST ID NO. CUFF.37835.0
  misc_feature: Variant of the nucleotide sequence at SEQ ID NO 16017

SEQ ID NO: 16020 - DNA, 459 bp, Muscodor strobelii
  misc_feature: SGI cDNA ID NO. 565317
  misc_feature: Encodes the peptide sequence at SEQ ID NO 16021
atgaaaggcttcctccaacttctggctttcgccctaatgggcatcatcaccgtcaacgccggcaacaccgtgttgacaccagtcccctgcatgaaccctggatacaacatctctatgttccgaaacacaggttgttcagattacgatgagtacacgggacctttcacgatatcccatgactggggctctacctgctatcaggcagagagagtgatgaaatcggtccgaattactggttgcggccttagaactagtgtctccatgaacaaatggtgttccggggaaatgttgagtacgggcaacaaagatattcccataacagagtatgtgcttagcaacttgtcttttcctattcctaagtcttactcgtctctcgacttcgatttcatagtcttggacgcgaatagtaccttctccatgacgaacataatcttcgactttcttgacttcaatcgctga

SEQ ID NO: 16021 - protein, 152 aa, Muscodor strobelii
  misc_feature: SGI Peptide ID NO. 565317
MKGFLQLLAFALMGIITVNAGNTVLTPVPCMNPGYNISMFRNTGCSDYDEYTGPFTISHDWGSTCYQAERVMKSVRITGCGLRTSVSMNKWCSGEMLSTGNKDIPITEYVLSNLSFPIPKSYSSLDFDFIVLDANSTFSMTNIIFDFLDFNR

SEQ ID NO: 16022 - DNA, 813 bp, Muscodor strobelii
  misc_feature: SGI cDNA ID NO. 565318
  misc_feature: Reduced expression when VOC is produced
  misc_feature: Encodes the peptide sequence at SEQ ID NO 16023
atggcgggcgaaacagccccggacctcgacgacatctcgtttgtggtgtctatggtcatcgctgggttctttgcaatctcggtctataacagtcttgaaatctacgttttcctcttccgcacctttctctctcgattgcatctcgtagtcggtgatcctcggaaaatccgctgggttctagtcatgattatctgcgtgttcttcatcttgcaactcccgacatcgatcctctttatatacaacaacttcaacgacgagcgcgacatgcgtgcagtcgccgcatttaacatttacgagaagatacaactggttgcgtttaccgtgcaggagaccataatatccggactatacgtatatgatgcttccgccgcactgaagcctatgaaggttatcaaaggcgacaaagtcacgactactttccgcgagttagtggcactatttatccttgtggttttgctagatataactttgatcatatccgaatacacgaatcacttccaaatccagacgacatacaagcccgtggtgtatagcgtaaagctcaaagtcgaatgcattgtcctcaacaatctcatcaatctagtccagtcaggcaccagcacctttcaaatcggaacaggattttcatgtcaaggacaacgactcagcatggcgatggaagactcgtggtggacgcagcacaatgcttcattgggaatcacggagagcaggactacaagcggtggttcaatatcgcagaaccaggctttgtcgcagtccttaacgcctgttaggagtaagacgaagggccgaaggaaaggcacgagcgtatga

SEQ ID NO: 16023 - protein, 270 aa, Muscodor strobelii
  misc_feature: SGI Peptide ID NO. 565318
  misc_feature (44)..(184): NCBI GI: 256729303 Blast Desc: NECHADRAFT_47747 [Nectria haematococca mpVI 77-13-4]
  misc_feature (44)..(184): NCBI GI: 46117188 Blast Desc: FG04436.1 [Gibberella zeae PH-1]
  misc_feature (44)..(198): NCBI GI: 261353890 Blast Desc: integral membrane protein [Verticillium albo-atrum VaMs.102]
  misc_feature (1)..(203): NCBI GI: 115443176 Blast Desc: conserved [Aspergillus terreus NIH2624] gi|114188264|gb|EAU29964.1| conserved [Aspergillus terreus NIH2624]
  misc_feature (1)..(203): NCBI GI: 255939824 Blast Desc: Pc16g03130 [Penicillium chrysogenum Wisconsin 54-1255] gi|211585304|emb|CAP92983.1| Pc16g03130 [Penicillium chrysogenum Wisconsin 54-1255]
  misc_feature (15)..(201): NCBI GI: 145614080 Blast Desc: MGG_08982 [Magnaporthe grisea 70-15] gi|145021059|gb|EDK05188.1| MGG_08982 [Magnaporthe grisea 70-15]
  misc_feature (44)..(198): NCBI GI: 256730283 Blast Desc: NECHADRAFT_45041 [Nectria haematococca mpVI 77-13-4]
  misc_feature (44)..(218): NCBI GI: 212537165 Blast Desc: conserved [Penicillium marneffei ATCC 18224] gi|210068480|gb|EEA22571.1| conserved [Penicillium marneffei ATCC 18224]
  misc_feature (44)..(197): NCBI GI: 119483014 Blast Desc: NFIA_027120 [Neosartorya fischeri NRRL 181] gi|119409690|gb|EAW19638.1| conserved [Neosartorya fischeri NRRL 181]
  misc_feature (44)..(197): NCBI GI: 70986870 Blast Desc: conserved [Aspergillus fumigatus Af293] gi|66846552|gb|EAL86884.1| conserved [Aspergillus fumigatus Af293]
  misc_feature: Useful for introducing or modulating the production of volatile compounds
MAGETAPDLDDISFVVSMVIAGFFAISVYNSLEIYVFLFRTFLSRLHLVVGDPRKIRWVLVMIICVFFILQLPTSILFIYNNFNDERDMRAVAAFNIYEKIQLVAFTVQETIISGLYVYDASAALKPMKVIKGDKVTTTFRELVALFILVVLLDITLIISEYTNHFQIQTTYKPVVYSVKLKVECIVLNNLINLVQSGTSTFQIGTGFSCQGQRLSMAMEDSWWTQHNASLGITESRTTSGGSISQNQALSQSLTPVRSKTKGRRKGTSV

SEQ ID NO: 16024 - DNA, 3629 bp, Muscodor strobelii
  misc_feature: SGI EST ID NO. CUFF.37843.0
  misc_feature: Variant of the nucleotide sequence at SEQ ID NO 16022
gtgggcggagcgcgatctgtgcctcaaatattcattctttgctatatctcaaattcaattgactcgggatcgatagcatctccatttattagaacgggaacaaagctccacatcatgcctctaagtaaagaacaaatggaagcgcgcctccgggctcgaggagccgtaccgaagccgaaaccggcatacctgcccactgccggatctcctttgactgtcgatgagaaattatatgctgcaatcagagacgcaccaagagtacagattctagactttgtgctgcccgttaggtcaggacgggcttggaaagctcccgccgggtccatcgtccgtattagcacacccgagggtccgcaagttggcgatctcaatatatggaatgcacataaccccagagaacggttctgggcagcacgtaccaagcagctgcatgcctcccatgtctcgacaaacgatcgattgtggtctacgcttccgtacatgcggccgctgatgacgattctggacgatactttgtcctggtatggtgtggacgaacatgggggacgtgtccatgatttgttgggtacaggttgtgatccttatatcaacgctgtattgaccagtggtgagaagtcagaaaatggacacgaaagtgatgagaaaagactctataacttccattgccgctcgaacctcacacgagctgttttaccctacggccttgcagagtctgatgttcacgatgtcatcaatttgtttcaagtcactgggcttgacgaaaagggtcgttactatatgagcccatgtccggctgagcctggagattatatcgagtttctagccgaacaagacgtattaatggccttgagtacgtgtccaggcggcgacttgtctctttggggtttcggagctgcaagcgagaaagaaatgatcaagtgttgtcggcccttgaaagtcgaagtatttcgccttcaagatgaaaattccctccaaaaagccgggtggcgttctgcgcaagtatctagctacaggggcttgcatggtatggtagttcctaaaggtgagcatcaggctgcgatataacatcaggcacggctatgcccaccatttcacagatatgcagacgagaggcaacaggccacaaatcgtatgtcaatttgcttggccatccaaggtattttcagaacacgtaaaggttgctgatcacagtagcatcgatttgttatagtgtgttattccttaactcgaaatgcgtgcgcatccaaccctcctatcgcatacaacaggtgtagcatcaatttgttatatttgcttgaacgttattggaccggagagaaagccgcagtgtgacaagttgacatatgaaaaccaacctcaattgtgctgaatgaggtcaaagcgatctgcatcagccaatcccttcccatgcaatttcaagggattacgacgtcggcgaatttggtacataagctcgctagcgagtcatggcagtgcttggcccatgcttctccatacgagatccaatacctcccccagttcccatgtgaagcatagaacgatgagaccgtaatggaatgattctagtggcaactctattccgcacctatttattgacactaggaacgtgaaacgaaagcaacttcaatccgtgattcagaggagatgtgaccacatgctcgtcttgttcaaaacaattgtagcaatcatgccttaacttcaccataccaactatatcctcttcctatgccactacttctcatctgttcactctacacttcgagccatcgctaagatggcgggcgaaacagccccggacctcgacgacatctcgtttgtggtgtctatggtcatcgctgggttctttgcaatctcggtctataacagtcttgaaatctacgttttcctcttccgcacctttcgtcgccgatggggtctatacttctggagcttgttatgcgcaaacaccgggattccactgcattcggtatctcaactgcttcgatactttcgcattgcgcccagtggccctatgtcggtactcgttgtactcggatggtggttgatggtttcgggtcaatctttggttttatgtatggcaacactctattcagagattgagagacttggttgatgaaactgatattgtgctccagtctctcgattgcatctcgtagtcggtgatcctcggaaaatccgctgggttctagtcatgattatctgcgtgttcttcatcttgcaactcccgacatcgatcctctttatatacaacaacttcaacgacgagcgcgacatgcgtgcagtcgccgcatttaacatttacgagaagatacaactggttgcgtttaccgtgcaggagaccataatatccggactatacgtatatgatgcttccgccgcactgaagcctatgaaggttatcaaaggcgacaaagtcacgactactttccgcgagttagtggcactatttatccttgtggttttgctagatataactttgatcatatccgaatacacgaatcacttccaaatccagacgacatacaagcccgtggtgtatagcgtaaagctcaaagtcgaatgcattgtcctcaacaatctcatcaatctagtccagtcaggcaccagcacctttcaaatcggaacaggattttcatgtcaaggacaacgactcagcatggcgatggaagactcgtggtggacgcagcacaatgcttcattgggaatcacggagagcaggactacaagcggtggttcaatatcgcagaaccaggctttgtcgcagtccttaacgcctgttaggagtaagacgaagggccgaaggaaaggcacgagcgtatgattgactgatcgaataattaataatacccaatttctcagcgttcatctcaatttttggcttttgctattcaccaaaggagagtctgataatttgatcggtgatgaagatgtttgccaccggtctgggggcagccacacacataattagttgtgtactacttctccagtgattgaggaaggaaagaagtgatatgcatataacttaccgaattctcaacatgctgctacacaatcctctactgtcactcatcgacattccacacctagctcattgtgcactatcaccatgaaaggcttcctccaacttctggctttcgccctaatgggcatcatcaccgtcaacgccggcaacaccgtgttgacaccagtcccctgcatgaaccctggatacaacatctctatgttccgaaacacaggttgttcagattacgatgagtacacgggacctttcacgatatcccatgactggggctctacctgctatcaggcagagagagtgatgaaatcggtccgaattactggttgcggccttagaactagtgtctccatgaacaaatggtgttccggggaaatggttggtttgtcttctacgtacgcaaagatatatttactaacgagcactacgcagttgagtacgggcaacaaagatattcccataacagagtatgtgcttagcaacttgtcttttcctattcctaagtcttactcgtctctcgacttcgatttcatagtcttggacgcgaatagtaccttctccatgacgaacataatcttcgactttcttgacttcaatcgctgaccttttccgg

SEQ ID NO: 16025 - DNA, 951 bp, Muscodor strobelii
  misc_feature: SGI cDNA ID NO. 565319
  misc_feature: Encodes the peptide sequence at SEQ ID NO 16026
atgcctctaagtaaagaacaaatggaagcgcgcctccgggctcgaggagccgtaccgaagccgaaaccggcatacctgcccactgccggatctcctttgactgtcgatgagaaattatatgctgcaatcagagacgcaccaagagtacagattctagactttgtgctgcccgttaggtcaggacgggcttggaaagctcccgccgggtccatcgtccgtattagcacacccgagggtccgcaagttggcgatctcaatatatggaatgcacataaccccagagaacggttctgggcagcacgtaccaagcagctgcatgcctcccatgtctcgacaaacgatcgattgtggtctacgcttccgtacatgcggccgctgatgacgattctggacgatactttgtcctggtatggtgtggacgaacatgggggacgtgtccatgatttgttgggtacaggttgtgatccttatatcaacgctgtattgaccagtggtgagaagtcagaaaatggacacgaaagtgatgagaaaagactctataacttccattgccgctcgaacctcacacgagctgttttaccctacggccttgcagagtctgatgttcacgatgtcatcaatttgtttcaagtcactgggcttgacgaaaagggtcgttactatatgagcccatgtccggctgagcctggagattatatcgagtttctagccgaacaagacgtattaatggccttgagtacgtgtccaggcggcgacttgtctctttggggtttcggagctgcaagcgagaaagaaatgatcaagtgttgtcggcccttgaaagtcgaagtatttcgccttcaagatgaaaattccctccaaaaagccgggtggcgttctgcgcaagtatctagctacaggggcttgcatggtatggtagttcctaaaggtgagcatcaggctgcgatataa

SEQ ID NO: 16026 - protein, 316 aa, Muscodor strobelii
  misc_feature: SGI Peptide ID NO. 565319
  misc_feature (53)..(277): Pfam Id: PF09347 Pfam Desc: Domain of function (DUF1989)
  misc_feature (11)..(315): NCBI GI: 116200909 Blast Desc: CHGG_08339 [Chaetomium globosum CBS 148.51] gi|88176857|gb|EAQ84325.1| CHGG_08339 [Chaetomium globosum CBS 148.51]
  misc_feature (11)..(313): NCBI GI: 46117426 Blast Desc: FG04555.1 [Gibberella zeae PH-1]
  misc_feature (1)..(306): NCBI GI: 164422346 Blast Desc: NCU09306 [Neurospora crassa OR74A] gi|157069540|gb|EDO64868.1| conserved [Neurospora crassa OR74A]
  misc_feature (3)..(311): NCBI GI: 261361101 Blast Desc: meiotic chromosome segregation protein [Verticillium albo-atrum VaMs.102]
  misc_feature (24)..(307): NCBI GI: 212529474 Blast Desc: conserved [Penicillium marneffei ATCC 18224] gi|210074292|gb|EEA28379.1| conserved [Penicillium marneffei ATCC 18224]
  misc_feature (2)..(305): NCBI GI: 171677344 Blast Desc: protein product [Podospora anserina] gi|170936740|emb|CAP61398.1| protein product [Podospora anserina]
  misc_feature (11)..(246): NCBI GI: 145601821 Blast Desc: MGG_10785 [Magnaporthe grisea 70-15] gi|145010313|gb|EDJ94969.1| MGG_10785 [Magnaporthe grisea 70-15]
  misc_feature (16)..(305): NCBI GI: 256724774 Blast Desc: NECHADRAFT_48248 [Nectria haematococca mpVI 77-13-4]
  misc_feature (18)..(308): NCBI GI: 150865027 Blast Desc: PICST_45364 [Pichia stipitis CBS 6054] gi|149386283|gb|ABN66048.2| [Pichia stipitis CBS 6054]
  misc_feature (3)..(308): NCBI GI: 199428954 Blast Desc: DEHA2A06160p [Debaryomyces hansenii]
MPLSKEQMEARLRARGAVPKPKPAYLPTAGSPLTVDEKLYAAIRDAPRVQILDFVLPVRSGRAWKAPAGSIVRISTPEGPQVGDLNIWNAHNPRERFWAARTKQLHASHVSTNDRLWSTLPYMRPLMTILDDTLSWYGVDEHGGRVHDLLGTGCDPYINAVLTSGEKSENGHESDEKRLYNFHCRSNLTRAVLPYGLAESDVHDVINLFQVTGLDEKGRYYMSPCPAEPGDYIEFLAEQDVLMALSTCPGGDLSLWGFGAASEKEMIKCCRPLKVEVFRLQDENSLQKAGWRSAQVSSYRGLHGMVVPKGEHQAAI

SEQ ID NO: 16027 - DNA, 3629 bp, Muscodor strobelii; identical to SEQ ID NO: 16024
  misc_feature: SGI EST ID NO. CUFF.37843.0
  misc_feature: Variant of the nucleotide sequence at SEQ ID NO 16025

SEQ ID NO: 16028 - DNA, 2013 bp, Muscodor strobelii
  misc_feature: SGI cDNA ID NO. 565320
  misc_feature: Encodes the peptide sequence at SEQ ID NO 16029
atgttcctcttgggcggctcttcgaagcggaagaagacatccaaggcagccaagtctagatcccagactgatacacgcgaaacatccagatcaccatctcctctgccatcgccgtcgcccttaccgtccccatccccgtcgatagacccgccatctagatccgtctatctatttgatcaggcacaacttaagccagttgcgccaccgcccgaagatgtcttggacctgaacagcaacctggagagcctggcttcattattcccagatattcagcccgaggtgttccgtgagatgctttcgaacttctccgaggaatccaagttgtttgtcattacagacaaactactcaagaacccttcacattttgtcaaaggccgtcggcgcaacaacgatgatgcacatgtgcaggataaagctctgcctaaaacggaggtcttccggacccccgaatacaagagagccgtccgaactcttgctttgcaggagttcaagggcctctctcgatcatccatcgacgctatcctatcagaatcgaaccactcctacctcgacgcccggccaacactcgtagacctgtcttccaaatcgtggaagttcgccatatcttcgctcatcttccggcgcaagcctgtcacatcgtccgaagccgcaacacatccgctcgtgatatggagggcctccgaggatggtgttctggcgccctccgtcaagtcaactggaaacgccgaattggaccgggagctgttcgacgagctcattctgcccctcaagactcgcgagaaggatgtcagggaaaaggaagaccatgcgctggcaatcacactacaaacagaggaagccgaggcttgcgaggccacgtacgaatgcgcttgctgctttacggattcctgttttgaggagtttaccacgtgcagcgccgagggtcatatggtatgcttccgatgtgtccagcattctataacagaggctgtgtttggacaaggttggcagcgcagcatacacaaagacaccggcaccctgcactgtctggcggtttcatcgactgaatgtgaggggtgcatctcttccgaacatatccgacgagctatggccgatgcagagaaaggggatgagatcctagagaaacttgatcagcgcttggcagaccacggccttatctcgagtggcatgcccctcatacgatgtccattctgcaactatgccgaagtcgacgagctgtatatgccggaccatgccaggagaccgagactccggctcaacaatttgcccaatatcctcttacttctcgtcctcatcatcctctcgcctgcctgtgtcctcctgggcatcatcggtctcatcttcttcctcctaaatctcaacggagccttccgactcgccatgtctcaacagttcactgccgcattcagccgccaccaacgtcgacgccgaggtctaagattcatctgtcagaaccccgcttgtgcgcgatcatcctgcctctcatgcacaaaggcatgggtagacatccacgtctgtcacgagtcctccctgatcgccctgcgcactcaagtcgagcaagctatgtctatggccgtcaagcgtatctgtccacgctgcaacacttctttcgtgaaatcagcaggatgcaacaaattagtctgtccatgcggctacaaaatgtgctacgtctgccgtaaagacatcggtagtcccacagagggatatcagcatttctgccaacattttcgaccggaaggcgacggcagacagtgcacgatgtgcaataagtgtaatctctgggaaacagagaacaccgacgcgatactgcgcaaggcgaaacaagacgcggagcgcaggtggaaagagacagaaggacgcgatctctcggatgccgagaaagcgtatctagacagtggagttggcagtgtaggtagtaccgtaggggagaaagtcgggtccgtcttacgaatcggcaaggtgccgactattgaggaattgtgtgatttcatcgttgagacgttcttcatttga

SEQ ID NO: 16029 - protein, 670 aa, Muscodor strobelii
  misc_feature: SGI Peptide ID NO. 565320
  misc_feature (43)..(670): NCBI GI: 46136253 Blast Desc: FG09642.1 [Gibberella zeae PH-1]
  misc_feature (56)..(670): NCBI GI: 256727624 Blast Desc: [Nectria haematococca mpVI 77-13-4]
  misc_feature (29)..(669): NCBI GI: 171683569 Blast Desc: protein product [Podospora anserina] gi|170941744|emb|CAP67398.1| protein product [Podospora anserina]
  misc_feature (56)..(666): NCBI GI: 164423303 Blast Desc: NCU11393 [Neurospora crassa OR74A] gi|157070036|gb|EDO64953.1| conserved [Neurospora crassa OR74A]
  misc_feature (56)..(670): NCBI GI: 39975853 Blast Desc: MGG_06147 [Magnaporthe grisea 70-15] gi|145011547|gb|EDJ96203.1| MGG_06147 [Magnaporthe grisea 70-15]
  misc_feature (37)..(628): NCBI GI: 156050283 Blast Desc: SS1G_07728 [Sclerotinia sclerotiorum 1980] gi|154692129|gb|EDN91867.1| SS1G_07728 [Sclerotinia sclerotiorum 1980]
  misc_feature (54)..(652): NCBI GI: 116194476 Blast Desc: CHGG_03836 [Chaetomium globosum CBS 148.51] gi|88179749|gb|EAQ87217.1| CHGG_03836 [Chaetomium globosum CBS 148.51]
  misc_feature (76)..(619): NCBI GI: 240110253 Blast Desc: CPC735_062850 [Coccidioides posadasii C735 delta SOWgp]
  misc_feature (76)..(619): NCBI GI: 119180048 Blast Desc: CIMG_08694 [Coccidioides immitis RS]
  misc_feature (75)..(615): NCBI GI: 70982099 Blast Desc: RING finger protein (Zin) [Aspergillus fumigatus Af293] gi|66844201|gb|EAL84540.1| RING finger protein (Zin), [Aspergillus fumigatus Af293] gi|159122188|gb|EDP47310.1| RING
MFLLGGSSKRKKTSKAAKSRSQTDTRETSRSPSPLPSPSPLPSPSPSIDPPSRSVYLFDQAQLKPVAPPPEDVLDLNSNLESLASLFPDIQPEVFREMLSNFSEESKLFVITDKLLKNPSHFVKGRRRNNDDAHVQDKALPKTEVFRTPEYKRAVRTLALQEFKGLSRSSIDAILSESNHSYLDARPTLVDLSSKSWKFAISSLIFRRKPVTSSEAATHPLVIWRASEDGVLAPSVKSTGNAELDRELFDELILPLKTREKDVREKEDHALAITLQTEEAEACEATYECACCFTDSCFEEFTTCSAEGHMVCFRCVQHSITEAVFGQGWQRSIHKDTGTLHCLAVSSTECEGCISSEHIRRAMADAEKGDEILEKLDQRLADHGLISSGMPLIRCPFCNYAEVDELYMPDHARRPRLRLNNLPNILLLLVLIILSPACVLLGIIGLIFFLLNLNGAFRLAMSQQFTAAFSRHQRRRRGLRFICQNPACARSSCLSCTKAWVDIHVCHESSLIALRTQVEQAMSMAVKRICPRCNTSFVKSAGCNKLVCPCGYKMCYVCRKDIGSPTEGYQHFCQHFRPEGDGRQCTMCNKCNLWETENTDAILRKAKQDAERRWKETEGRDLSDAEKAYLDSGVGSVGSTVGEKVGSVLRIGKVPTIEELCDFIVETFFI

SEQ ID NO: 16030 - DNA, 2718 bp, Muscodor strobelii
  misc_feature: SGI cDNA ID NO. 565321
  misc_feature: Reduced expression when VOC is produced
  misc_feature: Encodes the peptide sequence at SEQ ID NO 16031
atggctagccaattgcgctacgacggccaggtcgccgtcgtcaccggcgctggtggtggcttgggaaaagcctatgctttgtttttcgcttcaaggggagccaaggtcgtcatcaacgacttgggcggctcgttcaagggcgagggtaactctacaaaggctgccgatgtggtcgtcgacgaaatcaagaaggccggaggtgaggccgtagccaactacgacagcgtcgagaatggcgacaagatcattgaaaccgccatcaaggcattcggccgtatcgacattctcatcaacaatgccggtatcctacgcgacatcagctttaagaacatgaaagacgaggactgggacctgatcatgaaggtccacgtcagaggcgcatacaagtgtgctcgtgctgcttggcctcatttccgcaaacagaagtacggtcgtgtcatcaataccgcttcagctgctggtctatttggaaactttggccaggccaactactctgctgctaagctggccatggtcggcttcactgagaccctcgctaaagaaggtgtgaagtacaacatcatcgctaatgtcattgccccaattgctgctagccgtatgacggaaaccgtcatgcctccagagcttttggctgccttgaaaccagagtggatcgttcctctagtagctgtcttggtccacaagaacaataccgatgagaccggtgccatcttcgaagttggtggtgggcacattgctaaaatgagatgggagcgatccagcggtctgcttttgaaggccgatgacagctatactcctggcgctatcattaagcaatggagcaaggtcaacgatttctcgaacccccaatatcccactggtcccaatgacttcttggctttactggaggactcgatgaaaatgggccccagcgagcaaggtgagaagatcgacttcgccggtcgtgttgctttggtcactggtggtggtgctggtattggtcgcgcatactgcttggctttcgccaaggctggcgcttctgttgttgtcaatgatcttgtcgaccctgacacagttgtgggggagatcaagaagatgggtggtaaagcagccggcgtcaaagcctcctctgaagagggcgagaaggtcgtcaagggcgccatcgatgccttcggccgcctcgatatcgtgatcaacaatgctggtatcctccgagacaaagctttcaccaacatggatgatagcctttgggatcccgtcatgaacgttcacctccgaagtacctacaaggttactaaggctgcgtggcccatcttcctaaagcagaagtatggacgtgtcatcaacactacatctactagcggtatctacggtaactttggacaagccaattacgccgcagctaaatgcggtattctgggcttctcccgtgctattgctcttgagggtgccaagtacaatatttatgtcaacaccattgctcccaatgctggaacacagatgacaaagacgattttgcccgcagagctcgtacaggcctttaagcctgactacatagctcctctagtcctcgctctgtgcagtgataaggtccccaaggagccgaccggcggtctgtatgaagtcggcagtggttgggctggccgcacgagatggcagcgctctggaggtgttggcttctcccttgataagaagctagagcctgaagaagtcgtcaagaactgggccaagatcgttaacttcgatgatggacggtcagatcatcccgagaagacttccgcttcaatagaaaagatcatggagaatctgcagaagaggcaagcggactctcagggcgctgatgctagtgctggtgctgaggctggcaagggcaacgagttcgtcgcggcgcaggaaaaggccaagaaggtgaagtcaaagtcgaccgagttcacatacgctgagcgtgatgccatgctctacaacttgggtattggtgccaagcgcaccgatctgccttacgtcttcgagggccatgaggatttccaagttctcccaacatacggtgttatccctcaattcgacgtcgagatgcccttcagcttcgatgaggtcgttcccaacttctcgcccatgatgttgctgcacggcgagcaatatctggaagtcaagaagtaccccatcccaaccagcgctaagacacagaaccacgccaagctcatcgaggtcgtggataaaggatcagctgccatcctgaagagcggcgtgactaccgttaatgccgagactggtgaggagctgttctacaatgagtctaccgtcttcctccgcggttgcggtggtttcggtgggcagaagaagcccgctgacaggggcgctgctactgcggccaacgtcccgcctaagagagcccctgatgtcgttgttgagtcgacgactacgcaggaacaggctgctatttatcggttgagcggtgattataaccctctccacatcgacccatccttcgcgaaaatgggcggtttcaaacagcctatcctccacggcctctgcttcatgggcatcgcgggcaaagcggtgtatgagagcttcggcccgtataagaatatcaaggtccggtttgcgggctcggtgttccctggccagacgctgatcacggagatgtggaaggagggtgatggcaagaaggtcgtgttccagactaaggttaaggagacgggtaaacttgctatttcgggggcagctgctgagcttgtttaa

SEQ ID NO: 16031 - protein, 905 aa, Muscodor strobelii
  misc_feature: SGI Peptide ID NO. 565321
  misc_feature (10)..(183): Pfam Id: PF00106 Pfam Desc: short chain dehydrogenase
  misc_feature (315)..(477): Pfam Id: PF00106 Pfam Desc: short chain dehydrogenase
  misc_feature (11)..(191): Pfam Id: PF08659 Pfam Desc: KR domain
  misc_feature (784)..(900): Pfam Id: PF01575 Pfam Desc: MaoC like domain
  misc_feature (1)..(904): NCBI GI: 169893570 Blast Desc: hydratase/dehydrogease multifunctional enzyme type 2 [Starmerella bombicola]
  misc_feature (5)..(896): NCBI GI: 170098915 Blast Desc: multifunctional beta-oxidation protein [Laccaria bicolor S238N-H82] gi|164644201|gb|EDR08451.1| multifunctional beta-oxidation protein [Laccaria bicolor S238N-H82]
  misc_feature (2)..(905): NCBI GI: 58268866 Blast Desc: peroxisomal hydratase-dehydrogenase-epimerase (hde) [Cryptococcus neoformans var. neoformans JEC21] gi|134113022|ref|XP_774787.1| CNBF2170 [Cryptococcus neoformans
  misc_feature (23)..(872): NCBI GI: 164657291 Blast Desc: MGL_3316 [Malassezia globosa CBS 7966] gi|159103665|gb|EDP42558.1| MGL_3316 [Malassezia globosa CBS 7966]
  misc_feature (3)..(606): NCBI GI: 240276685 Blast Desc: acetoacetyl-CoA reductase [Ajellomyces capsulatus H143]
  misc_feature (3)..(905): NCBI GI: 146416347 Blast Desc: PGUG_03524 [Pichia guilliermondii ATCC 6260]
  misc_feature (3)..(905): NCBI GI: 190347193 Blast Desc: PGUG_03524 [Pichia guilliermondii ATCC 6260]
  misc_feature (1)..(905): NCBI GI: 50292863 Blast Desc: protein product [Candida glabrata] gi|49528177|emb|CAG61834.1| protein product [Candida glabrata]
  misc_feature (3)..(904): NCBI GI: 156837464 Blast Desc: Kpol_348p3 [Vanderwaltozyma polyspora DSM 70294] gi|156113322|gb|EDO14899.1| Kpol_348p3 [Vanderwaltozyma polyspora DSM 70294]
  misc_feature (3)..(905): NCBI GI: 126132968 Blast Desc: PICST_54590 [Pichia stipitis CBS 6054] gi|126094834|gb|ABN64980.1| [Pichia stipitis CBS 6054]
  misc_feature (307)..(904): SWISSPROT Homolog: EC 1.1.1.35 3-hydroxyacyl-CoA dehydrogenase
  misc_feature (307)..(904): SWISSPROT Homolog: EC 4.2.1.107 3-alpha,7-alpha,12-alpha-trihydroxy-5-beta-cholest-24-enoyl-CoAhydratase
  misc_feature: Useful for introducing or modulating the production of volatile compounds
MASQLRYDGQVAVVTGAGGGLGKAYALFFASRGAKVVINDLGGSFKGEGNSTKAADVVVDEIKKAGGEAVANYDSVENGDKIIETAIKAFGRIDILINNAGILRDISFKNMKDEDWDLIMKVHVRGAYKCARAAWPHFRKQKYGRVINTASAAGLFGNFGQANYSAAKLAMVGFTETLAKEGVKYNIIANVIAPIAASRMTETVMPPELLAALKPEWIVPLVAVLVHKNNTDETGAIFEVGGGHIAKMRWERSSGLLLKADDSYTPGAIIKQWSKVNDFSNPQYPTGPNDFLALLEDSMKMGPSEQGEKIDFAGRVALVTGGGAGIGRAYCLAFAKAGASVVVNDLVDPDTVVGEIKKMGGKAAGVKASSEEGEKVVKGAIDAFGRLDIVINNAGILRDKAFTNMDDSLWDPVMNVHLRSTYKVTKAAWPIFLKQKYGRVINTTSTSGIYGNFGQANYAAAKCGILGFSRAIALEGAKYNIYVNTIAPNAGTQMTKTILPAELVQAFKPDYIAPLVLALCSDKVPKEPTGGLYEVGSGWAGRTRWQRSGGVGFSLDKKLEPEEVVKNWAKIVNFDDGRSDHPEKTSASIEKIMENLQKRQADSQGADASAGAEAGKGNEFVAAQEKAKKVKSKSTEFTYAERDAMLYNLGIGAKRTDLPYVFEGHEDFQVLPTYGVIPQFDVEMPFSFDEVVPNFSPMMLLHGEQYLEVKKYPIPTSAKTQNHAKLIEVVDKGSAAILKSGVTTVNAETGEELFYNESTVFLRGCGGFGGQKKPADRGAATAANVPPKRAPDVVVESTTTQEQAAIYRLSGDYNPLHIDPSFAKMGGFKQPILHGLCFMGIAGKAVYESFGPYKNIKVRFAGSVFPGQTLITEMWKEGDGKKVVFQTKVKETGKLAISGAAAELV

SEQ ID NO: 16032 - DNA, 5752 bp, Muscodor strobelii
  misc_feature: SGI EST ID NO. CUFF.38563.1
  misc_feature: Variant of the nucleotide sequence at SEQ ID NO 16030
ccatgatccagcccattttcaccctgcctgcattttcatactgagttcactgcctttatccgggtgaggcctattatcctaaactctcaatcctcaatctcccagcttctctctacatcggttctcatctctgtattagagaactgcgaccgtatttcttccttttttccttgtcttcgttgatacccaagcaccagcaaaaccactcacataccacacacaatatggctagccaattgcgctacgacggccaggtcgccgtcgtcaccggcgctggtggtggcttgggaaaagcctatgctttgtttttcgcttcaaggggagccaaggtcgtcatcaacgacttgggcggctcgttcaagggcgagggtaactctacaaaggctgccgatgtggtcgtcgacgaaatcaagaaggccggaggtgaggccgtagccaactacgacagcgtcgagaatggcgacaagatcattgaaaccgccatcaaggcattcggccgtatcgacattctcatcaacaatgccggtatcctacgcgacatcagctttaagaacatgaaagacgaggactgggacctgatcatgaaggtccacgtcagaggcgcatacaagtgtgctcgtgctgcttggcctcatttccgcaaacagaagtacggtcgtgtcatcaataccgcttcagctgctggtctatttggaaactttggccaggccaactactctgctgctaagctggccatggtcggcttcactgagaccctcgctaaagaaggtgtgaagtacaacatcatcgctaatgtcattgccccaattgctgctagccgtatgacggaaaccgtcatgcctccagagcttttggctgccttgaaaccagagtggatcgttcctctagtagctgtcttggtccacaagaacaataccgatgagaccggtgccatcttcgaagttggtggtgggcacattgctaaaatgagatgggagcgatccagcggtctgcttttgaaggccgatgacagctatactcctggcgctatcattaagcaatggagcaaggtcaacgatttctcgaacccccaatatcccactggtcccaatgacttcttggctttactggaggactcgatgaaaatgggccccagcgagcaaggtgagaagatcgacttcgccggtcgtgttgctttggtcactggtggtggtgctggtattggtcgcgcatactgcttggctttcgccaaggctggcgcttctgttgttgtcaatgatcttgtcgaccctgacacagttgtgggggagatcaagaagatgggtggtaaagcagccggcgtcaaagcctcctctgaagagggcgagaaggtcgtcaagggcgccatcgatgccttcggccgcctcgatatcgtgatcaacaatgctggtatcctccgagacaaagctttcaccaacatggatgatagcctttgggatcccgtcatgaacgttcacctccgaagtacctacaaggttactaaggctgcgtggcccatcttcctaaagcagaagtatggacgtgtcatcaacactacatctactagcggtatctacggtaactttggacaagccaattacgccgcagctaaatgcggtattctgggcttctcccgtgctattgctcttgagggtgccaagtacaatatttatgtcaacaccattgctcccaatgctggaacacagatgacaaagacgattttgcccgcagagctcgtacaggcctttaagcctgactacatagctcctctagtcctcgctctgtgcagtgataaggtccccaaggagccgaccggcggtctgtatgaagtcggcagtggttgggctggccgcacgagatggcagcgctctggaggtgttggcttctcccttgataagaagctagagcctgaagaagtcgtcaagaactgggccaagatcgttaacttcgatgatggacggtcagatcatcccgagaagacttccgcttcaatagaaaagatcatggagaatctgcagaagaggcaagcggactctcagggcgctgatgctagtgctggtgctgaggctggcaagggcaacgagttcgtcgcggcgcaggaaaaggccaagaaggtgaagtcaaagtcgaccgagttcacatacgctgagcgtgatgccatgctctacaacttgggtattggtgccaagcgcaccgatctgccttacgtcttcgagggccatgaggatttccaagttctcccaacatacggtgttatccctcaattcgacgtcgagatgcccttcagcttcgatgaggtcgttcccaacttctcgcccatgatgttgctgcacggcgagcaatatctggaagtcaagaagtaccccatcccaaccagcgctaagacacagaaccacgccaagctcatcgaggtcgtggataaaggatcagctgccatcctgaagagcggcgtgactaccgttaatgccgagactggtgaggagctgttctacaatgagtctaccgtcttcctccgcggttgcggtggtttcggtgggcagaagaagcccgctgacaggggcgctgctactgcggccaacgtcccgcctaagagagcccctgatgtcgttgttgagtcgacgactacgcaggaacaggctgctatttatcggttgagcggtgattataaccctctccacatcgacccatccttcgcgaaaatgggcggtttcaaacagcctatcctccacggcctctgcttcatgggcatcgcgggcaaagcggtgtatgagagcttcggcccgtataagaatatcaaggtccggtttgcgggctcggtgttccctggccagacgctgatcacggagatgtggaaggagggtgatggcaagaaggtcgtgttccagactaaggttaaggagacgggtaaacttgctatttcgggggcagctgctgagcttgtttaagtggcattgaggaagagagggggaaggatagggagatgagagatggctgggggaagatgtatgaataatgcgcatatgtggacatggttcttgaaatcttatagatttcgtatcgtattgtttaggcgtttgaaaatgatatttatttcagatttgcttcagaattactcttgctatgctgttacctccttcgaccggattgagccatttaacctaatgggttaactgcttaactcggacttgtaggttggttatcaatctaaaattttatttggtcgcaatactgtctgtacctaattgatatcatagcaagttttcatgcaataggggtatatcccatataagtaccttatcttaatgctcaatccatctttcttatccctcgaatagcaattcccctaaacaccgagcgaaaacgtactcccttccctaatgcaataacagccatgcgtgctgatctttctcttggccttttgtgttctgtgttccctgctccctggaaaagactcttttactcctttgggttggccaatatcaaatgaagaacgtctcaacgatgaaatcacacaattcctcaatagtcggcaccttgccgattcgtaagacggacccgactttctcccctacggtactacctacactgccaactccactgtctagatacgctttctcggcatccgagagatcgcgtccttctgtctctttccacctgcgctccgcgtcttgtttcgccttgcgcagtatcgcgtcggtgttctctgtttcccagagattacacttattgcacatcgtgcactgtctgccgtcgccttccggtcgaaaatgttggcagaaatgctgatatccctctgtgggactaccgatgtctttacggcagacgtagcacattttgtagccgcatggacagactaatttgttgcatcctgctgatttcacgaaagaagtgttgcagcgtggacagatacgcttgacggccatagacatagcttgctcgacttgagtgcgcagggcgatcagggaggactcgtgacagacgtggatgtctacccatgcctttgtgcatgagaggcaggatgatcgcgcacaagcggggttctgacagatgaatcttagacctcggcgtcgacgttggtggcggctgaatgcggcagtgaactgttgagacatggcgagtcggaaggctccgttgagatttaggaggaagaagatgagaccgatgatgcccaggaggacacaggcaggcgagaggatgatgaggacgagaagtaagaggatattgggcaaattgttgagccggagtctcggtctcctggcatggtccggcatatacagctcgtcgacttcggcatagttgcagaatggacatcgtatgaggggcatgccactcgagataaggccgtggtctgccaagcgctgatcaagtttctctaggatctcatcccctttctctgcatcggccatagctcgtcggatatgttcggaagagatgcacccctcacattcagtcgatgaaaccgccagacagtgcagggtgccggtgtctttgtgtatgctgcgctgccaaccttgtccaaacacagcctctgttatagaatgctggacacatcggaagcataccatatgaccctcggcgctgcacgtggtaaactcctcaaaacaggaatccgtaaagcagcaagcgcattcgtacgtggcctcgcaagcctcggcttcctctgtttgtagtgtgattgccagcgcatggtcttccttttccctgacatccttctcgcgagtcttgaggggcagaatgagctcgtcgaacagctcccggtccaattcggcgtttccagttgacttgacggagggcgccagaacaccatcctcggaggccctccatatcacgagcggatgtgttgcggcttcggacgatgtgacaggcttgcgccggaagatgagcgaagatatggcgaacttccacgatttggaagacaggtctacgagtgttggccgggcgtcgaggtaggagtggttcgattctgataggatagcgtcgatggatgatcgagagaggcccttgaactcctgcaaagcaagagttcggacggctctcttgtattcgggggtccggaagacctccgttttaggcagagctttatcctgcacatgtgcatcatcgttgttgcgccgacggcctttgacaaaatgtgaagggttcttgagtagtttgtctgtaatgacaaacaacttggattcctcggagaagttcgaaagcatctcacggaacacctcgggctgaatatctgggaataatgaagccaggctctccaggttgctgttcaggtccaagacatcttcgggcggtggcgcaactggcttaagttgtgcctgatcaaatagatagacggatctagatggcgggtctatcgacggggatggggacggtaagggcgacggcgatggcagaggagatggtgatctggatgtttcgcgtgtatcagtctgggatctagacttggctgccttggatgtcttcttccgcttcgaagagccgcccaagaggaacatgttgatcaaggtggccaagtcgataggtccacgggcaccatgatgtcgtcgtccggggggtgagaagtgtgctgtaaatgctgtatttcagcgtctcgggagttgagagtatataactccaggtcggccttggacgccagacagctctttatacgtctgagagaagaagatactcagacagcaagtgcgacaaatggtgttcgcgctttgaacgagtgcatgtgaacagaagataatgcagcctggtggtgaacatgaccacg

SEQ ID NO: 16033 - DNA, 999 bp, Muscodor strobelii
  misc_feature: SGI cDNA ID NO. 565322
  misc_feature: Encodes the peptide sequence at SEQ ID NO 16034
atgggatccgttacaggtgccaacgacaatgcgggtggtttaccggatactcaaacaatagaggccacgactacattaaaggaagcaattttggaaaccaatgtcaaaagtaccgaaataattgatgataagagcgaaatatgcataccgttcattctcgaacgcgtccgcgcccaccttgcgtcagcgactgacgcagagactccacggccgtttataattggactcaacggtgtccaaggggtaggaaaaacaactttagttcaaactctagcagagacactgcaacatcaagagggcttggagactctcgttgtcagtatcgatgatttctatctcgcccacgatgaccaaattgccctagcggcttcaatgcccgacaataaattagtccaagtaagaggggagccaggaacacacgacatccccctcctccgtacattcttcggcgcaatcctcaccaacaccccaaccctcgtccccacctacgacaaatcactcttctccggctcaggcgaccgcacctctccctcaacctggaaaccaataaacacacccacccaaccgccaatccaggtcctaatcttcgaaggctggtgcgtcggcttccggtccctcacccccacagaaatccaccgaaaatacaatctccccagccgaaccctcaaatcccactccctcccgcatctagacttcataaacgaaagcctccgctcctacgacgcagtcacggacctattcgacgcgtttatacacatcgacgccgaagacacggaatgggtctacgactggagattagaacaggaagtcatgctgcgcgcgcagaaggggacgggcatgagtgatgagcaggttattaagtttgtcgatgcttattatcccgcttatgagctcttcaccgataagttgaggggtggtgtgttcccgggaaaggtaggtgcgcagttgaggttagttgtgggcaaagacagacgggtgaagatgagtactgtactttaa

SEQ ID NO: 16034 - protein, 332 aa, Muscodor strobelii
  misc_feature: SGI Peptide ID NO. 565322
  misc_feature (37)..(332): NCBI GI: 39975849 Blast Desc: MGG_06149 [Magnaporthe grisea 70-15] gi|145011545|gb|EDJ96201.1| MGG_06149 [Magnaporthe grisea 70-15]
  misc_feature (38)..(332): NCBI GI: 171683531 Blast Desc: protein product [Podospora anserina] gi|170941725|emb|CAP67379.1| protein product [Podospora anserina]
  misc_feature (40)..(319): NCBI GI: 46136257 Blast Desc: FG09644.1 [Gibberella zeae PH-1]
  misc_feature (40)..(319): NCBI GI: 256727623 Blast Desc: [Nectria haematococca mpVI 77-13-4]
  misc_feature (33)..(326): NCBI GI: 156045513 Blast Desc: SS1G_09946 [Sclerotinia sclerotiorum 1980] gi|154694340|gb|EDN94078.1| SS1G_09946 [Sclerotinia sclerotiorum 1980]
  misc_feature (35)..(326): NCBI GI: 154290511 Blast Desc: BC1G_15687 [Botryotinia fuckeliana B05.10] gi|150847535|gb|EDN22728.1| BC1G_15687 [Botryotinia fuckeliana B05.10]
  misc_feature (38)..(332): NCBI GI: 116194466 Blast Desc: CHGG_03831 [Chaetomium globosum CBS 148.51] gi|88179744|gb|EAQ87212.1| CHGG_03831 [Chaetomium globosum CBS 148.51]
  misc_feature (38)..(332): NCBI GI: 164423299 Blast Desc: NCU08827 [Neurospora crassa OR74A] gi|157070034|gb|EAA32802.2| conserved [Neurospora crassa OR74A]
  misc_feature (39)..(327): NCBI GI: 212536488 Blast Desc: conserved [Penicillium marneffei ATCC 18224] gi|210070799|gb|EEA24889.1| conserved [Penicillium marneffei ATCC 18224]
  misc_feature (38)..(327): NCBI GI: 121714447 Blast Desc: Uridine/cytidine kinase, [Aspergillus clavatus NRRL 1] gi|119402988|gb|EAW13408.1| Uridine/cytidine kinase, [Aspergillus clavatus NRRL 1]
  misc_feature (54)..(299): SWISSPROT Homolog: EC 2.7.1.31 Glycerate kinase
MGSVTGANDNAGGLPDTQTIEATTTLKEAILETNVKSTEIIDDKSEICIPFILERVRAHLASATDAETPRPFIIGLNGVQGVGKTTLVQTLAETLQHQEGLETLVVSIDDFYLAHDDQIALAASMPDNKLVQVRGEPGTHDIPLLRTFFGAILTNTPTLVPTYDKSLFSGSGDRTSPSTWKPINTPTQPPIQVLIFEGWCVGFRSLTPTEIHRKYNLPSRTLKSHSLPHLDFINESLRSYDAVTDLFDAFIHIDAEDTEWVYDWRLEQEVMLRAQKGTGMSDEQVIKFVDAYYPAYELFTDKLRGGVFPGKVGAQLRLVVGKDRRVKMSTVL

SEQ ID NO: 16035 - DNA, 3277 bp, Muscodor strobelii
  misc_feature: SGI EST ID NO. CUFF.38835.0
  misc_feature: Variant of the nucleotide sequence at SEQ ID NO 16033
gactcaacggtgtccaaggggtaggaaaaacaactttagttcaaactctagcagagacactgcaacatcaagagggcttggagactctcgttgtcagtatcgatgatttctatctcgcccacgatgaccaaattgccctagcggcttcaatgcccgacaataaattagtccaagtaagaggggagccaggaacacacgacatccccctcctccgtacattcttcggcgcaatcctcaccaacaccccaaccctcgtccccacctacgacaaatcactcttctccggctcaggcgaccgcacctctccctcaacctggaaaccaataaacacacccacccaaccgccaatccaggtcctaatcttcgaaggctggtgcgtcggcttccggtccctcacccccacagaaatccaccgaaaatacaatctccccagccgaaccctcaaatcccactccctcccgcatctagacttcataaacgaaagcctccgctcctacgacgcagtcacggacctattcgacgcgtttatacacatcgacgccgaagacacggaatgggtctacgactggagattagaacaggaagtcatgctgcgcgcgcagaaggggacgggcatgagtgatgagcaggttattaagtttgtcgatgcttattatcccgcttatgagctcttcaccgataagttgaggggtggtgtgttcccgggaaaggtaggtgcgcagttgaggttagttgtgggcaaagacagacgggtgaagatgagtactgtactttaatatgaatcaccttatgaagaaaaggtgaaagtgagatcaattggtacaaaatatattcgatcgctctcgagaactatttctcaaattctctgtattacattgtcatgatattcgtagcccatgccagccctaaactccatccgtaacagcaatcaaagcaaaagcaaacctccaaacgccgactatgcggtcgtaaagtcgttataatccccgtgtgtcaacaccgtataacacgccctttctctatccccgcttcttttaatacagcagtcatgtaatcatatataagagaggaaggtcccccaaaagagattgccgtgcggatccatttctagaatggactgcctttagtccatatccttattaagtatcatcttgctgccttcggacttgagctcagcaagcgtctggccgatgccctgcatcttatttcgtacagcctcctctctgtccgcgatctcgttctcaaacgactcgatgatctctcgtttagcaacacgttgcgtcttgaagccggccatgatagaggcaaatttctccaggaaccaatccccggattcctcccactctttgatggacatcttcgtgaagaactcggcttgtctcgcttcgtccttgccatagaaatggttgagtttatctgctagtgtaccttcgggtggcccaacggctgatcgtgcttcggcttgggctgggtcgtagtcgaacttctcttgtctcagacgggagtactccatgctcgacagctgtccatcatcatagtcaagttcaagcgagcgcttcttggacgttgtatgctgcttctcctgtacaactcgaggcatagcactctcgcgtagcccgcctttacccttgctctcatttttgaaaagctgccgactcgtcgagggcttgcttttcacagctggtttgggcgtgggcactcgctcttctacagcacttcgggcctccgcctcgtcttggtgactgaccatgggtgtgtcggtgtcggcgaagatagttgagcgacggacttcatgttctgacgtctgaattttaggtaggcgcagttgtggcacttgtagtgcttgatcgcgaacaccgtcctcaactagtttcacctcaatttcctgtgttgggattgtcgatccgatcccgttttcattgaagtggttatttctttccgcgaaagattctccacgtccgtctctcagagtcatagtcttgaacgggtggtgaaggcgttttgcagaaggagtcttttcgggagattgctcatatgggctatcagaagaatacggatcacggccattgcccacgatggtttccttaaagccatttcggtaagctctagcatcaggagtcgacgcgctcctggtgagactatttccattgggtatctcgcttatcaacccatccgggcccatcagcatctggtcgggttggtcagccaagtccaccttccttggactgggccggtgacggtgaggcgacgctatttgttgatagttgaaatacaatggctggtctggcctctgccgatagccaggttgcgcgttcgaaccgatgttactggcagtgtcactgaacgcggagccgtctactgtggactgatcccagaaagggccctgctgtctattggaggtatgcaagttctctgacgggatggacttatgtcgtggaagattcaaaatggtctctctgggctgactgggacggatagccacgggtatgtgagttggattggcagtggctgcgcgctgagaattgacattgactataggcgcacgcgaacgaggcggcgaaggctgttgcaattggttctgcgacaccgggggggcgctggtagaggtgggctgtgatagattcacgacgcgcttttgaggctggggctgtggtagaggttgcgattggggttgggacgaagactcgcgtctcgcgtgggcgtgggcagagctcgccggcgcagcagcaacgacaggcgagttgccatgatgcaacccggggttgttagtgacccaggcctgcatcttgttcctcgactgtttgagaaaactactattcggcatcagggatgggggatcggatttgctggctggtgcttgtggttcgggggagggggatttcttgtttcttgtttcttggtgattctgtgttggcacagtcccaatggtgcttggataccgggcggtggctgatgtgcgagtgtttgcggaaacttggaagcgggagcgtgtaagagatcgtgtcgtggtgtttgatgttttgtgtattgtgttctgtcgtgtcgtggtcgcgcggtggcgactcgaatcgggtgcacgagaggcaaagccgaccgattatgtattattacgcagccatcctacccaataatgcgccggataggttgggtcgcaacatagacatgctcaaccgctcgggggcgagtaagggagcgtgggtggcatgaagcgtcgactggttggagatggagtcgtgagaggcgtgtggtgaacacggaaggagctctggtctctggc

SEQ ID NO: 16036 - DNA, 1662 bp, Muscodor strobelii
  misc_feature: SGI cDNA ID NO. 565323
  misc_feature: Encodes the peptide sequence at SEQ ID NO 16037
atgcaggcctgggtcactaacaaccccgggttgcatcatggcaactcgcctgtcgttgctgctgcgccggcgagctctgcccacgcccacgcgagacgcgagtcttcgtcccaaccccaatcgcaacctctaccacagccccagcctcaaaagcgcgtcgtgaatctatcacagcccacctctaccagcgcccccccggtgtcgcagaaccaattgcaacagccttcgccgcctcgttcgcgtgcgcctatagtcaatgtcaattctcagcgcgcagccactgccaatccaactcacatacccgtggctatccgtcccagtcagcccagagagaccattttgaatcttccacgacataagtccatcccgtcagagaacttgcatacctccaatagacagcagggccctttctgggatcagtccacagtagacggctccgcgttcagtgacactgccagtaacatcggttcgaacgcgcaacctggctatcggcagaggccagaccagccattgtatttcaactatcaacaaatagcgtcgcctcaccgtcaccggcccagtccaaggaaggtggacttggctgaccaacccgaccagatgctgatgggcccggatgggttgataagcgagatacccaatggaaatagtctcaccaggagcgcgtcgactcctgatgctagagcttaccgaaatggctttaaggaaaccatcgtgggcaatggccgtgatccgtattcttctgatagcccatatgagcaatctcccgaaaagactccttctgcaaaacgccttcaccacccgttcaagactatgactctgagagacggacgtggagaatctttcgcggaaagaaataaccacttcaatgaaaacgggatcggatcgacaatcccaacacaggaaattgaggtgaaactagttgaggacggtgttcgcgatcaagcactacaagtgccacaactgcgcctacctaaaattcagacgtcagaacatgaagtccgtcgctcaactatcttcgccgacaccgacacacccatggtcagtcaccaagacgaggcggaggcccgaagtgctgtagaagagcgagtgcccacgcccaaaccagctgtgaaaagcaagccctcgacgagtcggcagcttttcaaaaatgagagcaagggtaaaggcgggctacgcgagagtgctatgcctcgagttgtacaggagaagcagcatacaacgtccaagaagcgctcgcttgaacttgactatgatgatggacagctgtcgagcatggagtactcccgtctgagacaagagaagttcgactacgacccagcccaagccgaagcacgatcagccgttgggccacccgaaggtacactagcagataaactcaaccatttctatggcaaggacgaagcgagacaagccgagttcttcacgaagatgtccatcaaagagtgggaggaatccggggattggttcctggagaaatttgcctctatcatggccggcttcaagacgcaacgtgttgctaaacgagagatcatcgagtcgtttgagaacgagatcgcggacagagaggaggctgtacgaaataagatgcagggcatcggccagacgcttgctgagctcaagtccgaaggcagcaagatgatacttaataaggatatggactaa

SEQ ID NO: 16037 - protein, 553 aa, Muscodor strobelii
  misc_feature: SGI Peptide ID NO. 565323
  misc_feature (406)..(553): NCBI GI: 116194464 Blast Desc: CHGG_03830 [Chaetomium globosum CBS 148.51] gi|88179743|gb|EAQ87211.1| CHGG_03830 [Chaetomium globosum CBS 148.51]
  misc_feature (390)..(546): NCBI GI: 39975847 Blast Desc: MGG_06150 [Magnaporthe grisea 70-15] gi|145011544|gb|EDJ96200.1| MGG_06150 [Magnaporthe grisea 70-15]
  misc_feature (408)..(553): NCBI GI: 85105795 Blast Desc: NCU08826 [Neurospora crassa OR74A] gi|28923630|gb|EAA32801.1| [Neurospora crassa OR74A]
  misc_feature (390)..(553): NCBI GI: 171683533 Blast Desc: protein product [Podospora anserina] gi|170941726|emb|CAP67380.1| protein product [Podospora anserina]
  misc_feature (293)..(550): NCBI GI: 46136259 Blast Desc: FG09645.1 [Gibberella zeae PH-1]
  misc_feature (414)..(547): NCBI GI: 189210315 Blast Desc: [Pyrenophora tritici-repentis Pt-1C-BFP] gi|187977582|gb|EDU44208.1| [Pyrenophora tritici-repentis Pt-1C-BFP]
  misc_feature (415)..(547): NCBI GI: 169618812 Blast Desc: SNOG_12598 [Phaeosphaeria nodorum SN15] gi|160703686|gb|EAT79896.2| SNOG_12598 [Phaeosphaeria nodorum SN15]
  misc_feature (407)..(547): NCBI GI: 261192416 Blast Desc: conserved [Ajellomyces dermatitidis SLH14081] gi|239589490|gb|EEQ72133.1| conserved [Ajellomyces dermatitidis SLH14081]
  misc_feature (407)..(547): NCBI GI: 239615206 Blast Desc: conserved [Ajellomyces dermatitidis ER-3]
  misc_feature (409)..(548): NCBI GI: 154290513 Blast Desc: BC1G_15688 [Botryotinia fuckeliana B05.10] gi|150847536|gb|EDN22729.1| BC1G_15688 [Botryotinia fuckeliana B05.10]
MQAWVTNNPGLHHGNSPVVAAAPASSAHAHARRESSSQPQSQPLPQPQPQKRVVNLSQPTSTSAPPVSQNQLQQPSPPRSRAPIVNVNSQRAATANPTHIPVAIRPSQPRETILNLPRHKSIPSENLHTSNRQQGPFWDQSTVDGSAFSDTASNIGSNAQPGYRQRPDQPLYFNYQQIASPHRHRPSPRKVDLADQPDQMLMGPDGLISEIPNGNSLTRSASTPDARAYRNGFKETIVGNGRDPYSSDSPYEQSPEKTPSAKRLHHPFKTMTLRDGRGESFAERNNHFNENGIGSTIPTQEIEVKLVEDGVRDQALQVPQLRLPKIQTSEHEVRRSTIFADTDTPMVSHQDEAEARSAVEERVPTPKPAVKSKPSTSRQLFKNESKGKGGLRESAMPRVVQEKQHTTSKKRSLELDYDDGQLSSMEYSRLRQEKFDYDPAQAEARSAVGPPEGTLADKLNHFYGKDEARQAEFFTKMSIKEWEESGDWFLEKFASIMAGFKTQRVAKREIIESFENEIADREEAVRNKMQGIGQTLAELKSEGSKMILNKDMD

SEQ ID NO: 16038 - DNA, 3418 bp, Muscodor strobelii
  misc_feature: SGI EST ID NO. CUFF.38835.1
  misc_feature: Variant of the nucleotide sequence at SEQ ID NO 16036
gccagagaccagagctccttccgtgttcaccacacgcctctcacgactccatctccaaccagtcgacgcttcatgccacccacgctcccttactcgcccccgagcggttgagcatgtctatgttgcgacccaacctatccggcgcattattgggtaggatggctgcgtaataatacataatcggtcggctttgcctctcgtgcacccgattcgagtcgccaccgcgcgaccacgacacgacagaacacaatacacaaaacatcaaacaccacgacacgatctcttacacgctcccgcttccaagtttccgcaaacactcgcacatcagccaccgcccggtatccaagcaccattgggactgtgccaacacagaatcaccaagaaacaagaaacaagaaatccccctcccccgaaccacaagcaccagccagcaaatccgatcccccatccctgatgccgaatagtagttttctcaaacagtcgaggaacaagatgcaggcctgggtcactaacaaccccgggttgcatcatggcaactcgcctgtcgttgctgctgcgccggcgagctctgcccacgcccacgcgagacgcgagtcttcgtcccaaccccaatcgcaacctctaccacagccccagcctcaaaagcgcgtcgtgaatctatcacagcccacctctaccagcgcccccccggtgtcgcagaaccaattgcaacagccttcgccgcctcgttcgcgtgcgcctatagtcaatgtcaattctcagcgcgcagccactgccaatccaactcacatacccgtggctatccgtcccagtcagcccagagagaccattttgaatcttccacgacataagtccatcccgtcagagaacttgcatacctccaatagacagcagggccctttctgggatcagtccacagtagacggctccgcgttcagtgacactgccagtaacatcggttcgaacgcgcaacctggctatcggcagaggccagaccagccattgtatttcaactatcaacaaatagcgtcgcctcaccgtcaccggcccagtccaaggaaggtggacttggctgaccaacccgaccagatgctgatgggcccggatgggttgataagcgagatacccaatggaaatagtctcaccaggagcgcgtcgactcctgatgctagagcttaccgaaatggctttaaggaaaccatcgtgggcaatggccgtgatccgtattcttctgatagcccatatgagcaatctcccgaaaagactccttctgcaaaacgccttcaccacccgttcaagactatgactctgagagacggacgtggagaatctttcgcggaaagaaataaccacttcaatgaaaacgggatcggatcgacaatcccaacacaggaaattgaggtgaaactagttgaggacggtgttcgcgatcaagcactacaagtgccacaactgcgcctacctaaaattcagacgtcagaacatgaagtccgtcgctcaactatcttcgccgacaccgacacacccatggtcagtcaccaagacgaggcggaggcccgaagtgctgtagaagagcgagtgcccacgcccaaaccagctgtgaaaagcaagccctcgacgagtcggcagcttttcaaaaatgagagcaagggtaaaggcgggctacgcgagagtgctatgcctcgagttgtacaggagaagcagcatacaacgtccaagaagcgctcgcttgaacttgactatgatgatggacagctgtcgagcatggagtactcccgtctgagacaagagaagttcgactacgacccagcccaagccgaagcacgatcagccgttgggccacccgaaggtacactagcagataaactcaaccatttctatggcaaggacgaagcgagacaagccgagttcttcacgaagatgtccatcaaagagtgggaggaatccggggattggttcctggagaaatttgcctctatcatggccggcttcaagacgcaacgtgttgctaaacgagagatcatcgagtcgtttgagaacgagatcgcggacagagaggaggctgtacgaaataagatgcagggcatcggccagacgcttgctgagctcaagtccgaaggcagcaagatgatacttaataaggatatggactaaaggcagtccattctagaaatggatccgcacggcaatctcttttgggggaccttcctctcttatatatgattacatgactgctgtattaaaagaagcggggatagagaaagggcgtgttatacggtgttgacacacggggattataacgactttacgaccgcatagtcggcgtttggaggtttgcttttgctttgattgctgttacggatggagtttagggctggcatgggctacgaatatcatgacaatgtaatacagagaatttgagaaatagttctcgagagcgatcgaatatattttgtaccaattgatctcactttcaccttttcttcataaggtgattcatattaaagtacagtactcatcttcacccgtctgtctttgcccacaactaacctcaactgcgcacctacctttcccgggaacacaccacccctcaacttatcggtgaagagctcataagcgggataataagcatcgacaaacttaataacctgctcatcactcatgcccgtccccttctgcgcgcgcagcatgacttcctgttctaatctccagtcgtagacccattccgtgtcttcggcgtcgatgtgtataaacgcgtcgaataggtccgtgactgcgtcgtaggagcggaggctttcgtttatgaagtctagatgcgggagggagtgggatttgagggttcggctggggagattgtattttcggtggatttctgtgggggtgagggaccggaagccgacgcaccagccttcgaagattaggacctggattggcggttgggtgggtgtgtttattggtttccaggttgagggagaggtgcggtcgcctgagccggagaagagtgatttgtcgtaggtggggacgagggttggggtgttggtgaggattgcgccgaagaatgtacggaggagggggatgtcgtgtgttcctgtagtgttttgtgtgttaatgaggcgtggtgtaaagggagatagggagtgatggtcaatatgagcagagagtagagtatagacatgcgcccgtgtttgtgaatagatataagcagatatgagaggagcttatatcgtacctggctcccctcttacttggactaatttattgtcgggcattgaagccgctagggcaatttggtcatcgtgggcgagatagaaatcatcgatactgacaacgagagtctccaagccctcttgatgttgcagtgtctctgctagagtttgaactaaagttgtttttcctaccccttggacaccgttgagtc

SEQ ID NO: 16039 - DNA, 732 bp, Muscodor strobelii
  misc_feature: SGI cDNA ID NO. 565324
  misc_feature: Encodes the peptide sequence at SEQ ID NO 16040
atggcatcaaaacatgcgtggaaaatagagctgttcccatgggaccattcgagtacagcacatgtcgagcgcatgtacgaccagcgaatcgcatgcgggtggcgggcagacgaagtacaatcttgggttgagtctgcaaagaaaggagggaagatgttctactgggctactttgtcgaagagtgtctcggaccgggataatttgctgcagaaacatgcccaggcctacccaaagcaagcaactccccttaaagacactgcgaaagagattcgtctcgtggcacaagaacctaccaatgcggagtttattcctattggtcatattgcgttggaaatccacagcgcggaagatgatggaaagttgggcttgccgtcaccgggtacagtctgggcacaccagctttacatttcagatgcgttgcagaatggtgggtatggtgttgcgactatggcccaagccgaggccatagcgacaagagaaccgatgaacgccacgacgatggccctggacacacttgcgaagactgtgaaggatgaccttgagggtatggagaggatcgagattggaaacgggaactcggttcctgtgacctccaaggaggattggtatgctcgtcagggttactatacttacgagcggaaatctggctacgtctatgagatgccggacgggcgaaaggttcctctctttgtgtcgttcatgaggaaggatattggttcaaagatcaactag

SEQ ID NO: 16040 - protein, 243 aa, Muscodor strobelii
  misc_feature: SGI Peptide ID NO. 565324
  misc_feature (8)..(224): NCBI GI: 261352252 Blast Desc: conserved [Verticillium albo-atrum VaMs.102]
  misc_feature (8)..(239): NCBI GI: 46129282 Blast Desc: FG08826.1 [Gibberella zeae PH-1]
  misc_feature (8)..(217): NCBI GI: 145613660 Blast Desc: MGG_01454 [Magnaporthe grisea 70-15] gi|145020710|gb|EDK04839.1| MGG_01454 [Magnaporthe grisea 70-15]
  misc_feature (9)..(238): NCBI GI: 261361235 Blast Desc: [Verticillium albo-atrum VaMs.102]
  misc_feature (8)..(239): NCBI GI: 255942189 Blast Desc: Pc18g00160 [Penicillium chrysogenum Wisconsin 54-1255] gi|211586596|emb|CAP94240.1| Pc18g00160 [Penicillium chrysogenum Wisconsin 54-1255]
  misc_feature (8)..(238): NCBI GI: 238485282 Blast Desc: conserved [Aspergillus flavus NRRL3357] gi|220698758|gb|EED55097.1| conserved [Aspergillus flavus NRRL3357]
  misc_feature (8)..(238): NCBI GI: 154321501 Blast Desc: BC1G_01625 [Botryotinia fuckeliana B05.10] gi|150852163|gb|EDN27355.1| BC1G_01625 [Botryotinia fuckeliana B05.10]
  misc_feature (8)..(239): NCBI GI: 256733674 Blast Desc: NECHADRAFT_78022 [Nectria haematococca mpVI 77-13-4]
  misc_feature (8)..(239): NCBI GI: 154301453 Blast Desc: BC1G_10396 [Botryotinia fuckeliana B05.10] gi|150856136|gb|EDN31328.1| BC1G_10396 [Botryotinia fuckeliana B05.10]
  misc_feature (8)..(208): NCBI GI: 156033029 Blast Desc: SS1G_13590 [Sclerotinia sclerotiorum 1980] gi|154698993|gb|EDN98731.1| SS1G_13590 [Sclerotinia sclerotiorum 1980]
MASKHAWKIELFPWDHSSTAHVERMYDQRIACGWRADEVQSWVESAKKGGKMFYWATLSKSVSDRDNLLQKHAQAYPKQATPLKDTAKEIRLVAQEPTNAEFIPIGHIALEIHSAEDDGKLGLPSPGTVWAHQLYISDALQNGGYGVATMAQAEAIATREPMNATTMALDTLAKTVKDDLEGMERIEIGNGNSVPVTSKEDWYARQGYYTYERKSGYVYEMPDGRKVPLFVSFMRKDIGSKIN

SEQ ID NO: 16041 - DNA, 1340 bp, Muscodor strobelii
  misc_feature: SGI EST ID NO. CUFF.39178.0
  misc_feature: Variant of the nucleotide sequence at SEQ ID NO 16039
ctaaattcaccgtttcttctaggactgagagtttaatgaaaccatatgaaagatggcatcaaaacatgcgtggaaaatagagctgttcccatgggaccattcgagtacagcacatgtcgagcgcatgtacgaccagcgaatcgcatgcgggtggcgggcagacgaagtacaatcttgggttgagtctgcaaagaaaggagggaagatgttctactgggctactttgtcgaagagtgtctcggaccgggataatttgctgcagaaacatgcccaggcctacccaaagcaagcaactccccttaaagacactgcgaaagagattcgtctcgtggcacaagaacctaccaatgcggagtttattcctattggtcatattgcgttggaaatccacagcgcggaagatgatggaaagttgggcttgccgtcaccgggtacagtctgggcacaccagctttacatttcagatgcgttgcagaatggtgggtatggtgttgcgactatggcccaagccgaggccatagcgacaagagaaccgatgaacgccacgacgatggccctggacacacttgcgaagactgtgaaggatgaccttgagggtatggagaggatcgagattggaaacgggaactcggttcctgtggtgagtgaactggcatgctacatgacgtggacgggacgatactgacgggggatgtagacctccaaggaggattggtatgctcgtcagggttactatacttacgagcggaaatctggctacgtctatgagatgccggacgggcgaaaggttcctctctttgtgtcgttcatgaggaaggatattggttcaaagatcaactagtaaaaacgtgggatttcgggttgaaccgatgggacttgcatgcagtggacctgagatagcctcatatgtaatcgattggatgagagtgatatgatacaggtcaagcgggaacgacaagtcgttatgacgtggagaaaatgttgagttctgagcagttatgtagaagcatggtggcccaacgtctattatagacgcgggtgtatggagaggagggttgcaatgtgggtatgagcaatagatagacgcggttcggtcaaccaactgcgacttgggggacaacacatcggacatgcagatgtaagaatgtccaatatgctagatgtgggtacataaggttgaggctgtcgaaacccggtttgcgatattatttgtcgaagccgttccttggagtgcacgatgctgtcatgtggccgagtttacctggtatgaggttcctgagaggacgggtagagtgcgaccgaccaattaatgggcggaggggaacagtcttaccctagag

SEQ ID NO: 16042 - DNA, 3135 bp, Muscodor strobelii
  misc_feature: SGI cDNA ID NO. 565325
  misc_feature: Reduced expression when VOC is produced
  misc_feature: Encodes the peptide sequence at SEQ ID NO 16043
atgccgcactcagagccagagggaccagtggtcaagcgacagaagctcaactctgtcgcaaagtccaagtcctcgacttcgtcccaatcccgtatcttcgcaccttaccgcactgttggcctggtatctccgaccgatgttccctttacgacggtgcccctgggcaagaccaccttccaggtcaccacctcgactggtcgatctctacagacctacgatctgaagcgcggattgaacctcgtcttcatgacccggccccggacgccctacgaaattacagcgacttgcgcttggaaagataaagtctttgcggcatggggtcattcaactgctgcagcctccgagcagggcatctgggttttccagcgcggcaagaaagttggacaactggaactccctgcagacatcacacaacctgtcaagcagattctagtctttggctcctggatcgttgcctgctgtgtgactagaatagaggtttggaagtcttcgacgtgcgagcactacaccaccttgttcagtatggcttccaaaaagggcgacaacgagttaacgggaggaatatgtactatgcccacttacctcaacaagatatttgcagcccgtcgggacggttgggtcgaaatctggaacgtctccacgggaaagctgatatacaccatcttgcccccctcgccagactgtggctctgttacctgtctacagccttcgcctgcactctctctcatgggtatctcttactccgctggcccgttagtcatccacaatgtattgactgacaagacggtacttatggtgaacgccgggacagaggatgcgcctgtaacgaatatcgctttccgaaccgatggaatgggagcgggacaggacggccgcaaggacggcgtgatggcgacatcgactcatgtcagcggagatgtcaccttttgggacctcaatgaaggcggccgaatcatgggcatcctgaggagtgcccacaatccccccggccgtggaggtcctaaagtcggagggggtgtgagcaaaatcgaatttctggccgggcagcctgttattgtgactagcggccgggacaactcgctcaaaacatggattttcgacgagactccgttctcgcccgtaccgcgcatcctacatactcgaaatggtcatgcggcacctgtcacatctcttcgtttcttgcccaccgactttgatggctctgaagcagggaataagtggcttctgagcggtggcaaagaccgtagcttatggggatggagtcttcgtcgtgacggtcagagcactgagctaagccaaggcaacattcggaaaaaggcgaagaagttcggcatattggctgcgaacgcgcttagtcatggtcctaccactactctggaagacttgaaggcacccgaaattacctgcattgcttgttctatgaatagagatggcggcatgggtgcaatgccaggcaagcaggcactctggcaaaagacgcgagatccaaaaaaatcgatggacgctgaaataagtggcatgacgggatgggagagtgtggtcacggctcacaaagatgatgcttttgtgcgcacttggttttggggccgtaagcgagcaggcagatgggcgttccagactggcgatggcaccaatgcttcgacggtctcaatgagtccctgtggaacgtttgctgtcgttggatcagccggtggttcaatcgacatgttcaatctccaatccggactccatagacaacgatttccttcgaaattgacacctgcgcaagcaaggcaggtcaagatgcaacaggctagacaagccgacaccgtcgttcagctccaggctcgtacatctgctggatttctagcgggaacgggcaagcacacgaaagctgtcacgggcatcgtggtggactccctgaatcatgtcgtcatcagctgctcgctcgatggacgtgtcaagttttgggagtttttgactggcaatctgcttcacgagatcaactgggccccaatgactgcgatcaccgggtgccgctaccatcctgcgagtgacttgatcgcattttcttgtgacaacggatccatacgtgtagtggatattgaaacgaggcacaccatccgtgagttctggggttgccaaggtaatatcaatgatttcacaatctccaacgacggtcggtggataatagcagcatctcaagattctgtaattagagtgtgggacttgcctacaagtcacctcatcgatgccattcggctcgagaaaccctgtacagctcttgcattctctgctacaggtgaataccttgctactgcatctgaaggcgagcttggggtggacatctggaacaacaaggcacttttcacgcatgtgccaacaaagcaaatttccgaatcaacaatcgaacatatttccggccccactgcctcgggcgaaggtggccaaggtatactcgaggctgcttttgaagacgatgtcgctgaggacgacgaagatcacgtttctgctccgagcttggatcaactaagtgcggaaatgacaacactttctttagttccgaagagcaggtggcaaactttgctacatctcgatttgattaaaaagagaaataaacctaaggaagcacccaaagctcccgagaaggcgcctttcttcctaccatcgaccaagggagaaccttcgtctattcaaggtgccacagagaagaaatccgatgatgatcagaaccaatcgcgtatcacgaaattcgattcgagtagaatggaacaagcattcacaattgccttgcaagagggcgctgcaagagggaactatgataaattcgtcgagcatttaaagactttaccgccctcaactgccgatcttgaacttcgctctctctcctctggagagtcggacgactcgaacgaactcttacacttcatacgcgcgatcacgagtcggctggtagcaaggcgagattacgaactgacacaggcgtggatgacggtcttcctgcgacttcattttgatttgatcatcgaaagcgagacgttgatggatgcactacaggattggaagagatatcagggtgatgagtgtgatagattagatagcttggttgggtattgtggtggtgtggtgagcttcttgagaagtcccacgacgtga

SEQ ID NO: 16043 - protein, 1044 aa, Muscodor strobelii
  misc_feature: SGI Peptide ID NO. 565325
  misc_feature (698)..(736): Pfam Id: PF00400 Pfam Desc: WD domain, G-beta repeat
  misc_feature (375)..(421): Pfam Id: PF00400 Pfam Desc: WD domain, G-beta repeat
  misc_feature (812)..(1041): Pfam Id: PF04192 Pfam Desc: Utp21 specific WD40 associated domain
  misc_feature (622)..(651): Pfam Id: PF00400 Pfam Desc: WD domain, G-beta repeat
  misc_feature (1)..(1044): NCBI GI: 46121405 Blast Desc: FG05081.1 [Gibberella zeae PH-1]
  misc_feature (1)..(1044): NCBI GI: 256727478 Blast Desc: [Nectria haematococca mpVI 77-13-4]
  misc_feature (1)..(1044): NCBI GI: 171683513 Blast Desc: protein product [Podospora anserina] gi|170941716|emb|CAP67370.1| protein product [Podospora anserina]
  misc_feature (1)..(1044): NCBI GI: 85104920 Blast Desc: NCU07011 [Neurospora crassa OR74A] gi|28923411|gb|EAA32596.1| conserved [Neurospora crassa OR74A]
  misc_feature (7)..(1044): NCBI GI: 156046272 Blast Desc: SS1G_09390 [Sclerotinia sclerotiorum 1980] gi|154693785|gb|EDN93523.1| SS1G_09390 [Sclerotinia sclerotiorum 1980]
  misc_feature (101)..(1044): NCBI GI: 145603462 Blast Desc: MGG_06038 [Magnaporthe grisea 70-15] gi|145011685|gb|EDJ96341.1| MGG_06038 [Magnaporthe grisea 70-15]
  misc_feature (37)..(1044): NCBI GI: 261359709 Blast Desc: U3 small nucleolar RNA-associated protein [Verticillium albo-atrum VaMs.102]
  misc_feature (7)..(1044): NCBI GI: 154319706 Blast Desc: BC1G_02334 [Botryotinia fuckeliana B05.10] gi|150855992|gb|EDN31184.1| BC1G_02334 [Botryotinia fuckeliana B05.10]
  misc_feature (1)..(1044): NCBI GI: 116194504 Blast Desc: CHGG_03850 [Chaetomium globosum CBS 148.51] gi|88179763|gb|EAQ87231.1| CHGG_03850 [Chaetomium globosum CBS 148.51]
  misc_feature (8)..(1041): NCBI GI: 189204884 Blast Desc: WD repeat containing protein 36 [Pyrenophora tritici-repentis Pt-1C-BFP] gi|187985876|gb|EDU51364.1| WD repeat containing protein 36 [Pyrenophora tritici-repentis Pt-1C-BFP]
  misc_feature: Useful for introducing or modulating the production of volatile compounds
MPHSEPEGPVVKRQKLNSVAKSKSSTSSQSRIFAPYRTVGLVSPTDVPFTTVPLGKTTFQVTTSTGRSLQTYDLKRGLNLVFMTRPRTPYEITATCAWKDKVFAAWGHSTAAASEQGIWVFQRGKKVGQLELPADITQPVKQILVFGSWIVACCVTRIEVWKSSTCEHYTTLFSMASKKGDNELTGGICTMPTYLNKIFAARRDGWVEIWNVSTGKLIYTILPPSPDCGSVTCLQPSPALSLMGISYSAGPLVIHNVLTDKTVLMVNAGTEDAPVTNIAFRTDGMGAGQDGRKDGVMATSTHVSGDVTFWDLNEGGRIMGILRSAHNPPGRGGPKVGGGVSKIEFLAGQPVIVTSGRDNSLKTWIFDETPFSPVPRILHTRNGHAAPVTSLRFLPTDFDGSEAGNKWLLSGGKDRSLWGWSLRRDGQSTELSQGNIRKKAKKFGILAANALSHGPTTTLEDLKAPEITCIACSMNRDGGMGAMPGKQALWQKTRDPKKSMDAEISGMTGWESVVTAHKDDAFVRTWFWGRKRAGRWAFQTGDGTNASTVSMSPCGTFAVVGSAGGSIDMFNLQSGLHRQRFPSKLTPAQARQVKMQQARQADTVVQLQARTSAGFLAGTGKHTKAVTGIVVDSLNHVVISCSLDGRVKFWEFLTGNLLHEINWAPMTAITGCRYHPASDLIAFSCDNGSIRVVDIETRHTIREFWGCQGNINDFTISNDGRWIIAASQDSVIRVWDLPTSHLIDAIRLEKPCTALAFSATGEYLATASEGELGVDIWNNKALFTHVPTKQISESTIEHISGPTASGEGGQGILEAAFEDDVAEDDEDHVSAPSLDQLSAEMTTLSLVPKSRWQTLLHLDLIKKRNKPKEAPKAPEKAPFFLPSTKGEPSSIQGATEKKSDDDQNQSRITKFDSSRMEQAFTIALQEGAARGNYDKFVEHLKTLPPSTADLELRSLSSGESDDSNELLHFIRAITSRLVARRDYELTQAWMTVFLRLHFDLIIESETLMDALQDWKRYQGDECDRLDSLVGYCGGVVSFLRSPTT

SEQ ID NO: 16044 - DNA, 3654 bp, Muscodor strobelii
  misc_feature: SGI EST ID NO. CUFF.37846.0
  misc_feature: Variant of the nucleotide sequence at SEQ ID NO 16042
aaaaaatatccttcccaggttagcgtccagtgcccgccataaagttgatgagaagccgagttcatgatagaaatcacgatactccgacttcttcttcgtcatatgcctcgttgagcccatccccaccatttgaaggtggaacatcatgcttgtagaataacataacctctttcgccaccaccatgccgcactcagagccagagggaccagtggtcaagcgacagaagctcaactctgtcgcaaagtccaagtcctcgacttcgtcccaatcccgtatcttcgcaccttaccgcactgttggcctggtatctccgaccgatgttccctttacgacggtgcccctgggcaagaccaccttccaggtcaccacctcgactggtcgatctctacagacctacgatctgaagcgcggattgaacctcgtcttcatgacccggccccggacgccctacgaaattacagcgacttgcgcttggaaagataaagtctttgcggcatggggtcattcaactgctgcagcctccgagcagggcatctgggttttccagcgcggcaagaaagttggacaactggaactccctgcagacatcacacaacctgtcaagcagattctagtctttggctcctggatcgttgcctgctgtgtgactagaatagaggtttggaagtcttcgacgtgcgagcactacaccaccttgttcagtatggcttccaaaaagggcgacaacgagttaacgggaggaatatgtactatgcccacttacctcaacaagatatttgcagcccgtcgggacggttgggtcgaaatctggaacgtctccacgggaaagctgatatacaccatcttgcccccctcgccagactgtggctctgttacctgtctacagccttcgcctgcactctctctcatgggtatctcttactccgctggcccgttagtcatccacaatgtattgactgacaagacggtacttatggtgaacgccgggacagaggatgcgcctgtaacgaatatcgctttccgaaccgatggaatgggagcgggacaggacggccgcaaggacggcgtgatggcgacatcgactcatgtcagcggagatgtcaccttttgggacctcaatgaaggcggccgaatcatgggcatcctgaggagtgcccacaatccccccggccgtggaggtcctaaagtcggagggggtgtgagcaaaatcgaatttctggccgggcagcctgttattgtgactagcggccgggacaactcgctcaaaacatggattttcgacgagactccgttctcgcccgtaccgcgcatcctacatactcgaaatggtcatgcggcacctgtcacatctcttcgtttcttgcccaccgactttgatggctctgaagcagggaataagtggcttctgagcggtggcaaagaccgtagcttatggggatggagtcttcgtcgtgacggtcagagcactgagctaagccaaggcaacattcggaaaaaggcgaagaagttcggcatattggctgcgaacgcgcttagtcatggtcctaccactactctggaagacttgaaggcacccgaaattacctgcattgcttgttctatgaatagagatggcggcatgggtgcaatgccaggcaagcaggcactctggcaaaagacgcgagatccaaaaaaatcgatggacgctgaaataagtggcatgacgggatgggagagtgtggtcacggctcacaaagatgatgcttttgtgcgcacttggttttggggccgtaagcgagcaggcagatgggcgttccagactggcgatggcaccaatgcttcgacggtctcaatgagtccctgtggaacgtttgctgtcgttggatcagccggtggttcaatcgacatgttcaatctccaatccggactccatagacaacgatttccttcgaaattgacacctgcgcaagcaaggcaggtcaagatgcaacaggctagacaagccgacaccgtcgttcagctccaggctcgtacatctgctggatttctagcgggaacgggcaagcacacgaaagctgtcacgggcatcgtggtggactccctgaatcatgtcgtcatcagctgctcgctcgatggacgtgtcaagttttgggagtttttgactggcaatctgcttcacgagatcaactgggccccaatgactgcgatcaccgggtgccgctaccatcctgcgagtgacttgatcgcattttcttgtgacaacggatccatacgtgtagtggatattgaaacgaggcacaccatccgtgagttctggggttgccaaggtaatatcaatgatttcacaatctccaacgacggtcggtggataatagcagcatctcaagattctgtaattagagtgtgggacttgcctacaagtcacctcatcgatgccattcggctcgagaaaccctgtacagctcttgcattctctgctacaggtgaataccttgctactgcatctgaaggcgagcttggggtggacatctggaacaacaaggcacttttcacgcatgtgccaacaaagcaaatttccgaatcaacaatcgaacatatttccggccccactgcctcgggcgaaggtggccaaggtatactcgaggctgcttttgaagacgatgtcgctgaggacgacgaagatcacgtttctgctccgagcttggatcaactaagtgcggaaatgacaacactttctttagttccgaagagcaggtggcaaactttgctacatctcgatttgattaaaaagagaaataaacctaaggaagcacccaaagctcccgagaaggcgcctttcttcctaccatcgaccaagggagaaccttcgtctattcaaggtgccacagagaagaaatccgatgatgatcagaaccaatcgcgtatcacgaaattcgattcgagtagaatggaacaagcattcacaattgccttgcaagagggcgctgcaagagggaactatgataaattcgtcgagcatttaaagactttaccgccctcaactgccgatcttgaacttcgctctctctcctctggagagtcggacgactcgaacgaactcttacacttcatacgcgcgatcacgagtcggctggtagcaaggcgagattacgaactgacacaggcgtggatgacggtcttcctgcgacttcattttgatttgatcatcgaaagcgagacgttgatggatgcactacaggattggaagagatatcagggtgatgagtgtgatagattagatagcttggttgggtattgtggtggtgtggtgagcttcttgagaagtcccacgacgtgaccaaacccgctcttcgtttacctagccgtgtaatgaaatatgttgaactacagaacaggtattttcctggttccccccttcactctccgaaagaggagacaatacgcagctctaagatatgctccctatttaaccttactcgcttgagcgtgccaaaagcatacatgatcaatacgattggaactcagggcaggggatagaggcgttatctagagtggatttgagtcaaccctttggacttttgcctttggccagtatcgagactatcttgacagctttcaccatgcaagacgttaatcggatccagtttgttgcctgttttcccaatcaggcacca

SEQ ID NO: 16045 - DNA, 4407 bp, Muscodor strobelii
  misc_feature: SGI cDNA ID NO. 565326
  misc_feature: Reduced expression when VOC is produced
  misc_feature: Encodes the peptide sequence at SEQ ID NO 16046
atggaggcaaactcaaatcgtggaagcttttctgtgcatagacattcttcagctcaagacatcagcacccatcttaccagcaaccctcgcacatctttttcagagccagaccgtgccaagcgtgcctcggtgtcatctgtcttctctcttgcatccgttcgtggtgtgccgagctccgcgtcctctaccaacggctcggactccggtacggcacaccgctccgtctccgtacagggtttgatggcttcgagcaagggaattggtcccgtcccgggccagtccgaagccggtgtgtccaatgtaaccatcaccacttcatcaagctccaatggccagaccccagctggcagtggtccacagctaacgcctcttaacactcatcacaccaatccccttgacctcatcaagcggaatccagcgccagcgccagctccaggttcatctagcactggcagtcgaccaccgcagccaacgagatctagaagtagggctaagcgtcggttcagcggaagcactgctacaagtagtcatagtcctagcagcgagcgtggcaatcatccccgggagaaagaagaggcgaagccagcaccttggggcattataggtgtttgtgccctcgattcaaaagctcgaagtaaacccagcaggaatattctcaaccgtatcattgcaaatagagacttcgatgttgttgtctttggagataagactattttggatgaaggggtggagaattggccaatatgtgactatctgatatctttctattcagatggcttcccactagacaaagcaattgcttatgtcaaggctcggaaaccattctgcgtcaacgatgtgccaatgcagaaaatactgtgggataggcgactttgtctccgtattcttgacaatatcaatgttccaacccctcaacgaattgaggtcaaccgagatggtggtccggatctactcacaccggatgtcgcaaaggccacgagagaggtctctggaattgacctcgaggacaccgaccccgaacaataccgcgtacccagaaaagtcgagttgctagacaatggcgatatcctctctgtcgatggagctcttctgaaaaagccatttgtcgagaaaccgacgagcggcgaagatcacaatatcatcatctatttcccacagtccgctggcggtggcgcgcgaaagcttttcagaaagatcggcaacaaaagctccgagtttgtcaaagatctcattgtcccccgcgccattactgagccggaaggaagtttcatatacgagaagttcatgcaagtagacaacgccgaagatgtgaaagcatatactgtcgggcctcagtactgccatgccgagacgaggaaatctcccgttgtagacggaattgtcaggcgtaatactcacggcaaagagatcagatatgtgactgctctaggtcccgaggaaaaagagatggcaagcaaaattgcaaaaacattcggacagagagtctgcggcttcgacctgcttcgggccggtggcaagagttatgtaatcgatgtgaacggttggagtttcgtcaaagataacgagacatattacgatcactgtgcaagcatactgaaggaaatgtttatgacggaaaaaatcaaacgtggtggtccgacaccgcctcttccctcaccagctgcctctgacattaatgatcccttcgccagggcagtcttggcgagtaaagataaggacacgcaatcctcctcgtttcagtctaaatcgacagctatcagcaccgtttcattagaagatgctgcgcgggagtcaactttggaggagaagccattggaaagctcaccatcgacaaagcctgagacaatggtgtcaggaattgcctcgagactcacaaccagaatttctcatttcacaggaggaagctcaacagcaagcagccttcctgcgacggcaccgtcaaccctaccggctactccaaatactggcatggaggatcaagttgaagctcagcctactcctccgccccctccaccaaaacattcttggaaactcaaaggccttgtctcggtcgttcgacatgctgaccggacgccgaagcaaaaatacaagttcacgttccatacacaaccattctttgaattgctcaaaggtcatcaagaagaagttcttcttatcggggaagcagcacttgctagcgttctcgaggcagtggatctggccatcaagcaaggagaggaagatcatactaaactcagatctttacgaaatgttcttgtaaagaaaggcggatgggcgggtacaaaagtccaaatcaagccaatgttccggaagaaaaggtcagcagtagaaacaccatctcagtcaacagctgatctcgttgagggtgtaaaacttgatctaccaacttcagacgccttacctcatggagagagccagacttcaatcggagtaccatcaacttcagagaaagaaggcaagctagatgaggtcgatgaaggggagtcaggagtgaagaatcgccgacatacaccgcggcggcaagactcaatgtccggtgttacaatgtccaagtttacagcggctgacaatagttttgtacttgacaaactacagctgattgtcaaatggggaggcgaaccgacacactctgcccgatatcaggcacaagaactcgcccaaaatatgagaaacgattatctccttctcaaccgtgatatcttggacgaagtgcacgttttcagcagctctgaaagacgcgtaacggctagtgctcaaatttgggcagcctcttttctagagcagaaagaacttccagaggatttcatcacgattcgaaaagaccttttagatgattcaaatgcagctaaagacgaaatggacaaagtcaagaagaagctcaaagggttgctacgcaaaggcaacgaacgaccttctcagtttgcctggcctgaaggcatgcctgagccttcagaggtccaggcacgagtcgtattgctgatgaactttcatcgccgagtgatgcaacacaattacagtaaactctatagcggagccgtgaattccctgaatgctatcaacactcctccttcagagaaggcacttggcgagacctcgaccggatctttggcttcctctctctcccaagctaatgctataaataacatccaagctcgatggtgttgcggtgaagatgccgaattatttcgagagcgctgggagaaactctttgcagaattctgcgacaacgagaaagtcgatcctagcaagatatccgagttatacgatacaatgaagtttgatgccctacacaaccgccaatttctggagtgggtgttcactccccctaagcatatgctggaggaagagtttggtatcacgcttagccgcgaaattaaaggagcgggaagagaatcagaggatatggcaaaactttctgacgatcgatctgacaagagccaaccaatagcatcatcgccacccaccgatcgagtagaaaagagtgaccgacaagaaaaagccgaaagggccgaaaaatcggattcgcagaattctatgaggcgtatcttcagacggaggtcatggatgaagaactccagcgagattgctcagcctgatgagtatttccatctgcaaagaggtaatagccggaccaaagcgaaaactgatgcacgcttcgagcctcttcgagaattgtatcaattagcaaaagtgatgtttgattttatctgccctcaagagtacggaatatccgatagcgaaaagctcgaaattggtctattgacctcgctaccccttttgaaagagatagtccaggacctcgaagagatgcaagcatctgaagacgccaagtcgttcttctacttcactaaagagtctcacatatacacgctgctgaactgcattctcgagggaggtattgagaccaagatcaatcgacgaacgattcccgaactcgactatctttcgcagatttgttttgagctttacgagtccgaaaacaagaatgcgccagatgctccgttgcctggacagcctactttcaattacagcatccgcatcactgtcagtcctggctgtcacatcttcgacccattggacatacagctagatagcaaacattgtattggctgcgcgccacggcgcagccttacacctcatggagactggaagcaagtcatcgagaccttgcgtgcaagatttcatcaggtcaaactgcccaagactttcctggccgtcaatttatccgatgcgttcacatttcaggagaaagaacggcagaattcagaagcagacgtttgcgacaaagtccgtcaagatggtgagcaagaagaagcaggtcttgaaatgaagcggaatgaaccgtcccgtggtcaaccatccgacgccagtcccgtcgatcaaggatctactttagataatctctag

SEQ ID NO: 16046 - protein, 1468 aa, Muscodor strobelii
  misc_feature: SGI Peptide ID NO. 565326
  misc_feature (677)..(1350): Pfam Id: PF00328 Pfam Desc: Histidine acid phosphatase
  misc_feature (27)..(1463): NCBI GI: 46121401 Blast Desc: FG05079.1 [Gibberella zeae PH-1]
  misc_feature (31)..(1423): NCBI GI: 256726913 Blast Desc: NECHADRAFT_10191 [Nectria haematococca mpVI 77-13-4]
  misc_feature (30)..(1423): NCBI GI: 171683511 Blast Desc: protein product [Podospora anserina] gi|170941715|emb|CAP67369.1| protein product [Podospora anserina]
  misc_feature (33)..(1455): NCBI GI: 164424442 Blast Desc: NCU07010 [Neurospora crassa OR74A] gi|157070514|gb|EAA32595.2| conserved [Neurospora crassa OR74A]
  misc_feature (29)..(1418): NCBI GI: 156046270 Blast Desc: SS1G_09389 [Sclerotinia sclerotiorum 1980] gi|154693784|gb|EDN93522.1| SS1G_09389 [Sclerotinia sclerotiorum 1980]
  misc_feature (74)..(1445): NCBI GI: 145603460 Blast Desc: MGG_06039 [Magnaporthe grisea 70-15] gi|145011684|gb|EDJ96340.1| MGG_06039 [Magnaporthe grisea 70-15]
  misc_feature (15)..(1460): NCBI GI: 116194502 Blast Desc: CHGG_03849 [Chaetomium globosum CBS 148.51] gi|88179762|gb|EAQ87230.1| CHGG_03849 [Chaetomium globosum CBS 148.51]
  misc_feature (36)..(1410): NCBI GI: 261188153 Blast Desc: inositol pyrophosphate synthase [Ajellomyces dermatitidis SLH14081] gi|239593368|gb|EEQ75949.1| inositol pyrophosphate synthase [Ajellomyces dermatitidis SLH14081]
  misc_feature (199)..(1410): NCBI GI: 239609110 Blast Desc: inositol pyrophosphate synthase [Ajellomyces dermatitidis ER-3]
  misc_feature (29)..(1410): NCBI GI: 242814735 Blast Desc: actin cytoskeleton organization and biogenesis protein, [Talaromyces stipitatus ATCC 10500] gi|218714768|gb|EED14191.1| actin cytoskeleton organization and
  misc_feature: Useful for introducing or modulating the production of volatile compounds
MEANSNRGSFSVHRHSSAQDISTHLTSNPRTSFSEPDRAKRASVSSVFSLASVRGVPSSASSTNGSDSGTAHRSVSVQGLMASSKGIGPVPGQSEAGVSNVTITTSSSSNGQTPAGSGPQLTPLNTHHTNPLDLIKRNPAPAPAPGSSSTGSRPPQPTRSRSRAKRRFSGSTATSSHSPSSERGNHPREKEEAKPAPWGIIGVCALDSKARSKPSRNILNRIIANRDFDVVVFGDKTILDEGVENWPICDYLISFYSDGFPLDKAIAYVKARKPFCVNDVPMQKILWDRRLCLRILDNINVPTPQRIEVNRDGGPDLLTPDVAKATREVSGIDLEDTDPEQYRVPRKVELLDNGDILSVDGALLKKPFVEKPTSGEDHNIIIYFPQSAGGGARKLFRKIGNKSSEFVKDLIVPRAITEPEGSFIYEKFMQVDNAEDVKAYTVGPQYCHAETRKSPVVDGIVRRNTHGKEIRYVTALGPEEKEMASKIAKTFGQRVCGFDLLRAGGKSYVIDVNGWSFVKDNETYYDHCASILKEMFMTEKIKRGGPTPPLPSPAASDINDPFARAVLASKDKDTQSSSFQSKSTAISTVSLEDAARESTLEEKPLESSPSTKPETMVSGIASRLTTRISHFTGGSSTASSLPATAPSTLPATPNTGMEDQVEAQPTPPPPPPKHSWKLKGLVSVVRHADRTPKQKYKFTFHTQPFFELLKGHQEEVLLIGEAALASVLEAVDLAIKQGEEDHTKLRSLRNVLVKKGGWAGTKVQIKPMFRKKRSAVETPSQSTADLVEGVKLDLPTSDALPHGESQTSIGVPSTSEKEGKLDEVDEGESGVKNRRHTPRRQDSMSGVTMSKFTAADNSFVLDKLQLIVKWGGEPTHSARYQAQELAQNMRNDYLLLNRDILDEVHVFSSSERRVTASAQIWAASFLEQKELPEDFITIRKDLLDDSNAAKDEMDKVKKKLKGLLRKGNERPSQFAWPEGMPEPSEVQARVVLLMNFHRRVMQHNYSKLYSGAVNSLNAINTPPSEKALGETSTGSLASSLSQANAINNIQARWCCGEDAELFRERWEKLFAEFCDNEKVDPSKISELYDTMKFDALHNRQFLEWVFTPPKHMLEEEFGITLSREIKGAGRESEDMAKLSDDRSDKSQPIASSPPTDRVEKSDRQEKAERAEKSDSQNSMRRIFRRRSWMKNSSEIAQPDEYFHLQRGNSRTKAKTDARFEPLRELYQLAKVMFDFICPQEYGISDSEKLEIGLLTSLPLLKEIVQDLEEMQASEDAKSFFYFTKESHIYTLLNCILEGGIETKINRRTIPELDYLSQICFELYESENKNAPDAPLPGQPTFNYSIRITVSPGCHIFDPLDIQLDSKHCIGCAPRRSLTPHGDWKQVIETLRARFHQVKLPKTFLAVNLSDAFTFQEKERQNSEADVCDKVRQDGEQEEAGLEMKRNEPSRGQPSDASPVDQGSTLDNL

SEQ ID NO: 16047 - DNA, 5187 bp, Muscodor strobelii
  misc_feature: SGI EST ID NO. CUFF.37873.0
  misc_feature: Variant of the nucleotide sequence at SEQ ID NO 16045
gcgtgtttcacaacaagcaactggtctatacaggcaatcagaggccacctccgccgtgaatatcttatcaccccactgtgaatcatttgctgttccacttcatatctaaagtggtcggcctaggcggaccttgtaccgtacatgaatactgtggtcgggtagctcaaaaatctgaggcggtttcggcccgtaaatcaacacagggcatcggagacgagcagggtagcggccgagatactaaaagttagcctgtcccttctccttaagatggaggcaaactcaaatcgtggaagcttttctgtgcatagacattcttcagctcaagacatcagcacccatcttaccagcaaccctcgcacatctttttcagagccagaccgtgccaagcgtgcctcggtgtcatctgtcttctctcttgcatccgttcgtggtgtgccgagctccgcgtcctctaccaacggctcggactccggtacggcacaccgctccgtctccgtacagggtttgatggcttcgagcaagggaattggtcccgtcccgggccagtccgaagccggtgtgtccaatgtaaccatcaccacttcatcaagctccaatggccagaccccagctggcagtggtccacagctaacgcctcttaacactcatcacaccaatccccttgacctcatcaagcggaatccagcgccagcgccagctccaggttcatctagcactggcagtcgaccaccgcagccaacgagatctagaagtagggctaagcgtcggttcagcggaagcactgctacaagtagtcatagtcctagcagcgagcgtggcaatcatccccgggagaaagaagaggcgaagccagcaccttggggcattataggtgtttgtgccctcgattcaaaagctcgaagtaaacccagcaggaatattctcaaccgtatcattgcaaatagagacttcgatgttgttgtctttggagataagactattttggatgaaggggtggagaattggccaatatgtgactatctgatatctttctattcagatggcttcccactagacaaagcaattgcttatgtcaaggctcggaaaccattctgcgtcaacgatgtgccaatgcagaaaatactgtgggataggcgactttgtctccgtattcttgacaatatcaatgttccaacccctcaacgaattgaggtcaaccgagatggtggtccggatctactcacaccggatgtcgcaaaggccacgagagaggtctctggaattgacctcgaggacaccgaccccgaacaataccgcgtacccagaaaagtcgagttgctagacaatggcgatatcctctctgtcgatggagctcttctgaaaaagccatttgtcgagaaaccgacgagcggcgaagatcacaatatcatcatctatttcccacagtccgctggcggtggcgcgcgaaagcttttcagaaagatcggcaacaaaagctccgagtttgtcaaagatctcattgtcccccgcgccattactgagccggaaggaagtttcatatacgagaagttcatgcaagtagacaacgccgaagatgtgaaagcatatactgtcgggcctcagtactgccatgccgagacgaggaaatctcccgttgtagacggaattgtcaggcgtaatactcacggcaaagagatcagatatgtgactgctctaggtcccgaggaaaaagagatggcaagcaaaattgcaaaaacattcggacagagagtctgcggcttcgacctgcttcgggccggtggcaagagttatgtaatcgatgtgaacggttggagtttcgtcaaagataacgagacatattacgatcactgtgcaagcatactgaaggaaatgtttatgacggaaaaaatcaaacgtggtggtccgacaccgcctcttccctcaccagctgcctctgacattaatgatcccttcgccagggcagtcttggcgagtaaagataaggacacgcaatcctcctcgtttcagtctaaatcgacagctatcagcaccgtttcattagaagatgctgcgcgggagtcaactttggaggagaagccattggaaagctcaccatcgacaaagcctgagacaatggtgtcaggaattgcctcgagactcacaaccagaatttctcatttcacaggaggaagctcaacagcaagcagccttcctgcgacggcaccgtcaaccctaccggctactccaaatactggcatggaggatcaagttgaagctcagcctactcctccgccccctccaccaaaacattcttggaaactcaaaggccttgtctcggtcgttcgacatgctgaccggacgccgaagcaaaaatacaagttcacgttccatacacaaccattctttgaattgctcaaaggtcatcaagaagaagttcttcttatcggggaagcagcacttgctagcgttctcgaggcagtggatctggccatcaagcaaggagaggaagatcatactaaactcagatctttacgaaatgttcttgtaaagaaaggcggatgggcgggtacaaaagtccaaatcaagccaatgttccggaagaaaaggtcagcagtagaaacaccatctcagtcaacagctgatctcgttgagggtgtaaaacttgatctaccaacttcagacgccttacctcatggagagagccagacttcaatcggagtaccatcaacttcagagaaagaaggcaagctagatgaggtcgatgaaggggagtcaggagtgaagaatcgccgacatacaccgcggcggcaagactcaatgtccggtgttacaatgtccaagtttacagcggctgacaatagttttgtacttgacaaactacagctgattgtcaaatggggaggcgaaccgacacactctgcccgatatcaggcacaagaactcgcccaaaatatgagaaacgattatctccttctcaaccgtgatatcttggacgaagtgcacgttttcagcagctctgaaagacgcgtaacggctagtgctcaaatttgggcagcctcttttctagagcagaaagaacttccagaggatttcatcacgattcgaaaagaccttttagatgattcaaatgcagctaaagacgaaatggacaaagtcaagaagaagctcaaagggttgctacgcaaaggcaacgaacgaccttctcagtttgcctggcctgaaggcatgcctgagccttcagaggtccaggcacgagtcgtattgctgatgaactttcatcgccgagtgatgcaacacaattacagtaaactctatagcggagccgtgaattccctgaatgctatcaacactcctccttcagagaaggcacttggcgagacctcgaccggatctttggcttcctctctctcccaagctaatgctataaataacatccaagctcgatggtgttgcggtgaagatgccgaattatttcgagagcgctgggagaaactctttgcagaattctgcgacaacgagaaagtcgatcctagcaagatatccgagttatacgatacaatgaagtttgatgccctacacaaccgccaatttctggagtgggtgttcactccccctaagcatatgctggaggaagagtttggtatcacgcttagccgcgaaattaaaggagcgggaagagaatcagaggatatggcaaaactttctgacgatcgatctgacaagagccaaccaatagcatcatcgccacccaccgatcgagtagaaaagagtgaccgacaagaaaaagccgaaagggccgaaaaatcggattcgcagaattctatgaggcgtatcttcagacggaggtcatggatgaagaactccagcgagattgctcagcctgatgagtatttccatctgcaaagaggtaatagccggaccaaagcgaaaactgatgcacgcttcgagcctcttcgagaattgtatcaattagcaaaagtgatgtttgattttatctgccctcaagagtacggaatatccgatagcgaaaagctcgaaattggtctattgacctcgctaccccttttgaaagagatagtccaggacctcgaagagatgcaagcatctgaagacgccaagtcgttcttctacttcactaaagagtctcacatatacacgctgctgaactgcattctcgagggaggtattgagaccaagatcaatcgacgaacgattcccgaactcgactatctttcgcagatttgttttgagctttacgagtccgaaaacaagaatgcgccagatgctccgttgcctggacagcctactttcaattacagcatccgcatcactgtcagtcctggctgtcacatcttcgacccattggacatacagctagatagcaaacattgtattggctgcgcgccacggcgcagccttacacctcatggagactggaagcaagtcatcgagaccttgcgtgcaagatttcatcaggtcaaactgcccaagactttcctggccgtcaatttatccgatgcgttcacatttcaggagaaagaacggcagaattcagaagcagacgtttgcgacaaagtccgtcaagatggtgagcaagaagaagcaggtcttgaaatgaagcggaatgaaccgtcccgtggtcaaccatccgacgccagtcccgtcgatcaaggatctactttagataatctctagctctgaaccaagactcctcagctcgcttcaacggaaaaggatccgaggccgcattaattaaagggttgaccaggttagctggccttttgggtctcatgttcgctcgcgccttctactaagatgagcaatcaagcggtgtgcaaatcgggttgggaaaaggattccgttgatcatcgctctcgggtggttcggacacgtgcaccgaaggaagaaaaaaaataattgtaaactagcgaagaattatcaggtagacatgaaacacaaatgtcaaagcgaatatgcgaaaatggcgtcagtttagaattgttgataagaggtacctgattgatgaattattagcacgaacagactgcagcactagcggatgtgttccgccgtggcattttgctcctgaggccgtcggcatcacgccacaaagtcttcttccaagttaaatgactgtgattccggtagtgagcctcaaccagccctacaggattacttagaataaacctagattatacaacattattg

SEQ ID NO: 16048 - DNA, 1098 bp, Muscodor strobelii
  misc_feature: SGI cDNA ID NO. 565327
  misc_feature: Encodes the peptide sequence at SEQ ID NO 16049
atgaagattaccgagttgtacatttacccaatcaaatcactcgctcctctagcggtcacgaagacacgcttgcgacgtgagggtctagagcatgatagacggttcatgcttctgaaggtgggaccaaatggcgagtacaagaatattcagaccgcatatatgccagaatgtgtgctcttcgatcaaaggctagaagacagtcgcattatcgtcacctatagaatccccgagccgcctctattcactcctgaggcaccagagcagcgaacggcactccgcgttccgttgtgtccagaactggagggccgcgatatcgttgatgtcaagctcatggggagctcgacagcagcttaccgtatgggcgatccctacgattcatggttcagcgcctgcttcggatacagagccattcttgtttatatcggaaatcaaagtcgaccagtccttgcccacaagcccagtgagcaccgcctttggcagcgtccacagtcggagcagggaggttggttgtcaagtattccggcatatatcgcaggtctttggagtgatggtgaagatgacaaaaaagaggagcaactcgtcttcaatgaatgtgcacccttccttctgacttccaaggcctcgcttcgggatgttagcacacgacttcctgctggcgagacaatggatatgcggaagtttcgacctaacattgtcgttgacgaggcagaagagaaagaaaagctccaggcttgggaggaggattattgggcggaggttgctattaggccgaaaggtacaagcgaggaagacagtgattgtgtggaacgacaacaccgccttgctcttacggccaactgtgcaagatgtatatcaatcaatatcgactatgataccggacggccagcgcagggcgaacttggaactgttctcaagaaactcatgaaagaccgtcgcgtggacggcggaaacaaatggtcgcccatttttggacgttacgccttcctgacgccgagcaataaagtagaggatgagggagccgaaattgctgttggcgacgacatcgacgtggtgacagtcctcgaccatcgggatacatggtcttggccaaaatattga

SEQ ID NO: 16049 - protein, 365 aa, Muscodor strobelii
  misc_feature: SGI Peptide ID NO. 565327
  misc_feature (1)..(135): Pfam Id: PF03476 Pfam Desc: MOSC N-terminal beta barrel domain
  misc_feature (198)..(250): Pfam Id: PF03473 Pfam Desc: MOSC domain
  misc_feature (1)..(37): Pfam Id: PF03476 Pfam Desc: MOSC N-terminal beta barrel domain
  misc_feature (1)..(362): NCBI GI: 256727479 Blast Desc: NECHADRAFT_76371 [Nectria haematococca mpVI 77-13-4]
  misc_feature (4)..(363): NCBI GI: 171680916 Blast Desc: protein product [Podospora anserina] gi|170940416|emb|CAP65642.1| protein product [Podospora anserina]
  misc_feature (1)..(362): NCBI GI: 240272977 Blast Desc: MOSC domain-containing protein [Ajellomyces capsulatus H143]
  misc_feature (1)..(351): NCBI GI: 116191545 Blast Desc: CHGG_05490 [Chaetomium globosum CBS 148.51] gi|88181403|gb|EAQ88871.1| CHGG_05490 [Chaetomium globosum CBS 148.51]
  misc_feature (1)..(363): NCBI GI: 46121397 Blast Desc: FG05077.1 [Gibberella zeae PH-1]
  misc_feature (1)..(364): NCBI GI: 239606449 Blast Desc: MOSC domain-containing protein [Ajellomyces dermatitidis ER-3]
  misc_feature (1)..(360): NCBI GI: 225559481 Blast Desc: MOSC domain-containing protein [Ajellomyces capsulatus G186AR]
  misc_feature (1)..(363): NCBI GI: 240105857 Blast Desc: MOSC domain containing protein [Coccidioides posadasii C735 delta SOWgp]
  misc_feature (1)..(350): NCBI GI: 119193092 Blast Desc: CIMG_00923 [Coccidioides immitis RS]
  misc_feature (2)..(364): NCBI GI: 261190320 Blast Desc: MOSC domain-containing protein [Ajellomyces dermatitidis SLH14081] gi|239591398|gb|EEQ73979.1| MOSC domain-containing protein [Ajellomyces dermatitidis SLH14081]
MKITELYIYPIKSLAPLAVTKTRLRREGLEHDRRFMLLKVGPNGEYKNIQTAYMPECVLFDQRLEDSRIIVTYRIPEPPLFTPEAPEQRTALRVPLCPELEGRDIVDVKLMGSSTAAYRMGDPYDSWFSACFGYRAILVYIGNQSRPVLAHKPSEHRLWQRPQSEQGGWLSSIPAYIAGLWSDGEDDKKEEQLVFNECAPFLLTSKASLRDVSTRLPAGETMDMRKFRPNIVVDEAEEKEKLQAWEEDYWAEVAIRPKGTSEEDSDCVERQHRLALTANCARCISINIDYDTGRPAQGELGTVLKKLMKDRRVDGGNKWSPIFGRYAFLTPSNKVEDEGAEIAVGDDIDVVTVLDHRDTWSWPKY

SEQ ID NO: 16050 - DNA, 2513 bp, Muscodor strobelii
  misc_feature: SGI EST ID NO. CUFF.37880.0
  misc_feature: Variant of the nucleotide sequence at SEQ ID NO 16048
gaatggtgcgggttcataatgaattatctatcgcgcacctattcggatatttaacttcatcgtctagtacttgtcgttaagttattttgttacttcaaagagtactgacaatcatataaatccaagagctgtacggaccactgtgctcgtgcaatacactcttcgccatgaagattaccgagttgtacatttacccaatcaaatcactcgctcctctagcggtcacgaagacacgcttgcgacgtgagggtctagagcatgatagacggttcatgcttctgaaggtgggaccaaatggcgagtacaagaatattcagaccgcatatatgccagaatgtgtgctcttcgatcaaaggctagaagacagtcgcattatcgtcacctatagaatccccgagccgcctctattcactcctgaggcaccagagcagcgaacggcactccgcgttccgttgtgtccagaactggagggccgcgatatcgttgatgtcaagctcatggggagctcgacagcagcttaccgtatgggcgatccctacgattcatggttcagcgcctgcttcggatacagagccattcttgtttatatcggaaatcaaagtcgaccagtccttgcccacaagcccagtgagcaccgcctttggcagcgtccacagtcggagcagggaggttggttgtcaagtattccggcatatatcgcaggtctttggagtgatggtgaagatgacaaaaaagaggagcaactcgtcttcaatgaatgtgcacccttccttctgacttccaaggcctcgcttcgggatgttagcacacgacttcctgctggcgagacaatggatatgcggaagtttcgacctaacattgtcgttgacgaggcagaagagaaagaaaagctccaggcttgggaggaggattattgggcggaggttgctattaggccgaaaggtacaagcgaggaagacagtgattgtgtggaacgacaacaccgccttgctcttacggccaactgtgcaagatgtatatcaatcaatatcgactatgataccggacggccagcgcagggcgaacttggaactgttctcaagaaactcatgaaagaccgtcgcgtggacggcggaaacaaatggtcgcccatttttggacgttacgccttcctgacgccgagcaataaagtagaggatgagggagccgaaattgctgttggcgacgacatcgacgtggtgacagtcctcgaccatcgggatacatggtcttggccaaaatattgactctaactacctatccgaagggtgcccatttctagacagaaccgtgacatctgttcttgaaaggttatagtggttagttgtagttactgtggtagaattctagtgccgctcattgcgatgaccccttaactagcgacttctctgtgtcctattagcgaatgtgtcgctctttctttctcggcgaagcaatacgcaatcgcaaatatccctctttccttgatcgaccattatgtagacagaatattcgctgttggcaaagctgtttaattgacaatatttacatccgattttctagagccagaaactccacgctttgaaataagttcaatatgccagatgtcgaaggcgtgaatggttgtggtaagtctgaagccagaatatctccagatgggtaactttcctacaggtcatgtaggtaatcgattagcggggtccttgtcgcattcaaaacgaacgcccacgaagcgagagtgtatgatgtatcgaagctatgttcagtttgccttggtgtactttatgtcctgatgggaatttctccatcggagccgagacagatgccatagacctgatactgcatcttttcatggttgctattgtagcttgacttggccaaatctattgccaaacccccagcatggaacatgaatcgatgctggaacttcaaaaagacgcagtcaatcaaacactaccttccgcatcctgttgggcacaatcacacacgctgtccgatttgtggcacgatcagaggtcgcagacaccttctggttccgtctaccatgcactagcttgcgctgattgatccgcctggctttaagctggacgtctgttggttggctaaaagaaaagaaatgtgaggctgaatcgggttgtgtgacgtttgcgggaaccaaccgaagcatgggtggtgccgctcggctcgactgccgactgtttggcttgtggtggtaagaaagcgccaattgggtacgagaataagggtcccagattcaccggtatctttgctttgcttcatggtcctcgctttttctgttggttgtgtaaacgggttcccagtcattgcaagaggcgcctctcgaaacattgcttcatatggtctggacctgctcgactaacgaatcgtaactcctatcaccacgaagagcaatgaggatggtaatacaaacattcgtcaatcagggtttgagatgcaatcagatctggccagcagcaaccgcctcgcatctcagaggaccgttgcttgacagcttt

SEQ ID NO: 16051 - DNA, 1158 bp, Muscodor strobelii
  misc_feature: SGI cDNA ID NO. 565328
  misc_feature: Elevated expression when VOC is produced
  misc_feature: Encodes the peptide sequence at SEQ ID NO 16052
atggtttctccgtcttacatgagtcgtctcgttgcacgagcagcgttcgttaaatctacccacaaaacattccttgataaggcaacatacataagtcacacgatagatgccatcgattctcttcagcaatggtatagtccagcttcggggctatgggacaccactggatggtggaatgccggaaattgtttgacagttctagcggattatgctgtcctccagcctggctctgccaccactctaggtatccaaggcgtcatgcagaagacattcgaggatgcgcagaagacggtagtcacagccacaaaattttataatggggccggtctgcccatttcgtcctacagcatggttgcccaggaagagtcagacatatctaaacgagggttcgataacttcctcaacgactattacgacgacgaaggctggtgggcactcgcattaattcgcagctatgatgctgtcggtgacaagacctatctggacgctgcggttacaattttcgacgacatgacaaaaggaaagtcgccgtgcggtggaatatattggagcaaagtggacgattacacgaatgccatcgccaacgagctctactttaaggttgcagcatctttggccaaccgaataccaactcagaaggaccattatcttaatgttgccgaggagcaatgggcatggttcaagaaaagtggtttgattaattcgcagaacttgataaacgacggcctttcaacaagttgcaaaaacaatggacagaacacttggacatataatcagggcgttattttgggcggcttggtcgaactacacaaagccaacggtgactcaacactcctcccgaaagccacggctatcgctactgcggcaatcactttcaagacgcaaaatggcatactttttgaaggatgtgaacccgactgcggctccgacggcgcccagttcaaaggagtgttcatgcggaatctacgagagctacatcaagtagcgccccaagacacgtttaaggatttcttgcttaccaacgcggattcgatctggaataaagatcgcaaaggagaattgcttggcctggattggactgggccgtatgacaccgcgactgccggtactcaaagctctgcactagacgccttagttgcagcagttgctatctcgtag

SEQ ID NO: 16052 - protein, 385 aa, Muscodor strobelii
  misc_feature: SGI Peptide ID NO. 565328
  misc_feature (67)..(384): Pfam Id: PF03663 Pfam Desc: Glycosyl hydrolase family 76
  misc_feature (116)..(342): Pfam Id: PF03663 Pfam Desc: Glycosyl hydrolase family 76
  misc_feature (37)..(384): NCBI GI: 156036496 Blast Desc: SS1G_12937 [Sclerotinia sclerotiorum 1980] gi|154698342|gb|EDN98080.1| SS1G_12937 [Sclerotinia sclerotiorum 1980]
  misc_feature (4)..(373): NCBI GI: 88766409 Blast Desc: glycosyl hydrolase [Metarhizium anisopliae]
  misc_feature (10)..(385): NCBI GI: 256727521 Blast Desc: NECHADRAFT_33506 [Nectria haematococca mpVI 77-13-4]
  misc_feature (10)..(382): NCBI GI: 85104563 Blast Desc: NCU07005 [Neurospora crassa OR74A] gi|28923331|gb|EAA32525.1| [Neurospora crassa OR74A]
  misc_feature (1)..(385): NCBI GI: 145613714 Blast Desc: MGG_01418 [Magnaporthe grisea 70-15] gi|145020750|gb|EDK04879.1| MGG_01418 [Magnaporthe grisea 70-15]
  misc_feature (11)..(385): NCBI GI: 46136471 Blast Desc: FG09751.1 [Gibberella zeae PH-1]
  misc_feature (83)..(384): NCBI GI: 116194494 Blast Desc: CHGG_03845 [Chaetomium globosum CBS 148.51] gi|88179758|gb|EAQ87226.1| CHGG_03845 [Chaetomium globosum CBS 148.51]
  misc_feature (1)..(384): NCBI GI: 171683507 Blast Desc: protein product [Podospora anserina] gi|170941713|emb|CAP67367.1| protein product [Podospora anserina]
  misc_feature (29)..(372): NCBI GI: 115402265 Blast Desc: [Aspergillus terreus NIH2624] gi|114189055|gb|EAU30755.1| [Aspergillus terreus NIH2624]
  misc_feature (10)..(373): NCBI GI: 145259279 Blast Desc: An04g09650 [Aspergillus niger] gi|134074943|emb|CAK47972.1| protein product [Aspergillus niger]
  misc_feature (139)..(359): SWISSPROT Homolog: EC 3.2.1.101 Mannan endo-1,6-alpha-mannosidase
  misc_feature: Useful for introducing or modulating the production of volatile compounds
MVSPSYMSRLVARAAFVKSTHKTFLDKATYISHTIDAIDSLQQWYSPASGLWDTTGWWNAGNCLTVLADYAVLQPGSATTLGIQGVMQKTFEDAQKTVVTATKFYNGAGLPISSYSMVAQEESDISKRGFDNFLNDYYDDEGWWALALIRSYDAVGDKTYLDAAVTIFDDMTKGKSPCGGIYWSKVDDYTNAIANELYFKVAASLANRIPTQKDHYLNVAEEQWAWFKKSGLINSQNLINDGLSTSCKNNGQNTWTYNQGVILGGLVELHKANGDSTLLPKATAIATAAITFKTQNGILFEGCEPDCGSDGAQFKGVFMRNLRELHQVAPQDTFKDFLLTNADSIWNKDRKGELLGLDWTGPYDTATAGTQSSALDALVAAVAIS

SEQ ID NO: 16053 - DNA, 1923 bp, Muscodor strobelii
  misc_feature: SGI EST ID NO. CUFF.37894.0
  misc_feature: Variant of the nucleotide sequence at SEQ ID NO 16051
ctgaaatgaggacagacaaaaaatgcgaagataacggagctgtcgatctgttagctccagggattgacgcttggctgccgtttatgtaccgtgatcttcatgcactaccgataagtgaaagaaaattccccgtaagagggttatgcaccagagccccagccgtgcaagcccaggctcgcatggagccaatttcccctgaaacgaaaaccaagcccaaccagagccctatcaaacgctggctagcgattccaaagacagagcccccctatcacatataagctgaagagcctggaggtttattttgcgtgatgagcttttcgatagaatgtgttggcaaaaagcggccaattgccatatgccgcgcgaccatccctttcctccttgcctgggatattagtgccacttcgcttccccaaagctatgtgcatatgtctgatttccaactttttggttgttgagcaagccggatgacgcatttacccacaagctaatggtatgttgacataccggcgtcgtgtatgtgtagcaataatatcccttatttatatatccaaccagaccaactcgactttctggaaaagtctgagtccatatttcgagtcgaatcattatcatcgccagcatatatcttaatcgccgacatggtttctccgtcttacatgagtcgtctcgttgcacgagcagcgttcgttaaatctacccacaaaacattccttgataaggcaacatacataagtcacacgatagatgccatcgattctcttcagcaatggtatagtccagcttcggggctatgggacaccactggatggtggaatgccggaaattgtttgacagttctagcggattatgctgtcctccagcctggctctgccaccactctaggtatccaaggcgtcatgcagaagacattcgaggatgcgcagaagacggtagtcacagccacaaaattttataatggggccggtctgcccatttcgtcctacagcatggttgcccaggaagagtcagacatatctaaacgagggttcgataacttcctcaacgactattacgacgacgaaggctggtgggcactcgcattaattcgcagctatgatgctgtcggtgacaagacctatctggacgctgcggttacaattttcgacgacatgacaaaaggaaagtcgccgtgcggtggaatatattggagcaaagtggacgattacacgaatgccatcgccaacgagctctactttaaggttgcagcatctttggccaaccgaataccaactcagaaggaccattatcttaatgttgccgaggagcaatgggcatggttcaagaaaagtggtttgattaattcgcagaacttgataaacgacggcctttcaacaagttgcaaaaacaatggacagaacacttggacatataatcagggcgttattttgggcggcttggtcgaactacacaaagccaacggtgactcaacactcctcccgaaagccacggctatcgctactgcggcaatcactttcaagacgcaaaatggcatactttttgaaggatgtgaacccgactgcggctccgacggcgcccagttcaaaggagtgttcatgcggaatctacgagagctacatcaagtagcgccccaagacacgtttaaggatttcttgcttaccaacgcggattcgatctggaataaagatcgcaaaggagaattgcttggcctggattggactgggccgtatgacaccgcgactgccggtactcaaagctctgcactagacgccttagttgcagcagttgctatctcgtagacacggggtttcgcttttctcattatacatttcttccactcattgtcagcccccagatatacccagaaagactattgcgcgaatacctctcattaattattagatatgatagtaatgatcattc

SEQ ID NO: 16054 - DNA, 3759 bp, Muscodor strobelii
  misc_feature: SGI cDNA ID NO. 565329
  misc_feature: Encodes the peptide sequence at SEQ ID NO 16055
atggatgcatcagaacgtgagcgcgacgctttcatccagaagcacgctgcagatttcgttgccgactttgaccgctccctggacccgttcctgaggaaacctaatggccaattacgaagacgtgtacgctttcgagaaacatccagattaatctctcacctgctcgagcattttcaagaactccctcaattattagaccctcatcttccgaaatggcttccagcactagcagatgcgtatctcgagtgcctccaagaccgtcggaagctgagaggattgtcgacaagatcgcagcttcttcactctttgccaaatgctatctgtaggattatctacagtttctgcaaaatacgcggtgagaaagttattgtgagatttctcagtgttgaaactcgctatctggagcttttactgcaagctattgaggattctgagcgtgaatctggtcctacatcgttttcggatcccgtaaactcatggacatggcacgagagatatatcgttctcctctggctatcacagctgttcttcgcccccttcgatctatcaactatttcatctaacggtatagatgaattcgagcaaccagttctacgtgggttcgagtggccacagcagataccgcgaataactctgagggtcatacccctagctgttcactatcttgcctctcccgggaaagaacgagatggcgcaaaggcgctcttagttcgcttggccatgcggagagacatgcaagagctgaaggtgctcaacgcgctcgtacgatgggctctctcaactctacagacaagtgaagattcttcgggcttatctccttactacttcattgggagtctttcttttctggcgggtgttttgcgtgctgctgaagatacatccatcatggatgatcaccttgagtccatattctacgctgtacaaaacatatcctcggcggacgacgatacttccaggatgatcaatggatctgcactcgcgcgaaagatgatgatcaaagttactcgctcgctagtcatatctactctgcgcaaatctcgaccgagcatggccgacacggaaatagttgaaactacaatcgggtatcttcttgagcacctcgcagacaatgataccccagttcgattggccgcaagcaaagcgttgagtatcataacactaaagttagactccgatatggcttcgcaagttattgaagcagttatcgaatcgctaaatcgaaatgtgctttggattaagagcaaggggagcagagatcttactgcagttgaccctcttgaatggcatggactgatgctgactctatcacatctcttataccggaggtctccacccccggatagtttgtcagtcatcatccattcacttctaatcgggctctcgttcgagaagcgaagcccgtcaggtggctcagtcggcgccaatgtcagggatgcttcttgttttggtatttgggctttggcccgtcgttataccacttcagagctgctcggcgttgaaactcaacctattttggttgcacgaggccaccattcagcggcatcgatcttgcaagtcattgctaccgaactggttgtgacagcatcaattgatcccgctggtaatatccggagaggtgcatccgccgccttgcaggaacttattggtcgtcatccagatactatagaaaaaggcatttccatagtccaagttgtggattatcatgcagtcgctctacgctctagggcaattgatgaagtagctttgcaagctaccagactctcgacccattatgggcatgctcttctggagggcacgctgggttggcgtggcattggcgatatggaagcaggtgcacgtagagttgctgcggtatcctatgggactcttgcccttgagttagcccgctctaacccgagcagctcattagaagatgtcaaggtttcaattgaattactactttctcgaatcagtgaccttcaagttcggcaagtggaagagcgtcatggactactattgagtcttgccgcggttcttgactcaattccatctctgcttggaacaaaaacgctaaggagcgtctctaagcagctatctgtttcacacctgcaagatatgttacagaccatcttcgaatactcaagcagcgccaaatttcgaaagccagagctcgtcgcagaggcaacaagcaccctcgtcgtctctgcagtacctctttttctcatcaacttatctgggcttaccaaggagcagcatcgatgtcaagaattggtgctaaaaggatctgatgtcatcaacgaaaacggtttgaagctaatggagacctgtgcaatccttgacgatgcaagaaagctgcaagcgaccttgcctggagagctattgggatctatcgaaaattgtgtgaacatatggcttgatagaagcgaaagttcggtggtagagctgtcatctgcagctgcaaccgtactcttactattttcatccccttctcggcgggctgagattatgaagtcatggtgcgaaaaaattcgtttcccccgaacgacacgaaacaaacacggagatgggcttcttcatgctctatctaggagttattccctctcgaattctgcagctgcggacggagacggcaaaacgattgggagcttggtggttagctcaattgcggagcgatgggctaaggatgcaaacattgaaactcatgttgctataatacagagtttcacaagcaccgccatgttgcgaaacaggccggcagacttgattgaaatcatctcggcaggacttgaagattacacaattaccgcgcgtggcgacataggctcacatgtcaggttgcaggcgattaaggccacgaagactttatggttaagttgtgatttgagtgagcaattcaatgaaaggctgttcgttcagatcgtccgcttagccgcagagaaattagatagcgtgcgagccgaagctaagtccgcgctcgaagttattctactcccgaagtatcgtgaaatcattcgcgacctgtcgttctcttcgaaagaatacttcgattttcttctagcgcttcgggatatgctcgctataaaccctaccttatcaacgactctcacagaagagagttacatttccagcctgctagccggtctggtcacgtctgcagatacaggaaatgaagatcttgttattgtgacaagggcttcacttgcagagctctgtgagatgtcagacgataacctgcgccaggtctgtacagcgttgctatacaacttgagggttcatgccacgcaagatcgtgtcctaatacctaccctggaggtcattgcatatttatttcatgttggcatattacagcgctgttgcaacacgagcagtgaagctagtgggcaactaaatgttcggcagctttgtctcctggtacaaaaagccgcatataagacaggcaacgtccgtaagctagaagcttgtatcaaagtatatggagtgattgcaaaaatcgatggctcgagagttgcaggagaagcatctcaacctctaataagcggcatcagagaggcgcggaagcgcctcggcgcactgctacttcatccctggcctcgagttcgaagtctcgttgtagacgagctatggtgcgtcatggcaagttccgacgacgaggaaaacagggaacatgatgtagacgagcctgtcgataacagaccagagcaagccaatatgctcctgggtatagattgggggaaggcaagcaaggcagacgtccaagggcttgtatcgtggcttagttaa

SEQ ID NO: 16055 - protein, 1252 aa, Muscodor strobelii
  misc_feature: SGI Peptide ID NO. 565329
  misc_feature (1)..(1248): NCBI GI: 46136469 Blast Desc: FG09750.1 [Gibberella zeae PH-1]
  misc_feature (1)..(1245): NCBI GI: 256727520 Blast Desc: NECHADRAFT_66440 [Nectria haematococca mpVI 77-13-4]
  misc_feature (1)..(1248): NCBI GI: 85104560 Blast Desc: NCU07004 [Neurospora crassa OR74A] gi|28923330|gb|EAA32524.1| conserved [Neurospora crassa OR74A]
  misc_feature (1)..(1251): NCBI GI: 39951553 Blast Desc: MGG_01419 [Magnaporthe grisea 70-15] gi|145020749|gb|EDK04878.1| MGG_01419 [Magnaporthe grisea 70-15]
  misc_feature (1)..(1252): NCBI GI: 116194492 Blast Desc: CHGG_03844 [Chaetomium globosum CBS 148.51] gi|88179757|gb|EAQ87225.1| CHGG_03844 [Chaetomium globosum CBS 148.51]
  misc_feature (99)..(1252): NCBI GI: 171683503 Blast Desc: protein product [Podospora anserina] gi|170941711|emb|CAP67365.1| protein product [Podospora anserina]
  misc_feature (1)..(1201): NCBI GI: 154293808 Blast Desc: BC1G_14232 [Botryotinia fuckeliana B05.10] gi|150845205|gb|EDN20398.1| BC1G_14232 [Botryotinia fuckeliana B05.10]
  misc_feature (376)..(1251): NCBI GI: 261352543 Blast Desc: conserved [Verticillium albo-atrum VaMs.102]
  misc_feature (1)..(1233): NCBI GI: 119478948 Blast Desc: beta-tubulin cofactor d [Neosartorya fischeri NRRL 181] gi|119407657|gb|EAW17606.1| beta-tubulin cofactor d [Neosartorya fischeri NRRL 181]
  misc_feature (1)..(1201): NCBI GI: 238499765 Blast Desc: tubulin-specific chaperone D, [Aspergillus flavus NRRL3357] gi|220692870|gb|EED49216.1| tubulin-specific chaperone D, [Aspergillus flavus NRRL3357]
MDASERERDAFIQKHAADFVADFDRSLDPFLRKPNGQLRRRVRFRETSRLISHLLEHFQELPQLLDPHLPKWLPALADAYLECLQDRRKLRGLSTRSQLLHSLPNAICRIIYSFCKIRGEKVIVRFLSVETRYLELLLQAIEDSERESGPTSFSDPVNSWTWHERYIVLLWLSQLFFAPFDLSTISSNGIDEFEQPVLRGFEWPQQIPRITLRVIPLAVHYLASPGKERDGAKALLVRLAMRRDMQELKVLNALVRWALSTLQTSEDSSGLSPYYFIGSLSFLAGVLRAAEDTSIMDDHLESIFYAVQNISSADDDTSRMINGSALARKMMIKVTRSLVISTLRKSRPSMADTEIVETTIGYLLEHLADNDTPVRLAASKALSIITLKLDSDMASQVIEAVIESLNRNVLWIKSKGSRDLTAVDPLEWHGLMLTLSHLLYRRSPPPDSLSVIIHSLLIGLSFEKRSPSGGSVGANVRDASCFGIWALARRYTTSELLGVETQPILVARGHHSAASILQVIATELVVTASIDPAGNIRRGASAALQELIGRHPDTIEKGISIVQVVDYHAVALRSRAIDEVALQATRLSTHYGHALLEGTLGWRGIGDMEAGARRVAAVSYGTLALELARSNPSSSLEDVKVSIELLLSRISDLQVRQVEERHGLLLSLAAVLDSIPSLLGTKTLRSVSKQLSVSHLQDMLQTIFEYSSSAKFRKPELVAEATSTLVVSAVPLFLINLSGLTKEQHRCQELVLKGSDVINENGLKLMETCAILDDARKLQATLPGELLGSIENCVNIWLDRSESSVVELSSAAATVLLLFSSPSRRAEIMKSWCEKIRFPRTTRNKHGDGLLHALSRSYSLSNSAAADGDGKTIGSLVVSSIAERWAKDANIETHVAIIQSFTSTAMLRNRPADLIEIISAGLEDYTITARGDIGSHVRLQAIKATKTLWLSCDLSEQFNERLFVQIVRLAAEKLDSVRAEAKSALEVILLPKYREIIRDLSFSSKEYFDFLLALRDMLAINPTLSTTLTEESYISSLLAGLVTSADTGNEDLVIVTRASLAELCEMSDDNLRQVCTALLYNLRVHATQDRVLIPTLEVIAYLFHVGILQRCCNTSSEASGQLNVRQLCLLVQKAAYKTGNVRKLEACIKVYGVIAKIDGSRVAGEASQPLISGIREARKRLGALLLHPWPRVRSLVVDELWCVMASSDDEENREHDVDEPVDNRPEQANMLLGIDWGKASKADVQGLVSWLS

SEQ ID NO: 16056 - DNA, 4911 bp, Muscodor strobelii
  misc_feature: SGI EST ID NO. CUFF.37900.0
  misc_feature: Variant of the nucleotide sequence at SEQ ID NO 16054
ctcgtgtcgtcttcttcttcttttgttccttagtaaaatatcggggtaaacgttacaaatttgttgatcctttagttctgcgtcccctatagcactacgtgtatcaatctcttggtagcgcctgagaatatttgtccctacacgacctgcgtactacgataaaataaaggtcaagattcacgccgtattattgaacatggatgcatcagaacgtgagcgcgacgctttcatccagaagcacgctgcagatttcgttgccgactttgaccgctccctggacccgttcctgaggaaacctaatggccaattacgaagacgtgtacgctttcgagaaacatccagattaatctctcacctgctcgagcattttcaagaactccctcaattattagaccctcatcttccgaaatggcttccagcactagcagatgcgtatctcgagtgcctccaagaccgtcggaagctgagaggattgtcgacaagatcgcagcttcttcactctttgccaaatgctatctgtaggattatctacagtttctgcaaaatacgcggtgagaaagttattgtgagatttctcagtgttgaaactcgctatctggagcttttactgcaagctattgaggattctgagcgtgaatctggtcctacatcgttttcggatcccgtaaactcatggacatggcacgagagatatatcgttctcctctggctatcacagctgttcttcgcccccttcgatctatcaactatttcatctaacggtatagatgaattcgagcaaccagttctacgtgggttcgagtggccacagcagataccgcgaataactctgagggtcatacccctagctgttcactatcttgcctctcccgggaaagaacgagatggcgcaaaggcgctcttagttcgcttggccatgcggagagacatgcaagagctgaaggtgctcaacgcgctcgtacgatgggctctctcaactctacagacaagtgaagattcttcgggcttatctccttactacttcattgggagtctttcttttctggcgggtgttttgcgtgctgctgaagatacatccatcatggatgatcaccttgagtccatattctacgctgtacaaaacatatcctcggcggacgacgatacttccaggatgatcaatggatctgcactcgcgcgaaagatgatgatcaaagttactcgctcgctagtcatatctactctgcgcaaatctcgaccgagcatggccgacacggaaatagttgaaactacaatcgggtatcttcttgagcacctcgcagacaatgataccccagttcgattggccgcaagcaaagcgttgagtatcataacactaaagttagactccgatatggcttcgcaagttattgaagcagttatcgaatcgctaaatcgaaatgtgctttggattaagagcaaggggagcagagatcttactgcagttgaccctcttgaatggcatggactgatgctgactctatcacatctcttataccggaggtctccacccccggatagtttgtcagtcatcatccattcacttctaatcgggctctcgttcgagaagcgaagcccgtcaggtggctcagtcggcgccaatgtcagggatgcttcttgttttggtatttgggctttggcccgtcgttataccacttcagagctgctcggcgttgaaactcaacctattttggttgcacgaggccaccattcagcggcatcgatcttgcaagtcattgctaccgaactggttgtgacagcatcaattgatcccgctggtaatatccggagaggtgcatccgccgccttgcaggaacttattggtcgtcatccagatactatagaaaaaggcatttccatagtccaagttgtggattatcatgcagtcgctctacgctctagggcaattgatgaagtagctttgcaagctaccagactctcgacccattatgggcatgctcttctggagggcacgctgggttggcgtggcattggcgatatggaagcaggtgcacgtagagttgctgcggtatcctatgggactcttgcccttgagttagcccgctctaacccgagcagctcattagaagatgtcaaggtttcaattgaattactactttctcgaatcagtgaccttcaagttcggcaagtggaagagcgtcatggactactattgagtcttgccgcggttcttgactcaattccatctctgcttggaacaaaaacgctaaggagcgtctctaagcagctatctgtttcacacctgcaagatatgttacagaccatcttcgaatactcaagcagcgccaaatttcgaaagccagagctcgtcgcagaggcaacaagcaccctcgtcgtctctgcagtacctctttttctcatcaacttatctgggcttaccaaggagcagcatcgatgtcaagaattggtgctaaaaggatctgatgtcatcaacgaaaacggtttgaagctaatggagacctgtgcaatccttgacgatgcaagaaagctgcaagcgaccttgcctggagagctattgggatctatcgaaaattgtgtgaacatatggcttgatagaagcgaaagttcggtggtagagctgtcatctgcagctgcaaccgtactcttactattttcatccccttctcggcgggctgagattatgaagtcatggtgcgaaaaaattcgtttcccccgaacgacacgaaacaaacacggagatgggcttcttcatgctctatctaggagttattccctctcgaattctgcagctgcggacggagacggcaaaacgattgggagcttggtggttagctcaattgcggagcgatgggctaaggatgcaaacattgaaactcatgttgctataatacagagtttcacaagcaccgccatgttgcgaaacaggccggcagacttgattgaaatcatctcggcaggacttgaagattacacaattaccgcgcgtggcgacataggctcacatgtcaggttgcaggcgattaaggccacgaagactttatggttaagttgtgatttgagtgagcaattcaatgaaaggctgttcgttcagatcgtccgcttagccgcagagaaattagatagcgtgcgagccgaagctaagtccgcgctcgaagttattctactcccgaagtatcgtgaaatcattcgcgacctgtcgttctcttcgaaagaatacttcgattttcttctagcgcttcgggatatgctcgctataaaccctaccttatcaacgactctcacagaagagagttacatttccagcctgctagccggtctggtcacgtctgcagatacaggaaatgaagatcttgttattgtgacaagggcttcacttgcagagctctgtgagatgtcagacgataacctgcgccaggtctgtacagcgttgctatacaacttgagggttcatgccacgcaagatcgtgtcctaatacctaccctggaggtcattgcatatttatttcatgttggcatattacagcgctgttgcaacacgagcagtgaagctagtgggcaactaaatgttcggcagctttgtctcctggtacaaaaagccgcatataagacaggcaacgtccgtaagctagaagcttgtatcaaagtatatggagtgattgcaaaaatcgatggctcgagagttgcaggagaagcatctcaacctctaataagcggcatcagagaggcgcggaagcgcctcggcgcactgctacttcatccctggcctcgagttcgaagtctcgttgtagacgagctatggtgcgtcatggcaagttccgacgacgaggaaaacagggaacatgatgtagacgagcctgtcgataacagaccagagcaagccaatatgctcctgggtatagattgggggaaggcaagcaaggcagacgtccaagggcttgtatcgtggcttagttaacgcaacatacgtgttggtgctcctggctacaaattctcaaatatgtcgcgactttgaatccgtggacccattttacattatcaccgaatggcacagcaaatgcagtgtcttatagactaaagggaagactctgatgatggtattggctgcgtattcctattctccctccgaattgtgagcttgcaacacacatggtatagttacttgctttgtgctatttcaagcaaattcgcgttacgaattgcgcatatcgaacatgtctattttactgcaactacccatatgcctatatggcgtcagattagtaatgcacttatacagcagcacgtagagtagttgtagggcaactccacgacaaccctgctacctatcaagcctcatgtcggcaaatttgttctaccgatatgaggcatggcaaatatgcattggaatagccagcattaagccaaaagccgccaagggacggaagcgtatcagggtctgcacacgcaagttgcggctggtctgaattaggacgtatgtacagtaatcaatggcttcgaaagctgagctggccaaaggtttgccaatccccgggtgccggcagacccccgcgacccaatatgttcaaagctttgggatcgcgaactgctattgcttaacctggaaagaatctataaatatccaagaaggagggaaagtttgcgaacatgggcactgaacatcgatgttgatatctgaccagataggaatgctatctcggttatcacgcgttgaagacaacatcagatgagccagggacggaacaagcaaggcaggggtgtagctcgtaccattgtagattcttcggggtttacaactgccaaggtgggaaaagaacttttgaatcgcgaattcaggggcaatgataaatgtgaatactattcacgtacgaattcaacagccacagaccacacccatcacatccatcagcttag

SEQ ID NO: 16057 - DNA, 1524 bp, Muscodor strobelii
  misc_feature: SGI cDNA ID NO. 565330
  misc_feature: Encodes the peptide sequence at SEQ ID NO 16058
atgacgttgtactctccccctccgccgcttcacaccttctaccaggataagcccacgcttcttgtgtgctggtggatgaccttgttctgtgctaccgtcattttgttgcgcgtcaccggtcgctttatccgttccgaaaagctcttcaaagaggaccggactgtcctatatgcgctcctaccgctattcgcacgtatggcactggtccatcttgtgctgctatggggaacaaataatgcccgcttcgaccggccgttaagtgaaaacgagagaatgcaaaaggcggttgctagtggcttggtcattgcaactcgcatgctctacgctgccactctctggattctaaaactcgccgtcttggactttttcaagcgactgacaagcactttctggaaacgatctcacgagatcactctaaaaataataagagttgtgctgggcctcacatttttcgctatcctcgctgccgatctgaccgaatgccgccctttcgaccattattggcaagttctgcctgatcctggtggtgaatgtcgtcagggctatgtccagctgatcactatgtcggtggcgaacattacgactgatcttatcctcgtcatctacccgataccaatcattctgaccagtcaaatggggccgaaaaagaagtttcaattgacattactatttgcgatgagcttgggtccgattggcacaactattttccggctaatacacgtactcagaagcaacggcagtcaacaaacacgatcattactagcatcggttgaacttctcttcgcaacaacggccgcgaatgccctggttctcggctcttttgttcgtgacaggggtacaaagaaggcgaaatacagggtggattcatttgctgcggacactttggaccgagtgtcgtctcggcgacctacaatacgacactggggaagtgatgaagatttggtcagaggtctaggtgtcagcgttgcacccgaataccgcgacgacgaggacgaggaagcatcgctcgctaggcgtgtacctgcgccacccgcgaacgtaggccaatggcagttgagttcagagtcgcaagcgaccgagactcaagagcgtaccgcatttctgcagccggacgttccgccgatctcgaccaactataacagctctctcataacccctcgacgggtttcctttgccgatgctggtggcttactggatggcgatacaagcagcacgctgcgaagtaatcgtgatagttacaactctagccaggacccgctatcgccatacagatctactccatcgccaataatgacagcgagtgggaatggtttgcgtcgcggttctcaaaccattctccatgatttgggtgggctttttcatcctttccaatcgcgccgaggtcgagggccaggtcaaggccgatctgccgccaacgtgactgaattgcaacccataccgcaacatccccacgaaccagcatacgagacagcgtcgtacagcggtggaccgatactagtagatgccggcggtctgcttaaataa

SEQ ID NO: 16058 - protein, 507 aa, Muscodor strobelii
  misc_feature: SGI Peptide ID NO. 565330
  misc_feature (1)..(507): NCBI GI: 261352544 Blast Desc: conserved [Verticillium albo-atrum VaMs.102]
  misc_feature (1)..(506): NCBI GI: 256727519 Blast Desc: [Nectria haematococca mpVI 77-13-4]
  misc_feature (1)..(507): NCBI GI: 46136467 Blast Desc: FG09749.1 [Gibberella zeae PH-1]
  misc_feature (1)..(485): NCBI GI: 39975979 Blast Desc: MGG_06084 [Magnaporthe grisea 70-15] gi|145011625|gb|EDJ96281.1| MGG_06084 [Magnaporthe grisea 70-15]
  misc_feature (1)..(507): NCBI GI: 171688472 Blast Desc: protein product [Podospora anserina] gi|170944198|emb|CAP70308.1| protein product [Podospora anserina]
  misc_feature (1)..(456): NCBI GI: 164429261 Blast Desc: NCU05307 [Neurospora crassa OR74A] gi|157073003|gb|EAA32842.2| conserved [Neurospora crassa OR74A]
  misc_feature (1)..(506): NCBI GI: 116196522 Blast Desc: CHGG_04859 [Chaetomium globosum CBS 148.51] gi|88180772|gb|EAQ88240.1| CHGG_04859 [Chaetomium globosum CBS 148.51]
  misc_feature (1)..(455): NCBI GI: 156061711 Blast Desc: SS1G_03001 [Sclerotinia sclerotiorum 1980] gi|154700402|gb|EDO00141.1| SS1G_03001 [Sclerotinia sclerotiorum 1980]
  misc_feature (3)..(461): NCBI GI: 258563324 Blast Desc: conserved [Uncinocarpus reesii 1704] gi|237907914|gb|EEP82315.1| conserved [Uncinocarpus reesii 1704]
  misc_feature (7)..(506): NCBI GI: 70996046 Blast Desc: integral membrane protein Pth11-like [Aspergillus fumigatus Af293] gi|44890003|emb|CAF32121.1| integral membrane protein, [Aspergillus fumigatus] gi|66850413|gb|EAL90740.1|
MTLYSPPPPLHTFYQDKPTLLVCWWMTLFCATVILLRVTGRFIRSEKLFKEDRTVLYALLPLFARMALVHLVLLWGTNNARFDRPLSENERMQKAVASGLVIATRMLYAATLWILKLAVLDFFKRLTSTFWKRSHEITLKIIRVVLGLTFFAILAADLTECRPFDHYWQVLPDPGGECRQGYVQLITMSVANITTDLILVIYPIPIILTSQMGPKKKFQLTLLFAMSLGPIGTTIFRLIHVLRSNGSQQTRSLLASVELLFATTAANALVLGSFVRDRGTKKAKYRVDSFAADTLDRVSSRRPTIRHWGSDEDLVRGLGVSVAPEYRDDEDEEASLARRVPAPPANVGQWQLSSESQATETQERTAFLQPDVPPISTNYNSSLITPRRVSFADAGGLLDGDTSSTLRSNRDSYNSSQDPLSPYRSTPSPIMTASGNGLRRGSQTILHDLGGLFHPFQSRRGRGPGQGRSAANVTELQPIPQHPHEPAYETASYSGGPILVDAGGLLK

SEQ ID NO: 16059 - DNA, 4041 bp, Muscodor strobelii
  misc_feature: SGI EST ID NO. CUFF.37949.0
  misc_feature: Variant of the nucleotide sequence at SEQ ID NO 16057
atcgtatgtgcaggtagtgcgggctgggctgcggaggcacatcacatccccaggattcaattacctcgcctgctacccacttcgtctcacctggccttccctcaaagctcccactctgttcctcgctgttccggcatgtcctttgcttctcaaataccaacctccgttgcgaatctccgacgttgcctgcgatattctgcccatctgtcattctaccatgtacaatacactccagccattgacgccgaattgtaatccacatcaaaaccggactcagaaagtatatgcgtcgcacacgaccaacgttggggttattcgcagtgggccaggaagtgtcactcaaaccttattctgaaggctcaacgggcgctagggtcactgtcaatatcagagggcaagggttgttgaattcaatcacggtgcggaataaggcttcatcggctgatataggggcggacgcatgctttggaatgaagccgatgccacgaataaatcatagacggatattctttgcagattgcgcgagcctcccgacgacgacctccgactccccgctcgtcccctctgcggaggttgacgggcgtggctacttctaggtacggggccaaggcaaaaagacaacatgacgttgtactctccccctccgccgcttcacaccttctaccaggataagcccacgcttcttgtgtgctggtggatgaccttgttctgtgctaccgtcattttgttgcgcgtcaccggtcgctttatccgttccgaaaagctcttcaaagaggaccggactgtcctatatgcgctcctaccgctattcgcacgtatggcactggtccatcttgtgctgctatggggaacaaataatgcccgcttcgaccggccgttaagtgaaaacgagagaatgcaaaaggcggttgctagtggcttggtcattgcaactcgcatgctctacgctgccactctctggattctaaaactcgccgtcttggactttttcaagcgactgacaagcactttctggaaacgatctcacgagatcactctaaaaataataagagttgtgctgggcctcacatttttcgctatcctcgctgccgatctgaccgaatgccgccctttcgaccattattggcaagttctgcctgatcctggtggtgaatgtcgtcagggctatgtccagctgatcactatgtcggtggcgaacattacgactgatcttatcctcgtcatctacccgataccaatcattctgaccagtcaaatggggccgaaaaagaagtttcaattgacattactatttgcgatgagcttgggtccgattggcacaactattttccggctaatacacgtactcagaagcaacggcagtcaacaaacacgatcattactagcatcggttgaacttctcttcgcaacaacggccgcgaatgccctggttctcggctcttttgttcgtgacaggggtacaaagaaggcgaaatacagggtggattcatttgctgcggacactttggaccgagtgtcgtctcggcgacctacaatacgacactggggaagtgatgaagatttggtcagaggtctaggtgtcagcgttgcacccgaataccgcgacgacgaggacgaggaagcatcgctcgctaggcgtgtacctgcgccacccgcgaacgtaggccaatggcagttgagttcagagtcgcaagcgaccgagactcaagagcgtaccgcatttctgcagccggacgttccgccgatctcgaccaactataacagctctctcataacccctcgacgggtttcctttgccgatgctggtggcttactggatggcgatacaagcagcacgctgcgaagtaatcgtgatagttacaactctagccaggacccgctatcgccatacagatctactccatcgccaataatgacagcgagtgggaatggtttgcgtcgcggttctcaaaccattctccatgatttgggtgggctttttcatcctttccaatcgcgccgaggtcgagggccaggtcaaggccgatctgccgccaacgtgactgaattgcaacccataccgcaacatccccacgaaccagcatacgagacagcgtcgtacagcggtggaccgatactagtagatgccggcggtctgcttaaataatccgattactcgatcctgaactcatcgatcttttttattacgacacagttttgcctctctattaacgttcgccgatatatcgataccctgtctccatacctagctgcagtttccatgagatttacgaccttgatgccgaaattcatgacgtgtacaaatttttgatacctttacatatatattagagcccgatggactggatatggctccggggagaaatccttattggattatgtgatttttataagccttgctccagagttgagaactcggattgtagagcgcggccacgtaaggcgttttttggcgtcatcgggaattggctagagtacaggaggctctgaaagagtctgtttcatattcccaattggaagaatccacaggtattgaaggctttgtccttcccattaccagtattgtggagaaacgaaaggaacgagatgtatgcatacgtcttagaacccgggctaccatacctggaaatatagctccattaatagcactccatgtgcgactgaacgattgctcataatgtcttgtttcctctcgtatctattcccgtcctgggtacattctagtgcttttgaacctctcatgcggaccacattgtttatgggttagtatgccatgagacaaatggcccctttggaatttcaaaactacacattcatcattctgaacgcttatggttcggtaaacggatgagccaacgcttgtcttatcagcatttttgtaaattctcaagaatcacgagattttctgtttcaggcctgtctcgttatgtaatcgcctgaatgctgtctaatgctacatacaatatgttcgaatccaagaaacgcaacaatccccttttccctctctgctcaagtcatgacgatcaccacgttcccaagccaaccactaaacttatccaagaagccttggcattgtccaatacagaccgataccttcaccagatggacatcggaccactcaacccagagtacttacagacaagtggcgccaccgtcagcagagcctcctcatcctcatccccgcttctcgcgtgctgcgtgcttattattccgccgaggcggcaccgagaaaattatcgatttgagatgcgtgtcagaccggggaaaggcaaagtcctgcatgagccggcttttgctttcggatgaccatctgagacatttcgtggtaagcatgggatgggatgatgtttttctcaatactcaaaggggaaataaatacacggaatgatggtccataccaaggacttgggtttttatgctcccggtcccgggttgttgggacgagtgtgatttatttttgagactgaaactttgttagcgatggaagcgtggggctttgctttttcccacgaggccgagtcctaggaacgaatgtagcgatgtcttgaaggtgcattgatcatgtgagtctgcatatgagacatttgatctggtaggttagctaggtgtcttggatggagatgattctagatgtttgtgagacattgatgcattatctggctacacgtactgcgatatggctattctgtatagggcaaggaataggagtaggtacatacaagtgcacgcatctgctcaagaactacgaaaatcgatggacagtaatcaacgaatgattcttgtcctacacgcgttcacccgctgaatatgcattgcaacatacatatctttgatgacaacatccatcatctttcatctctcccgatacgaaatccgcatgctctccaggtgacgtgtgtacgacgaaacagaaagccaccaaagaatctagaatcatgcttaggtttcactcatcatctgcggctgattgcgacgtcgtagtgtaccttagacgtaaatccggcctgtcggtggtagtaactgtgtaacgctggctgctta

SEQ ID NO: 16060 - DNA, 705 bp, Muscodor strobelii
  misc_feature: SGI cDNA ID NO. 565331
  misc_feature: Reduced expression when VOC is produced
  misc_feature: Encodes the peptide sequence at SEQ ID NO 16061
atggctgacgccgagaccctcagctccgaggcccaggagagggccgttgtcaaggcctggcgcacatggagaactgcccacgagatggttcaggatcggggctatgaactggcagaggcagaagtcaagatctctctcgatgacttcagacagcaatacacaagcatcgatggctcactgtcgcgcgagcggatgaagttcggtgcccgccccagccccgagatgctgaagaagtacacccctcccgccactgcccacaaccccgacccccagccagacatcggtaccatctgggtagacttcatcgacggcaacattggtgccgaagaaatgcgaaagttctccaagttctgtgccaccgagcactaccgtaccggcatcatgatcctcagcggcaacgtctcctcggccgccaagaaggagatcgccaagtttgcccagtggacgaccatcgagtggttcctcgacgaggacctgctcatcaacatcacccaccacgagctcgtgccccgccatgtcattctctctagagacgagaagatggccctgctcaagcgttaccgcctgaaggagacccagctgccccgtatcctccagcgggaccccatcgccaagtactatggcatgcgccgcggacaggtcgtcaagatcatccgcacctccgagacggctggacgatatgccagttaccgactgtgtgtatga

SEQ ID NO: 16061 - protein, 234 aa, Muscodor strobelii
  misc_feature: SGI Peptide ID NO. 565331
  misc_feature (161)..(234): Pfam Id: PF01191 Pfam Desc: RNA polymerase Rpb5, C-terminal domain
  misc_feature (8)..(122): Pfam Id: PF03871 Pfam Desc: RNA polymerase Rpb5, N-terminal domain
  misc_feature (8)..(53): Pfam Id: PF03871 Pfam Desc: RNA polymerase Rpb5, N-terminal domain
  misc_feature (8)..(234): NCBI GI: 171688464 Blast Desc: protein product [Podospora anserina] gi|170944194|emb|CAP70304.1| protein product [Podospora anserina]
  misc_feature (1)..(234): NCBI GI: 85105978 Blast Desc: DNA-directed RNA polymerases II 24 kDa polypeptide [Neurospora crassa OR74A] gi|28923670|gb|EAA32840.1| DNA-directed RNA polymerases II 24 kDa polypeptide [Neurospora crassa OR74A]
  misc_feature (3)..(232): NCBI GI: 46136465 Blast Desc: FG09748.1 [Gibberella zeae PH-1]
  misc_feature (9)..(234): NCBI GI: 261352545 Blast Desc: DNA-directed RNA polymerases I [Verticillium albo-atrum VaMs.102]
  misc_feature (35)..(234): NCBI GI: 116196520 Blast Desc: CHGG_04858 [Chaetomium globosum CBS 148.51] gi|88180771|gb|EAQ88239.1| CHGG_04858 [Chaetomium globosum CBS 148.51]
  misc_feature (1)..(233): NCBI GI: 154292350 Blast Desc: BC1G_14664 [Botryotinia fuckeliana B05.10] gi|150846143|gb|EDN21336.1| BC1G_14664 [Botryotinia fuckeliana B05.10]
  misc_feature (1)..(233): NCBI GI: 156061727 Blast Desc: SS1G_03009 [Sclerotinia sclerotiorum 1980] gi|154700410|gb|EDO00149.1| SS1G_03009 [Sclerotinia sclerotiorum 1980]
  misc_feature (1)..(234): NCBI GI: 67516941 Blast Desc: AN0752.2 [Aspergillus nidulans FGSC A4] gi|40746238|gb|EAA65394.1| AN0752.2 [Aspergillus nidulans FGSC A4] gi|259488970|tpe|CBF88854.1| TPA: RNA polymerase subunit FGSC
  misc_feature (3)..(234): NCBI GI: 119495104 Blast Desc: RNA polymerase subunit [Neosartorya fischeri NRRL 181] gi|119412507|gb|EAW22448.1| RNA polymerase subunit [Neosartorya fischeri NRRL 181]
  misc_feature (1)..(231): NCBI GI: 154276568 Blast Desc: DNA-directed RNA polymerases II 24 kDa polypeptide [Ajellomyces capsulatus NAm1] gi|150414202|gb|EDN09567.1| DNA-directed RNA polymerases II 24 kDa polypeptide [Ajellomyces
  misc_feature: Useful for introducing or modulating the production of volatile compounds
MADAETLSSEAQERAVVKAWRTWRTAHEMVQDRGYELAEAEVKISLDDFRQQYTSIDGSLSRERMKFGARPSPEMLKKYTPPATAHNPDPQPDIGTIWVDFIDGNIGAEEMRKFSKFCATEHYRTGIMILSGNVSSAAKKEIAKFAQWTTIEWFLDEDLLINITHHELVPRHVILSRDEKMALLKRYRLKETQLPRILQRDPIAKYYGMRRGQVVKIIRTSETAGRYASYRLCV

SEQ ID NO: 16062 - DNA, 1801 bp, Muscodor strobelii
  misc_feature: SGI EST ID NO. CUFF.38135.0
  misc_feature: Variant of the nucleotide sequence at SEQ ID NO 16060
tgctgggaattttttcatgcgccagaagctgcgagcaaggctgaaatcatcccatgctctttcattgtcccgctgccatccaatcggtctcgcgctccttcctttgctatctcgccattgttgtcggtcgcctgtcccgcgccgcgcactcactacacttctgtagtcaataccattagcgtccataatccctaatcccacgaattcctcgcttcgtcccgacgtgaatacctgcacccacgaactcgtccatagcagtcgcgactaccatccacttgccgcgccaacatggctgacgccgagaccctcagctccgaggcccaggagagggccgttgtcaaggcctggcgcacatggagaactgcccacgagatggttcaggatcggggctatgaactggcagaggcagaagtcaagatctctctcgatgacttcagacagcaatacacaagcatcgatggctcactgtcgcgcgagcggatgaagttcggtgcccgccccagccccgagatgctgaagaagtacacccctcccgccactgcccacaaccccgacccccagccagacatcggtaccatctgggtagacttcatcgacggcaacattggtgccgaagaaatgcgaaagttctccaagttctgtgccaccgagcactaccgtaccggcatcatgatcctcagcggcaacgtctcctcggccgccaagaaggagatcgccaagtttgcccagtggacgaccatcgagtggttcctcgacgaggacctgctcatcaacatcacccaccacgagctcgtgccccgccatgtcattctctctagagacgagaagatggccctgctcaagcgttaccgcctgaaggagacccagctgccccgtatcctccagcgggaccccatcgccaagtactatggcatgcgccgcggacaggtcgtcaagatcatccgcacctccgagacggctggacgatatgccagttaccgactgtgtgtatgaggcgcgcggattctagaccgtcaagatcgtgtgccagggatagcggatagcggagaggaagaaaagacgcaaaagagaatgacagcatttacaaaattcggcgtctaccaggtgaagggatttccatttaggcggcaaggaaccggcgttttgcggcatcagaaagtcagaggtgcaaactatattcccgtgtgcattttgagctccccttgggctgtcaatcaagaattttgatacaaatcttttattgagaccggacgttaagcgtttgtgatttttgcactcactgcctgagtggtattggaccattcctatgaccaaatttagggactggcctcaaacaggcagacgtgctaatgacgtctgagtcctggttctcctaaaaattctcatcaatagcctacttcgtgtttagcatcggtgatccttacgattttaccaatgcagtggatttgagatgatgcgaagcttgatcagtacgtcaccgcggatttctaccgtggatcatgccgagaccataataacgagcagtcatggtatcagtcccgcgaagggatcccctctgagactgtagataacagaaatttcgttgatttcgtgcgtatggcccatgagaaatactacctatatatgacctctctgcacaacaggggaatcaacctctttgacataggaacgtaaagttctgttgcgtcacctgtatcatcgccctcttgaaatgtagatttaataagtgtatcacaaacattgtctgaacagtacaatatgctactgatacgagagtagggtcgaatgcgcacgcatttcg

SEQ ID NO: 16063 - DNA, 1461 bp, Muscodor strobelii
  misc_feature: SGI cDNA ID NO. 565332
  misc_feature: Reduced expression when VOC is produced
  misc_feature: Encodes the peptide sequence at SEQ ID NO 16064
atggccgacgttgctcccgccgcggctgcacctgccgctgataagaagaagcctgagaaacccaaccaggaggcattcaatcaagaattggcaaaggctgagaaggaataccaggatgcactggccaaatacaacgctgccaagaccaaggtcaacgacgctacccccaacagcaacaaggatgcacctacacccacccagaagcgccgccaggagctcatcgcccagctcaccgagatccgcaccaagcaaggcgttggcaagaatgcccgcaactccaagaccgatcagatgaagcgcctcgacgagcagctcaagaatcgcattgccgagcagaagaccgcccgcggcagactcgcctacaagagcaccgacgagctggaacgtgccatctcgagccttgaccagcaggtcaacaccggcatgatgaagcttgtggacgagaagaaggccctggtcgagatcagcaacctgaagaagcagcgcaagaacttcactcagatcgactccatgcagaaggatatcgacgacctcaagcagaagatcaaggacatcaaggacagcatggacgaccccgaagcgcgcggcctcagcgaccagtacaacaagatccaggccgagctcgacaccatcaaggctgagcaagactcggctttcaagaacctctccggcctgcgcgacgagcggaccaagtggcagaccgagcagagcgccaagtggcaggtcatcaagcagatcaaggacaactactatgctcaaaagaaagcattcggagagtgggagcgcgaggccaagcagaaggcccgtgagcgccagaaggccgaacgcgagaagtacgaaaacgagaagaagatggagcgcgctcagaagatgctccaggaagccagcgaccctgcctacctcgaggagatccgtcgcgccaccagcttgctgaactttttcgatccctcgtctgcttctacggagaagtcccctctcttggctagcagtggcatgactgctcaagccacccgcaaagtcgatgactccgggttgaaaggcaccaagctcgtgcgaaaggaggaccgcgatgatgagtatctgcccgctacgtcgaagaagggcaagaaaggcaagaaaggtggcgccactgctgagaagagtggattcagctgcccaccttcagtcatggaagactgcggtttcgttggtgttgatccacctatgagcgcggctgctgtacctgagactatcgagaagatcaagggcaagcttgccgagtggaagggtgatcagcaggcacagacccagcgaaacatcgaaaaggcaaagaaggagatcgaaaaacttgaggccgaggaggctgcagaggctgcagctcctgcaactaatggcgccgatagcgataagaagaccaatggcaaagtcgaggctgtcaccgcggagctcaaggacgcatcgttggagaacaaggcggagtag

SEQ ID NO: 16064 - protein, 486 aa, Muscodor strobelii
  misc_feature: SGI Peptide ID NO. 565332
  misc_feature (17)..(486): NCBI GI: 85105974 Blast Desc: NCU05304 [Neurospora crassa OR74A] gi|28923669|gb|EAA32839.1| conserved [Neurospora crassa OR74A]
  misc_feature (1)..(484): NCBI GI: 145603386 Blast Desc: MGG_06082 [Magnaporthe grisea 70-15] gi|145011627|gb|EDJ96283.1| MGG_06082 [Magnaporthe grisea 70-15]
  misc_feature (1)..(486): NCBI GI: 46136463 Blast Desc: FG09747.1 [Gibberella zeae PH-1]
  misc_feature (17)..(486): NCBI GI: 256727518 Blast Desc: [Nectria haematococca mpVI 77-13-4]
  misc_feature (17)..(468): NCBI GI: 116196518 Blast Desc: CHGG_04857 [Chaetomium globosum CBS 148.51] gi|88180770|gb|EAQ88238.1| CHGG_04857 [Chaetomium globosum CBS 148.51]
  misc_feature (1)..(486): NCBI GI: 156061729 Blast Desc: SS1G_03010 [Sclerotinia sclerotiorum 1980] gi|154700411|gb|EDO00150.1| SS1G_03010 [Sclerotinia sclerotiorum 1980]
  misc_feature (1)..(364): NCBI GI: 261352546 Blast Desc: conserved [Verticillium albo-atrum VaMs.102]
  misc_feature (20)..(484): NCBI GI: 171688462 Blast Desc: protein product [Podospora anserina] gi|170944193|emb|CAP70303.1| protein product [Podospora anserina]
  misc_feature (15)..(485): NCBI GI: 67516943 Blast Desc: AN0753.2 [Aspergillus nidulans FGSC A4] gi|40746239|gb|EAA65395.1| AN0753.2 [Aspergillus nidulans FGSC A4] gi|259488969|tpe|CBF88852.1| TPA: nuclear segregation protein
  misc_feature (5)..(485): NCBI GI: 145230682 Blast Desc: An01g11960 [Aspergillus niger] gi|134055724|emb|CAK44097.1| protein product [Aspergillus niger]
  misc_feature: Useful for introducing or modulating the production of volatile compounds
MADVAPAAAAPAADKKKPEKPNQEAFNQELAKAEKEYQDALAKYNAAKTKVNDATPNSNKDAPTPTQKRRQELIAQLTEIRTKQGVGKNARNSKTDQMKRLDEQLKNRIAEQKTARGRLAYKSTDELERAISSLDQQVNTGMMKLVDEKKALVEISNLKKQRKNFTQIDSMQKDIDDLKQKIKDIKDSMDDPEARGLSDQYNKIQAELDTIKAEQDSAFKNLSGLRDERTKWQTEQSAKWQVIKQIKDNYYAQKKAFGEWEREAKQKARERQKAEREKYENEKKMERAQKMLQEASDPAYLEEIRRATSLLNFFDPSSASTEKSPLLASSGMTAQATRKVDDSGLKGTKLVRKEDRDDEYLPATSKKGKKGKKGGATAEKSGFSCPPSVMEDCGFVGVDPPMSAAAVPETIEKIKGKLAEWKGDQQAQTQRNIEKAKKEIEKLEAEEAAEAAAPATNGADSDKKTNGKVEAVTAELKDASLENKAE

SEQ ID NO: 16065 - DNA, 2434 bp, Muscodor strobelii
  misc_feature: SGI EST ID NO. CUFF.38283.0
  misc_feature: Variant of the nucleotide sequence at SEQ ID NO 16063
ccgcacaccacgccacacacaccagtagtagccttctctggaccctgagatctggcctccatttttctctggacctctctcgccgtccccttctcgcctactgccttaccgtagttaatacatacagacatcattaacttgattgtcttgctgtgctgcagccccctcccccccagctgccactacctatctgttggggcgctcgccgattctcagtaatctccccctcccttccaccttgccgtccgctccctgaccacactcgccgtccaccatcatggccgacgttgctcccgccgcggctgcacctgccgctgataagaagaagcctgagaaacccaaccaggaggcattcaatcaagaattggcaaaggctgagaaggaataccaggatgcactggccaaatacaacgctgccaagaccaaggtcaacgacgctacccccaacagcaacaaggatgcacctacacccacccagaagcgccgccaggagctcatcgcccagctcaccgagatccgcaccaagcaaggcgttggcaagaatgcccgcaactccaagaccgatcagatgaagcgcctcgacgagcagctcaagaatcgcattgccgagcagaagaccgcccgcggcagactcgcctacaagagcaccgacgagctggaacgtgccatctcgagccttgaccagcaggtcaacaccggcatgatgaagcttgtggacgagaagaaggccctggtcgagatcagcaacctgaagaagcagcgcaagaacttcactcagatcgactccatgcagaaggatatcgacgacctcaagcagaagatcaaggacatcaaggacagcatggacgaccccgaagcgcgcggcctcagcgaccagtacaacaagatccaggccgagctcgacaccatcaaggctgagcaagactcggctttcaagaacctctccggcctgcgcgacgagcggaccaagtggcagaccgagcagagcgccaagtggcaggtcatcaagcagatcaaggacaactactatgctcaaaagaaagcattcggagagtgggagcgcgaggccaagcagaaggcccgtgagcgccagaaggccgaacgcgagaagtacgaaaacgagaagaagatggagcgcgctcagaagatgctccaggaagccagcgaccctgcctacctcgaggagatccgtcgcgccaccagcttgctgaactttttcgatccctcgtctgcttctacggagaagtcccctctcttggctagcagtggcatgactgctcaagccacccgcaaagtcgatgactccgggttgaaaggcaccaagctcgtgcgaaaggaggaccgcgatgatgagtatctgcccgctacgtcgaagaagggcaagaaaggcaagaaaggtggcgccactgctgagaagagtggattcagctgcccaccttcagtcatggaagactgcggtttcgttggtgttgatccacctatgagcgcggctgctgtacctgagactatcgagaagatcaagggcaagcttgccgagtggaagggtgatcagcaggcacagacccagcgaaacatcgaaaaggcaaagaaggagatcgaaaaacttgaggccgaggaggctgcagaggctgcagctcctgcaactaatggcgccgatagcgataagaagaccaatggcaaagtcgaggctgtcaccgcggagctcaaggacgcatcgttggagaacaaggcggagtaggactccgccgatttcccggccttgcagtctcagcaagattcagaatcggtgcctgatgaaacccttgtctcggaggagactgccggtgatgaggaggagctatctgattctggtgaccagtcgcgtgattctaaggaggacgcactcaacgctgatgacgagtcacccgaaccaaccgaggagaaacccgagcccaaggaacaatcatccgagcccaagaaggaagtatgcaagcctaaggaggaggtgctcgagcctaaggaagagctacccaaattgaatgaggacttgctcgcgcttgaggacaagacttccgagcctatcgacaaggaactcagctcgaagcggaaaagcatctaatcctcaatcgaaattttggcaatcggtcactctgaacccttcgtcgaagagtcctccatgttgggccaccatcaacgcactccggctcgtttgtacagcacagctgaattttatcctggagcataagcattctcttctttacggtattttcctttcagactatagttcatcagccatattctgcgtcattgtttagacgagcagtggcgcgagtttccacatgtcttctgccgctggagggggccgccgggaatggtagcttaggattgcggcatgagtaggcacgcttgtaatactttagagcgacaaaacaatgttatacaatatattcccttt

SEQ ID NO: 16066 - DNA, 687 bp, Muscodor strobelii
  misc_feature: SGI cDNA ID NO. 565333
  misc_feature: Encodes the peptide sequence at SEQ ID NO 16067
atgcatagcagtaagaaatcccgcaaggacgtcatcaggatggacccggactgtgccatctgccatgctcctgcgagccatgcttgtgattgcgaggcaaagggcttggaaactgctgtccgtcaagcagaggcacgtatgatgcagtctatctattctgatatacgcacttgggtccgagggcatgctcaagattatatactcgagtattttcgtttgcttacagaacggcggaaagctgcgcatgctcagcacattgaacggttaacgtcacatgcttaccattattatcatgcgcctccacatccgactgaaatcgcgaatgcccaggcgaccctcaagcgaggtatcgatgaagattggcagtcaagtgtgcaacgttatccggaagtgttggagtactttttcagcttagttgagatgacacttccaagtgacgacgagcctgcagtcaaagacccacctctaagcgcattgcaaggttcgaggaagagtcatagacggagctcgaccattgcgcccgagagtgcgcacgagagagatagagaacgaaataggaggacaccgccgcctattatggacagaagaacgcctgctcctattgctggtaacccgttagcaccatcacggcgagcttacggccgacctccaactgctccaccaggaagctactaccacccatattaa

SEQ ID NO: 16067 - protein, 228 aa, Muscodor strobelii
  misc_feature: SGI Peptide ID NO. 565333
  misc_feature (3)..(204): NCBI GI: 171688500 Blast Desc: protein product [Podospora anserina] gi|170944212|emb|CAP70322.1| protein product [Podospora anserina]
  misc_feature (14)..(200): NCBI GI: 116196514 Blast Desc: CHGG_04855 [Chaetomium globosum CBS 148.51] gi|88180768|gb|EAQ88236.1| CHGG_04855 [Chaetomium globosum CBS 148.51]
  misc_feature (6)..(200): NCBI GI: 261352547 Blast Desc: conserved [Verticillium albo-atrum VaMs.102]
  misc_feature (3)..(225): NCBI GI: 85105970 Blast Desc: NCU05303 [Neurospora crassa OR74A] gi|28923668|gb|EAA32838.1| conserved [Neurospora crassa OR74A]
  misc_feature (14)..(200): NCBI GI: 256726949 Blast Desc: NECHADRAFT_33738 [Nectria haematococca mpVI 77-13-4]
  misc_feature (4)..(174): NCBI GI: 154293786 Blast Desc: BC1G_14221 [Botryotinia fuckeliana B05.10] gi|150845194|gb|EDN20387.1| BC1G_14221 [Botryotinia fuckeliana B05.10]
  misc_feature (14)..(167): NCBI GI: 156061737 Blast Desc: SS1G_03014 [Sclerotinia sclerotiorum 1980] gi|154700415|gb|EDO00154.1| SS1G_03014 [Sclerotinia sclerotiorum 1980]
  misc_feature (28)..(200): NCBI GI: 46136461 Blast Desc: FG09746.1 [Gibberella zeae PH-1]
  misc_feature (14)..(158): NCBI GI: 39975985 Blast Desc: MGG_06081 [Magnaporthe grisea 70-15] gi|145011628|gb|EDJ96284.1| MGG_06081 [Magnaporthe grisea 70-15]
  misc_feature (16)..(189): NCBI GI: 189193333 Blast Desc: conserved [Pyrenophora tritici-repentis Pt-1C-BFP] gi|187978569|gb|EDU45195.1| conserved [Pyrenophora tritici-repentis Pt-1C-BFP]
MHSSKKSRKDVIRMDPDCAICHAPASHACDCEAKGLETAVRQAEARMMQSIYSDIRTWVRGHAQDYILEYFRLLTERRKAAHAQHIERLTSHAYHYYHAPPHPTEIANAQATLKRGIDEDWQSSVQRYPEVLEYFFSLVEMTLPSDDEPAVKDPPLSALQGSRKSHRRSSTIAPESAHERDRERNRRTPPPIMDRRTPAPIAGNPLAPSRRAYGRPPTAPPGSYYHPY

SEQ ID NO: 16068 - DNA, 3074 bp, Muscodor strobelii
  misc_feature: SGI EST ID NO. CUFF.37923.0
  misc_feature: Variant of the nucleotide sequence at SEQ ID NO 16066
tctcgtcgtatagatgtgagctcaagtgtttgatgcacaattgtcgcaattagccgccgttgtccctgcgaatttggggtctttcagagttcagccaacaagagcggtgtacgatgtatgatgatgggctacaccacaaacatgtgttgcactccaatagatattgggtcactcgccacagatgaggcgaagcgagttgtatcctttcttgcccaatgatgctgccagccgaactacagaccatccaatcttacggtacttggaattattgcaacctaaacttatactgtcgagtggagagatcgggcgacccagaggctcaagttcccgtctttttggcttctccacactttctttttgtttctttcattgcccgggcgtcgatgatcagtgttcgtaagaagagctgctgatgaagtttcacgacttcagctcgttccgctttcttgtctctcgggtcagtaggtagatgatcgatagaaaagtctgggtgtcatctcctatccgagattcagtgttcaaccccctcccgcttcacaatcggagtccaatatctgggtgtgcagcaacgtcggcggatctgcgagctctcgattcggttacggtcatgcactctgcatactaagtagtaatccagccgcccattcgagccacgacagccgctttttatctcctgcccagacgtggacatactctctcctctcccgctcgcgagactggtcttcggccgctgctgagctgttacactttgcaacctttactgcttctcctagtttctcaattggtcttgtgtgtcactttattgctgcaccactctgcaccactaccaccaccacgacgcctgctcgtcgagtcctctctcttcttctgcattgacacgctcgcacgtcgtcgatctatccaattgcttggcctatccatctgcgctggcccttggcttcttcaggccgttgtgtcttcgtgtatctctgctgtctattgcgtgtggctataccccacactccgcagagtatactgctcttcggctcccgtgatatcggtcatatcgggtcgcaaaactcactcttcccgctcccatttgctgccctcattgccccccaattccgcctccttcgagagggcggtcagttctgccacctgcaggagaattgcgagctagccatagactgaacacctctcgtccgattcccctcttgctagctaccacgcggttcgctgtaactctactactgctgtccaagtagtgtaagtgcgtgcgtgtctgcgtctgcgtgtatgtctgtctgctcgcctctattacttgcgttacccttcataatacagtaagaaatcccgcaaggacgtcatcaggatggacccggactgtgccatctgccatgctcctgcgagccatgcttgtgattgcgaggcaaagggcttggaaactgctgtccgtcaagcagaggcacgtatgatgcagtctatctattctgatatacgcacttgggtccgagggcatgctcaagattatatactcgagtattttcgtttgcttacagaacggcggaaagctgcgcatgctcagcacattgaacggttaacgtcacatgcttaccattattatcatgcgcctccacatccgactgaaatcgcgaatgcccaggcgaccctcaagcgaggtatcgatgaagattggcagtcaagtgtgcaacgttatccggaagtgttggagtactttttcagcttagttgagatgacacttccaagtgacgacgagcctgcagtcaaagacccacctctaagcgcattgcaaggttcgaggaagagtcatagacggagctcgaccattgcgcccgagagtgcgcacgagagagatagagaacgaaataggaggacaccgccgcctattatggacagaagaacgcctgctcctattgctggtaacccgttagcaccatcacggcgagcttacggccgacctccaactgctccaccaggaagctactaccacccatattaatacgttaagctcatggaacaacctagccaacaaattgttattttctctcagcaggctccgcaacatcaacatcacgaaacatactacgccatcaacactagatcactgtttgttctacagtacaggaaaacattgctgtaatgcaggcctgggtcgaaatcgaaacgcctctcactaccttgacaatggagtcaagtccaactttgtttccttctcacgagaccacgatcacacgagccgatgacatgttctgcaatgcataaaaaagcagatggagcattacgaaggcacataatcattctgcatagcgctggtttcgccattcttcgagcgtgtttttctttcttttgtcagtttcgattcatcataccctggccttgcactaccaaggttctggattgatcggccggaatactgatttgtatcgttcaatttgtccccaaagggataaaggcattggagtacggagtccaggctttgcagtatatacgaaggacgatggtatagtgaatcggtaaagtcaagttatttgacgcaatgtggcgcttggcaatgggccgtggaaagtccgagaagtcatcctacgccgaaaggacttggaaaagagtacctagagcgtgatgtttctggatctgtcaaagtcgagagactacgaagttcacagaatctttaactggaaagaacgaagctttatactgctcgctatggttccaattacgactcacctcgatgaacctagctggacctgcttagaattattgactgaccaaagatgcgaaagaaagtgatgctttatcatcttgtgtgtctatcaatttgaaaggaggtgtataaaagacacagatgaatcaattaatcgcctcttaaaatgctctattattaactagtgaacatagcttcaagtgctaacaatatatatctaatccgcttgatttattaccaacaccaaccctaacaaatatcacaacactagcatttatggcaaaattactaggcaaccaaaactcctctattttaaccgggttcaatcttgagtcaagcgatctttcacgcatacttagagacatcgttccaa

SEQ ID NO: 16069 - DNA, 1821 bp, Muscodor strobelii
  misc_feature: SGI cDNA ID NO. 565334
  misc_feature: Encodes the peptide sequence at SEQ ID NO 16070
atgcctccgcgttgttccgggagctctgcgctcttcctccctttcctctatccgaccctattccgatgcaccacccgcgcctctcgagctaatcgtggctttacggttttggggccttcaccaacaccggccactgatatccctaaggttgtcattagcgatgactcgagcaacgacatcccaacctctcgtttgaatcctaccccggacgactacgccgtttccactttcgccgacaaggctagtgttacgatacaggctggcggaggtggcggcggctgcatttcattccttcgagaaatattcatcgccaatgggcccgcgaacggtggcgatggtgggcatggtggaaacgtttacatcgaagctgtgcactccgagaattcgttgcacaagatagcccgtcgccgtatcattcgcgctggccgaggcaaaacgggtcaaggcagtaatcgaggtggctcacgcggcgaagatgtcatcatccaggttcctgtgggtacagtcatccgagaaatcagcagaatagacccggttgttgaggaggacaaactgtattatgacgcccgagagaaagagcgcgaataccaaaagctggtgagagaggcagaagctgcgaccaaagccagcgaggagacaggaatcggtggcgctgaggctctgcagctcaacataaatcttccagatccaccaccacatgcccaggcccataagtttactctttacccgggcatgtcaaatgcggatcgccgaaatctggagcttccacgactgcctaggcgcgagcgtatgtttgctcaaccagacgcgcctatccatcttgacctctccactccaactcatcgaccgatcttacttgccgcaggcggcctgggtggtctgggcaatccccattttgtctccaaagaccgacctcgcccgctgttcgccacaaagggggagagggcaatgcgcatgcagatagaacttgagctcaaactcttagcagatgtgggctttgttggcctgcctaatgctggcaagagtacgctgttacgcgctttgactcgtagccgtgcccgcgttggtaattgggcttttacgacgctccagcctaatattggtactgtggtgctggacaatcacaaagggcgcccgatcgtgaaccatcgaaggttgcagctctcgaaagatcctcattccgtgattcacgatgccaatcttggtcctgttgtcgtcacacaaccatctggtcaggcactaatcggcgaggcccctgagccacgaaaacgctttaccattgcagacattccagggctgattgagggtgctcatctagatcgaggactgggaatggagtttcttcgccacgttgagcgagcaggcgttcttgcatttgtcatcgatctaaacgctggcgatgcggtgaaggcactgaaagctttgtggactgaggttggactgtatgctcgaatgcgggaggatgaagaaagagaaaatgaagcgagcgaagacattgactgggaaggagatggaagtgacctagaaatgggtcagatggtcattgcagacctccctgagattcgagatgaaccgactggcttgcgcattgctgctaagccgtggttcgtgattgccaccaaaggggatcttccagaaaccgaagataactatagcaagctgaaggattatatggatgccataaccgatggccgagagcctcatcctagcggtgtagaaggcgcctggacagaagactgtgctgctattccggtgagcgccatccacgggcatggaacggatcgaatcatccactggacactaggcctgctagacgaatag

SEQ ID NO: 16070 - protein, 606 aa, Muscodor strobelii
  misc_feature: SGI Peptide ID NO. 565334
  misc_feature (77)..(327): Pfam Id: PF01018 Pfam Desc: GTP1/OBG
  misc_feature (329)..(500): Pfam Id: PF01926 Pfam Desc: GTPase of function
  misc_feature (77)..(169): Pfam Id: PF01018 Pfam Desc: GTP1/OBG
  misc_feature (285)..(327): Pfam Id: PF01018 Pfam Desc: GTP1/OBG
  misc_feature (329)..(482): Pfam Id: PF01926 Pfam Desc: GTPase of function
  misc_feature (1)..(605): NCBI GI: 85105966 Blast Desc: NCU05302 [Neurospora crassa OR74A] gi|28923667|gb|EAA32837.1| conserved [Neurospora crassa OR74A]
  misc_feature (5)..(605): NCBI GI: 171688498 Blast Desc: protein product [Podospora anserina] gi|170944211|emb|CAP70321.1| protein product [Podospora anserina]
  misc_feature (1)..(606): NCBI GI: 39975987 Blast Desc: MGG_06080 [Magnaporthe grisea 70-15] gi|145011629|gb|EDJ96285.1| MGG_06080 [Magnaporthe grisea 70-15]
  misc_feature (1)..(605): NCBI GI: 246771698 Blast Desc: OBG family small GTPase [Sporothrix schenckii]
  misc_feature (74)..(605): NCBI GI: 116196512 Blast Desc: CHGG_04854 [Chaetomium globosum CBS 148.51] gi|88180767|gb|EAQ88235.1| CHGG_04854 [Chaetomium globosum CBS 148.51]
  misc_feature (52)..(588): NCBI GI: 46136459 Blast Desc: FG09745.1 [Gibberella zeae PH-1]
  misc_feature (1)..(606): NCBI GI: 261352357 Blast Desc: GTP-binding protein [Verticillium albo-atrum VaMs.102]
  misc_feature (1)..(605): NCBI GI: 154293788 Blast Desc: BC1G_14222 [Botryotinia fuckeliana B05.10] gi|150845195|gb|EDN20388.1| BC1G_14222 [Botryotinia fuckeliana B05.10]
  misc_feature (8)..(606): NCBI GI: 119186571 Blast Desc: CIMG_03333 [Coccidioides immitis RS]
  misc_feature (6)..(606): NCBI GI: 240108521 Blast Desc: GTP1/OBG family protein [Coccidioides posadasii C735 delta SOWgp]
MPPRCSGSSALFLPFLYPTLFRCTTRASRANRGFTVLGPSPTPATDIPKVVISDDSSNDIPTSRLNPTPDDYAVSTFADKASVTIQAGGGGGGCISFLREIFIANGPANGGDGGHGGNVYIEAVHSENSLHKIARRRIIRAGRGKTGQGSNRGGSRGEDVIIQVPVGTVIREISRIDPVVEEDKLYYDAREKEREYQKLVREAEAATKASEETGIGGAEALQLNINLPDPPPHAQAHKFTLYPGMSNADRRNLELPRLPRRERMFAQPDAPIHLDLSTPTHRPILLAAGGLGGLGNPHFVSKDRPRPLFATKGERAMRMQIELELKLLADVGFVGLPNAGKSTLLRALTRSRARVGNWAFTTLQPNIGTVVLDNHKGRPIVNHRRLQLSKDPHSVIHDANLGPVVVTQPSGQALIGEAPEPRKRFTIADIPGLIEGAHLDRGLGMEFLRHVERAGVLAFVIDLNAGDAVKALKALWTEVGLYARMREDEERENEASEDIDWEGDGSDLEMGQMVIADLPEIRDEPTGLRIAAKPWFVIATKGDLPETEDNYSKLKDYMDAITDGREPHPSGVEGAWTEDCAAIPVSAIHGHGTDRIIHWTLGLLDE

SEQ ID NO: 16071 - DNA, 2415 bp, Muscodor strobelii
  misc_feature: SGI EST ID NO. CUFF.37925.0
  misc_feature: Variant of the nucleotide sequence at SEQ ID NO 16069
tatcggttaaaaattccaatcgccgttcaggtccggtccaaccacatggctggtatcggtgatgcagatagtagcttagcttcttgcatcatgtcatgcaacaactcgatcctcgttcatcggtagcttcatagtcgcgatccagcaccatggcgagataatccttgactttcgtttgtatcctgtaagaagctcgccatacgaggacggagtgccgccgtcgcgatgcctccgcgttgttccgggagctctgcgctcttcctccctttcctctatccgaccctattccgatgcaccacccgcgcctctcgagctaatcgtggctttacggttttggggccttcaccaacaccggccactgatatccctaaggttgtcattagcgatgactcgagcaacgacatcccaacctctcgtttgaatcctaccccggacgactacgccgtttccactttcgccgacaaggctagtgttacgatacaggctggcggaggtggcggcggctgcatttcattccttcgagaaatattcatcgccaatgggcccgcgaacggtggcgatggtgggcatggtggaaacgtttacatcgaagctgtgcactccgagaattcgttgcacaagatagcccgtcgccgtatcattcgcgctggccgaggcaaaacgggtcaaggcagtaatcgaggtggctcacgcggcgaagatgtcatcatccaggttcctgtgggtacagtcatccgagaaatcagcagaatagacccggttgttgaggaggacaaactgtattatgacgcccgagagaaagagcgcgaataccaaaagctggtgagagaggcagaagctgcgaccaaagccagcgaggagacaggaatcggtggcgctgaggctctgcagctcaacataaatcttccagatccaccaccacatgcccaggcccataagtttactctttacccgggcatgtcaaatgcggatcgccgaaatctggagcttccacgactgcctaggcgcgagcgtatgtttgctcaaccagacgcgcctatccatcttgacctctccactccaactcatcgaccgatcttacttgccgcaggcggcctgggtggtctgggcaatccccattttgtctccaaagaccgacctcgcccgctgttcgccacaaagggggagagggcaatgcgcatgcagatagaacttgagctcaaactcttagcagatgtgggctttgttggcctgcctaatgctggcaagagtacgctgttacgcgctttgactcgtagccgtgcccgcgttggtaattgggcttttacgacgctccagcctaatattggtactgtggtgctggacaatcacaaagggcgcccgatcgtgaaccatcgaaggttgcagctctcgaaagatcctcattccgtgattcacgatgccaatcttggtcctgttgtcgtcacacaaccatctggtcaggcactaatcggcgaggcccctgagccacgaaaacgctttaccattgcagacattccagggctgattgagggtgctcatctagatcgaggactgggaatggagtttcttcgccacgttgagcgagcaggcgttcttgcatttgtcatcgatctaaacgctggcgatgcggtgaaggcactgaaagctttgtggactgaggttggactgtatgctcgaatgcgggaggatgaagaaagagaaaatgaagcgagcgaagacattgactgggaaggagatggaagtgacctagaaatgggtcagatggtcattgcagacctccctgagattcgagatgaaccgactggcttgcgcattgctgctaagccgtggttcgtgattgccaccaaaggggatcttccagaaaccgaagataactatagcaagctgaaggattatatggatgccataaccgatggccgagagcctcatcctagcggtgtagaaggcgcctggacagaagactgtgctgctattccggtgagcgccatccacgggcatggaacggatcgaatcatccactggacactaggcctgctagacgaatagaagtagccttcagctgtacaaaactgtatgtaactcacaatgtcaaattaagtgtattatatccgatccccggttcttctacaatcgaagacaatgcatgctggcacctaactgtggatgcaaatcatttcgcagagcagtcgtagagcaaggccttctttctcattataaaattctcaacggccctatgggagagatacttcacttactatcgaggaaggtgttgcctgatttcgaccctaagctctggcacttgccactccttcgacgccgccccaataagaggtctctaaggcagtttgttcctggcagtcaccttacttctcactctgctctcactcggcactacctctcttcctcactttgaaa

SEQ ID NO: 16072 - DNA, 2178 bp, Muscodor strobelii
  misc_feature: SGI cDNA ID NO. 565335
  misc_feature: Encodes the peptide sequence at SEQ ID NO 16073
atgaaggagtcccaaggcactggccttctcggccatggcaattcggctgtgcttaccaaggtcgacaagcttcgagagtacatcggaaacaggatcgcattacctcagcttgtcgtggttggcgaccaatccgtaggcaagagctccgttttggagaacttgactggatttgcctttcctcgtgggccagatgtctgtacacgctacgcaacacagatcacctgccgacgtgaatcagaggaaagcattactatctccatcattcctcattcgggcgccccacccgatgcccaagcacgcctgaagtctttccatagtaaaatcacagactttggcacagacgatgtggcacaattgtttcgagatgcgaacgaggcgatgggcatcgcggctgccaattgcggtacagcatccaccaattcctcgtgctcagcttttagcgagcatattcttaagattgagaagtctggtcccaatgaggagcattttacagtcattgatgtccccggtatatttcgtgacagagagaaaggagtcaccgaagaaagtgacattgagttggtcaggaacatggtgaaatcctacatcaaggattctcgcactatcattctcgcaatcatcccgagtaatgttgatcctgcgacccaagaaatcctgaagctagcgagggaagcagatcccacgatgatgagaacaatggctgttctcacgaaacctgaccttgcaatcgagcaagttactagacagagagtcatcgactatgttcttcgcaaaagaggcgatctcacattgggatattatgtcatcaaaaatcgaggagcagatgagaccgagatgaccctggaacaagcccagaaaaaggagcgggatttttttggcactgaaccttggttggccctggctagcagcggcagagccggaactgatggcatcaagtcgcgagtccacaaacttctaaccgaccttatcaaaaaggaatttccgaaagtcaagtctgaagtggcgaaggaacttcagtcaatccaagaccagcaacataaactcggaccacctcgaagcgatatgcatgcacaacgtgcttatctcaatcagatcagcgaggcgttccaatcactcgtgcgtgatgctctcaatgcacattatacaagccacagtatcttctcagatggaaatcttcggctcatcactcgtatcatggaatcgaataagcattattcggaagacatggcaacaaagggtcatatgagagagttcgtgagagatcttgattccagcagcacggcaaaaagagacgcaaagctgcaactggatattttcaagccggatctgtctaagctacacgacatcagctctgaactcgaagagattttgagttctttagacagctcgatgctagaatatgactgtcatggtactattatggagtatatcgcccgagtttatcaggcaagccaaggagaggaccttggaaccttcggcggcgcattgcttgcaacaatgttcaaagaacagagccgcaaatggggtataataacccatatctacatgaatcgagtaatttgtcacgtccatcgattcatctcagacacgattcgattcgtctgtcccgacccaaaagttcgtgaagaactctggaatggatatttgctcgaagaaatcctcgaatcgtatcgtaaggctttgcgtcacgctgatttcctcatcgagatcgagcgtgaacaacttccgtacactatgaatgactacttcaacagcaatttgcagaaagtgcagtctgaacgaatcaccagctcaatagagcaacttggatataagtcctactctggaagtgaagagcaagttacgctgaaaatggtggcgttgaagaacctttccgtcaatcaagcaaacgaggcccacgttcgagagtacatgcatgacgtgctatggagctactacaaagtggcgcgaaagcgctttgtcgacgttgtgtatcagcaagcggtaaagcatctcttgctgtcggggaagggtagcccactcaaaaaattcaattcggagatggtaatgaatttgggggaagaagagctcgacatgatcgctggggaagacgagttcataaagcagagccgtgagaagctgagccacgacttgaagaactttgaggctgcgctcagcgttctgaaaggatctcgatag

SEQ ID NO: 16073 - protein, 725 aa, Muscodor strobelii
  misc_feature: SGI Peptide ID NO. 565335
  misc_feature (37)..(239): Pfam Id: PF00350 Pfam Desc: Dynamin family
  misc_feature (629)..(724): Pfam Id: PF02212 Pfam Desc: Dynamin GTPase effector domain
  misc_feature (13)..(722): NCBI GI: 189211876 Blast Desc: interferon-induced GTP-binding protein Mx2 [Pyrenophora tritici-repentis Pt-1C-BFP] gi|187979465|gb|EDU46091.1| interferon-induced GTP-binding Mx2
  misc_feature (10)..(723): NCBI GI: 256729632 Blast Desc: NECHADRAFT_95422 [Nectria haematococca mpVI 77-13-4]
  misc_feature (11)..(722): NCBI GI: 242797837 Blast Desc: dynamin, [Talaromyces stipitatus ATCC 10500] gi|218716389|gb|EED15810.1| dynamin, [Talaromyces stipitatus ATCC 10500]
  misc_feature (11)..(723): NCBI GI: 46122565 Blast Desc: FG05660.1 [Gibberella zeae PH-1]
  misc_feature (18)..(722): NCBI GI: 164424111 Blast Desc: NCU05693 [Neurospora crassa OR74A] gi|157070378|gb|EAA33819.2| [Neurospora crassa OR74A]
  misc_feature (13)..(722): NCBI GI: 261352463 Blast Desc: interferon-induced GTP-binding protein Mx1 [Verticillium albo-atrum VaMs.102]
  misc_feature (8)..(424): NCBI GI: 39968043 Blast Desc: MGG_02114 [Magnaporthe grisea 70-15] gi|145012996|gb|EDJ97637.1| MGG_02114 [Magnaporthe grisea 70-15]
  misc_feature (13)..(721): NCBI GI: 171695162 Blast Desc: protein product [Podospora anserina] gi|170947823|emb|CAP59986.1| protein product [Podospora anserina]
  misc_feature (1)..(722): NCBI GI: 145234220 Blast Desc: An02g13500 [Aspergillus niger] gi|134057425|emb|CAK47763.1| protein product [Aspergillus niger]
  misc_feature (8)..(723): NCBI GI: 85108651 Blast Desc: NCU06973 [Neurospora crassa OR74A] gi|28924223|gb|EAA33377.1| [Neurospora crassa OR74A]
  misc_feature (32)..(371): SWISSPROT Homolog: EC 3.6.5.5 Dynamin GTPase
MKESQGTGLLGHGNSAVLTKVDKLREYIGNRIALPQLVVVGDQSVGKSSVLENLTGFAFPRGPDVCTRYATQITCRRESEESITISIIPHSGAPPDAQARLKSFHSKITDFGTDDVAQLFRDANEAMGIAAANCGTASTNSSCSAFSEHILKIEKSGPNEEHFTVIDVPGIFRDREKGVTEESDIELVRNMVKSYIKDSRTIILAIIPSNVDPATQEILKLAREADPTMMRTMAVLTKPDLAIEQVTRQRVIDYVLRKRGDLTLGYYVIKNRGADETEMTLEQAQKKERDFFGTEPWLALASSGRAGTDGIKSRVHKLLTDLIKKEFPKVKSEVAKELQSIQDQQHKLGPPRSDMHAQRAYLNQISEAFQSLVRDALNAHYTSHSIFSDGNLRLITRIMESNKHYSEDMATKGHMREFVRDLDSSSTAKRDAKLQLDIFKPDLSKLHDISSELEEILSSLDSSMLEYDCHGTIMEYIARVYQASQGEDLGTFGGALLATMFKEQSRKWGIITHIYMNRVICHVHRFISDTIRFVCPDPKVREELWNGYLLEEILESYRKALRHADFLIEIEREQLPYTMNDYFNSNLQKVQSERITSSIEQLGYKSYSGSEEQVTLKMVALKNLSVNQANEAHVREYMHDVLWSYYKVARKRFVDVVYQQAVKHLLLSGKGSPLKKFNSEMVMNLGEEELDMIAGEDEFIKQSREKLSHDLKNFEAALSVLKGSR

SEQ ID NO: 16074 - DNA, 291 bp, Muscodor strobelii
  misc_feature: SGI EST ID NO. CUFF.37937.0
  misc_feature: Variant of the nucleotide sequence at SEQ ID NO 16072
attccagcagcacggcaaaaagagacgcaaagctgcaactggatattttcaagccggatctgtctaagctacacgacatcagctctgaactcgaagagattttgagttctttagacagctcgatgctagaatatgactgtcatggtactattatggagtatatcgcccgagtttatcaggcaagccaaggagaggaccttggaaccttcggcggcgcattgcttgcaacaatgttcaaagaacagagccgcaaatggggtataataacccatatctacatgaatcgagtaa

SEQ ID NO: 16075 - DNA, 831 bp, Muscodor strobelii
  misc_feature: SGI cDNA ID NO. 565336
  misc_feature: Encodes the peptide sequence at SEQ ID NO 16076
atgtcgccctctacgacgaatggcagcgagccgaccgtgaagttttcccagggacaggcgtttccgaggccgcccagcttcaaaaatccgcttgatgagcgacagtatcttaagcagcggttggcgctggcgttccgcatctttgctaagcaagggtttgatgaaggcgtcgctgggcacatcacagtcagagaccccgttgatccgacgacattctgggtcaatccttttggcgtggcatggccattgcttcgagcctcggatctcatccgcgttaaccacgagggcgagatcgtggatggtggaccggtgaggcttctcaatactgcggcatacatgatccactcagcggtacacgaagctcggccagacgtcaatgctgtcgcacacagccactcgatctacgggcgcgcattcgcgacgctcggccggccattggaaatcatcacgcaggacgcttgtgcattctacaacgacattgcgcactacgataattttggagggattgtcctggggccagaagagggtcagagaatcgtggagtcacttggacagaagaaagccgttattcttgcgaatcatgggcttttgacttgtggtaaatcagtcgagagctgtgtgttttggttcaatagtctggagaagtgctgtcaggcgcaattactcgctgatgcggcggcagctgggaaaggtagtgagacggtcaaggttacggaggaagaggccgcgttcacgtataagacgattgggaatgaggttgctgggtggtttagtgcgaagccggcgttcgatatgatggagcatgagagtgggaatgattataagatgtag

SEQ ID NO: 16076 - protein, 276 aa, Muscodor strobelii
  misc_feature: SGI Peptide ID NO. 565336
  misc_feature (39)..(242): Pfam Id: PF00596 Pfam Desc: Class II Aldolase and Adducin N-terminal domain
  misc_feature (2)..(275): NCBI GI: 154293798 Blast Desc: BC1G_14227 [Botryotinia fuckeliana B05.10] gi|150845200|gb|EDN20393.1| BC1G_14227 [Botryotinia fuckeliana B05.10]
  misc_feature (16)..(275): NCBI GI: 156061721 Blast Desc: SS1G_03006 [Sclerotinia sclerotiorum 1980] gi|154700407|gb|EDO00146.1| SS1G_03006 [Sclerotinia sclerotiorum 1980]
  misc_feature (20)..(274): NCBI GI: 225560280 Blast Desc: class II aldolase/adducin domain-containing protein [Ajellomyces capsulatus G186AR]
  misc_feature (19)..(274): NCBI GI: 119186587 Blast Desc: conserved [Coccidioides immitis RS]
  misc_feature (19)..(274): NCBI GI: 240108514 Blast Desc: Class II Aldolase and Adducin N-terminal domain containing protein [Coccidioides posadasii C735 delta SOWgp]
  misc_feature (3)..(274): NCBI GI: 169606184 Blast Desc: SNOG_06128 [Phaeosphaeria nodorum SN15] gi|160706931|gb|EAT85959.2| SNOG_06128 [Phaeosphaeria nodorum SN15]
  misc_feature (21)..(274): NCBI GI: 255941340 Blast Desc: Pc16g11350 [Penicillium chrysogenum Wisconsin 54-1255] gi|211586062|emb|CAP93805.1| Pc16g11350 [Penicillium chrysogenum Wisconsin 54-1255]
  misc_feature (21)..(274): NCBI GI: 115437074 Blast Desc: conserved [Aspergillus terreus NIH2624] gi|114188534|gb|EAU30234.1| conserved [Aspergillus terreus NIH2624]
  misc_feature (19)..(274): NCBI GI: 258563302 Blast Desc: conserved [Uncinocarpus reesii 1704] gi|237907903|gb|EEP82304.1| conserved [Uncinocarpus reesii 1704]
  misc_feature (19)..(274): NCBI GI: 145248329 Blast Desc: An13g02780 [Aspergillus niger] gi|134081164|emb|CAK41674.1| protein product [Aspergillus niger]
  misc_feature (46)..(203): SWISSPROT Homolog: EC 4.1.2.17 L-fuculose-phosphate aldolase
MSPSTTNGSEPTVKFSQGQAFPRPPSFKNPLDERQYLKQRLALAFRIFAKQGFDEGVAGHITVRDPVDPTTFWVNPFGVAWPLLRASDLIRVNHEGEIVDGGPVRLLNTAAYMIHSAVHEARPDVNAVAHSHSIYGRAFATLGRPLEIITQDACAFYNDIAHYDNFGGIVLGPEEGQRIVESLGQKKAVILANHGLLTCGKSVESCVFWFNSLEKCCQAQLLADAAAAGKGSETVKVTEEEAAFTYKTIGNEVAGWFSAKPAFDMMEHESGNDYKM

SEQ ID NO: 16077 - DNA, 1115 bp, Muscodor strobelii
  misc_feature: SGI EST ID NO. CUFF.37943.0
  misc_feature: Variant of the nucleotide sequence at SEQ ID NO 16075
gaactttaaaaaccgccacatccgtaaataacagcccaattcaacattacctgtagcctgtagtaatacaattgttcttgttcaacccaaagatgtcgccctctacgacgaatggcagcgagccgaccgtgaagttttcccagggacaggcgtttccgaggccgcccagcttcaaaaatccgcttgatgagcgacagtatcttaagcagcggttggcgctggcgttccgcatctttgctaagcaagggtttgatgaaggcgtcgctgggcacatcacagtcagagaccccgttgatccgacgacattctgggtcaatccttttggcgtggcatggccattgcttcgagcctcggatctcatccgcgttaaccacgagggcgagatcgtggatggtggaccggtgaggcttctcaatactgcggcatacatgatccactcagcggtacacgaagctcggccagacgtcaatgctgtcgcacacagccactcgatctacgggcgcgcattcgcgacgctcggccggccattggaaatcatcacgcaggacgcttgtgcattctacaacgacattgcgcactacgataattttggagggattgtcctggggccagaagagggtcagagaatcgtggagtcacttggacagaagaaagccgttattcttgcgaatcatgggcttttgacttgtggtaaatcagtcgagagctgtgtgttttggttcaatagtctggagaagtgctgtcaggcgcaattactcgctgatgcggcggcagctgggaaaggtagtgagacggtcaaggttacggaggaagaggccgcgttcacgtataagacgattgggaatgaggttgctgggtggtttagtgcgaagccggcgttcgatatgatggagcatgagagtgggaatgattataagatgtaggatggactgaagagagcaggatggttctgggtttgagcgaagatgggagattgatactataccgtacgtcatgtttcaataggtacctaagttgtccactgaattacttgtgttctataagtctgcggataacatgacttaagaatcgaattgtaaaataagtatgatataaagacattaagtcattattta

SEQ ID NO: 16078 - DNA, 672 bp, Muscodor strobelii
  misc_feature: SGI cDNA ID NO. 565337
  misc_feature: Encodes the peptide sequence at SEQ ID NO 16079
atggtgttggcttactacttcgcttcgctattgccgacggtccgacaacggcctggtggtggtagtttgcttgttttgggttccagcaatgtcgacgaataccttagaggctacctaagcaaatacgacaactcttctgctgatttgaacccgattgggggactgtcaaaattagacttgaagtcattccttgcgtgggctcagtcgagtttcgacatgcctatcctctcagagttcctttctgcaacgcctactgccgagctggagccaatcaccgagacctacacgcaaacggatgaagaccagatggggatgacctacgctgagctgtcgatctatgggtcacttagaaagcaagaaaaactcgggccctgcggaatgttcgagcgactcgtccacgaatggggccccggtagcgagcgtgagctcagcccgcgagaggtcgccgacaaggtcaagcggttcttccacttccacaaaatcaacaggcacaagcagacggttgcgacgccggcttatcacgctgagagctacagcccggacgatcatagattcgacttgcggccgttcttatacccaccctcgtacggatccagggaatttaacaagattgacgagagggtggcagtattagagaaagcgctagagttaaaaaagaaagaaataatttaa

SEQ ID NO: 16079 - protein, 223 aa, Muscodor strobelii
  misc_feature: SGI Peptide ID NO. 565337
  misc_feature (1)..(216): NCBI GI: 85092028 Blast Desc: NCU04648 [Neurospora crassa OR74A] gi|21622315|emb|CAD37018.1| conserved [Neurospora crassa] gi|28920593|gb|EAA29955.1| NCU04648 [Neurospora crassa OR74A]
  misc_feature (1)..(208): NCBI GI: 255720454 Blast Desc: KLTH0H15004p [Lachancea thermotolerans] gi|238942473|emb|CAR30645.1| KLTH0H15004p [Lachancea thermotolerans]
  misc_feature (1)..(223): NCBI GI: 46126041 Blast Desc: FG07398.1 [Gibberella zeae PH-1]
  misc_feature (1)..(212): NCBI GI: 119498883 Blast Desc: glutamine-dependent NAD(+) synthetase [Neosartorya fischeri NRRL 181] gi|119414363|gb|EAW24302.1| glutamine-dependent NAD(+) synthetase [Neosartorya fischeri NRRL
  misc_feature (1)..(213): NCBI GI: 238838391 Blast Desc: glutamine-dependent NAD(+) synthetase [Microsporum canis CBS 113480]
  misc_feature (1)..(215): NCBI GI: 50307329 Blast Desc: protein product [Kluyveromyces lactis] gi|49642777|emb|CAH00739.1| KLLA0D13024p [Kluyveromyces lactis]
  misc_feature (1)..(212): NCBI GI: 254581832 Blast Desc: ZYRO0D10714p [Zygosaccharomyces rouxii] gi|238939793|emb|CAR27968.1| ZYRO0D10714p [Zygosaccharomyces rouxii]
  misc_feature (1)..(220): NCBI GI: 171692267 Blast Desc: protein product [Podospora anserina] gi|170946082|emb|CAP72883.1| protein product [Podospora anserina]
  misc_feature (1)..(213): NCBI GI: 67902432 Blast Desc: AN8203.2 [Aspergillus nidulans FGSC A4] gi|40739657|gb|EAA58847.1| AN8203.2 [Aspergillus nidulans FGSC A4] gi|259480981|tpe|CBF74102.1| TPA: glutamine dependent NAD A4]
  misc_feature (1)..(212): NCBI GI: 156837328 Blast Desc: Kpol_364p6 [Vanderwaltozyma polyspora DSM 70294] gi|156113251|gb|EDO14834.1| Kpol_364p6 [Vanderwaltozyma polyspora DSM 70294]
  misc_feature (1)..(207): SWISSPROT Homolog: EC 6.3.5.1 NAD(+) synthase (glutamine-hydrolyzing)
MVLAYYFASLLPTVRQRPGGGSLLVLGSSNVDEYLRGYLSKYDNSSADLNPIGGLSKLDLKSFLAWAQSSFDMPILSEFLSATPTAELEPITETYTQTDEDQMGMTYAELSIYGSLRKQEKLGPCGMFERLVHEWGPGSERELSPREVADKVKRFFHFHKINRHKQTVATPAYHAESYSPDDHRFDLRPFLYPPSYGSREFNKIDERVAVLEKALELKKKEII

SEQ ID NO: 16080 - DNA, 2105 bp, Muscodor strobelii
  misc_feature: SGI EST ID NO. CUFF.37946.0
  misc_feature: Variant of the nucleotide sequence at SEQ ID NO 16078
cgggaacctcgaaagaatcctcacgagcatccgacaagccaaggcagctggcgctaccttgcggacgggcccggagctagagatcaccggatatggctgtctcgatcatttcttggaatccgacctctatgaactggcaatggaatctcttttaactatactcgagcagcccgatctccatggcatcctgatcgatgtcgggctgcccatcatgcaccgcggcaaccgcttcaactgcagggccttgattctcgacggacacttactctgtctgcgccccaaaatctacctcgcaaatgacggcaacttcagagataaccgcttcttcgtcccgtggggtaggcctcgacacgttgagcacttttctcttcctcccctcctgaagaaacatcaaaacaaacgccaggtgcccatcggcgatgtcatcctatctcttgacgacacaaccttggctgctgagacctgcgaggagctcttcacgccagccgctccgcatattaccatgggtttgaatggggttgaagtgtttacgaacagcagcggctctcaccatagccttcgcaaactaaacgagcgtatttctttaataagcgaagctactcggaagaatggaggcatctatctgtacgcaaacagtaagggttgtgacggcgatcggctcctgtacgacgggtgcgctatgatacttgtcaacggcgacatcgtggctcaaggttctcaattcagcctgttggacgtcgaagtggtgacggccacagttgatctcgaaaaagtccggtctttccgttgtgctccgtcacgtagctttcaagccatcgaggctcccatctacgagaggctggaggtcaatttccagctttgccagaacaacgacgatgttctcgcagtgcccacgccggttcaagccccacgataccatctgcctgaagaggagatcgcccttggcccagcgtgctggctctgggattaccttcgacgaagcaaggctgccggatacttggtacctttgtcaggaggcatagattcgtgcgcaactgctacgattgtgttcagcatgtgtcgacttgtagtttcagctcttgaagcagggaaccaccaagtgcatgaagacgtgaaaagaatcgccgccttctccaaagaactcccacggacgcctgaggatctgtgtggtcagatctttcataccctctatctggggatggaaaatcagtcaagccaggaaacacgaaagcgagcccaggacttggctactcgcatatgaagcttccacaaagatcctaacatcgatgaggtatttggggcggcgaaggacgtgctttcgaagagcacggggtttaatcctcgtttcgcggtctatggaggagatgtggcagaaaacttggctcttcagaacatccagtcaagggagcgaatggtgttggcttactacttcgcttcgctattgccgacggtccgacaacggcctggtggtggtagtttgcttgttttgggttccagcaatgtcgacgaataccttagaggctacctaagcaaatacgacaactcttctgctgatttgaacccgattgggggactgtcaaaattagacttgaagtcattccttgcgtgggctcagtcgagtttcgacatgcctatcctctcagagttcctttctgcaacgcctactgccgagctggagccaatcaccgagacctacacgcaaacggatgaagaccagatggggatgacctacgctgagctgtcgatctatgggtcacttagaaagcaagaaaaactcgggccctgcggaatgttcgagcgactcgtccacgaatggggccccggtagcgagcgtgagctcagcccgcgagaggtcgccgacaaggtcaagcggttcttccacttccacaaaatcaacaggcacaagcagacggttgcgacgccggcttatcacgctgagagctacagcccggacgatcatagattcgacttgcggccgttcttatacccaccctcgtacggatccagggaatttaacaagattgacgagagggtggcagtattagagaaagcgctagagttaaaaaagaaagaaataatttaaattaaaagcaatattattatta

SEQ ID NO: 16081 - DNA, 1320 bp, Muscodor strobelii
  misc_feature: SGI cDNA ID NO. 565338
  misc_feature: Encodes the peptide sequence at SEQ ID NO 16082
atggtgcagcttgtcaccctcgcgacatgctcgctaaaccagtgggcattagactgggacgggaacctcgaaagaatcctcacgagcatccgacaagccaaggcagctggcgctaccttgcggacgggcccggagctagagatcaccggatatggctgtctcgatcatttcttggaatccgacctctatgaactggcaatggaatctcttttaactatactcgagcagcccgatctccatggcatcctgatcgatgtcgggctgcccatcatgcaccgcggcaaccgcttcaactgcagggccttgattctcgacggacacttactctgtctgcgccccaaaatctacctcgcaaatgacggcaacttcagagataaccgcttcttcgtcccgtggggtaggcctcgacacgttgagcacttttctcttcctcccctcctgaagaaacatcaaaacaaacgccaggtgcccatcggcgatgtcatcctatctcttgacgacacaaccttggctgctgagacctgcgaggagctcttcacgccagccgctccgcatattaccatgggtttgaatggggttgaagtgtttacgaacagcagcggctctcaccatagccttcgcaaactaaacgagcgtatttctttaataagcgaagctactcggaagaatggaggcatctatctgtacgcaaacagtaagggttgtgacggcgatcggctcctgtacgacgggtgcgctatgatacttgtcaacggcgacatcgtggctcaaggttctcaattcagcctgttggacgtcgaagtggtgacggccacagttgatctcgaaaaagtccggtctttccgttgtgctccgtcacgtagctttcaagccatcgaggctcccatctacgagaggctggaggtcaatttccagctttgccagaacaacgacgatgttctcgcagtgcccacgccggttcaagccccacgataccatctgcctgaagaggagatcgcccttggcccagcgtgctggctctgggattaccttcgacgaagcaaggctgccggatacttggtacctttgtcaggaggcatagattcgtgcgcaactgctacgattgtgttcagcatgtgtcgacttgtagtttcagctcttgaagcagggaaccaccaagtgcatgaagacgtgaaaagaatcgccgccttctccaaagaactcccacggacgcctgaggatctgtgtggtcagatctttcataccctctatctggggatggaaaatcagtcaagccaggaaacacgaaagcgagcccaggacttggctactcgcatatga

SEQ ID NO: 16082 - protein, 439 aa, Muscodor strobelii
  misc_feature: SGI Peptide ID NO. 565338
  misc_feature (6)..(201): Pfam Id: PF00795 Pfam Desc: Carbon-nitrogen hydrolase
  misc_feature (6)..(103): Pfam Id: PF00795 Pfam Desc: Carbon-nitrogen hydrolase
  misc_feature (1)..(439): NCBI GI: 46126041 Blast Desc: FG07398.1 [Gibberella zeae PH-1]
  misc_feature (1)..(439): NCBI GI: 240108741 Blast Desc: Glutamine-dependent NAD(+) synthetase, [Coccidioides posadasii C735 delta SOWgp]
  misc_feature (1)..(439): NCBI GI: 258578433 Blast Desc: glutamine-dependent NAD(+) synthetase synthase [glutamine-hydrolyzing]) [Uncinocarpus reesii 1704] gi|237903664|gb|EEP78065.1| glutamine-dependent NAD(+) synthetase
  misc_feature (1)..(439): NCBI GI: 242778593 Blast Desc: glutamine dependent NAD synthetase, [Talaromyces stipitatus ATCC 10500] gi|218722890|gb|EED22308.1| glutamine dependent NAD synthetase, [Talaromyces stipitatus ATCC 10500]
  misc_feature (1)..(439): NCBI GI: 212533653 Blast Desc: glutamine dependent NAD+ synthetase, [Penicillium marneffei ATCC 18224] gi|210072347|gb|EEA26436.1| glutamine dependent NAD+ synthetase, [Penicillium marneffei ATCC 18224]
  misc_feature (1)..(439): NCBI GI: 238838391 Blast Desc: glutamine-dependent NAD(+) synthetase [Microsporum canis CBS 113480]
  misc_feature (3)..(439): NCBI GI: 171692267 Blast Desc: protein product [Podospora anserina] gi|170946082|emb|CAP72883.1| protein product [Podospora anserina]
  misc_feature (1)..(439): NCBI GI: 189192773 Blast Desc: NAD synthetase 1 [Pyrenophora tritici-repentis Pt-1C-BFP] gi|187978289|gb|EDU44915.1| NAD synthetase 1 [Pyrenophora tritici-repentis Pt-1C-BFP]
  misc_feature (1)..(439): NCBI GI: 254573068 Blast Desc: Glutamine-dependent NAD(+) synthetase [Pichia pastoris GS115] gi|238033442|emb|CAY71464.1| Glutamine-dependent NAD(+) synthetase [Pichia pastoris GS115]
  misc_feature (1)..(439): NCBI GI: 145242608 Blast Desc: An09g05660 [Aspergillus niger] gi|134078429|emb|CAL00844.1| protein product [Aspergillus niger]
  misc_feature (1)..(439): SWISSPROT Homolog: EC 6.3.5.1 NAD(+) synthase (glutamine-hydrolyzing)
MVQLVTLATCSLNQWALDWDGNLERILTSIRQAKAAGATLRTGPELEITGYGCLDHFLESDLYELAMESLLTILEQPDLHGILIDVGLPIMHRGNRFNCRALILDGHLLCLRPKIYLANDGNFRDNRFFVPWGRPRHVEHFSLPPLLKKHQNKRQVPIGDVILSLDDTTLAAETCEELFTPAAPHITMGLNGVEVFTNSSGSHHSLRKLNERISLISEATRKNGGIYLYANSKGCDGDRLLYDGCAMILVNGDIVAQGSQFSLLDVEVVTATVDLEKVRSFRCAPSRSFQAIEAPIYERLEVNFQLCQNNDDVLAVPTPVQAPRYHLPEEEIALGPACWLWDYLRRSKAAGYLVPLSGGIDSCATATIVFSMCRLVVSALEAGNHQVHEDVKRIAAFSKELPRTPEDLCGQIFHTLYLGMENQSSQETRKRAQDLATRI

SEQ ID NO: 16083 - DNA, 2105 bp, Muscodor strobelii; identical to SEQ ID NO: 16080
  misc_feature: SGI EST ID NO. CUFF.37946.0
  misc_feature: Variant of the nucleotide sequence at SEQ ID NO 16081

SEQ ID NO: 16084 - DNA, 2601 bp, Muscodor strobelii
  misc_feature: SGI cDNA ID NO. 565339
  misc_feature: Reduced expression when VOC is produced
  misc_feature: Encodes the peptide sequence at SEQ ID NO 16085
atggggaagagaagaggaggccgtagaaacaacgacaatcgcaatggcggcagcgaccgagtgcatcatagacagccccgcaccgactcgtaccgatctaaccctgacgtgccccgatccaacacgcgcctcgagactttctacaacagcgcgctccctctcgacgacgaagagaaggcaaaattctgggaggtcttgcgcaccgaccttcccaactccttccgcttctgcggctccaagggccatgcactggccgtgaagcggctgctggaagagaggtatgctcccgagatcgtcaagatcaagcactttaacggcgatgctgtcgaggcgccccaagctgtgccttggtaccccgatagtctcgcttactccatgaacacacccaagcaggtcatccgcaagttccccccctttgcctccttccagaagttcttagtgtcagagaccagcgtcggcaacatcagtcgtcaggagctggtgagcatgattccacctctcgtcatggatctcaagcccggcatggcagttcttgacttgtgtgctgctccgggtagcaagtcggcccagctccttgagatgatccacgctggagaggagggcaggatccgaaagtttcttgaggcattcggtgaagctcctctcccctccgaccagatgcaagagtccgaccctgccgatgacaactcggatgatggacgcgcaaccggcctgctgatcgccaatgatgtcgaatacaagcgatgccacatgttggtccatcagctcaagcgactctcctcccccaacttgatcgtcacaaatcacgacgcgaccctcttcccgcctcttcagctgcccaaggatccggacagccccgtcaaccaatacctcaagtttgacaggatcttggccgacgtcccctgctcgggagacggaacattgaggaagaacgtggatttgtggaagtattggcagcctggcagtgccttgggtcttcattcgacgcaatgtcgaatcctggtcaaggcgctgcagatgctcaaggtcggtggtagagttgtcttctcaacatgcagcatgaaccccgtcgagaacgagtctgtcgtggtctcagcaatcgagcgctgcggtggtccagacgtcgtggagattatcgactgcaaagaccgactacctcttttgcaacgcaatcctggaatgtatcaatggcagatcatggataaatctggtcggatatggaataactgggaggaagttgaggcacacgtcgctaacggaggaacaccacccggaaagctatcgccgaccatgttcccaaggcctgacacaagcgattgctcaggcctgcctctcgaccgctgcatgcgagtctatgctcaccagcaggataccggcggctttttcatcacggtgctcgagaagaagaaggaattcaaggctaagcccgaggcaaagacgcagtgggagacgccaaacgagactcaggctactgagacagccgctgagcaggagattgtagaggaagctaaagctactctcggacagcccactgatgaagtcccatctgtcggctccaagcgggcgttggacgaagacgagataaaggaagagccttcggtgaagcgacagaagacagagacgcctccggctgagaaggccgggaagatcgccgaagccgttactgaagcctccgtcaaagaagaggtcgaaattaagatggaggaggactctaagccagtcgcctcttctgatcgacgagtcaaggacaacatgtacgaggagccgttcaagtatctttcgcccgaccatgaggtaatccaagacatcctaaaattctacaaaatcaatcctcgattcccctccgacagatttatggtccgcaatgctgcaggcgagccggcgaaagctatctactactccagtcaactggttcgcgacatattagttcaaaacgaaggtcggggcgttcggttcatacacggtggtctcaagatgttcatgaaacaagatgctccctctgctgaagtctgtcgctggcgcattcagtccgagggcttgcctatcatcgccgggtacatgggtcctgagcgcatcgtccgactaacgaataaggagacgctgcacctgttacttcgcgagatgttccccaagttcgtcaatgacgactggaagaaactcaatgagattggcgagcgggctagagatatcggcatgggctgttgtctactgagcgttgagccggatggcacagatcccgagttctcggaacccatggtcctcccgctgtggaagagcttccattcactcaatcttatgttacccaaggaagatcgcgcagctatgatgttgagactattcaacgatacttcccctgtcatcaacaggacgcttaaggactcagcgaagctagaggctgataagactaagaaagaggaggttcctgtaaagaccgaggaagacaagatggagggtgtcactgaatctaagaataccgagataaaggaggaagcctcggacgaggcaaagcccgacaccgaagacgcgaagatggaggacactaccactgcagttacagaggagaaaggagagcaagtaacgatgcctagcgaagcggcgtag

SEQ ID NO: 16085 - protein, 866 aa, Muscodor strobelii
  misc_feature: SGI Peptide ID NO. 565339
  misc_feature (296)..(591): Pfam Id: PF01189 Pfam Desc: NOL1/NOP2/sun family
  misc_feature (296)..(368): Pfam Id: PF01189 Pfam Desc: NOL1/NOP2/sun family
  misc_feature (31)..(792): NCBI GI: 116196510 Blast Desc: CHGG_04853 [Chaetomium globosum CBS 148.51] gi|88180766|gb|EAQ88234.1| CHGG_04853 [Chaetomium globosum CBS 148.51]
  misc_feature (11)..(795): NCBI GI: 85105962 Blast Desc: NCU05301 [Neurospora crassa OR74A] gi|28923666|gb|EAA32836.1| NCU05301 [Neurospora crassa OR74A]
  misc_feature (31)..(834): NCBI GI: 46136457 Blast Desc: FG09744.1 [Gibberella zeae PH-1]
  misc_feature (31)..(819): NCBI GI: 171688496 Blast Desc: protein product [Podospora anserina] gi|170944210|emb|CAP70320.1| protein product [Podospora anserina]
  misc_feature (31)..(836): NCBI GI: 256726948 Blast Desc: NECHADRAFT_76439 [Nectria haematococca mpVI 77-13-4]
  misc_feature (28)..(807): NCBI GI: 156061725 Blast Desc: SS1G_03008 [Sclerotinia sclerotiorum 1980] gi|154700409|gb|EDO00148.1| SS1G_03008 [Sclerotinia sclerotiorum 1980]
  misc_feature (4)..(845): NCBI GI: 145603390 Blast Desc: MGG_13217 [Magnaporthe grisea 70-15] gi|145011631|gb|EDJ96287.1| MGG_13217 [Magnaporthe grisea 70-15]
  misc_feature (1)..(802): NCBI GI: 225560282 Blast Desc: tRNA (cytosine-5-)-methyltransferase NCL1 [Ajellomyces capsulatus G186AR]
  misc_feature (36)..(834): NCBI GI: 115492151 Blast Desc: ATEG_00617 [Aspergillus terreus NIH2624] gi|114197563|gb|EAU39263.1| ATEG_00617 [Aspergillus terreus NIH2624]
  misc_feature (36)..(802): NCBI GI: 238488983 Blast Desc: methyltransferase (Ncl1), [Aspergillus flavus NRRL3357] gi|220698117|gb|EED54457.1| methyltransferase (Ncl1), [Aspergillus flavus NRRL3357]
  misc_feature (30)..(772): SWISSPROT Homolog: EC 2.1.1.29 tRNA (cytosine-5-)-methyltransferase
  misc_feature: Useful for introducing or modulating the production of volatile compounds
MGKRRGGRRNNDNRNGGSDRVHHRQPRTDSYRSNPDVPRSNTRLETFYNSALPLDDEEKAKFWEVLRTDLPNSFRFCGSKGHALAVKRLLEERYAPEIVKIKHFNGDAVEAPQAVPWYPDSLAYSMNTPKQVIRKFPPFASFQKFLVSETSVGNISRQELVSMIPPLVMDLKPGMAVLDLCAAPGSKSAQLLEMIHAGEEGRIRKFLEAFGEAPLPSDQMQESDPADDNSDDGRATGLLIANDVEYKRCHMLVHQLKRLSSPNLIVTNHDATLFPPLQLPKDPDSPVNQYLKFDRILADVPCSGDGTLRKNVDLWKYWQPGSALGLHSTQCRILVKALQMLKVGGRVVFSTCSMNPVENESVVVSAIERCGGPDVVEIIDCKDRLPLLQRNPGMYQWQIMDKSGRIWNNWEEVEAHVANGGTPPGKLSPTMFPRPDTSDCSGLPLDRCMRVYAHQQDTGGFFITVLEKKKEFKAKPEAKTQWETPNETQATETAAEQEIVEEAKATLGQPTDEVPSVGSKRALDEDEIKEEPSVKRQKTETPPAEKAGKIAEAVTEASVKEEVEIKMEEDSKPVASSDRRVKDNMYEEPFKYLSPDHEVIQDILKFYKINPRFPSDRFMVRNAAGEPAKAIYYSSQLVRDILVQNEGRGVRFIHGGLKMFMKQDAPSAEVCRWRIQSEGLPIIAGYMGPERIVRLTNKETLHLLLREMFPKFVNDDWKKLNEIGERARDIGMGCCLLSVEPDGTDPEFSEPMVLPLWKSFHSLNLMLPKEDRAAMMLRLFNDTSPVINRTLKDSAKLEADKTKKEEVPVKTEEDKMEGVTESKNTEIKEEASDEAKPDTEDAKMEDTTTAVTEEKGEQVTMPSEAA

SEQ ID NO: 16086 - DNA, 5535 bp, Muscodor strobelii
  misc_feature: SGI EST ID NO. CUFF.38149.0
  misc_feature: Variant of the nucleotide sequence at SEQ ID NO 16084
attgaaagctccgaactcgatgcttcgcgcaagataactcccgactcttcttgtctcgactgcagccgcatcgggattgcacgaaatagcttgaagctgagagagaatccttcaatcacttccaatcaacaagtacgcactcgaagctggttgcgcgagctacgcgctaaacgctcacgatggggaagagaagaggaggccgtagaaacaacgacaatcgcaatggcggcagcgaccgagtgcatcatagacagccccgcaccgactcgtaccgatctaaccctgacgtgccccgatccaacacgcgcctcgagactttctacaacagcgcgctccctctcgacgacgaagagaaggcaaaattctgggaggtcttgcgcaccgaccttcccaactccttccgcttctgcggctccaagggccatgcactggccgtgaagcggctgctggaagagaggtatgctcccgagatcgtcaagatcaagcactttaacggcgatgctgtcgaggcgccccaagctgtgccttggtaccccgatagtctcgcttactccatgaacacacccaagcaggtcatccgcaagttccccccctttgcctccttccagaagttcttagtgtcagagaccagcgtcggcaacatcagtcgtcaggagctggtgagcatgattccacctctcgtcatggatctcaagcccggcatggcagttcttgacttgtgtgctgctccgggtagcaagtcggcccagctccttgagatgatccacgctggagaggagggcaggatccgaaagtttcttgaggcattcggtgaagctcctctcccctccgaccagatgcaagagtccgaccctgccgatgacaactcggatgatggacgcgcaaccggcctgctgatcgccaatgatgtcgaatacaagcgatgccacatgttggtccatcagctcaagcgactctcctcccccaacttgatcgtcacaaatcacgacgcgaccctcttcccgcctcttcagctgcccaaggatccggacagccccgtcaaccaatacctcaagtttgacaggatcttggccgacgtcccctgctcgggagacggaacattgaggaagaacgtggatttgtggaagtattggcagcctggcagtgccttgggtcttcattcgacgcaatgtcgaatcctggtcaaggcgctgcagatgctcaaggtcggtggtagagttgtcttctcaacatgcagcatgaaccccgtcgagaacgagtctgtcgtggtctcagcaatcgagcgctgcggtggtccagacgtcgtggagattatcgactgcaaagaccgactacctcttttgcaacgcaatcctggaatgtatcaatggcagatcatggataaatctggtcggatatggaataactgggaggaagttgaggcacacgtcgctaacggaggaacaccacccggaaagctatcgccgaccatgttcccaaggcctgacacaagcgattgctcaggcctgcctctcgaccgctgcatgcgagtctatgctcaccagcaggataccggcggctttttcatcacggtgctcgagaagaagaaggaattcaaggctaagcccgaggcaaagacgcagtgggagacgccaaacgagactcaggctactgagacagccgctgagcaggagattgtagaggaagctaaagctactctcggacagcccactgatgaagtcccatctgtcggctccaagcgggcgttggacgaagacgagataaaggaagagccttcggtgaagcgacagaagacagagacgcctccggctgagaaggccgggaagatcgccgaagccgttactgaagcctccgtcaaagaagaggtcgaaattaagatggaggaggactctaagccagtcgcctcttctgatcgacgagtcaaggacaacatgtacgaggagccgttcaagtatctttcgcccgaccatgaggtaatccaagacatcctaaaattctacaaaatcaatcctcgattcccctccgacagatttatggtccgcaatgctgcaggcgagccggcgaaagctatctactactccagtcaactggttcgcgacatattagttcaaaacgaaggtcggggcgttcggttcatacacggtggtctcaagatgttcatgaaacaagatgctccctctgctgaagtctgtcgctggcgcattcagtccgagggcttgcctatcatcgccgggtacatgggtcctgagcgcatcgtccgactaacgaataaggagacgctgcacctgttacttcgcgagatgttccccaagttcgtcaatgacgactggaagaaactcaatgagattggcgagcgggctagagatatcggcatgggctgttgtctactgagcgttgagccggatggcacagatcccgagttctcggaacccatggtcctcccgctgtggaagagcttccattcactcaatcttatgttacccaaggaagatcgcgcagctatgatgttgagactattcaacgatacttcccctgtcatcaacaggacgcttaaggactcagcgaagctagaggctgataagactaagaaagaggaggttcctgtaaagaccgaggaagacaagatggagggtgtcactgaatctaagaataccgagataaaggaggaagcctcggacgaggcaaagcccgacaccgaagacgcgaagatggaggacactaccactgcagttacagaggagaaaggagagcaagtaacgatgcctagcgaagcggcgtaggagtccgcttccgatagcgcggatgagtatctcgatgatattcatgacctcaggctggctgggtgcgacctccccttccgaacttattatgactaccaggccgaaatggatctccgggagggtagaatgaagacctcacgtagatggtagatacgagctagttgctattgtactggctatctgttcgtctgtaggtatacggctacctcgcctatctaaagatgagatgtaatgaaaaagcagaatcaatgtactgcgatggacaaatatgtaactcaaaaattgtcacgcgcgtggcactgctgcccttcgtgaacgccctttagtaaaatgcttctaaggcatcaatggaactcgagtaataacatcacgattctcgaaacaaatatttctcagaaatcaaacggcatcttcgtgcctactcactcataaacccttttatgatcttgactattatacaaatataaacacactaatattatacctagaaccccattttccatatccaacgacatccatatttctcttggccctactctacagcagcgccttctccctctgcccagtaacgcgctcaaaagtatcaagcgccatagtcaaattatggtgtccactcgtctttcccctgagtacattatcataatccaagacctccgcaagcgggacctgggccgtaatctgcaacatcctcagccttccctttcttcgctcgtgcagcgaggtctggaactcgtagggatcgggtggtgcgtatatatccgctatatctatctccccgcttgcgtcgtttccagagtctgaagttgagtagttctgatcctgtaggtctcgcacttcgaggactttgcctcctcgcgcggattgcaaatcgtgctcgatcataccggctgctgcttcagggcatacgatgattgctttcattacgggttctaggagggttatgttgccctgttggtgtgcggctgtcaggatatcttttactgcctttttagcagcgctagagatgtgggcgcctgaggcgccgaaatgatctgttgatgcgtcgtatgtgagtttgacgaaacatcggtacatcggtgagttcctacggggtcctcgagctagggcggcgattgtgccgtttatgagggattgttttgttgttccgatgtcgaaggggtgatctacgcctgggaaggcgacttggatgatgtttccgtcgcgttctatgtatgaggattgttctaagttgagggtagtctctggctcgaggggttggatctcggctgtgcaggctgcttggccggcgttgcctgctactgtcttatcaaagactgctcgcatgggagctgtcggtatggatatgctctctttgtagtcgacgacgatgtttccccacattgcttccgccttgtagtagttctcgatacggtctcgtgccacttcaagatggagggtacccatgcccgagagcatgtactgctctgacttctcgtctcgtgaccatctaaggcttggatcctctctcgatgcgttgtctagagctgcttcgagagttttagctgctgttggagagtacgcatctagtacgatgaaagccactggcggtggaatctccggtggtcgaactttgatctctgcaagatgggctggtggagttttccctgatgtgaaagacatcagtgtgtcgccagttcgagcagcttttagccctgtgatagcaccaatctgaccaggagtaagataggggacctcgacatgttctgctgcggatatctgcatgatattgagtgacctctcgaattgctgtagattagtattccacaattgtgtatttttcttgagtacaccatgatagatccggacccaagcgagcatgccgcggcgagggtcatgagtgactttgaagacggatcctaggaaatcgacgttggcattcttcttggatgttttcgggttttgcaagacttgcccaagggactgaacgttcgatccattacggaccgtcagctctggccgatcgagtgggctgggtaaatattcattgactgcattcagcagcggtacaacaccgatatttttcagacttgagcccgcaaagacgggtacgagcgtccccgagccatcccttaggacgcgccgaatgctcttcttgatggcgtccgccgacagaccctctccctgttctgtccatagttctaagagctccgtatcatgctcgcataaaagctcgatcagcctctcgcgtgcgcgttctatctcgtccttgatcgtgccttcggtcacgattgaggataaatcggcttctgaatcagatgttccagcccagctgactactcgaccggtaacaacatccacgacacctttcacgtggtcgttcttccaccatggtatttgacagactagaggcatgccgttcagtttcaacccgatatcctgaacggatttcttgaaggaagctccgtcacggtcaagcttgttgacgaatatcatgcgcggtatcttgaattctttggcggacgcccatactctctcagtatgggcctccacgccctccacaccgtcgatgacacatactgcaccatcgagaatgggcatacatcgttcgacctcgaacctgaagtctacatgtccgggtgtgtcaatcaggttgatgatatgtggccgagtcccagctgaggcatcgtccttccgtggccagttgaaggtaatggctgccgactgaatggtaatacctctctgcctttccatcggcagaaaatcggtgaccgtgtca

SEQ ID NO: 16087 - DNA, 2481 bp, Muscodor strobelii
  misc_feature: SGI cDNA ID NO. 565340
  misc_feature: Encodes the peptide sequence at SEQ ID NO 16088
atgagcttcctagccgtcgcccgcccaagtcacctaagatgttggactcaagccagacggaaagcgttactaccaaactcacaacgctttctgttaaggactagaaacatatcgtcgagctctacacctcagacggataataccattagatatattcgaaacatcggcattgtcgctcatgtcgatgccggcaaaacgacgaccacggagcagatgctcttcaatagtggctccttgaggcatgcaggcaacgttgataatggtgacacggtcaccgattttctgccgatggaaaggcagagaggtattaccattcagtcggcagccattaccttcaactggccacggaaggacgatgcctcagctgggactcggccacatatcatcaacctgattgacacacccggacatgtagacttcaggttcgaggtcgaacgatgtatgcccattctcgatggtgcagtatgtgtcatcgacggtgtggagggcgtggaggcccatactgagagagtatgggcgtccgccaaagaattcaagataccgcgcatgatattcgtcaacaagcttgaccgtgacggagcttccttcaagaaatccgttcaggatatcgggttgaaactgaacggcatgcctctagtctgtcaaataccatggtggaagaacgaccacgtgaaaggtgtcgtggatgttgttaccggtcgagtagtcagctgggctggaacatctgattcagaagccgatttatcctcaatcgtgaccgaaggcacgatcaaggacgagatagaacgcgcacgcgagaggctgatcgagcttttatgcgagcatgatacggagctcttagaactatggacagaacagggagagggtctgtcggcggacgccatcaagaagagcattcggcgcgtcctaagggatggctcggggacgctcgtacccgtctttgcgggctcaagtctgaaaaatatcggtgttgtaccgctgctgaatgcagtcaatgaatatttacccagcccactcgatcggccagagctgacggtccgtaatggatcgaacgttcagtcccttgggcaagtcttgcaaaacccgaaaacatccaagaagaatgccaacgtcgatttcctaggatccgtcttcaaagtcactcatgaccctcgccgcggcatgctcgcttgggtccggatctatcatggtgtactcaagaaaaatacacaattgtggaatactaatctacagcaattcgagaggtcactcaatatcatgcagatatccgcagcagaacatgtcgaggtcccctatcttactcctggtcagattggtgctatcacagggctaaaagctgctcgaactggcgacacactgatgtctttcacatcagggaaaactccaccagcccatcttgcagagatcaaagttcgaccaccggagattccaccgccagtggctttcatcgtactagatgcgtactctccaacagcagctaaaactctcgaagcagctctagacaacgcatcgagagaggatccaagccttagatggtcacgagacgagaagtcagagcagtacatgctctcgggcatgggtaccctccatcttgaagtggcacgagaccgtatcgagaactactacaaggcggaagcaatgtggggaaacatcgtcgtcgactacaaagagagcatatccataccgacagctcccatgcgagcagtctttgataagacagtagcaggcaacgccggccaagcagcctgcacagccgagatccaacccctcgagccagagactaccctcaacttagaacaatcctcatacatagaacgcgacggaaacatcatccaagtcgccttcccaggcgtagatcaccccttcgacatcggaacaacaaaacaatccctcataaacggcacaatcgccgccctagctcgaggaccccgtaggaactcaccgatgtaccgatgtttcgtcaaactcacatacgacgcatcaacagatcatttcggcgcctcaggcgcccacatctctagcgctgctaaaaaggcagtaaaagatatcctgacagccgcacaccaacagggcaacataaccctcctagaacccgtaatgaaagcaatcatcgtatgccctgaagcagcagccggtatgatcgagcacgatttgcaatccgcgcgaggaggcaaagtcctcgaagtgcgagacctacaggatcagaactactcaacttcagactctggaaacgacgcaagcggggagatagatatagcggatatatacgcaccacccgatccctacgagttccagacctcgctgcacgagcgaagaaagggaaggctgaggatgttgcagattacggcccaggtcccgcttgcggaggtcttggattatgataatgtactcaggggaaagacgagtggacaccataatttgactatggcgcttgatacttttgagcgcgttactgggcagagggagaaggcgctgctgtag

SEQ ID NO: 16088 - protein, 826 aa, Muscodor strobelii
  misc_feature: SGI Peptide ID NO. 565340
  misc_feature (50)..(337): Pfam Id: PF00009 Pfam Desc: Elongation factor Tu GTP binding domain
  misc_feature (694)..(723): Pfam Id: PF00679 Pfam Desc: Elongation factor G C-terminus
  misc_feature (781)..(825): Pfam Id: PF00679 Pfam Desc: Elongation factor G C-terminus
  misc_feature (387)..(454): Pfam Id: PF03144 Pfam Desc: Elongation factor Tu domain 2
  misc_feature (64)..(825): NCBI GI: 116194518 Blast Desc: CHGG_03857 [Chaetomium globosum CBS 148.51] gi|88179770|gb|EAQ87238.1| CHGG_03857 [Chaetomium globosum CBS 148.51]
  misc_feature (46)..(825): NCBI GI: 256727477 Blast Desc: [Nectria haematococca mpVI 77-13-4]
  misc_feature (35)..(825): NCBI GI: 171683527 Blast Desc: protein product [Podospora anserina] gi|170941723|emb|CAP67377.1| protein product [Podospora anserina]
  misc_feature (64)..(825): NCBI GI: 46121409 Blast Desc: FG05083.1 [Gibberella zeae PH-1]
  misc_feature (14)..(825): NCBI GI: 39951581 Blast Desc: MGG_01433 [Magnaporthe grisea 70-15] gi|145020733|gb|EDK04862.1| MGG_01433 [Magnaporthe grisea 70-15]
  misc_feature (85)..(825): NCBI GI: 164424456 Blast Desc: NCU07021 [Neurospora crassa OR74A] gi|157070519|gb|EAA32924.2| conserved [Neurospora crassa OR74A]
  misc_feature (81)..(825): NCBI GI: 154313701 Blast Desc: BC1G_05700 [Botryotinia fuckeliana B05.10] gi|150849282|gb|EDN24475.1| BC1G_05700 [Botryotinia fuckeliana B05.10]
  misc_feature (24)..(826): NCBI GI: 226278301 Blast Desc: elongation factor G [Paracoccidioides brasiliensis Pb01]
  misc_feature (3)..(826): NCBI GI: 226291129 Blast Desc: elongation factor G [Paracoccidioides brasiliensis Pb18]
  misc_feature (33)..(826): NCBI GI: 212530600 Blast Desc: translation elongation factor G2, [Penicillium marneffei ATCC 18224] gi|261277847|sp|B6Q1T9.1|RRF2M_PENMQ RecName: Full=Ribosome-releasing factor 2, mitochondrial; factor
MSFLAVARPSHLRCWTQARRKALLPNSQRFLLRTRNISSSSTPQTDNTIRYIRNIGIVAHVDAGKTTTTEQMLFNSGSLRHAGNVDNGDTVTDFLPMERQRGITIQSAAITFNWPRKDDASAGTRPHIINLIDTPGHVDFRFEVERCMPILDGAVCVIDGVEGVEAHTERVWASAKEFKIPRMIFVNKLDRDGASFKKSVQDIGLKLNGMPLVCQIPWWKNDHVKGVVDVVTGRVVSWAGTSDSEADLSSIVTEGTIKDEIERARERLIELLCEHDTELLELWTEQGEGLSADAIKKSIRRVLRDGSGTLVPVFAGSSLKNIGVVPLLNAVNEYLPSPLDRPELTVRNGSNVQSLGQVLQNPKTSKKNANVDFLGSVFKVTHDPRRGMLAWVRIYHGVLKKNTQLWNTNLQQFERSLNIMQISAAEHVEVPYLTPGQIGAITGLKAARTGDTLMSFTSGKTPPAHLAEIKVRPPEIPPPVAFIVLDAYSPTAAKTLEAALDNASREDPSLRWSRDEKSEQYMLSGMGTLHLEVARDRIENYYKAEAMWGNIVVDYKESISIPTAPMRAVFDKTVAGNAGQAACTAEIQPLEPETTLNLEQSSYIERDGNIIQVAFPGVDHPFDIGTTKQSLINGTIAALARGPRRNSPMYRCFVKLTYDASTDHFGASGAHISSAAKKAVKDILTAAHQQGNITLLEPVMKAIIVCPEAAAGMIEHDLQSARGGKVLEVRDLQDQNYSTSDSGNDASGEIDIADIYAPPDPYEFQTSLHERRKGRLRMLQITAQVPLAEVLDYDNVLRGKTSGHHNLTMALDTFERVTGQREKALL

SEQ ID NO: 16089 - DNA, 6092 bp, Muscodor strobelii
  misc_feature: SGI EST ID NO. CUFF.38150.1
  misc_feature: Variant of the nucleotide sequence at SEQ ID NO 16087
tccctgcaggtgttgtgacacagcacgatagataccgcatcgcatctgttggtgttcctgctcaacaactctttcaacaagcacgtgcctctgtttttcactctggtgatgtatcattgtagctgtcgcttatataattttgcactcaattggacttcgcggggtggaatttgtacgttgaccgcggcatgacatctcactacacctcgaattttcacatattgcttcaggcatgagcttcctagccgtcgcccgcccaagtcacctaagatgttggactcaagccagacggaaagcgttactaccaaactcacaacgctttctgttaaggactagaaacatatcgtcgagctctacacctcagacggataataccattagatatattcgaaacatcggcattgtcgctcatgtcgatgccggcaaaacgacgaccacggagcagatgctcttcaatagtggctccttgaggcatgcaggcaacgttgataatggtgacacggtcaccgattttctgccgatggaaaggcagagaggtattaccattcagtcggcagccattaccttcaactggccacggaaggacgatgcctcagctgggactcggccacatatcatcaacctgattgacacacccggacatgtagacttcaggttcgaggtcgaacgatgtatgcccattctcgatggtgcagtatgtgtcatcgacggtgtggagggcgtggaggcccatactgagagagtatgggcgtccgccaaagaattcaagataccgcgcatgatattcgtcaacaagcttgaccgtgacggagcttccttcaagaaatccgttcaggatatcgggttgaaactgaacggcatgcctctagtctgtcaaataccatggtggaagaacgaccacgtgaaaggtgtcgtggatgttgttaccggtcgagtagtcagctgggctggaacatctgattcagaagccgatttatcctcaatcgtgaccgaaggcacgatcaaggacgagatagaacgcgcacgcgagaggctgatcgagcttttatgcgagcatgatacggagctcttagaactatggacagaacagggagagggtctgtcggcggacgccatcaagaagagcattcggcgcgtcctaagggatggctcggggacgctcgtacccgtctttgcgggctcaagtctgaaaaatatcggtgttgtaccgctgctgaatgcagtcaatgaatatttacccagcccactcgatcggccagagctgacggtccgtaatggatcgaacgttcagtcccttgggcaagtcttgcaaaacccgaaaacatccaagaagaatgccaacgtcgatttcctaggatccgtcttcaaagtcactcatgaccctcgccgcggcatgctcgcttgggtccggatctatcatggtgtactcaagaaaaatacacaattgtggaatactaatctacagcaattcgagaggtcactcaatatcatgcagatatccgcagcagaacatgtcgaggtcccctatcttactcctggtcagattggtgctatcacagggctaaaagctgctcgaactggcgacacactgatgtctttcacatcagggaaaactccaccagcccatcttgcagagatcaaagttcgaccaccggagattccaccgccagtggctttcatcgtactagatgcgtactctccaacagcagctaaaactctcgaagcagctctagacaacgcatcgagagaggatccaagccttagatggtcacgagacgagaagtcagagcagtacatgctctcgggcatgggtaccctccatcttgaagtggcacgagaccgtatcgagaactactacaaggcggaagcaatgtggggaaacatcgtcgtcgactacaaagagagcatatccataccgacagctcccatgcgagcagtctttgataagacagtagcaggcaacgccggccaagcagcctgcacagccgagatccaacccctcgagccagagactaccctcaacttagaacaatcctcatacatagaacgcgacggaaacatcatccaagtcgccttcccaggcgtagatcaccccttcgacatcggaacaacaaaacaatccctcataaacggcacaatcgccgccctagctcgaggaccccgtaggaactcaccgatgtaccgatgtttcgtcaaactcacatacgacgcatcaacagatcatttcggcgcctcaggcgcccacatctctagcgctgctaaaaaggcagtaaaagatatcctgacagccgcacaccaacagggcaacataaccctcctagaacccgtaatgaaagcaatcatcgtatgccctgaagcagcagccggtatgatcgagcacgatttgcaatccgcgcgaggaggcaaagtcctcgaagtgcgagacctacaggatcagaactactcaacttcagactctggaaacgacgcaagcggggagatagatatagcggatatatacgcaccacccgatccctacgagttccagacctcgctgcacgagcgaagaaagggaaggctgaggatgttgcagattacggcccaggtcccgcttgcggaggtcttggattatgataatgtactcaggggaaagacgagtggacaccataatttgactatggcgcttgatacttttgagcgcgttactgggcagagggagaaggcgctgctgtagagtagggccaagagaaatatggatgtcgttggatatggaaaatggggttctaggtataatattagtgtgtttatatttgtataatagtcaagatcataaaagggtttatgagtgagtaggcacgaagatgccgtttgatttctgagaaatatttgtttcgagaatcgtgatgttattactcgagttccattgatgccttagaagcattttactaaagggcgttcacgaagggcagcagtgccacgcgcgtgacaatttttgagttacatatttgtccatcgcagtacattgattctgctttttcattacatctcatctttagataggcgaggtagccgtatacctacagacgaacagatagccagtacaatagcaactagctcgtatctaccatctacgtgaggtcttcattctaccctcccggagatccatttcggcctggtagtcataataagttcggaaggggaggtcgcacccagccagcctgaggtcatgaatatcatcgagatactcatccgcgctatcggaagcggactcctacgccgcttcgctaggcatcgttacttgctctcctttctcctctgtaactgcagtggtagtgtcctccatcttcgcgtcttcggtgtcgggctttgcctcgtccgaggcttcctcctttatctcggtattcttagattcagtgacaccctccatcttgtcttcctcggtctttacaggaacctcctctttcttagtcttatcagcctctagcttcgctgagtccttaagcgtcctgttgatgacaggggaagtatcgttgaatagtctcaacatcatagctgcgcgatcttccttgggtaacataagattgagtgaatggaagctcttccacagcgggaggaccatgggttccgagaactcgggatctgtgccatccggctcaacgctcagtagacaacagcccatgccgatatctctagcccgctcgccaatctcattgagtttcttccagtcgtcattgacgaacttggggaacatctcgcgaagtaacaggtgcagcgtctccttattcgttagtcggacgatgcgctcaggacccatgtacccggcgatgataggcaagccctcggactgaatgcgccagcgacagacttcagcagagggagcatcttgtttcatgaacatcttgagaccaccgtgtatgaaccgaacgccccgaccttcgttttgaactaatatgtcgcgaaccagttgactggagtagtagatagctttcgccggctcgcctgcagcattgcggaccataaatctgtcggaggggaatcgaggattgattttgtagaattttaggatgtcttggattacctcatggtcgggcgaaagatacttgaacggctcctcgtacatgttgtccttgactcgtcgatcagaagaggcgactggcttagagtcctcctccatcttaatttcgacctcttctttgacggaggcttcagtaacggcttcggcgatcttcccggccttctcagccggaggcgtctctgtcttctgtcgcttcaccgaaggctcttcctttatctcgtcttcgtccaacgcccgcttggagccgacagatgggacttcatcagtgggctgtccgagagtagctttagcttcctctacaatctcctgctcagcggctgtctcagtagcctgagtctcgtttggcgtctcccactgcgtctttgcctcgggcttagccttgaattccttcttcttctcgagcaccgtgatgaaaaagccgccggtatcctgctggtgagcatagactcgcatgcagcggtcgagaggcaggcctgagcaatcgcttgtgtcaggccttgggaacatggtcggcgatagctttccgggtggtgttcctccgttagcgacgtgtgcctcaacttcctcccagttattccatatccgaccagatttatccatgatctgccattgatacattccaggattgcgttgcaaaagaggtagtcggtctttgcagtcgataatctccacgacgtctggaccaccgcagcgctcgattgctgagaccacgacagactcgttctcgacggggttcatgctgcatgttgagaagacaactctaccaccgaccttgagcatctgcagcgccttgaccaggattcgacattgcgtcgaatgaagacccaaggcactgccaggctgccaatacttccacaaatccacgttcttcctcaatgttccgtctcccgagcaggggacgtcggccaagatcctgtcaaacttgaggtattggttgacggggctgtccggatccttgggcagctgaagaggcgggaagagggtcgcgtcgtgatttgtgacgatcaagttgggggaggagagtcgcttgagctgatggaccaacatgtggcatcgcttgtattcgacatcattggcgatcagcaggccggttgcgcgtccatcatccgagttgtcatcggcagggtcggactcttgcatctggtcggaggggagaggagcttcaccgaatgcctcaagaaactttcggatcctgccctcctctccagcgtggatcatctcaaggagctgggccgacttgctacccggagcagcacacaagtcaagaactgccatgccgggcttgagatccatgacgagaggtggaatcatgctcaccagctcctgacgactgatgttgccgacgctggtctctgacactaagaacttctggaaggaggcaaagggggggaacttgcggatgacctgcttgggtgtgttcatggagtaagcgagactatcggggtaccaaggcacagcttggggcgcctcgacagcatcgccgttaaagtgcttgatcttgacgatctcgggagcatacctctcttccagcagccgcttcacggccagtgcatggcccttggagccgcagaagcggaaggagttgggaaggtcggtgcgcaagacctcccagaattttgccttctcttcgtcgtcgagagggagcgcgctgttgtagaaagtctcgaggcgcgtgttggatcggggcacgtcagggttagatcggtacgagtcggtgcggggctgtctatgatgcactcggtcgctgccgccattgcgattgtcgttgtttctacggcctccctaacaagcacgaagcggtcagcggacatgtttctaggttctcccaacgcgacgcagcttactcttctcttccccatcgtgagcgtttagcgcgtagctcgcgcaaccagcttcgagtgcgtacttgttgattggaagtgattgaaggattctctctcagcttcaagctatttcgtgcaatcccgatgcggctgcagtcgagacaagaagagtcgggagttatcttgcgcgaagcatcgagttcggagctttcaat

SEQ ID NO: 16090 - DNA, 1191 bp, Muscodor strobelii
  misc_feature: SGI cDNA ID NO. 565342
  misc_feature: Encodes the peptide sequence at SEQ ID NO 16091
atggaggaggcaagcacaaacccgcttctttcgtcacagaagtcgtcagactcgggtctgcaggcagtcctccaccctctcgtcctcctcaccatctccgactacatcacacgccacaccctcagagaacagcctggccccatcgtcggtgctctgttgggacagcagaatggaagagagattactatcgagcatgcctttgagtgtgccaccaagactgtcaaggatgaagtattactagatgccgactggttcaagagtcggctggagcagatgacgaccatgtacaaggcccctcaactcgacctcgtaggctggtacacgctgctccccaagaccggtccgaccccggccatcctccccattcacaaatggatcctgtccacgcacaacgagtcttcactcctacttggtttccaccaggatgaagtcatccaacattctgccggcagcagactacccctcaccatctacgagtccaactatgaggccgacgagccaagacatgaccagggcgaagacaaggagatgcgcgatcgggagccacccctcagcctcaagttccacgagctgccatactctgtcgagacgggcgaggccgagatgatcagcatggacttcgtagccagaggtgctggcaacgccaccgcaatcgaggcaagtgagcccaagaaatccacaaccgacgatcccaagggcaagcgcaagatggacgacagggcagaggtggaagagtcagagggcctcatcctctcccgtgaggacgaagagatgatcgccgctctgaccgccaaggggaactcggtcaagatgctagaagcacgtatcgacctcctggcaaaatatctggagcgcctaccgcagaacaacgcaatgatcaccgacgagagcgagcagacaacaccatcccacaccatcctgcgctccatccaagccctaatcaacagattctccctcctcgtccccgccgcaaccgaggccttcgagcaggagatgctcagcgaatccaacgacgtgcacctcatggagctgctcaacaacgtcatgcacagcgtcgcggacatccgcaacatcggcaagaagtacaacatcgtcgagtcgagcaagacgcacaaccgcaagggcttcatggacacccgcttcacttccgagtaccggggcgcaggcgatctggccaccggtgctatgtag

SEQ ID NO: 16091 - protein, 396 aa, Muscodor strobelii
  misc_feature: SGI Peptide ID NO. 565342
  misc_feature (17)..(132): Pfam Id: PF01398 Pfam Desc: Mov34/MPN/PAD-1 family
  misc_feature (17)..(107): Pfam Id: PF01398 Pfam Desc: Mov34/MPN/PAD-1 family
  misc_feature (7)..(389): NCBI GI: 156046463 Blast Desc: SS1G_09415 [Sclerotinia sclerotiorum 1980] gi|154693810|gb|EDN93548.1| SS1G_09415 [Sclerotinia sclerotiorum 1980]
  misc_feature (6)..(375): NCBI GI: 256727028 Blast Desc: NECHADRAFT_5151 [Nectria haematococca mpVI 77-13-4]
  misc_feature (7)..(391): NCBI GI: 154313693 Blast Desc: BC1G_05696 [Botryotinia fuckeliana B05.10] gi|150849278|gb|EDN24471.1| BC1G_05696 [Botryotinia fuckeliana B05.10]
  misc_feature (7)..(391): NCBI GI: 46136165 Blast Desc: FG09598.1 [Gibberella zeae PH-1]
  misc_feature (3)..(375): NCBI GI: 39951579 Blast Desc: MGG_01432 [Magnaporthe grisea 70-15] gi|145020734|gb|EDK04863.1| MGG_01432 [Magnaporthe grisea 70-15]
  misc_feature (1)..(396): NCBI GI: 212530558 Blast Desc: COP9 signalosome subunit 6 (CsnF), [Penicillium marneffei ATCC 18224] gi|210074834|gb|EEA28921.1| COP9 signalosome subunit 6 (CsnF), [Penicillium marneffei ATCC 18224]
  misc_feature (5)..(389): NCBI GI: 242818362 Blast Desc: COP9 signalosome subunit 6 (CsnF), [Talaromyces stipitatus ATCC 10500] gi|218713567|gb|EED12991.1| COP9 signalosome subunit 6 (CsnF), [Talaromyces stipitatus ATCC 10500]
  misc_feature (2)..(369): NCBI GI: 171683521 Blast Desc: protein product [Podospora anserina] gi|170941720|emb|CAP67374.1| protein product [Podospora anserina]
  misc_feature (7)..(371): NCBI GI: 261197634 Blast Desc: COP9 signalosome subunit 6 [Ajellomyces dermatitidis SLH14081] gi|239595182|gb|EEQ77763.1| COP9 signalosome subunit 6 [Ajellomyces dermatitidis SLH14081]
  misc_feature (7)..(371): NCBI GI: 239607597 Blast Desc: COP9 signalosome subunit 6 [Ajellomyces dermatitidis ER-3]
MEEASTNPLLSSQKSSDSGLQAVLHPLVLLTISDYITRHTLREQPGPIVGALLGQQNGREITIEHAFECATKTVKDEVLLDADWFKSRLEQMTTMYKAPQLDLVGWYTLLPKTGPTPAILPIHKWILSTHNESSLLLGFHQDEVIQHSAGSRLPLTIYESNYEADEPRHDQGEDKEMRDREPPLSLKFHELPYSVETGEAEMISMDFVARGAGNATAIEASEPKKSTTDDPKGKRKMDDRAEVEESEGLILSREDEEMIAALTAKGNSVKMLEARIDLLAKYLERLPQNNAMITDESEQTTPSHTILRSIQALINRFSLLVPAATEAFEQEMLSESNDVHLMELLNNVMHSVADIRNIGKKYNIVESSKTHNRKGFMDTRFTSEYRGAGDLATGAM

SEQ ID NO: 16092 - DNA, 3210 bp, Muscodor strobelii
  misc_feature: SGI EST ID NO. CUFF.38204.1
  misc_feature: Variant of the nucleotide sequence at SEQ ID NO 16090
caagagattaaccactgcacaccttttaagtgccaccttgtctaactctgcctcacgacatcttccacactcctgtctttactctcgcaactggtgaagtcaatatggaggaggcaagcacaaacccgcttctttcgtcacagaagtcgtcagactcgggtctgcaggcagtcctccaccctctcgtcctcctcaccatctccgactacatcacacgccacaccctcagagaacagcctggccccatcgtcggtgctctgttgggacagcagaatggaagagagattactatcgagcatgcctttgagtgtgccaccaagactgtcaaggatgaagtattactagatgccgactggttcaagagtcggctggagcagatgacgaccatgtacaaggcccctcaactcgacctcgtaggctggtacacgctgctccccaagaccggtccgaccccggccatcctccccattcacaaatggatcctgtccacgcacaacgagtcttcactcctacttggtttccaccaggatgaagtcatccaacattctgccggcagcagactacccctcaccatctacgagtccaactatgaggccgacgagccaagacatgaccagggcgaagacaaggagatgcgcgatcgggagccacccctcagcctcaagttccacgagctgccatactctgtcgagacgggcgaggccgagatgatcagcatggacttcgtagccagaggtgctggcaacgccaccgcaatcgaggcaagtgagcccaagaaatccacaaccgacgatcccaagggcaagcgcaagatggacgacagggcagaggtggaagagtcagagggcctcatcctctcccgtgaggacgaagagatgatcgccgctctgaccgccaaggggaactcggtcaagatgctagaagcacgtatcgacctcctggcaaaatatctggagcgcctaccgcagaacaacgcaatgatcaccgacgagagcgagcagacaacaccatcccacaccatcctgcgctccatccaagccctaatcaacagattctccctcctcgtccccgccgcaaccgaggccttcgagcaggagatgctcagcgaatccaacgacgtgcacctcatggagctgctcaacaacgtcatgcacagcgtcgcggacatccgcaacatcggcaagaagtacaacatcgtcgagtcgagcaagacgcacaaccgcaagggcttcatggacacccgcttcacttccgagtaccggggcgcaggcgatctggccaccggtgctatgtaggacaagggaccgcggaaaagaccgtcgccgccgggctcttggggggactacacgttttaagtagataaatcgtttatgactgcatttgcgtggcgaaccaggcgtttcttgtcttttgctgctagggatggggtttgctgcttgcttgatcagaggaagagttagttcatggatagagggtctattctcggaagatagcgttgctcttcaaaaggggaagcaggggaagccatgaggagccatgaatcaatgcgaagcaatgcacttaagaatatcaagataattctgcatcacaaaatactgaatggagtacgtttccatgagttttgtgccccttacccatatcatacacatcataatgaagcaggagagatatgtgtaagtaatatgtataagaacagccaagttctacctcgcttagcgatgaccgcgactctttcaacacctatgactacagcctcattctcgagttgaatttttcccactctccaccagccagccccaagtcataatccccatccccatcctcacaataacccattacaaactacacacccctttaaaaagtactagtagccagcctagacgccgcattcctagcatcaacacgatcctcatcatcttcttccgtcaacccgggcagcgcaccaggagcgggcgtagccttagtttccccctgctcctgctcctccccaacacttccgccggcaacacctctagacagactatccgtgcgtctcggcacaccactccaagcatcgcccttcggaccctgagacgcagctaagctcgcgcgtcggaccgtgggatgagattcacggcctagacgagagagaccacccgaggcgtcgatggtccggatatcgggtcgtacactctcgaggagagcaagagtacgtcgctccgcttcaatctcacggacgacgaactcgcggatactgccccgaagatcggcggacgtcctcgcgaaccatttgcgtcgctcgttgacgaggttctgcgtgactctcgtcgtcttctggtagagctcgtgttccgtgctgcgggcctcgtcgagggaagcgatggcctcgtctaccttttcgcggcgcacgctcgagctagctttgaggcgatctgctgcgttgagtttgccgcgcgttatgtcctgcgcttgtaggaattcccggatgaggagttggcggtttgtcagtgtctcttttacgacgaaggcgtcttgtgagtggtattggaatgaatcgcccagcgttgcggcttcggctgtggcttgggcggcgtggcagtcgccgactgtttggacgattttgccgagtttgcggtaggcgtttgcgaggccctggtgaggctcttgtatgttcatcgctcctagcttgacgccgaagtcggattctgagagtcccaggcctagattttgtgagttgtcatgctatagctcgaggagctggtgggttatatcttacctcttcgtgacttcacgagcttatcgactttatggcctgcgtccatagaacccaaatagaatagcttgactatgggccgtgcttcggccaattcgggcgtctcgtctgggggaggcgcaaactgctttaaaacctttcttcgtacaccggtcgcaggctgcttccgcttgatcatggggctgtatccaaagtcgctctcgacgaacaggaccatctcatcgtccatcatgagcacttcgttgctgcagacatagttgaaccacctctgcatgagagtcttgacgcgagtctcgtcctcgtcggtgccggcgccggcggaagtgacggacggtggtacagctgggaccatggcgtcgggattggcggatatcaggtgttcggcgagcttgatgaattcggagtgtaggcggcggacgtcgcggaattgggtggttcggaatttatgtatgtttgtc

SEQ ID NO: 16093 - DNA, 2208 bp, Muscodor strobelii
  misc_feature: SGI cDNA ID NO. 565343
  misc_feature: Encodes the peptide sequence at SEQ ID NO 16094
atgtccttcattactgtcgctgccgcgacgatcccaagtattcccttggattttcaaggcaatcgggatcgtgtactggagtcaatcaggatcgcaaaggagaaaggcgccacgctccgcaccggccctgagctcgaaattcctggctacggatgtctggaccatcacctggaaggcgataccttcgcccattcttgggaagtacttgctgaaattatcagcgacggggtgtgtaaagacatgcttcttgatatcgggatggggtgccgtcacagaaacgtgaggtacaactgcagggtactatgcacgttccgcaagatacttttcattcgacccaagatggctcttgccaacgatggcttataccgagaggcgaggcatttcaccgcttgggcaaaacctatgcaaacggagacatattatcttgaatcagtgatacagcaggtgactggccaacacactgttcccattggtgatgccatactatcaacgagagatacctccatcggctgtgaaacctgcgaagagatgttcacaccgcgcaatccgtccacgtatatgtcgcttaatggttgcgagatcatcctgaacagctctgcttcacacgctgaacttcgaaagctgaagacgagacttgacctcatatcaaattcgacgaggaagactggtggatgttatgtctatgcaaacgccaccggtgtcgacggtgaagcccggatgatgttcgacggttcctcgatgatcttgttgaatggtaaagtcctcgagcagggaagtcaattctcccttgagcctgtggaggttatcacggcaactattgatattgaagagattcgaagtttccgatccagcatatcgagaaacgtccaagcagctgcccaggcagattacccacggatagaattcgatataagattgtctcgctccgctgacgatattttcttatcgaagaacttacagatctctgtcgaaaagcagcttcgaattcttgacccgatgtccgaaatatggatgagcactgctgtctacctctggcaatatctcgtccggacatactctcccggcttctttcttagtctttctggtggactagacagcagtactgtggctctgtttgtatatggcatggcaaaagttgtgcttagctccatagaatccggttcaacgtcaacattggtggatctcagaaaggtgacgggagtgaaagatcttgcccccaaaacacctgaggagatagttaacctcctcctcactacatgctacatgggcacagtcaactcaagcgacgagacatccggtcgggccaagagactctccgaaaaactgggggcttatcacatggatatcactatcgactcagctgttcaggccaacctgggaataatccagtcagcgttgaaattcgaaccaaaatactcagtcgaaggtggtacgcgcgccgagaatcttgctctccagaacattcaagctcgcagccgactagtcgcgcaatattctctggcccaactggctaccacagctcggcagactcccagagccggcactgcattgttagttttgactagcggaaacgtagacgaagctttacgaggatgcaagaccttccggctatcagactatacaaaatatgatgctagcagcggtgatatcgcaccccttggctccatatccaagaacgacgcaaagctctttcaaaaatgggcaatcgacgcttgggacctgaaaattatgaaagaattcctcgaagctgagcttcttcctctttcagcgggtgtacaggatgatgagtcagagagcgagatgggactaacgtacaccgagctctctgttttcggaatcttgcgcaaggtagagaaactcggcccgtggtcatcgtacttgcatttactaggcctgtggaaagaccgcaatctatcacccacgcaaattgcggaaaaagtaatgcgttttttccggaactatgcattgaatcgccataagatgaccgtactgatcataccaataccatttagaacatcacgaacgccaaaacggactgacatgttttggtacactaggacgccgtcgatacacatgtcggcgtataatcccgatgataatcggcatgatcttagaccgttcctctatgttgtcaattggccgtttcagtttgaaaagatacggaatcatgctaaacatcttgaggagttgatggagcagaagaagtag

SEQ ID NO: 16094 - protein, 735 aa, Muscodor strobelii
  misc_feature: SGI Peptide ID NO. 565343
  misc_feature (5)..(200): Pfam Id: PF00795 Pfam Desc: Carbon-nitrogen hydrolase
  misc_feature (1)..(735): NCBI GI: 256733888 Blast Desc: NECHADRAFT_99513 [Nectria haematococca mpVI 77-13-4]
  misc_feature (1)..(703): NCBI GI: 145607339 Blast Desc: MGG_04178 [Magnaporthe grisea 70-15] gi|145014914|gb|EDJ99482.1| MGG_04178 [Magnaporthe grisea 70-15]
  misc_feature (3)..(728): NCBI GI: 119498883 Blast Desc: glutamine-dependent NAD(+) synthetase [Neosartorya fischeri NRRL 181] gi|119414363|gb|EAW24302.1| glutamine-dependent NAD(+) synthetase [Neosartorya fischeri NRRL
  misc_feature (3)..(732): NCBI GI: 261189261 Blast Desc: glutamine-dependent NAD(+) synthetase [Ajellomyces dermatitidis SLH14081] gi|239591827|gb|EEQ74408.1| glutamine-dependent NAD(+) synthetase [Ajellomyces dermatitidis
  misc_feature (3)..(732): NCBI GI: 239614745 Blast Desc: glutamine-dependent NAD(+) synthetase [Ajellomyces dermatitidis ER-3]
  misc_feature (3)..(728): NCBI GI: 255955723 Blast Desc: Pc21g16060 [Penicillium chrysogenum Wisconsin 54-1255] gi|211590325|emb|CAP96503.1| Pc21g16060 [Penicillium chrysogenum Wisconsin 54-1255]
  misc_feature (3)..(728): NCBI GI: 121718800 Blast Desc: glutamine-dependent NAD(+) synthetase [Aspergillus clavatus NRRL 1] gi|119404395|gb|EAW14771.1| glutamine-dependent NAD(+) synthetase [Aspergillus clavatus NRRL 1]
  misc_feature (3)..(720): NCBI GI: 50307329 Blast Desc: protein product [Kluyveromyces lactis] gi|49642777|emb|CAH00739.1| KLLA0D13024p [Kluyveromyces lactis]
  misc_feature (3)..(728): NCBI GI: 145242608 Blast Desc: An09g05660 [Aspergillus niger] gi|134078429|emb|CAL00844.1| protein product [Aspergillus niger]
  misc_feature (1)..(720): NCBI GI: 170087972 Blast Desc: [Laccaria bicolor S238N-H82] gi|164650409|gb|EDR14650.1| [Laccaria bicolor S238N-H82]
  misc_feature (4)..(729): SWISSPROT Homolog: EC 6.3.5.1 NAD(+) synthase (glutamine-hydrolyzing)
MSFITVAAATIPSIPLDFQGNRDRVLESIRIAKEKGATLRTGPELEIPGYGCLDHHLEGDTFAHSWEVLAEIISDGVCKDMLLDIGMGCRHRNVRYNCRVLCTFRKILFIRPKMALANDGLYREARHFTAWAKPMQTETYYLESVIQQVTGQHTVPIGDAILSTRDTSIGCETCEEMFTPRNPSTYMSLNGCEIILNSSASHAELRKLKTRLDLISNSTRKTGGCYVYANATGVDGEARMMFDGSSMILLNGKVLEQGSQFSLEPVEVITATIDIEEIRSFRSSISRNVQAAAQADYPRIEFDIRLSRSADDIFLSKNLQISVEKQLRILDPMSEIWMSTAVYLWQYLVRTYSPGFFLSLSGGLDSSTVALFVYGMAKVVLSSIESGSTSTLVDLRKVTGVKDLAPKTPEEIVNLLLTTCYMGTVNSSDETSGRAKRLSEKLGAYHMDITIDSAVQANLGIIQSALKFEPKYSVEGGTRAENLALQNIQARSRLVAQYSLAQLATTARQTPRAGTALLVLTSGNVDEALRGCKTFRLSDYTKYDASSGDIAPLGSISKNDAKLFQKWAIDAWDLKIMKEFLEAELLPLSAGVQDDESESEMGLTYTELSVFGILRKVEKLGPWSSYLHLLGLWKDRNLSPTQIAEKVMRFFRNYALNRHKMTVLIIPIPFRTSRTPKRTDMFWYTRTPSIHMSAYNPDDNRHDLRPFLYVVNWPFQFEKIRNHAKHLEELMEQKK

SEQ ID NO: 16095 - DNA, 1827 bp, Muscodor strobelii
  misc_feature: SGI EST ID NO. CUFF.37970.0
  misc_feature: Variant of the nucleotide sequence at SEQ ID NO 16093
ccggccggattttctgcctagagcatggaaaatgacataaatatgcctgctagtcgacgtgtaaagggaaacttcacttatttcaccaacaaaaaaagggtggggcacatagaacttagaaacactacctaagaagcatcggagaacagccggcgtttgttcagatgcacctcagacttacaaaacagtgggtgagactttttcaaaaaaatcccttggtcagtgatagacgactcgccatgtccttcattactgtcgctgccgcgacgatcccaagtattcccttggattttcaaggcaatcgggatcgtgtactggagtcaatcaggatcgcaaaggagaaaggcgccacgctccgcaccggccctgagctcgaaattcctggctacggatgtctggaccatcacctggaaggcgataccttcgcccattcttgggaagtacttgctgaaattatcagcgacggggtgtgtaaagacatgcttcttgatatcgggatggggtgccgtcacagaaacgtgaggtacaactgcagggtactatgcacgttccgcaagatacttttcattcgacccaagatggctcttgccaacgatggcttataccgagaggcgaggcatttcaccgcttgggcaaaacctatgcaaacggagacatattatcttgaatcagtgatacagcaggtgactggccaacacactgttcccattggtgatgccatactatcaacgagagatacctccatcggctgtgaaacctgcgaagagatgttcacaccgcgcaatccgtccacgtatatgtcgcttaatggttgcgagatcatcctgaacagctctgcttcacacgctgaacttcgaaagctgaagacgagacttgacctcatatcaaattcgacgaggaagactggtggatgttatgtctatgcaaacgccaccggtgtcgacggtgaagcccggatgatgttcgacggttcctcgatgatcttgttgaatggtaaagtcctcgagcagggaagtcaattctcccttgagcctgtggaggttatcacggcaactattgatattgaagagattcgaagtttccgatccagcatatcgagaaacgtccaagcagctgcccaggcagattacccacggatagaattcgatataagattgtctcgctccgctgacgatattttcttatcgaagaacttacagatctctgtcgaaaagcagcttcgaattcttgacccgatgtccgaaatatggatgagcactgctgtctacctctggcaatatctcgtccggacatactctcccggcttctttcttagtctttctggtggactagacagcagtactgtggctctgtttgtatatggcatggcaaaagttgtgcttagctccatagaatccggttcaacgtcaacattggtggatctcagaaaggtgacgggagtgaaagatcttgcccccaaaacacctgaggagatagttaacctcctcctcactacatgctacatgggcacagtcaactcaagcgacgagacatccggtcgggccaagagactctccgaaaaactgggggcttatcacatggatatcactatcgactcagctgttcaggccaacctgggaataatccagtcagcgttgaaattcgaaccaaaatactcagtcgaaggtggtacgcgcgccgagaatcttgctctccagaacattcaagctcgcagccgactagtcgcgcaatattctctggcccaactggctaccacagctcggcagactcccagagccggcactgcattgttagttttgactagcggaaacgtagacgaagctttac

SEQ ID NO: 16096 - DNA, 1173 bp, Muscodor strobelii
  misc_feature: SGI cDNA ID NO. 565344
  misc_feature: Elevated expression when VOC is produced
  misc_feature: Encodes the peptide sequence at SEQ ID NO 16097
atgttgtcactttttcttggcgctttgctcgtcatcagcccgctggctgcaggagcaccgcacaaacaccaccgaccttgttccggaaagcctcataccacaaaaacagtaatcgtgactgtaactgaacctgtttccgagagcacagtatcttctactacctcgagcgttgcggcaacaacgtccgaagaaccggtttccacgactgtcatcgccatcacggtgagctctgttgcacagtctaccgtggttgagcagccgtccacaaccgtcatttccatcacagtgagctccccagagtctactgtgactgagcaaccaccgtctacttcgacgtccgcaaagacaattgctacgtctccatcatcatctgaaaagcctacttctacacctgcttcatcgccgactgttacgggagatagtgtctatgcagatgcaagtgcaatttcataccaagtcggtgctacgaagcaatgcggcaacgaagatcgcttgatcatgcctggaatgccatggacggtcagtaatgctatgtacggtgccgatgatatggttgggacgcaatgcaccaacttcgagcagcttctagaagctacagatggcacagagctggtacaatggacaagtaccaccgacatagaaatggtcgaggatacagagggtatctgcaagggctactctaacattgggattggcaagaacttgaagaaccctcttcaggatatcaagtcgataaatgcttattatagttggaaccggacgatcgaatccgaattcagaggctccaatatcttcgacttcatcactgctccgactgcaggcgatggcacgtcgaccgcaacctcggagttcatgttgtttctgcagatatggggtggacaagttccaatcggattttctcggccgcccgtagcaacgttcgatttgtatggcacgagctggaagctttacgagggtgtcaatcccaataaccatgtgacagtccgcagtgcgatccctgataaccagttcgaaggcaacttcgaaggcgacctaaagttatggctcgataaaatggccgaacttaagtacattgagcccaccgactttgtcaatgtcgggaacagtggtacagagatcttttacggaaagacgactcagcacgtccaaaccgctcttaacatcaatgtttaa

SEQ ID NO: 16097 - protein, 390 aa, Muscodor strobelii
  misc_feature: SGI Peptide ID NO. 565344
  misc_feature (155)..(390): NCBI GI: 145235541 Blast Desc: An03g05380 [Aspergillus niger] gi|134058105|emb|CAK38300.1| protein product [Aspergillus niger]
  misc_feature (155)..(390): NCBI GI: 169781350 Blast Desc: [Aspergillus oryzae RIB40] gi|238501200|ref|XP_002381834.1| endoglucanase-1 precursor, [Aspergillus flavus NRRL3357] gi|83773880|dbj|BAE64005.1| protein
  misc_feature (155)..(390): NCBI GI: 119473753 Blast Desc: NFIA_002040 [Neosartorya fischeri NRRL 181] gi|119406905|gb|EAW16855.1| NFIA_002040 [Neosartorya fischeri NRRL 181]
  misc_feature (155)..(390): NCBI GI: 154321722 Blast Desc: [Botryotinia fuckeliana B05.10] gi|150850255|gb|EDN25448.1| [Botryotinia fuckeliana B05.10]
  misc_feature (154)..(390): NCBI GI: 156045948 Blast Desc: [Sclerotinia sclerotiorum 1980] gi|154693646|gb|EDN93384.1| [Sclerotinia sclerotiorum 1980]
  misc_feature (155)..(370): NCBI GI: 70985863 Blast Desc: iron-sulfur cluster-binding protein, rieske family domain protein [Aspergillus fumigatus Af293] gi|66846066|gb|EAL86399.1| iron-sulfur cluster-binding protein,
  misc_feature (155)..(370): NCBI GI: 159128427 Blast Desc: iron-sulfur cluster-binding protein, rieske family domain protein [Aspergillus fumigatus A1163]
  misc_feature (159)..(390): NCBI GI: 256724139 Blast Desc: NECHADRAFT_122895 [Nectria haematococca mpVI 77-13-4]
  misc_feature (159)..(388): NCBI GI: 189208482 Blast Desc: endoglucanase A precursor [Pyrenophora tritici-repentis Pt-1C-BFP] gi|187976667|gb|EDU43293.1| endoglucanase A precursor [Pyrenophora tritici-repentis
  misc_feature (155)..(376): NCBI GI: 256722177 Blast Desc: NECHADRAFT_106477 [Nectria haematococca mpVI 77-13-4]
  misc_feature: Useful for introducing or modulating the production of volatile compounds
MLSLFLGALLVISPLAAGAPHKHHRPCSGKPHTTKTVIVTVTEPVSESTVSSTTSSVAATTSEEPVSTTVIAITVSSVAQSTVVEQPSTTVISITVSSPESTVTEQPPSTSTSAKTIATSPSSSEKPTSTPASSPTVTGDSVYADASAISYQVGATKQCGNEDRLIMPGMPWTVSNAMYGADDMVGTQCTNFEQLLEATDGTELVQWTSTTDIEMVEDTEGICKGYSNIGIGKNLKNPLQDIKSINAYYSWNRTIESEFRGSNIFDFITAPTAGDGTSTATSEFMLFLQIWGGQVPIGFSRPPVATFDLYGTSWKLYEGVNPNNHVTVRSAIPDNQFEGNFEGDLKLWLDKMAELKYIEPTDFVNVGNSGTEIFYGKTTQHVQTALNINV

SEQ ID NO: 16098 - DNA, 2256 bp, Muscodor strobelii
  misc_feature: SGI EST ID NO. CUFF.37986.0
  misc_feature: Variant of the nucleotide sequence at SEQ ID NO 16096
agggatcgggcggtaagctgcagcctttaccgggtgggtgggcctgttctgaaacgggactagaggccccttctcatcttgtcaccaaatccagatccttaagatccaatcccctgggttgtttgatgcttcgatgtcatctattcgcgccgatgagatagcagccccatgcaggaacttgtagacactttctcgactcgtgcatctctacatggatcttgcagatctccctgtactaaacattcccaccccctaacgcctgcagatctgttggttcgtttggactttgccacgaagatgatattgtatcttttctttgccccgtcaagcccgtttctctttgttctgcgagacgcaaggattctgcaggaccttttgcaccttttgtcataggcctggctggttatctgatgcagtgtggcttttcctttgtgcttacggctggtgacccgacatgcttagtttgtttcaagtagaccaacgagaaagatgtttccaatataatgaccttcaaggacgaccatcttgatgatgatctaagaatcgagaattttgtttctcttcttccacgtctctctcttcacctctcgttcgctctcttctcagtgacttggttcacctatccattcattttgctctattcgttccgttgctggttgatccaacactctctttcgacagcccggcgcggtctgaaaagcgtgtacactctttacgatagccaaacagattctacttctatcgctactaacttgtccgtgaagcatttgccgacatgttgtcactttttcttggcgctttgctcgtcatcagcccgctggctgcaggagcaccgcacaaacaccaccgaccttgttccggaaagcctcataccacaaaaacagtaatcgtgactgtaactgaacctgtttccgagagcacagtatcttctactacctcgagcgttgcggcaacaacgtccgaagaaccggtttccacgactgtcatcgccatcacggtgagctctgttgcacagtctaccgtggttgagcagccgtccacaaccgtcatttccatcacagtgagctccccagagtctactgtgactgagcaaccaccgtctacttcgacgtccgcaaagacaattgctacgtctccatcatcatctgaaaagcctacttctacacctgcttcatcgccgactgttacgggagatagtgtctatgcagatgcaagtgcaatttcataccaagtcggtgctacgaagcaatgcggcaacgaagatcgcttgatcatgcctggaatgccatggacggtcagtaatgctatgtacggtgccgatgatatggttgggacgcaatgcaccaacttcgagcagcttctagaagctacagatggcacagagctggtacaatggacaagtaccaccgacatagaaatggtcgaggatacagagggtatctgcaagggctactctaacattgggattggcaagaacttgaagaaccctcttcaggatatcaagtcgataaatgcttattatagttggaaccggacgatcgaatccgaattcagaggctccaatatcttcgacttcatcactgctccgactgcaggcgatggcacgtcgaccgcaacctcggagttcatgttgtttctgcagatatggggtggacaagttccaatcggattttctcggccgcccgtagcaacgttcgatttgtatggcacgagctggaagctttacgagggtgtcaatcccaataaccatgtgacagtccgcagtgcgatccctgataaccagttcgaaggcaacttcgaaggcgacctaaagttatggctcgataaaatggccgaacttaagtacattgagcccaccgactttgtcaatgtcgggaacagtggtacagagatcttttacggaaagacgactcagcacgtccaaaccgctcttaacatcaatgtttaaaactggacttcatatgctatgaaattggctgggtgtctgagtcaattaaactcggcaggtcgatttgacgcgatcgatcaattctattcttgtatatataagctgtatctgtggaaagattacccactgtgagactttggccttgtgggatgctcgaaaaatcatgcatcttgactttgactatatcggccttttcaggttactagataagaatatcatttgcatccattggcatgatgaaactaggaaccgtctaaatcttggtcgtatgcatgagaaatagcgaggtaaacgatgacagatcttcc

SEQ ID NO: 16099 - DNA, 2304 bp, Muscodor strobelii
  misc_feature: SGI cDNA ID NO. 565345
  misc_feature: Elevated expression when VOC is produced
  misc_feature: Encodes the peptide sequence at SEQ ID NO 16100
atgacccggtggactgcgcaaacccgggagaactttatctcacaggtcccttacagcgacggtgatgctttcattcatggcttccaggcgacacaccagccagcaatatggatgggtgagcttggtcaaatggtgataagcccaagctggacggaagaaataaagcctgcttttgagcagcgcggtctcgcttttcgtaaagaggacgaagttagtacaccttatgtctacgaagtgcttttagatgcggcaacagagggagaacgtgacttcaacctcactgaagaagccgtaggggaagggcccgtccctggaggggcgggcggtgtgccgagcgaagtctcaaatggggcaaacggacgagtacggaaacgagcaacaatcaacgaagcttatgaccgctcaattagagtggctatgaccgcactggctcacaccagttacataaggcttgactatgaggatgaatctcaaaagtgcagtcccgatcttcatgttgaacctgctgtcttcgttcaagctacgcgacaaaattggacgggtcacgttgaaatcgatcccgatagacaagagatttctggtagcaacccagagcgacaagattatctcctcggtccagacaagccagattcttttagaggttactttgtttcacgattctcaaaacctttcgtatcgtacggcactactaagggacgaaacatctccgagtcaaggcttagtgacagcggagaatctcttggtgcttacgtacggtttcatccgggtacaactcgtgtcgagatccgtacaggtatttcgttcgtgagtgtcgagcaagcgcgaaagaacttagagattgagataccagacgatgtttcattcgaagacactattgaacaagtaaaagctgcgtggttggataagcttggccgagtaacgattgagggtgccaatgctaccgacgaggaacatgatccgcggacgatttggtacactgggctctttcacgctctgcaatatccaaatgatttctcagagccattaagtggcgacgacggttgcgaacgtacgttttataatggttatactgacagtattcaaacgagcaatgaatcctactaccagtcatggtcaatctgggatacgtaccgagccgaacattctttactcacattgttcgcacctgagcgtgtcaatggcatgatgagatcactcctgagtatcttcgattggagcggtaggctcccaatgtgggccaatatggtcgagacgaacatcatgattgctaccaatgctgatgtggttctggcaaatgctctttcacgcgggtttcgttcatttaatatcactaaggcttggactgcggtccagaaagatgcatacgtaccaccagagcgagacacagaactactctactatgacagagaaccttcgacgccctacgaggtacgagcaggtctgacaagttatttagaacatggatgggttgacaatgaccgctggtccgagtcagcatcacgaacgctcgactatgcctttaacgatgcagcctgtgctgttgtagcacgtatagctggacaagacactgtggcatctgagcttgatgtgagagccaagaattataaaaagctttggaatccggaaacacagttcatgcaggcacgcaacggcaatggatcctgggctaatgaaacctgggggtggaccgaaggcgaccaatgggtttacacattcgacgttatgcacgatattgaaggtcttgcggatctgtttcaaaatggccgcgaagggatgaaagccaagttggacgagcattttaacggcggacataatatgcacactaatgagccgtcacaccatgttccatacttgtattcgctcatcggctatccgaattcggctgcagatcgtattagagcgatagcctgggatgggtataatgccacgagccgcggactcagtgggaacgaggatcttggtcaaatgtcagcgtggtatgtcttctctgcgctgggattctaccccgtgaatccagctggcgaagaatatgtcatcggatcaccattgtttgaaaaagtaacgctacgactccccgccggtgtagcaagcggcggcgagattcaggttatcggcgactcagagagggaattggtgatatcagcgccgggagcgacaagccaatcatatgtggcagggctttcagtggatggagtggtgaagaagcgacccatactcacgcataatgatatcgtcaacgctaagctgattagtttcgagatgagcggagtgcctacttcctgggcctcaggccaagtagtgtag

SEQ ID NO: 16100 - protein, 767 aa, Muscodor strobelii
  misc_feature: SGI Peptide ID NO. 565345
  misc_feature (242)..(758): Pfam Id: PF07971 Pfam Desc: Glycosyl hydrolase family 92
  misc_feature (1)..(739): NCBI GI: 255930881 Blast Desc: Pc12g00970 [Penicillium chrysogenum Wisconsin 54-1255] gi|211581616|emb|CAP79724.1| Pc12g00970 [Penicillium chrysogenum Wisconsin 54-1255]
  misc_feature (1)..(763): NCBI GI: 229818635 Blast Desc: alpha-1,2-mannosidase [Beutenbergia cavernae DSM 12333] gi|229564548|gb|ACQ78399.1| alpha-1,2-mannosidase [Beutenbergia cavernae DSM 12333]
  misc_feature (1)..(762): NCBI GI: 58271286 Blast Desc: alpha-1,2-mannosidase [Cryptococcus neoformans var. neoformans JEC21] gi|57229058|gb|AAW45492.1| alpha-1,2-mannosidase, [Cryptococcus neoformans var. neoformans
  misc_feature (1)..(762): NCBI GI: 134114602 Blast Desc: CNBH0560 [Cryptococcus neoformans var. neoformans B-3501A] gi|50256639|gb|EAL19362.1| CNBH0560 [Cryptococcus neoformans var. neoformans B-3501A]
  misc_feature (2)..(763): NCBI GI: 71006510 Blast Desc: UM01774.1 [Ustilago maydis 521] gi|46097239|gb|EAK82472.1| UM01774.1 [Ustilago maydis 521]
  misc_feature (1)..(767): NCBI GI: 170101955 Blast Desc: glycoside hydrolase family 92 protein [Laccaria bicolor S238N-H82] gi|164643009|gb|EDR07263.1| glycoside hydrolase family 92 protein [Laccaria bicolor S238N-H82]
  misc_feature (30)..(767): NCBI GI: 169865778 Blast Desc: CC1G_06700 [Coprinopsis cinerea okayama7#130] gi|116499495|gb|EAU82390.1| CC1G_06700 [Coprinopsis cinerea okayama7#130]
  misc_feature (1)..(761): NCBI GI: 116622341 Blast Desc: alpha-1,2-mannosidase [Solibacter usitatus Ellin6076] gi|116225503|gb|ABJ84212.1| alpha-1,2-mannosidase [Candidatus Solibacter usitatus Ellin6076]
  misc_feature (1)..(763): NCBI GI: 169349600 Blast Desc: CLOSPI_00338 [Clostridium spiroforme DSM 1552] gi|169293675|gb|EDS75808.1| CLOSPI_00338 [Clostridium spiroforme DSM 1552]
  misc_feature (1)..(758): NCBI GI: 116624232 Blast Desc: alpha-1,2-mannosidase [Solibacter usitatus Ellin6076] gi|116227394|gb|ABJ86103.1| alpha-1,2-mannosidase [Candidatus Solibacter usitatus Ellin6076]
  misc_feature: Useful for introducing or modulating the production of volatile compounds
MTRWTAQTRENFISQVPYSDGDAFIHGFQATHQPAIWMGELGQMVISPSWTEEIKPAFEQRGLAFRKEDEVSTPYVYEVLLDAATEGERDFNLTEEAVGEGPVPGGAGGVPSEVSNGANGRVRKRATINEAYDRSIRVAMTALAHTSYIRLDYEDESQKCSPDLHVEPAVFVQATRQNWTGHVEIDPDRQEISGSNPERQDYLLGPDKPDSFRGYFVSRFSKPFVSYGTTKGRNISESRLSDSGESLGAYVRFHPGTTRVEIRTGISFVSVEQARKNLEIEIPDDVSFEDTIEQVKAAWLDKLGRVTIEGANATDEEHDPRTIWYTGLFHALQYPNDFSEPLSGDDGCERTFYNGYTDSIQTSNESYYQSWSIWDTYRAEHSLLTLFAPERVNGMMRSLLSIFDWSGRLPMWANMVETNIMIATNADVVLANALSRGFRSFNITKAWTAVQKDAYVPPERDTELLYYDREPSTPYEVRAGLTSYLEHGWVDNDRWSESASRTLDYAFNDAACAVVARIAGQDTVASELDVRAKNYKKLWNPETQFMQARNGNGSWANETWGWTEGDQWVYTFDVMHDIEGLADLFQNGREGMKAKLDEHFNGGHNMHTNEPSHHVPYLYSLIGYPNSAADRIRAIAWDGYNATSRGLSGNEDLGQMSAWYVFSALGFYPVNPAGEEYVIGSPLFEKVTLRLPAGVASGGEIQVIGDSERELVISAPGATSQSYVAGLSVDGVVKKRPILTHNDIVNAKLISFEMSGVPTSWASGQVV

SEQ ID NO: 16101 - DNA, 1782 bp, Muscodor strobelii
  misc_feature: SGI EST ID NO. CUFF.37991.0
  misc_feature: Variant of the nucleotide sequence at SEQ ID NO 16099
gacaagattatctcctcggtccagacaagccagattcttttagaggttactttgtttcacgattctcaaaacctttcgtatcgtacggcactactaagggacgaaacatctccgagtcaaggcttagtgacagcggagaatctcttggtgcttacgtacggtttcatccgggtacaactcgtgtcgagatccgtacaggtatttcgttcgtgagtgtcgagcaagcgcgaaagaacttagagattgagataccagacgatgtttcattcgaagacactattgaacaagtaaaagctgcgtggttggataagcttggccgagtaacgattgagggtgccaatgctaccgacgaggaacatgatccgcggacgatttggtacactgggctctttcacgctctgcaatatccaaatgatttctcagagccattaagtggcgacgacggttgcgaacgtacgttttataatggttatactgacagtattcaaacgagcaatgaatcctactaccagtcatggtcaatctgggatacgtaccgagccgaacattctttactcacattgttcgcacctgagcgtgtcaatggcatgatgagatcactcctgagtatcttcgattggagcggtaggctcccaatgtgggccaatatggtcgagacgaacatcatgattgctaccaatgctgatgtggttctggcaaatgctctttcacgcgggtttcgttcatttaatatcactaaggcttggactgcggtccagaaagatgcatacgtaccaccagagcgagacacagaactactctactatgacagagaaccttcgacgccctacgaggtacgagcaggtctgacaagttatttagaacatggatgggttgacaatgaccgctggtccgagtcagcatcacgaacgctcgactatgcctttaacgatgcagcctgtgctgttgtagcacgtatagctggacaagacactgtggcatctgagcttgatgtgagagccaagaattataaaaagctttggaatccggaaacacagttcatgcaggcacgcaacggcaatggatcctgggctaatgaaacctgggggtggaccgaaggcgaccaatgggtttacacattcgacgttatgcacgatattgaaggtcttgcggatctgtttcaaaatggccgcgaagggatgaaagccaagttggacgagcattttaacggcggacataatatgcacactaatgagccgtcacaccatgttccatacttgtattcgctcatcggctatccgaattcggctgcagatcgtattagagcgatagcctgggatgggtataatgccacgagccgcggactcagtgggaacgaggatcttggtcaaatgtcagcgtggtatgtcttctctgcgctgggattctaccccgtgaatccagctggcgaagaatatgtcatcggatcaccattgtttgaaaaagtaacgctacgactccccgccggtgtagcaagcggcggcgagattcaggttatcggcgactcagagagggaattggtgatatcagcgccgggagcgacaagccaatcatatgtggcagggctttcagtggatggagtggtgaagaagcgacccatactcacgcataatgatatcgtcaacgctaagctgattagtttcgagatgagcggagtgcctacttcctgggcctcaggccaagtagtgtagtgctcgtctttcggtagatttacaaatcgcttcaagggacattttatattaaagtgtcaaatgtatgcctctc

SEQ ID NO: 16102 - DNA, 1704 bp, Muscodor strobelii
  misc_feature: SGI cDNA ID NO. 565346
  misc_feature: Encodes the peptide sequence at SEQ ID NO 16103
atgctgaagaaaacgagacttttgaaatggagtgattggatgggaacagctccggagttcaaagttgtgttcggaaaagcgcgcggcaagggccttggcccgtcaagagacaacgaccaagctcgggttttgatcaatgaagccaatgactaccttcaaaaatgcaagaaactggcaaaaaggcttaaagccgaacgccctagtaggtgcttacttgagtcttctcaaaagcctaagctcgatccgccctcccgcgaaatctcagatcgcatggtggccatttacttccaatgtttcgaatctgtgcaccgaattcttcacgaaccaacattcatgaaggactatcatcggttttggcaatatccagacaagtctgcgcctagcgaacgcctccaaatcctccttgtcattgccttggggtgtagtctcactgaagaagcagggccagacactgagatgcgccgaaaaatagagcactgggtgtatatagtacaagcgtggttatcgggacccctagaaaaggatcgcttggatattcccggactgcaaatcaattgtcttgcaattttagctcgtcagattttctcaatcggcggagatctcgtttggatgtctatcgggtcgttggttcacagagctatgcagattggcctgcaccgcgaccctaagcatttaccatatatgtctctacttgaagctgaaactcgtagaagactctggtacacaatagtcgagatgatactgcaatcgtcgttagactccgcaatgccaccgcgtatcgcactggatgactttgatacggaggtgccatccaacatcaatgacaacgaaatagaggaatcatcaacggcactacgtccgcatccgaagggcttgtatacatctaccgcactccaacttcagctcattgaatctctccccattagactccgtgttgtccagcttctgaacgggctacattcagagttgctttacgctgatgttctagcgctgaacaccgagatccaagatgcatgtcgctccgggcaaaagttcgatagagataacaaggacacaggtgtcacggtgttccacagtaatcttcgtgacttttccatacgccggtttttactccctttacactatccattcgcttgcgaagcggttgaaaatcctttatttcttttctcaaagaagatcacacttgaggtcgcattacgtataatcgaaccagagcctgacaataaattctcacggctcgtggcaattggtggaggcatgttcaaagagggactaagatgcgcgactggtgttgtcagtctccaattactacaggagatcgaggagcaaaggcttgatgggacgctgcatagaccctcgcagcgtcttggacttattcgacaagcttttgaaactattattgcaatctcttgggagcggattcgacagggcgagacaaacattaagtctcccatgttcttgagcatgaccctcgccgcggccgattacacccagagggatgcttcgagcgattatcaaatggcgaaaagcgcaagagatactctcgtcctttgccacaatctattagaatcgagaataaacgccttgccgggtgttacgtctaccgactggacatttggctcggataccgtcggcaccacgccagaggattatggcctcgatttcaatctaaatctcttctttccagaaatgggattttcctga

SEQ ID NO: 16103 - protein, 567 aa, Muscodor strobelii
  misc_feature: SGI Peptide ID NO. 565346
  misc_feature (178)..(276): Pfam Id: PF04082 Pfam Desc: Fungal specific transcription factor domain
  misc_feature (1)..(566): NCBI GI: 119490839 Blast Desc: C6 zinc finger domain protein [Neosartorya fischeri NRRL 181] gi|119411276|gb|EAW21219.1| C6 zinc finger domain protein [Neosartorya fischeri NRRL 181]
  misc_feature (1)..(437): NCBI GI: 256723200 Blast Desc: NECHADRAFT_14180 [Nectria haematococca mpVI 77-13-4]
  misc_feature (1)..(437): NCBI GI: 116192309 Blast Desc: CHGG_05872 [Chaetomium globosum CBS 148.51] gi|88181785|gb|EAQ89253.1| CHGG_05872 [Chaetomium globosum CBS 148.51]
  misc_feature (2)..(526): NCBI GI: 242811777 Blast Desc: conserved [Talaromyces stipitatus ATCC 10500] gi|218714159|gb|EED13582.1| conserved [Talaromyces stipitatus ATCC 10500]
  misc_feature (2)..(530): NCBI GI: 242823923 Blast Desc: conserved [Talaromyces stipitatus ATCC 10500] gi|218713078|gb|EED12503.1| conserved [Talaromyces stipitatus ATCC 10500]
  misc_feature (2)..(557): NCBI GI: 156045269 Blast Desc: SS1G_09823 [Sclerotinia sclerotiorum 1980] gi|154694218|gb|EDN93956.1| SS1G_09823 [Sclerotinia sclerotiorum 1980]
  misc_feature (2)..(526): NCBI GI: 240276012 Blast Desc: C6 zinc finger protein [Ajellomyces capsulatus H143]
  misc_feature (1)..(554): NCBI GI: 258576025 Blast Desc: [Uncinocarpus reesii 1704] gi|237902460|gb|EEP76861.1| [Uncinocarpus reesii 1704]
  misc_feature (1)..(566): NCBI GI: 119485795 Blast Desc: C6 transcription factor, [Neosartorya fischeri NRRL 181] gi|119410396|gb|EAW20343.1| C6 transcription factor, [Neosartorya fischeri NRRL 181]
  misc_feature (46)..(525): NCBI GI: 225563411 Blast Desc: C6 zinc finger domain-containing protein [Ajellomyces capsulatus G186AR]
MLKKTRLLKWSDWMGTAPEFKVVFGKARGKGLGPSRDNDQARVLINEANDYLQKCKKLAKRLKAERPSRCLLESSQKPKLDPPSREISDRMVAIYFQCFESVHRILHEPTFMKDYHRFWQYPDKSAPSERLQILLVIALGCSLTEEAGPDTEMRRKIEHWVYIVQAWLSGPLEKDRLDIPGLQINCLAILARQIFSIGGDLVWMSIGSLVHRAMQIGLHRDPKHLPYMSLLEAETRRRLWYTIVEMILQSSLDSAMPPRIALDDFDTEVPSNINDNEIEESSTALRPHPKGLYTSTALQLQLIESLPIRLRVVQLLNGLHSELLYADVLALNTEIQDACRSGQKFDRDNKDTGVTVFHSNLRDFSIRRFLLPLHYPFACEAVENPLFLFSKKITLEVALRIIEPEPDNKFSRLVAIGGGMFKEGLRCATGVVSLQLLQEIEEQRLDGTLHRPSQRLGLIRQAFETIIAISWERIRQGETNIKSPMFLSMTLAAADYTQRDASSDYQMAKSARDTLVLCHNLLESRINALPGVTSTDWTFGSDTVGTTPEDYGLDFNLNLFFPEMGFS

SEQ ID NO: 16104 - DNA, 1090 bp, Muscodor strobelii
  misc_feature: SGI EST ID NO. CUFF.37997.0
  misc_feature: Variant of the nucleotide sequence at SEQ ID NO 16102
ataagcggcaaattgcgcgtgggctcggccttttccccgagagccatcttcttatatgggtttttttcttcaaaattgtatttgccgaattcaccgtctgtatcattcaattatcttaccaatttgctcctaatggccgaggaagaaccacagcgcctccgtcgccggccagctctgtcgtgccaaccctgcagacgtcgcaaagtaaagtgtgaccgtggcaacccatgcgcacgatgtgtctccattcagactcagtgtaaatacaggacgagtgacagagagcatccgatccggcaagacattacgcaggatagagctagagagtcacttgcaagtcctcaagctgcttcaactccaactactactcaaaccccatcttttcaccccctatttcatcctttcagtaacaacacagatcagttagcaattgagaatggaattcagtcaccttcctcagacaatcacgaaatcgcctctataggtcacatcggaagtccaatcctccaacatcatgctgctccgttgacccgcgccccgaaagcgtccaccaaccttcgagatacatgcaaaatagttcaaaatcttgaagaacaatcagctcctactaatataaccgagctggcgacaccggcaagaagcatattagaaagccgcgctggtctaacaaggtctcaaataatgctgaagaaaacgagacttttgaaatggagtgattggatgggaacagctccggagttcaaagttgtgttcggaaaagcgcgcggcaagggccttggcccgtcaagagacaacgaccaagctcgggttttgatcaatgaagccaatgactaccttcaaaaatgcaagaaactggcaaaaaggcttaaagccgaacgccctagtaggtgcttacttgagtcttctcaaaagcctaagctcgatccgccctcccgcgaaatctcagatcgcatggtggccatttacttccaatgtttcgaatctgtgcaccgaattcttcacgaaccaacattcatgaaggactatcatcggttttggcaatatccagacaagtctgcgcctagcgaacgcctccaaatcctccttgtaa

SEQ ID NO: 16105 - DNA, 1263 bp, Muscodor strobelii
  misc_feature: SGI cDNA ID NO. 565347
  misc_feature: Encodes the peptide sequence at SEQ ID NO 16106
atggcaccactcaaagttcttattagtggtggtgggattggtggtaccgccttagcattctggctttcgaagatcggtcacaatgtgaccgttgttgagagatattctactttaagagccactgggttgcaagtggatcttagagggcacggtatcgaagttttcaatcgcatgggtctccaagaagcttcgaaggcaatcatggcaccagaagaaggcatacaactggtggacaagcacggtaaaactaaagctttctttccgcgaaacgagtcggggtctggaacgcagaatttcaccagcgagtttgaaatcatgcgtggcgacttatgccaactcatgtacaatgagagcaaggaacgaaccagatacattttcggaaactcaatcaagagccttgcggacgatggaaactcggtcgacgtctccttcgcggatgggtcagaagagactttcgatctcgtggtgggagccgacgggctcaactcgcgtacgcgaaccatgatgctcggtggttcaaaagattacggacttgagccccttgacgggatctgtgtcggctatttcaccatgcctaagcaaatgaaaacaggagagcagtacctggcgaccgtctatatggcacccggaaatagaggatacatggtgcgaagggctcatcctgacaaagtccaggtatatatcggtggcaaaacgcatgtcttcgacaaggttccacggaataatacaaaagcagagaaagcagtcatgaccgaattattccaggggacgggctggcaaactgatgagcttttgaaatctttgaatacagacaacgacttttaccttgagcgaatggccctggtgaagttggatcgttggtaccgtggcaacgtggcactgactggcgatgcggcttggtgtcctacggcgaacacaggaatgggcactacttgtgctatagttggtgcatatatgcttgctggcgagatcagcaaattctgtggacgaggtgacactgccgccaaccctaaagacaacctctccaaggcgctcgcagcgtacgattccaactttcgtcccttcatggaccaagtccaaaaggggattaaggccgataccgggttcgggagttcgcttctcggtacttcaatcggggtgtcgctggtttaccttttcatgggaatcttgtcttttttcaaagtcaacgtcggtgctatgtttctcaaggaagaaattcaagactgggatctgccagattatgaggagttgcttcgcaaatga

SEQ ID NO: 16106 - protein, 420 aa, Muscodor strobelii
  misc_feature: SGI Peptide ID NO. 565347
  misc_feature (3)..(363): Pfam Id: PF01494 Pfam Desc: FAD binding domain
  misc_feature (5)..(34): Pfam Id: PF01266 Pfam Desc: FAD dependent oxidoreductase
  misc_feature (1)..(417): NCBI GI: 115388779 Blast Desc: conserved [Aspergillus terreus NIH2624] gi|114195979|gb|EAU37679.1| conserved [Aspergillus terreus NIH2624]
  misc_feature (1)..(420): NCBI GI: 256723201 Blast Desc: NECHADRAFT_86442 [Nectria haematococca mpVI 77-13-4]
  misc_feature (1)..(417): NCBI GI: 119485797 Blast Desc: FAD binding domain protein [Neosartorya fischeri NRRL 181] gi|119410397|gb|EAW20344.1| FAD binding domain protein [Neosartorya fischeri NRRL 181]
  misc_feature (1)..(417): NCBI GI: 169765404 Blast Desc: [Aspergillus oryzae RIB40] gi|83765028|dbj|BAE55171.1| protein product [Aspergillus oryzae]
  misc_feature (4)..(417): NCBI GI: 116192311 Blast Desc: CHGG_05873 [Chaetomium globosum CBS 148.51] gi|88181786|gb|EAQ89254.1| CHGG_05873 [Chaetomium globosum CBS 148.51]
  misc_feature (1)..(417): NCBI GI: 238481945 Blast Desc: monooxygenase, [Aspergillus flavus NRRL3357] gi|220700261|gb|EED56599.1| monooxygenase, [Aspergillus flavus NRRL3357]
  misc_feature (1)..(415): NCBI GI: 238507984 Blast Desc: monoxygenase, [Aspergillus flavus NRRL3357] gi|220688712|gb|EED45064.1| monoxygenase, [Aspergillus flavus NRRL3357]
  misc_feature (1)..(414): NCBI GI: 145250465 Blast Desc: An15g02070 [Aspergillus niger] gi|134082266|emb|CAK42310.1| protein product [Aspergillus niger]
  misc_feature (1)..(415): NCBI GI: 169784792 Blast Desc: [Aspergillus oryzae RIB40] gi|83775604|dbj|BAE65724.1| protein product [Aspergillus oryzae]
  misc_feature (1)..(417): NCBI GI: 67522729 Blast Desc: AN1821.2 [Aspergillus nidulans FGSC A4] gi|40745830|gb|EAA64986.1| AN1821.2 [Aspergillus nidulans FGSC A4] gi|259487169|tpe|CBF85628.1| TPA: FAD-binding monooxygenase,
  misc_feature (4)..(393): SWISSPROT Homolog: EC 1.14.13.90 Zeaxanthin epoxidase
MAPLKVLISGGGIGGTALAFWLSKIGHNVTVVERYSTLRATGLQVDLRGHGIEVFNRMGLQEASKAIMAPEEGIQLVDKHGKTKAFFPRNESGSGTQNFTSEFEIMRGDLCQLMYNESKERTRYIFGNSIKSLADDGNSVDVSFADGSEETFDLVVGADGLNSRTRTMMLGGSKDYGLEPLDGICVGYFTMPKQMKTGEQYLATVYMAPGNRGYMVRRAHPDKVQVYIGGKTHVFDKVPRNNTKAEKAVMTELFQGTGWQTDELLKSLNTDNDFYLERMALVKLDRWYRGNVALTGDAAWCPTANTGMGTTCAIVGAYMLAGEISKFCGRGDTAANPKDNLSKALAAYDSNFRPFMDQVQKGIKADTGFGSSLLGTSIGVSLVYLFMGILSFFKVNVGAMFLKEEIQDWDLPDYEELLRK

SEQ ID NO: 16107 - DNA, 975 bp, Muscodor strobelii
  misc_feature: SGI EST ID NO. CUFF.38012.0
  misc_feature: Variant of the nucleotide sequence at SEQ ID NO 16105
caaaagcagagaaagcagtcatgaccgaattattccaggggacgggctggcaaactgatgagcttttgaaatctttgaatacagacaacgacttttaccttgagcgaatggccctggtgaagttggatcgttggtaccgtggcaacgtggcactgactggcgatgcggcttggtgtcctacggcgaacacaggaatgggcactacttgtgctatagttggtgcatatatgcttgctggcgagatcagcaaattctgtggacgaggtgacactgccgccaaccctaaagacaacctctccaaggcgctcgcagcgtacgattccaactttcgtcccttcatggaccaagtccaaaaggggattaaggccgataccgggttcgggagttcgcttctcggtacttcaatcggggtgtcgctggtttaccttttcatgggaatcttgtcttttttcaaagtcaacgtcggtgctatgtttctcaaggaagaaattcaagactgggatctgccagattatgaggagttgcttcgcaaatgatcgacttcattggattgaagaagtgcaatctctccgctctatgcgcctgttagaagatagatgtaaatgacatgtatattagaccggatgtgctggagggcggccacaatgtattattacatttcttttcccaaatcccattttgaagggcgtacctcccgtaatttaatccgcaactccctgcgatgcatctatgacatgttcgatcgaatttgaactagggtgaggcttgttcatcaatttctatcattaaccatcactgtgcgtgtgaggtatgcatcccatccatccttgcggtattgctttgctgcctcgacaggatctgcagccgcataaatgcctcgaccagcaataacgaaatcagcaccttgctcgacaacattggcgggcgtcttgtactgctggccaagaggatcacctttgttcgccatattgacac

SEQ ID NO: 16108 - DNA, 873 bp, Muscodor strobelii
  misc_feature: SGI cDNA ID NO. 565348
  misc_feature: Encodes the peptide sequence at SEQ ID NO 16109
atggcgtcaaaatctcatttgacgtacgccgagcgaagcgagaaacactcaaaccctctcgtgaaacgtctcttcagcattgccgaggcgaagaagacaaacttagtagtctcagccgatttaacgactactaaagatcttctaaaatgcgcgaacgatctgggtccttacatcgcggtcttcaaaacccatatcgacatcatttcggacttcagcaaagagacctcagacggcttgcaagccttgtccaagaagcatgatttcttgattttcgaagatcgcaagttgatggatattggacacacggtgcagaggcagtatcatcagggcgcactgcgaatttcggaatgggcacatgtaagtattatgtcgctcaaatatcaagcccggattgtcaacttcagcgtactccctggtgacggcatagtcgacgccctaaaccagacgattgaagatcctagcttcccaaatcgcgacgagagaggttttctcattctcgctgaaatgacctcaaagggcagcctcgcgactggatcatacacccagaagagcatcgagttagctaggaagagtcctcgatctataattggatttgtggccttgcagtcccttactgatgtcgccaaaagcggtgcatctcctgacgaagacttcgtgctattcacgacgggtgtcaatatggcgaacaaaggtgatcctcttggccagcagtacaagacgcccgccaatgttgtcgagcaaggtgctgatttcgttattgctggtcgaggcatttatgcggctgcagatcctgtcgaggcagcaaagcaataccgcaaggatggatgggatgcatacctcacacgcacagtgatggttaatgatagaaattga

SEQ ID NO: 16109 - protein, 290 aa, Muscodor strobelii
  misc_feature: SGI Peptide ID NO. 565348
  misc_feature (33)..(271): Pfam Id: PF00215 Pfam Desc: Orotidine 5'-phosphate decarboxylase / HUMPS family
  misc_feature (1)..(282): NCBI GI: 74696878 Blast Desc: PYRF_PENCA RecName: Full=Orotidine 5'-phosphate decarboxylase; AltName: Full=OMP decarboxylase; Short=OMPdecase; Short=OMPDCase; AltName: Full=Uridine 5'-monophosphate synthase;
  misc_feature (1)..(282): NCBI GI: 119480631 Blast Desc: orotidine 5'-phosphate decarboxylase PyrG [Neosartorya fischeri NRRL 181] gi|119408498|gb|EAW18447.1| orotidine 5'-phosphate decarboxylase PyrG [Neosartorya fischeri NRRL 181]
  misc_feature (1)..(282): NCBI GI: 255935701 Blast Desc: orotidine 5-phosphate decarboxylase pyrG-Penicillium chrysogenum [Penicillium chrysogenum Wisconsin 54-1255] gi|211583497|emb|CAP91511.1| orotidine 5-phosphate decarboxylase
  misc_feature (1)..(282): NCBI GI: 190888776 Blast Desc: orotidine-5'-monophosphate decarboxylase [Penicillium camemberti]
  misc_feature (1)..(282): NCBI GI: 74697294 Blast Desc: PYRF_PENNA RecName: Full=Orotidine 5'-phosphate decarboxylase; AltName: Full=OMP decarboxylase; Short=OMPdecase; Short=OMPDCase; AltName: Full=Uridine 5'-monophosphate synthase;
  misc_feature (1)..(282): NCBI GI: 118365 Blast Desc: PYRF_PENCH RecName: Full=Orotidine 5'-phosphate decarboxylase; AltName: Full=OMP decarboxylase; Short=OMPdecase; Short=OMPDCase; AltName: Full=Uridine 5'-monophosphate synthase;
  misc_feature (1)..(284): NCBI GI: 71000978 Blast Desc: orotidine 5'-phosphate decarboxylase PyrG [Aspergillus fumigatus Af293] gi|3929346|sp|O13410.1|PYRF_ASPFU RecName: Full=Orotidine 5'-phosphate decarboxylase; AltName: Full=OMP PYRG
  misc_feature (1)..(282): NCBI GI: 118356 Blast Desc: PYRF_ASPNG RecName: Full=Orotidine 5'-phosphate decarboxylase; AltName: Full=OMP decarboxylase; Short=OMPdecase; Short=OMPDCase; AltName: Full=Uridine 5'-monophosphate synthase;
  misc_feature (1)..(282): NCBI GI: 74681665 Blast Desc: PYRF_ASPAW RecName: Full=Orotidine 5'-phosphate decarboxylase; AltName: Full=OMP decarboxylase; Short=OMPdecase; Short=OMPDCase; AltName: Full=Uridine 5'-monophosphate synthase;
  misc_feature (1)..(282): NCBI GI: 74697997 Blast Desc: PYRF_ASPKA RecName: Full=Orotidine 5'-phosphate decarboxylase; AltName: Full=OMP decarboxylase; Short=OMPdecase; Short=OMPDCase; AltName: Full=Uridine 5'-monophosphate synthase;
  misc_feature (1)..(282): SWISSPROT Homolog: EC 4.1.1.23 Orotidine-5'-phosphate decarboxylase
MASKSHLTYAERSEKHSNPLVKRLFSIAEAKKTNLVVSADLTTTKDLLKCANDLGPYIAVFKTHIDIISDFSKETSDGLQALSKKHDFLIFEDRKLMDIGHTVQRQYHQGALRISEWAHVSIMSLKYQARIVNFSVLPGDGIVDALNQTIEDPSFPNRDERGFLILAEMTSKGSLATGSYTQKSIELARKSPRSIIGFVALQSLTDVAKSGASPDEDFVLFTTGVNMANKGDPLGQQYKTPANVVEQGADFVIAGRGIYAAADPVEAAKQYRKDGWDAYLTRTVMVNDRN

SEQ ID NO: 16110 - DNA, 885 bp, Muscodor strobelii
  misc_feature: SGI cDNA ID NO. 565349
  misc_feature: Encodes the peptide sequence at SEQ ID NO 16111
atggcgtcaaaatctcatttgacgtacgccgagcgaagcgagaaacactcaaaccctctcgtgaaacgtctcttcagcattgccgaggcgaagaagacaaacttagtagtctcagccgatttaacgactactaaagatcttctaaaatgcgcgaacgatctgggtccttacatcgcggtcttcaaaacccatatcgacatcatttcggacttcagcaaagagacctcagacggcttgcaagccttgtccaagaagcatgatttcttgattttcgaagatcgcaagttgatggatattggacacacggtgcagaggcagtatcatcagggcgcactgcgaatttcggaatgggcacatgtaagtattatgtcgctcaaatatcaagcccgggtctttgactcgattgtcaacttcagcgtactccctggtgacggcatagtcgacgccctaaaccagacgattgaagatcctagcttcccaaatcgcgacgagagaggttttctcattctcgctgaaatgacctcaaagggcagcctcgcgactggatcatacacccagaagagcatcgagttagctaggaagagtcctcgatctataattggatttgtggccttgcagtcccttactgatgtcgccaaaagcggtgcatctcctgacgaagacttcgtgctattcacgacgggtgtcaatatggcgaacaaaggtgatcctcttggccagcagtacaagacgcccgccaatgttgtcgagcaaggtgctgatttcgttattgctggtcgaggcatttatgcggctgcagatcctgtcgaggcagcaaagcaataccgcaaggatggatgggatgcatacctcacacgcacagtgatggttaatgatagaaattga

SEQ ID NO: 16111 - protein, 294 aa, Muscodor strobelii
  misc_feature: SGI Peptide ID NO. 565349
  misc_feature (33)..(275): Pfam Id: PF00215 Pfam Desc: Orotidine 5'-phosphate decarboxylase / HUMPS family
  misc_feature (135)..(275): Pfam Id: PF00215 Pfam Desc: Orotidine 5'-phosphate decarboxylase / HUMPS family
  misc_feature (33)..(119): Pfam Id: PF00215 Pfam Desc: Orotidine 5'-phosphate decarboxylase / HUMPS family
  misc_feature (1)..(286): NCBI GI: 74696878 Blast Desc: PYRF_PENCA RecName: Full=Orotidine 5'-phosphate decarboxylase; AltName: Full=OMP decarboxylase; Short=OMPdecase; Short=OMPDCase; AltName: Full=Uridine 5'-monophosphate synthase;
  misc_feature (1)..(286): NCBI GI: 119480631 Blast Desc: orotidine 5'-phosphate decarboxylase PyrG [Neosartorya fischeri NRRL 181] gi|119408498|gb|EAW18447.1| orotidine 5'-phosphate decarboxylase PyrG [Neosartorya fischeri NRRL 181]
  misc_feature (1)..(286): NCBI GI: 255935701 Blast Desc: orotidine 5-phosphate decarboxylase pyrG-Penicillium chrysogenum [Penicillium chrysogenum Wisconsin 54-1255] gi|211583497|emb|CAP91511.1| orotidine 5-phosphate decarboxylase
  misc_feature (1)..(286): NCBI GI: 190888776 Blast Desc: orotidine-5'-monophosphate decarboxylase [Penicillium camemberti]
  misc_feature (1)..(286): NCBI GI: 74697294 Blast Desc: PYRF_PENNA RecName: Full=Orotidine 5'-phosphate decarboxylase; AltName: Full=OMP decarboxylase; Short=OMPdecase; Short=OMPDCase; AltName: Full=Uridine 5'-monophosphate synthase;
  misc_feature (1)..(286): NCBI GI: 118365 Blast Desc: PYRF_PENCH RecName: Full=Orotidine 5'-phosphate decarboxylase; AltName: Full=OMP decarboxylase; Short=OMPdecase; Short=OMPDCase; AltName: Full=Uridine 5'-monophosphate synthase;
  misc_feature (1)..(288): NCBI GI: 71000978 Blast Desc: orotidine 5'-phosphate decarboxylase PyrG [Aspergillus fumigatus Af293] gi|3929346|sp|O13410.1|PYRF_ASPFU RecName: Full=Orotidine 5'-phosphate decarboxylase; AltName: Full=OMP PYRG
  misc_feature (1)..(286): NCBI GI: 118356 Blast Desc: PYRF_ASPNG RecName: Full=Orotidine 5'-phosphate decarboxylase; AltName: Full=OMP decarboxylase; Short=OMPdecase; Short=OMPDCase; AltName: Full=Uridine 5'-monophosphate synthase;
  misc_feature (1)..(286): NCBI GI: 74681665 Blast Desc: PYRF_ASPAW RecName: Full=Orotidine 5'-phosphate decarboxylase; AltName: Full=OMP decarboxylase; Short=OMPdecase; Short=OMPDCase; AltName: Full=Uridine 5'-monophosphate synthase;
  misc_feature (1)..(286): NCBI GI: 74697997 Blast Desc: PYRF_ASPKA RecName: Full=Orotidine 5'-phosphate decarboxylase; AltName: Full=OMP decarboxylase; Short=OMPdecase; Short=OMPDCase; AltName: Full=Uridine 5'-monophosphate synthase;
  misc_feature (1)..(286): SWISSPROT Homolog: EC 4.1.1.23 Orotidine-5'-phosphate decarboxylase
MASKSHLTYAERSEKHSNPLVKRLFSIAEAKKTNLVVSADLTTTKDLLKCANDLGPYIAVFKTHIDIISDFSKETSDGLQALSKKHDFLIFEDRKLMDIGHTVQRQYHQGALRISEWAHVSIMSLKYQARVFDSIVNFSVLPGDGIVDALNQTIEDPSFPNRDERGFLILAEMTSKGSLATGSYTQKSIELARKSPRSIIGFVALQSLTDVAKSGASPDEDFVLFTTGVNMANKGDPLGQQYKTPANVVEQGADFVIAGRGIYAAADPVEAAKQYRKDGWDAYLTRTVMVNDRN

SEQ ID NO: 16112 - DNA, 2187 bp, Muscodor strobelii
  misc_feature: SGI cDNA ID NO. 565350
  misc_feature: Reduced expression when VOC is produced
  misc_feature: Encodes the peptide sequence at SEQ ID NO 16113
atggatcacaccgctcggatcctcgagtcggcacacgagctctacgctcgtgagggcatcacgggcggggataattcaagtcggcctgcgagttacaaggccattggtatcagcttggctgtcggctccgggatcttcatcggaacctcgttcgtgctcaaaaaggtcggcctgctgaaagccaacgagaagtacaaggaggctgcaggcgaaggctatagctacctcaagaactggctttggtggtcgggcatgagcttgatgattctaggcgaagtcttgaattttgttgcttatgcttttaccgaagccattctcgtcacgtccttgggagctctatcggttgtaatttgtacggtactttcagccatcttcctaaaggagagactgagtctcgtcggcaaggttgcctgcttcctttgcatcgtgggatccgtcatcatcgttcttaatgcgcccgagcaatcgtctgtgtccaccattcaggagatgcaacactatgtcattgcacctggattcctctcgtatactggcgtcatcatccttggcgccttattcctcgctttctgggttgggcctcggtatggcaagaagaacatgttcacgtacatatccatctgcagttgggtaggtggtttgagtgttgtggctacccaaggtctgggtgcagccatagtcgcccagattggggggacgcctcagttcaatcagtggttcctctatgtacttctcgtctttgtcgttgggactctactgaccgaaatcgtttttctcaataaagcgttgaatttgtttaatgcggctatggtcactccaacctattatgtctattttacaagcactaccataataacgtctgctgtattattcagaggcttcaaagggaccgcgacggagatcatcacagtggtctttggcttcctgaccatttgttctggtgtcattctgctgcagctttcgaagtctgcgaaagacgtgccagatactgccgtatttgccggtgatctgaaccagattcatactatcgccgagcaagagcagcccgagactgagcctaaagcagacgcgcttcgcggcacagcggccatattgcgacgaatctctactgtgcggccgaaaatggaggtcgaggagttcaagcgtctgcgcgaggagaaagagatggaacagcttgcaacagtgagcgaggatggtcaagagcaatacgaatgggacggcctacggaggaggagaacgacaataggaagtcaaaggagccgtcctttcacggctccaagtcctgccaacacgcctcatttgcccttgggccggacgcgaccgttgacggaggaagaactcgaagaggaaaggagcagtcaaacttctccaggcgttttgactagcatcgcaggcactattcggacacgcgcccgtagtattttgcctcggagccaagatagcaatctatcgatggagaaccagagtccaatgcatcccgtgcagctgactcagatttcagtaccgggccaaaattacgataacgaggctggtccacatggtagctatgggctgccaaacgacacatataagaccgagtacagtggcgccggcagcgtcgcctcgagaagcaccgatcgccatatccacttttccgacacaccgaagccaagtgctagtagcgcgtcgctcgttccgccgacacctcctccacacggggagaatcctcgcgcagcacgtcggcaattctcgttccagaatgtgttccgtcggcatcaagctgacagagcacaggatccagaaatgcctacgtctcacgcgaatccccttcgtcacggaatgggtgcgaggggccactcggatcggagcctgaaggtgaaaaatgcaaccgaagaagagaggctgggactggttaagggcgactcgcattcgatgccagcattgccacactatgatgaagagtcggacgacatgaatgacgacaatgactattactcagacgagaagcgttcgtcgaaatatggtagaggcatcacgggtagcccacctcggcggggaagtgacgatgagaaggcggaagaagcaatgtacgagcagagccggaggagatggcatgatagccaaagcggaagcagacatggttccccggggagctcaccaccacctggccgccataacgcaccacgcggcggcgatggagcgtttctttaa

SEQ ID NO: 16113 - protein, 728 aa, Muscodor strobelii
  misc_feature: SGI Peptide ID NO. 565350
  misc_feature (29)..(327): Pfam Id: PF05653 Pfam Desc: Domain of function (DUF803)
  misc_feature (93)..(150): Pfam Id: PF00892 Pfam Desc: Integral membrane protein DUF6
  misc_feature (35)..(327): Pfam Id: PF05653 Pfam Desc: Domain of function (DUF803)
  misc_feature (1)..(701): NCBI GI: 171691268 Blast Desc: protein product [Podospora anserina] gi|170945582|emb|CAP71695.1| protein product [Podospora anserina]
  misc_feature (8)..(728): NCBI GI: 145612027 Blast Desc: MGG_08036 [Magnaporthe grisea 70-15] gi|145019272|gb|EDK03500.1| MGG_08036 [Magnaporthe grisea 70-15]
  misc_feature (28)..(703): NCBI GI: 116195292 Blast Desc: CHGG_04244 [Chaetomium globosum CBS 148.51] gi|88180157|gb|EAQ87625.1| CHGG_04244 [Chaetomium globosum CBS 148.51]
  misc_feature (1)..(677): NCBI GI: 156062480 Blast Desc: SS1G_01356 [Sclerotinia sclerotiorum 1980] gi|154696692|gb|EDN96430.1| SS1G_01356 [Sclerotinia sclerotiorum 1980]
  misc_feature (1)..(676): NCBI GI: 40882162 Blast Desc: conserved [Neurospora crassa]
  misc_feature (1)..(668): NCBI GI: 164429406 Blast Desc: NCU04457 [Neurospora crassa OR74A] gi|157073466|gb|EAA27790.2| NCU04457 [Neurospora crassa OR74A]
  misc_feature (13)..(634): NCBI GI: 256726806 Blast Desc: NECHADRAFT_33416 [Nectria haematococca mpVI 77-13-4]
  misc_feature (1)..(650): NCBI GI: 212532659 Blast Desc: DUF803 domain membrane protein [Penicillium marneffei ATCC 18224] gi|210071850|gb|EEA25939.1| DUF803 domain membrane protein [Penicillium marneffei ATCC 18224]
  misc_feature (1)..(650): NCBI GI: 242776130 Blast Desc: DUF803 domain membrane protein [Talaromyces stipitatus ATCC 10500] gi|218722403|gb|EED21821.1| DUF803 domain membrane protein [Talaromyces stipitatus ATCC 10500]
  misc_feature (13)..(639): NCBI GI: 46136315 Blast Desc: FG09673.1 [Gibberella zeae PH-1]
  misc_feature: Useful for introducing or modulating the production of volatile compounds
MDHTARILESAHELYAREGITGGDNSSRPASYKAIGISLAVGSGIFIGTSFVLKKVGLLKANEKYKEAAGEGYSYLKNWLWWSGMSLMILGEVLNFVAYAFTEAILVTSLGALSVVICTVLSAIFLKERLSLVGKVACFLCIVGSVIIVLNAPEQSSVSTIQEMQHYVIAPGFLSYTGVIILGALFLAFWVGPRYGKKNMFTYISICSWVGGLSVVATQGLGAAIVAQIGGTPQFNQWFLYVLLVFVVGTLLTEIVFLNKALNLFNAAMVTPTYYVYFTSTTIITSAVLFRGFKGTATEIITVVFGFLTICSGVILLQLSKSAKDVPDTAVFAGDLNQIHTIAEQEQPETEPKADALRGTAAILRRISTVRPKMEVEEFKRLREEKEMEQLATVSEDGQEQYEWDGLRRRRTTIGSQRSRPFTAPSPANTPHLPLGRTRPLTEEELEEERSSQTSPGVLTSIAGTIRTRARSILPRSQDSNLSMENQSPMHPVQLTQISVPGQNYDNEAGPHGSYGLPNDTYKTEYSGAGSVASRSTDRHIHFSDTPKPSASSASLVPPTPPPHGENPRAARRQFSFQNVFRRHQADRAQDPEMPTSHANPLRHGMGARGHSDRSLKVKNATEEERLGLVKGDSHSMPALPHYDEESDDMNDDNDYYSDEKRSSKYGRGITGSPPRRGSDDEKAEEAMYEQSRRRWHDSQSGSRHGSPGSSPPPGRHNAPRGGDGAFL

SEQ ID NO: 16114 - DNA, 3393 bp, Muscodor strobelii
  misc_feature: SGI EST ID NO. CUFF.38040.0
  misc_feature: Variant of the nucleotide sequence at SEQ ID NO 16112
gcttgggctggtttcttctcttctcctcccaatactgtatgtactacatcattcattctcttccagttgagagccatgatgatttcagcacactagttttcagtacactagtgatcgtgtcttgcgatacacgcccagtcgctcggctctttgttgtctaaatcgcccccagaataacattgatacatcgccaatcaacgagcattggcggctacctcaaccacacgcagccgcccccaagcctgcaccattccaacgactgttgtttctgtttcaggacgctacatcccccccaaacgaccacgccaacttccattaatgaccagtcacgatttcactgaaagtgctttgctgaaaccagtaattcgtcgatcctaagaacgatctcctctacacgcctccccataccgataccttaccgacaccctgtaactggcgaacaccctttcgccgatctcatgaaccgatcgcattagtttgtcggccattatcattatacctgcgcctgtcgtccctacctggaaacgtcacctgccatcgccattgccatcaccctcatccaaaccctgagccccggaagcttagaaacgagacaccatagttcaaacctcgacgaacctgtttgaatttttacttacgaaatcttaaataccagcatatatagaaccaacagtgcgggcagtcgtacccacttgacaggcgacgacccccgtcgttgtcctcgtcgtagccaccgccaccgccaatatggatcacaccgctcggatcctcgagtcggcacacgagctctacgctcgtgagggcatcacgggcggggataattcaagtcggcctgcgagttacaaggccattggtatcagcttggctgtcggctccgggatcttcatcggaacctcgttcgtgctcaaaaaggtcggcctgctgaaagccaacgagaagtacaaggaggctgcaggcgaaggctatagctacctcaagaactggctttggtggtcgggcatgagcttgatgattctaggcgaagtcttgaattttgttgcttatgcttttaccgaagccattctcgtcacgtccttgggagctctatcggttgtaatttgtacggtactttcagccatcttcctaaaggagagactgagtctcgtcggcaaggttgcctgcttcctttgcatcgtgggatccgtcatcatcgttcttaatgcgcccgagcaatcgtctgtgtccaccattcaggagatgcaacactatgtcattgcacctggattcctctcgtatactggcgtcatcatccttggcgccttattcctcgctttctgggttgggcctcggtatggcaagaagaacatgttcacgtacatatccatctgcagttgggtaggtggtttgagtgttgtggctacccaaggtctgggtgcagccatagtcgcccagattggggggacgcctcagttcaatcagtggttcctctatgtacttctcgtctttgtcgttgggactctactgaccgaaatcgtttttctcaataaagcgttgaatttgtttaatgcggctatggtcactccaacctattatgtctattttacaagcactaccataataacgtctgctgtattattcagaggcttcaaagggaccgcgacggagatcatcacagtggtctttggcttcctgaccatttgttctggtgtcattctgctgcagctttcgaagtctgcgaaagacgtgccagatactgccgtatttgccggtgatctgaaccagattcatactatcgccgagcaagagcagcccgagactgagcctaaagcagacgcgcttcgcggcacagcggccatattgcgacgaatctctactgtgcggccgaaaatggaggtcgaggagttcaagcgtctgcgcgaggagaaagagatggaacagcttgcaacagtgagcgaggatggtcaagagcaatacgaatgggacggcctacggaggaggagaacgacaataggaagtcaaaggagccgtcctttcacggctccaagtcctgccaacacgcctcatttgcccttgggccggacgcgaccgttgacggaggaagaactcgaagaggaaaggagcagtcaaacttctccaggcgttttgactagcatcgcaggcactattcggacacgcgcccgtagtattttgcctcggagccaagatagcaatctatcgatggagaaccagagtccaatgcatcccgtgcagctgactcagatttcagtaccgggccaaaattacgataacgaggctggtccacatggtagctatgggctgccaaacgacacatataagaccgagtacagtggcgccggcagcgtcgcctcgagaagcaccgatcgccatatccacttttccgacacaccgaagccaagtgctagtagcgcgtcgctcgttccgccgacacctcctccacacggggagaatcctcgcgcagcacgtcggcaattctcgttccagaatgtgttccgtcggcatcaagctgacagagcacaggatccagaaatgcctacgtctcacgcgaatccccttcgtcacggaatgggtgcgaggggccactcggatcggagcctgaaggtgaaaaatgcaaccgaagaagagaggctgggactggttaagggcgactcgcattcgatgccagcattgccacactatgatgaagagtcggacgacatgaatgacgacaatgactattactcagacgagaagcgttcgtcgaaatatggtagaggcatcacgggtagcccacctcggcggggaagtgacgatgagaaggcggaagaagcaatgtacgagcagagccggaggagatggcatgatagccaaagcggaagcagacatggttccccggggagctcaccaccacctggccgccataacgcaccacgcggcggcgatggagcgtttctttaacataggatgatgatgaggcatgacaatttcttacgtcaactgttcttggacgcatgcccttatcatatcagctgtatcaactgccatggatgtgaatggtacaaaatggcgttttgagcaagagtgttggcaagtggtctgggtacactgcgcgctgcatctgacatctgacacggggtgtcttatacaaataaaaggtgtcctgtacatagatcaattacgcgctggcatggcatggtagtacatagcatactggagagacatttgagctaatagtgacatggaatgagaaacatgaattcccaccctttcactggtatttttagtgaaaatatgacgtgagaaacccatagaagccccaattgcattcctagatgccctctcgcaacctatggccatatgtcattctggcgtgttgtaatgcagactgtgatgcaggttatctagactacaacgccg

SEQ ID NO: 16115 - DNA, 1539 bp, Muscodor strobelii
  misc_feature: SGI cDNA ID NO. 565351
  misc_feature: Encodes the peptide sequence at SEQ ID NO 16116
atgcagaagaaacaacagtatcgtcatggcctcgcccgagctggacttttctgtaggatgtacgacctaagacggctgcttatcgtcgctattgtcgcgatcaccatctcccttgcgatattcaaagctcatcagcacgaactcattaggataacccctggtgagctatcgaacgtccccgagccgttcccctatactgatcatcctcctggacaatgcaccacatggcctgtcaacgcaaagggcgagtacaaacccaagatccagaaggaggttttcaggctccagagcttttcgcctcgaggcggttggaagaagcctgagggtattgcgatcaaggccctgatcttttacggccgcaagaggacggtcgatttcttggaatgctacctgcagcagaacctagtttcaaatggcggtttccttgacgaagtctggtttctggtacacacagatgacagcgaggatcttgcatatctgaatacgctcgtggaagagccgagaaataaaggccactacaagatcgtcagaccgggccaatgccgaggtttccagtatggctgtgtgtgggagcccatcatagaggacgatacgatctatgttaagatcgatgatgatattatatttatccatcccgataccattcctcaacttgtgtccacccgaattgcggagccccagccgttcgccatctctgccaacctagtcaacagcccgctgaccggctataaacattatgatactggcgcgatccatccattccttccagaccctagctctaacgcatcttcacagaaggcagcacagagttggcgcccatcggacaaatcgacttttcccaatgcgcagttgcctaggatcgacgagaatgatcacgatgcgataaccccagagactgttgaggagttcttgggaagaccggtcgggtacgaggggcatccgtggctcctgctagaagacaatgtcacagatcccctcctcaaaacgcccatgggaatcaacaaattccgcttgccgcaggacgaccctggttccatccatggagctgcttggaggtcttggaagatcgcagcgcagcagcaatactcgttgcttcgaaaccttgagctgaacaccatgtggcgatatcacttcggaacgcaaatgaactacgagcgaggtgttaaatcatcggccgacaaggcagcgctcaaatttttcgatcctaatcatctcggtccaggcggggagcaactcttcgacacaaactatatccggtacaatctgaatttcgttgcgctctggggtcacgacattcgcaatgctctgccaattgctgaagatgacgaggaggacattacagtcacaattccgaagcgcttacaacgcccattcgtgattgatacgcgcgctgtcgtgggtcatctaagtttctttcctcaacacgatggaattcgacagacagatctgctggatcgctggcgcgctttggccaacgagattagttgcgctgccgacaaccagaagactcccttcgattcgcggtgtgtcggctactga

SEQ ID NO: 16116 - protein, 512 aa, Muscodor strobelii
  misc_feature: SGI Peptide ID NO. 565351
  misc_feature (106)..(496): NCBI GI: 154278619 Blast Desc: conserved [Ajellomyces capsulatus NAm1] gi|150413708|gb|EDN09091.1| conserved [Ajellomyces capsulatus NAm1]
  misc_feature (104)..(504): NCBI GI: 46121951 Blast Desc: FG05353.1 [Gibberella zeae PH-1]
  misc_feature (106)..(496): NCBI GI: 261206452 Blast Desc: conserved [Ajellomyces dermatitidis SLH14081] gi|239593022|gb|EEQ75603.1| conserved [Ajellomyces dermatitidis SLH14081]
  misc_feature (106)..(496): NCBI GI: 239610803 Blast Desc: conserved [Ajellomyces dermatitidis ER-3]
  misc_feature (100)..(496): NCBI GI: 226280107 Blast Desc: conserved [Paracoccidioides brasiliensis Pb01]
  misc_feature (106)..(496): NCBI GI: 225680218 Blast Desc: conserved [Paracoccidioides brasiliensis Pb03]
  misc_feature (106)..(496): NCBI GI: 225678622 Blast Desc: conserved [Paracoccidioides brasiliensis Pb03]
  misc_feature (106)..(496): NCBI GI: 226284536 Blast Desc: conserved [Paracoccidioides brasiliensis Pb01]
  misc_feature (106)..(506): NCBI GI: 212527402 Blast Desc: conserved [Penicillium marneffei ATCC 18224] gi|210073256|gb|EEA27343.1| conserved [Penicillium marneffei ATCC 18224]
  misc_feature (106)..(496): NCBI GI: 226281751 Blast Desc: conserved [Paracoccidioides brasiliensis Pb01]
MQKKQQYRHGLARAGLFCRMYDLRRLLIVAIVAITISLAIFKAHQHELIRITPGELSNVPEPFPYTDHPPGQCTTWPVNAKGEYKPKIQKEVFRLQSFSPRGGWKKPEGIAIKALIFYGRKRTVDFLECYLQQNLVSNGGFLDEVWFLVHTDDSEDLAYLNTLVEEPRNKGHYKIVRPGQCRGFQYGCVWEPIIEDDTIYVKIDDDIIFIHPDTIPQLVSTRIAEPQPFAISANLVNSPLTGYKHYDTGAIHPFLPDPSSNASSQKAAQSWRPSDKSTFPNAQLPRIDENDHDAITPETVEEFLGRPVGYEGHPWLLLEDNVTDPLLKTPMGINKFRLPQDDPGSIHGAAWRSWKIAAQQQYSLLRNLELNTMWRYHFGTQMNYERGVKSSADKAALKFFDPNHLGPGGEQLFDTNYIRYNLNFVALWGHDIRNALPIAEDDEEDITVTIPKRLQRPFVIDTRAVVGHLSFFPQHDGIRQTDLLDRWRALANEISCAADNQKTPFDSRCVGY

SEQ ID NO: 16117 - DNA, 837 bp, Muscodor strobelii
  misc_feature: SGI cDNA ID NO. 565352
  misc_feature: Encodes the peptide sequence at SEQ ID NO 16118
atgattttcactgcgcagttgcccagactggtgcttctcttgttcagcactagcttgatggcagaagtgcttcaaagccccttagtctccccagcagagcttttcgactatttttttcccacggtcgactcaagtaaaatagatatcaacgacccgcttcgaggcggccgactttttccaaatgaaaccatcaatgcggacggaggcaaggaaagcggcgggtttctcgacgcttattatttggccgactacgtgatcgcgcatcagaacgacgagacagcaaacaccatttttcaaaaatactttgatgccggagacaagcagatggtattagatgtattcggtcgaatcgtcaatttcaatggacagggtagcccacatatagttggagtattgatcacagaggatgacagtgttaccgttgaggatgggcagcctagcgcagagctgacaaaggttgacacatctgaccctaccctaacgctgttcgaggatgtctgggtgcatcgaggtctcctgacggaacctacttcctgccaggaatggaacgacagaggcatgacccaggatatggtaacactgggccatgtcttgttacacgaatacacacactgggattggctgctttgggacattacacaggggcatatcgtcgacgccgccgtggataaccaagacgtaggatatggatggaagaactgcagaaatcttgacagagatacagctagatataatgcggatagttatgcctggttcgcaacagagctgacttgggcaattgtttgtggcaagagtaacgggtgggaggatcaaggtggtgataaaaagacggcgtag

SEQ ID NO: 16118 - protein, 278 aa, Muscodor strobelii
  misc_feature: SGI Peptide ID NO. 565352
  misc_feature (56)..(264): NCBI GI: 171679293 Blast Desc: protein product [Podospora anserina] gi|170939272|emb|CAP64500.1| protein product [Podospora anserina]
  misc_feature (193)..(265): NCBI GI: 171683091 Blast Desc: protein product [Podospora anserina] gi|170941505|emb|CAP67157.1| protein product [Podospora anserina]
MIFTAQLPRLVLLLFSTSLMAEVLQSPLVSPAELFDYFFPTVDSSKIDINDPLRGGRLFPNETINADGGKESGGFLDAYYLADYVIAHQNDETANTIFQKYFDAGDKQMVLDVFGRIVNFNGQGSPHIVGVLITEDDSVTVEDGQPSAELTKVDTSDPTLTLFEDVWVHRGLLTEPTSCQEWNDRGMTQDMVTLGHVLLHEYTHWDWLLWDITQGHIVDAAVDNQDVGYGWKNCRNLDRDTARYNADSYAWFATELTWAIVCGKSNGWEDQGGDKKTA

SEQ ID NO: 16119 - DNA, 3691 bp, Muscodor strobelii
  misc_feature: SGI EST ID NO. CUFF.38070.0
  misc_feature: Variant of the nucleotide sequence at SEQ ID NO 16117
atgtattcggtcgaatcgtcaatttcaatggacagggtagcccacatatagttggagtattgatcacagaggatgacagtgttaccgttgaggatgggcagcctagcgcagagctgacaaaggttgacacatctgaccctaccctaacgctgttcgaggatgtctgggtgcatcgaggtctcctgacggaacctacttcctgccaggaatggaacgacagaggcatgacccaggatatggtaacactgggccatgtcttgttacacgaatacacacactgggattggctgctttgggacattacacaggggcatatcgtcgacgccgccgtggataaccaagacgtaggatatggatggaagaactgcagaaatcttgacagagatacagctagatataatgcggatagttatgcctggttcgcaacagagctgacttgggcaattgtttgtggcaagagtaacgggtgggaggatcaaggtggtgataaaaagacggcgtagcaaaacagaacttggcaggcatcacatgcctagtagtcttctacgaatcagactcgcaatcgcagactccacaaaatgctaattgtccggtgataagacacgtgcaacaattgttctgggagtcgtacgcagttacctgcgaacatggatggtctcatggcattggggatttgtggaaggttttaagtcccttcgctacaacgtggtgcatagtgtgatacataatatttttctacttgagtggccaagtgagcgctaatctctaaattctgggaagaaatcgatatgatacttggacttttattcttttctaagtcccgaagggctacgactcaagatattttacacaatatagagacagatcaatgcggtcccgattgctaacgagcatcccgcgccctatgtcggtggactctcagtacatctccgtctgcggagttctcaaacgcacgcaattgcacttgactcattcggcaatataattttacacaatttcatcacaacttgctggagaccatctatgtatgttattttctgagttcgttcctatcttaatgtctaattagttcttcaactcaacacatatcaaaaatagctgtcccttcattatgacttctgtctacagcagagagcagattgatcaattcttagactacatacagctcccgaagccatatcaccatgcgcctccgtcactagatcttttgaaggcattgcatgtctacatgctggcagccgtgccttacgagaatctcgcgatacactacaatccggaacatagacctgatcttgaccctcagcatcttttcaataagatcgtcgtcaacaatagagggcgcggtggctactgcatggaaaatgccatcctttacaatcatatgctcgttggcctggggttcgacacatacacagccggcgtgagaactcgtctacgtctaggaggtgtaccttcaggtgactttcccggctgggtgcatatcgtcagtattgtcctccttgaggggcagcagtaccatgtcgacatcgcttttggcggcgattgtgcgacattacccatgccacttatcgatggaaatgttcatcagaacatggggactcaacagattcgtctccgacatgattggattcccacacaaacgaagcgcaccgagaggacgaagctatggatctacgagtaccgaaacagccccgagatggaatggcaggctttttatgcgtttgctgagatcgagttcatgcccaatgattgggaggtagtgaatgtctatacgagcacgagtcttaagagttggcaaacgcagactgtcattgtcatcaagtttctgagaagaccgggcgaagatggcagagaggagatttatggcaaacggatgctcgtcaatggtgtgatcaaggagaaccttggtggcaagaccagcatcattcatgagtgcaaaacagagcctgagagagtggccgcgttggaggagtattttggcattcaattaattgaggaagaaaaagacgcgattaaaggatggaggacggagcttgtttagacgtttgtttttgaggaagatgtggactcattcaaataattggcccggactatcattgccaagataacttaagataccttctccttgaaaacatggaaaacgagtatctcactgcgagtcccaattttggaagtcaatatcccaaagaatactatgcgccaacggcccttgtgacgacgccggcgtaccgggaccgaccgtgcgaatgaaggcatgtagatcctcttacggagcaccgagcctccgaccccgatcgcccgagactacgctacaacaactgatatgaccaaagtctcgtgtctggtgtataaatagacgagttgcgctcgtgtttctcctaatgataccaaacgaagagcaagatgatcccaagagtcatttaggagggaatttctatattacctactcgtcttgtctctcgcaccatcatccgaaagccatcgaatctaacaaacatcaagtattacaatactagtacaatgcctcctcgaccacttgtcactttggaagaagcttggctatccgctgcagcaaaaagagacaaccctcaacactccaatgtcttcaacgtaggagctatcggagaagccctagtcgagacagggagcatgcgtatcggatcaatggacgcaaacaacgtctctctccaagtcctatctcacgtccccggcacgctatcaccagaaacatgtcaggaagcaaacaacgagatggcagaagcagtaaaagccaatccatctcgtcttgctgcattcgcaaatctcccagttgggaatccggacttatgcccagttgagctcagacgctgtgtaaaagaacttggattcgttggtgcgctcatcgacaatcggacgggcggcacgtattatgatgaagacgaatatacacccttatgggagactgcgcaggaactcgacgtaccgatatacctccaccctactttcccgtcgaaagagcagacgcaagcctcatacaccggaaatttctcggatgattggtctttagctatcagtgcttttggatggggatggcattccgatgttgcggtgcacattctgcgtttatacgcaggaggcgtttttgaaaattaccctcgagtaaagattatcattggacattatggcgagatgataccgtttatgcttgatcgcattaataaagttgcgggtcgtttcgacatgccaaggagctttagagaggtctgggatgagaatatttggatcacgacgagtggagtttggagtgttgatccgatggctgttattgtgaggaatacgaagatcgatcacatcctatacagtgtcgattacccattcgcgaagaatgaagatggactgaaattcctggaagagttggagcagagcggtctcgttactaaggaacagctcgattgtattgcatataagaatgctgagaaattactgaaggtcaagatcagcaagacatttgcgtagatcaagctagtagaagtgcttagcttgagtctatcgcagcaagcaagacatccggctcggtcagtcaagcaacggagctatactgtatctcacccggagtcacagccgctgattattttgtacattagatgggtgaagaaattaccaactgcgctcacctatgccttaagctaccaagatcgatcatagaattatt

SEQ ID NO: 16120 - DNA, 930 bp, Muscodor strobelii
  misc_feature: SGI cDNA ID NO. 565353
  misc_feature: Reduced expression when VOC is produced
  misc_feature: Encodes the peptide sequence at SEQ ID NO 16121
atgacttctgtctacagcagagagcagattgatcaattcttagactacatacagctcccgaagccatatcaccatgcgcctccgtcactagatcttttgaaggcattgcatgtctacatgctggcagccgtgccttacgagaatctcgcgatacactacaatccggaacatagacctgatcttgaccctcagcatcttttcaataagatcgtcgtcaacaatagagggcgcggtggctactgcatggaaaatgccatcctttacaatcatatgctcgttggcctggggttcgacacatacacagccggcgtgagaactcgtctacgtctaggaggtgtaccttcaggtgactttcccggctgggtgcatatcgtcagtattgtcctccttgaggggcagcagtaccatgtcgacatcgcttttggcggcgattgtgcgacattacccatgccacttatcgatggaaatgttcatcagaacatggggactcaacagattcgtctccgacatgattggattcccacacaaacgaagcgcaccgagaggacgaagctatggatctacgagtaccgaaacagccccgagatggaatggcaggctttttatgcgtttgctgagatcgagttcatgcccaatgattgggaggtagtgaatgtctatacgagcacgagtcttaagagttggcaaacgcagactgtcattgtcatcaagtttctgagaagaccgggcgaagatggcagagaggagatttatggcaaacggatgctcgtcaatggtgtgatcaaggagaaccttggtggcaagaccagcatcattcatgagtgcaaaacagagcctgagagagtggccgcgttggaggagtattttggcattcaattaattgaggaagaaaaagacgcgattaaaggatggaggacggagcttgtttag

SEQ ID NO: 16121 - protein, 309 aa, Muscodor strobelii
  misc_feature: SGI Peptide ID NO. 565353
  misc_feature (29)..(300): Pfam Id: PF00797 Pfam Desc: N-acetyltransferase
  misc_feature (29)..(235): Pfam Id: PF00797 Pfam Desc: N-acetyltransferase
  misc_feature (1)..(309): NCBI GI: 256728692 Blast Desc: NECHADRAFT_51017 [Nectria haematococca mpVI 77-13-4]
  misc_feature (1)..(308): NCBI GI: 256729963 Blast Desc: NECHADRAFT_44961 [Nectria haematococca mpVI 77-13-4]
  misc_feature (3)..(308): NCBI GI: 169607793 Blast Desc: SNOG_06959 [Phaeosphaeria nodorum SN15] gi|160701492|gb|EAT85610.2| SNOG_06959 [Phaeosphaeria nodorum SN15]
  misc_feature (1)..(308): NCBI GI: 46135769 Blast Desc: FG09400.1 [Gibberella zeae PH-1]
  misc_feature (2)..(308): NCBI GI: 256735555 Blast Desc: [Nectria haematococca mpVI 77-13-4]
  misc_feature (3)..(308): NCBI GI: 171694417 Blast Desc: protein product [Podospora anserina] gi|170947157|emb|CAP73962.1| protein product [Podospora anserina]
  misc_feature (1)..(309): NCBI GI: 116197639 Blast Desc: CHGG_06975 [Chaetomium globosum CBS 148.51] gi|88178254|gb|EAQ85722.1| CHGG_06975 [Chaetomium globosum CBS 148.51]
  misc_feature (1)..(291): NCBI GI: 255931251 Blast Desc: Pc12g02960 [Penicillium chrysogenum Wisconsin 54-1255] gi|211581801|emb|CAP79923.1| Pc12g02960 [Penicillium chrysogenum Wisconsin 54-1255]
  misc_feature (1)..(293): NCBI GI: 238506263 Blast Desc: N-hydroxyarylamine O-acetyltransferase, [Aspergillus flavus NRRL3357] gi|220689046|gb|EED45397.1| N-hydroxyarylamine O-acetyltransferase, [Aspergillus flavus NRRL3357]
  misc_feature (3)..(293): NCBI GI: 115398672 Blast Desc: [Aspergillus terreus NIH2624] gi|114191808|gb|EAU33508.1| [Aspergillus terreus NIH2624]
  misc_feature: Useful for introducing or modulating the production of volatile compounds
MTSVYSREQIDQFLDYIQLPKPYHHAPPSLDLLKALHVYMLAAVPYENLAIHYNPEHRPDLDPQHLFNKIVVNNRGRGGYCMENAILYNHMLVGLGFDTYTAGVRTRLRLGGVPSGDFPGWVHIVSIVLLEGQQYHVDIAFGGDCATLPMPLIDGNVHQNMGTQQIRLRHDWIPTQTKRTERTKLWIYEYRNSPEMEWQAFYAFAEIEFMPNDWEVVNVYTSTSLKSWQTQTVIVIKFLRRPGEDGREEIYGKRMLVNGVIKENLGGKTSIIHECKTEPERVAALEEYFGIQLIEEEKDAIKGWRTELV

SEQ ID NO: 16122 - DNA, 3691 bp, Muscodor strobelii; identical to SEQ ID NO: 16119
  misc_feature: SGI EST ID NO. CUFF.38070.0
  misc_feature: Variant of the nucleotide sequence at SEQ ID NO 16120

SEQ ID NO: 16123 - DNA, 975 bp, Muscodor strobelii
  misc_feature: SGI cDNA ID NO. 565354
  misc_feature: Encodes the peptide sequence at SEQ ID NO 16124
atgcctcctcgaccacttgtcactttggaagaagcttggctatccgctgcagcaaaaagagacaaccctcaacactccaatgtcttcaacgtaggagctatcggagaagccctagtcgagacagggagcatgcgtatcggatcaatggacgcaaacaacgtctctctccaagtcctatctcacgtccccggcacgctatcaccagaaacatgtcaggaagcaaacaacgagatggcagaagcagtaaaagccaatccatctcgtcttgctgcattcgcaaatctcccagttgggaatccggacttatgcccagttgagctcagacgctgtgtaaaagaacttggattcgttggtgcgctcatcgacaatcggacgggcggcacgtattatgatgaagacgaatatacacccttatgggagactgcgcaggaactcgacgtaccgatatacctccaccctactttcccgtcgaaagagcagacgcaagcctcatacaccggaaatttctcggatgattggtctttagctatcagtgcttttggatggggatggcattccgatgttgcggtgcacattctgcgtttatacgcaggaggcgtttttgaaaattaccctcgagtaaagattatcattggacattatggcgagatgataccgtttatgcttgatcgcattaataaagttgcgggtcgtttcgacatgccaaggagctttagagaggtctgggatgagaatatttggatcacgacgagtggagtttggagtgttgatccgatggctgttattgtgaggaatacgaagatcgatcacatcctatacagtgtcgattacccattcgcgaagaatgaagatggactgaaattcctggaagagttggagcagagcggtctcgttactaaggaacagctcgattgtattgcatataagaatgctgagaaattactgaaggtcaagatcagcaagacatttgcgtag

SEQ ID NO: 16124 - protein, 324 aa, Muscodor strobelii
  misc_feature: SGI Peptide ID NO. 565354
  misc_feature (58)..(317): Pfam Id: PF04909 Pfam Desc: Amidohydrolase
  misc_feature (68)..(317): Pfam Id: PF04909 Pfam Desc: Amidohydrolase
  misc_feature (1)..(317): NCBI GI: 67523323 Blast Desc: AN2118.2 [Aspergillus nidulans FGSC A4] gi|40745794|gb|EAA64950.1| AN2118.2 [Aspergillus nidulans FGSC A4] gi|259487492|tpe|CBF86213.1| TPA: conserved [Aspergillus FGSC
  misc_feature (5)..(318): NCBI GI: 169781004 Blast Desc: [Aspergillus oryzae RIB40] gi|238504768|ref|XP_002383613.1| 2-amino-3-carboxymuconate-6-semialdehyde decarboxylase, flavus
  misc_feature (2)..(318): NCBI GI: 256723505 Blast Desc: NECHADRAFT_93978 [Nectria haematococca mpVI 77-13-4]
  misc_feature (2)..(318): NCBI GI: 256723398 Blast Desc: NECHADRAFT_55715 [Nectria haematococca mpVI 77-13-4]
  misc_feature (5)..(319): NCBI GI: 212546025 Blast Desc: 2,3-dihydroxybenzoic acid decarboxylase, [Penicillium marneffei ATCC 18224] gi|210064686|gb|EEA18781.1| 2,3-dihydroxybenzoic acid decarboxylase, [Penicillium marneffei
  misc_feature (5)..(321): NCBI GI: 85094097 Blast Desc: NCU06058 [Neurospora crassa OR74A] gi|28921276|gb|EAA30585.1| conserved [Neurospora crassa OR74A]
  misc_feature (5)..(321): NCBI GI: 67901848 Blast Desc: AN7911.2 [Aspergillus nidulans FGSC A4] gi|40740375|gb|EAA59565.1| AN7911.2 [Aspergillus nidulans FGSC A4] gi|259480660|tpe|CBF73507.1| TPA: conserved [Aspergillus FGSC
  misc_feature (5)..(319): NCBI GI: 242824594 Blast Desc: 2-amino-3-carboxymuconate-6-semialdehyde decarboxylase, [Talaromyces stipitatus ATCC 10500] gi|218713211|gb|EED12636.1| decarboxylase, [Talaromyces ATCC
  misc_feature (5)..(319): NCBI GI: 171680737 Blast Desc: protein product [Podospora anserina] gi|170939996|emb|CAP65222.1| protein product [Podospora anserina]
  misc_feature (5)..(319): NCBI GI: 156051774 Blast Desc: SS1G_07294 [Sclerotinia sclerotiorum 1980] gi|154705072|gb|EDO04811.1| SS1G_07294 [Sclerotinia sclerotiorum 1980]
  misc_feature (7)..(321): SWISSPROT Homolog: EC 4.1.1.46 o-pyrocatechuate decarboxylase
MPPRPLVTLEEAWLSAAAKRDNPQHSNVFNVGAIGEALVETGSMRIGSMDANNVSLQVLSHVPGTLSPETCQEANNEMAEAVKANPSRLAAFANLPVGNPDLCPVELRRCVKELGFVGALIDNRTGGTYYDEDEYTPLWETAQELDVPIYLHPTFPSKEQTQASYTGNFSDDWSLAISAFGWGWHSDVAVHILRLYAGGVFENYPRVKIIIGHYGEMIPFMLDRINKVAGRFDMPRSFREVWDENIWITTSGVWSVDPMAVIVRNTKIDHILYSVDYPFAKNEDGLKFLEELEQSGLVTKEQLDCIAYKNAEKLLKVKISKTFA

SEQ ID NO: 16125 - DNA, 3691 bp, Muscodor strobelii; identical to SEQ ID NO: 16119
  misc_feature: SGI EST ID NO. CUFF.38070.0
  misc_feature: Variant of the nucleotide sequence at SEQ ID NO 16123

SEQ ID NO: 16126 - DNA, 3372 bp, Muscodor strobelii
  misc_feature: SGI cDNA ID NO. 565356
  misc_feature: Encodes the peptide sequence at SEQ ID NO 16127
atgcatatgccagaacagcaaatgcaggatatcctgcattacatatatcctgtggctgtatttgtctacttctcgatctcatcggctgtcgtcgcttgcacacttcagaaggcccccacaaaagtaccaacacttcggtttcgtataatctggtactgcctgctggtattcattgcgttgtttggagttcaggcaggatcaaaggtcgtcgaggtcctgagatcgtcgcattggccgtctcaacctaccatcataggcttgctcgcatgcatcctggtattcggaatagaacagaacagtattggagactcttcggatgttgtctggtatccatactacggctcatggttgattgcgtctctattcgagattgctaacgctgctctctcgttccgcatggctgaatctcagcgttcccgtgaaactttcctcagcgatgaactaccggtcttcttacgattagacgcctgcatttccatcgttcggttcatcactgttctgattgtcctcatggcacacttctcttcgcatgatgtcatcaacgcagagagctctgacgaggaacgagcgcctctaatagccaaggccgatcagtctagcaatggaaatggctcggctgatagtggctacggcacgaacactgaagccacaaataccgagacaacaagtgcagagacggccaattcttctgcagatcccgagtcgccatgggaacggcaacaaaggcagcttcgcgaaaagatggagaaacgtttgaaaagcgagggaagttggatcgcttacatcaagggcttcatggtcttctttccttatgtctggcctgtcaaaaaccgacgcttgcagatgcacgtcattcttgtcgggctatgtctgcttgctgggaatggtctcaactttctgatacccagacagtatggtgctgtgcttgactcgctcagcggtgcatcggacaagaacccttggtttcaagtaggaatctttgccgtttttcgctttctcgactccgaggccggcattccactgatcagacatttactctggatgcctgttgattactattctcaagaggcactcagcatcgcggcgtattctcacgtcatgaacctgtcatctgagtttcacgacagccagagttcttctgatcttcaagtagccatttcaaatgggtaccacatttccagccttctcgaatcgatttgctttcaagcagtcccgatggtcattgacttggtcgtggcattctcttatctctctgtcaagtttggcccatatgaaggatttattacgatggccaccggcttggcattcatccaggctgcaggccagctcattgctagattcaaggagaagaggaagaagctagtgagcacatactttgaagagcattacacgcgccaagcgggcatacaaggctggcacaccgtcaacgcattcaaccaggttccgtatgaggagagtcgatatagcacagctgtcaagaagcaggtctccgcctcaaagtctatatattcgggctatctcattggccaagcctttcaatacctgattcttctcgcaggtctacttgcgggagcattcttagccgtttatcagattaccaataaacaagccacgccaggtgactttgtcatgcttttgacgtattgggcgcagcttacatcgcccctccgattcttctctactatgggacgcaatattagccaaagtcttgtccaagtcgagcgacttctcgaagtcatgttgacaaagcctaccgttaccgacaagttaaatgcccgtccattgaaacttaaaggggggacagtggagttccgcaatgtcagctttagctacgacaagaagaaggacatcttgaagggcgtgaagctgtctgtgaactctggtaagacagtggcctttgtgggtgccactggagcgggcaaatcgacaatattcaaagtccttgatcgattctacgatgttaccggcggctccattttgattgatggacaagacatccgtgatattacattgtctagtttgaggcagtgtattgggatcgttccccaatctcccatcctcttcgatgacaccgtattcaacaacgtccgatatgctcgtctagatgccactaaagaggaggtgatcgaggcttgcgaagccgctgctattcacaaacagatcatagggtttactgagggttatgacacgcgggttggagagcggggagtgaaactctcgggtggagaactgcagcgacttgctattgccagggccattctgaagaagcccgagatcgtcctcctcgatgaagcaacaagcgctgttgacacagacaccgaacaaaaaatccaagatggcctgcgtgctctttgcgagaaccgtaccactttcatcgtggctcaccggctctctaccgtcatgaatgccgatatgatcttcgtcgtggctaatggccaggttgtggagcaaggtagtcatgaggagctgattgcgaagaatggtagatatgccgagctctggtcgaagcagatttttgtcaagcccaaagagacgaaggagacggcggaaatagagatagagacagagacggcttcatcgacggaatgctcagaagaagtgaacgaagcggccgacgagcgttcaagcggatcgacttcttctggtactactggagaccaatcggtggggggcgtagcaaacatggatggggcgagtgctgctcacgcgaaaactccggtggcacacaggaaagagggttcaaagttgaatcctgatgcaccggagtttacgcctcgtgcggcgaagccagaatctgtgtctcctctacggaatagttgggctgaagatgttgaagaagaagtcgtggcacctatgtcaccaaatgatgggaaaggccgttgcagtacgcctcaagagacaggcggaatccataattcgactttatcgcgatcgaactcaccaacgccggaagcgggtgacataacctctgagatggccatgcgagactctgcagagcaatttcgtcctcgccacaactccatgacctgtccggagccccttgctcattgtagccctacacgctcagtcagtcagccagcaccgagtcctcaggtgtctacatcacctgttgctgctgctacacaaactcccgagactccaaacaatgtgcaggtgaaagaaagtgagccggcagccaccgaaaacaaacctcctcagggcccctcgcgcggacgtggttcatctcgcggacgggggttccggggacgtcatcgcggtagcaacgcaggaaggggtggtggtcgacgcaacgtatccaacccaaaacagacctcaggcaaggccagtggctcacagcccaaaaatcaggacaaacctgctacatcgacttag

SEQ ID NO: 16127 - protein, 1123 aa, Muscodor strobelii
  misc_feature: SGI Peptide ID NO. 565356
  misc_feature (911)..(928): Pfam Id: PF07145 Pfam Desc: Ataxin-2 C-terminal region
  misc_feature (628)..(812): Pfam Id: PF00005 Pfam Desc: ABC transporter
  misc_feature (469)..(556): Pfam Id: PF00664 Pfam Desc: ABC transporter transmembrane region
  misc_feature (3)..(928): NCBI GI: 116182530 Blast Desc: CHGG_01893 [Chaetomium globosum CBS 148.51] gi|88186190|gb|EAQ93658.1| CHGG_01893 [Chaetomium globosum CBS 148.51]
  misc_feature (12)..(848): NCBI GI: 171694968 Blast Desc: protein product [Podospora anserina] gi|170947726|emb|CAP59889.1| protein product [Podospora anserina]
  misc_feature (12)..(969): NCBI GI: 145603959 Blast Desc: MGG_14069 [Magnaporthe grisea 70-15] gi|145012071|gb|EDJ96727.1| MGG_14069 [Magnaporthe grisea 70-15]
  misc_feature (11)..(926): NCBI GI: 46111735 Blast Desc: FG02749.1 [Gibberella zeae PH-1]
  misc_feature (141)..(1117): NCBI GI: 256721993 Blast Desc: NECHADRAFT_94174 [Nectria haematococca mpVI 77-13-4]
  misc_feature (388)..(852): NCBI GI: 164427207 Blast Desc: NCU03228 [Neurospora crassa OR74A] gi|157071652|gb|EAA36092.2| NCU03228 [Neurospora crassa OR74A]
  misc_feature (2)..(927): NCBI GI: 239606895 Blast Desc: ABC transporter [Ajellomyces dermatitidis ER-3]
  misc_feature (45)..(1067): NCBI GI: 226284139 Blast Desc: lipid A export ATP-binding/permease protein msbA [Paracoccidioides brasiliensis Pb01]
  misc_feature (2)..(927): NCBI GI: 261194230 Blast Desc: ABC transporter [Ajellomyces dermatitidis SLH14081] gi|239588534|gb|EEQ71177.1| ABC transporter [Ajellomyces dermatitidis SLH14081]
  misc_feature (219)..(1067): NCBI GI: 226288769 Blast Desc: iron-sulfur clusters transporter atm1 [Paracoccidioides brasiliensis Pb18]
MHMPEQQMQDILHYIYPVAVFVYFSISSAVVACTLQKAPTKVPTLRFRIIWYCLLVFIALFGVQAGSKVVEVLRSSHWPSQPTIIGLLACILVFGIEQNSIGDSSDVVWYPYYGSWLIASLFEIANAALSFRMAESQRSRETFLSDELPVFLRLDACISIVRFITVLIVLMAHFSSHDVINAESSDEERAPLIAKADQSSNGNGSADSGYGTNTEATNTETTSAETANSSADPESPWERQQRQLREKMEKRLKSEGSWIAYIKGFMVFFPYVWPVKNRRLQMHVILVGLCLLAGNGLNFLIPRQYGAVLDSLSGASDKNPWFQVGIFAVFRFLDSEAGIPLIRHLLWMPVDYYSQEALSIAAYSHVMNLSSEFHDSQSSSDLQVAISNGYHISSLLESICFQAVPMVIDLVVAFSYLSVKFGPYEGFITMATGLAFIQAAGQLIARFKEKRKKLVSTYFEEHYTRQAGIQGWHTVNAFNQVPYEESRYSTAVKKQVSASKSIYSGYLIGQAFQYLILLAGLLAGAFLAVYQITNKQATPGDFVMLLTYWAQLTSPLRFFSTMGRNISQSLVQVERLLEVMLTKPTVTDKLNARPLKLKGGTVEFRNVSFSYDKKKDILKGVKLSVNSGKTVAFVGATGAGKSTIFKVLDRFYDVTGGSILIDGQDIRDITLSSLRQCIGIVPQSPILFDDTVFNNVRYARLDATKEEVIEACEAAAIHKQIIGFTEGYDTRVGERGVKLSGGELQRLAIARAILKKPEIVLLDEATSAVDTDTEQKIQDGLRALCENRTTFIVAHRLSTVMNADMIFVVANGQVVEQGSHEELIAKNGRYAELWSKQIFVKPKETKETAEIEIETETASSTECSEEVNEAADERSSGSTSSGTTGDQSVGGVANMDGASAAHAKTPVAHRKEGSKLNPDAPEFTPRAAKPESVSPLRNSWAEDVEEEVVAPMSPNDGKGRCSTPQETGGIHNSTLSRSNSPTPEAGDITSEMAMRDSAEQFRPRHNSMTCPEPLAHCSPTRSVSQPAPSPQVSTSPVAAATQTPETPNNVQVKESEPAATENKPPQGPSRGRGSSRGRGFRGRHRGSNAGRGGGRRNVSNPKQTSGKASGSQPKNQDKPATST

SEQ ID NO: 16128 - DNA, 4559 bp, Muscodor strobelii
  misc_feature: SGI EST ID NO. CUFF.38229.2
  misc_feature: Variant of the nucleotide sequence at SEQ ID NO 16126
ttctcacgtcatgaacctgtcatctgagtttcacgacagccagagttcttctgatcttcaagtagccatttcaaatgggtaccacatttccagccttctcgaatcgatttgctttcaagcagtcccgatggtcattgacttggtcgtggcattctcttatctctctgtcaagtttggcccatatgaaggatttattacgatggccaccggcttggcattcatccaggctgcaggccagctcattgctagattcaaggagaagaggaagaagctagtgagcacatactttgaagagcattacacgcgccaagcgggcatacaaggctggcacaccgtcaacgcattcaaccaggttccgtatgaggagagtcgatatagcacagctgtcaagaagcaggtctccgcctcaaagtctatatattcgggctatctcattggccaagcctttcaatacctgattcttctcgcaggtctacttgcgggagcattcttagccgtttatcagattaccaataaacaagccacgccaggtgactttgtcatgcttttgacgtattgggcgcagcttacatcgcccctccgattcttctctactatgggacgcaatattagccaaagtcttgtccaagtcgagcgacttctcgaagtcatgttgacaaagcctaccgttaccgacaagttaaatgcccgtccattgaaacttaaaggggggacagtggagttccgcaatgtcagctttagctacgacaagaagaaggacatcttgaagggcgtgaagctgtctgtgaactctggtaagacagtggcctttgtgggtgccactggagcgggcaaatcgacaatattcaaagtccttgatcgattctacgatgttaccggcggctccattttgattgatggacaagacatccgtgatattacattgtctagtttgaggcagtgtattgggatcgttccccaatctcccatcctcttcgatgacaccgtattcaacaacgtccgatatgctcgtctagatgccactaaagaggaggtgatcgaggcttgcgaagccgctgctattcacaaacagatcatagggtttactgagggttatgacacgcgggttggagagcggggagtgaaactctcgggtggagaactgcagcgacttgctattgccagggccattctgaagaagcccgagatcgtcctcctcgatgaagcaacaagcgctgttgacacagacaccgaacaaaaaatccaagatggcctgcgtgctctttgcgagaaccgtaccactttcatcgtggctcaccggctctctaccgtcatgaatgccgatatgatcttcgtcgtggctaatggccaggttgtggagcaaggtagtcatgaggagctgattgcgaagaatggtagatatgccgagctctggtcgaagcagatttttgtcaagcccaaagagacgaaggagacggcggaaatagagatagagacagagacggcttcatcgacggaatgctcagaagaagtgaacgaagcggccgacgagcgttcaagcggatcgacttcttctggtactactggagaccaatcggtggggggcgtagcaaacatggatggggcgagtgctgctcacgcgaaaactccggtggcacacaggaaagaggtagatcaatcaaaagatcaatcgtgattttttgactgatactgacctcgatcttgtagggttcaaagttgaatcctgatgcaccggagtttacgcctcgtgcggcgaagccagaatctgtgtctcctctacggaatagttgggctgaagatgttgaagaagaagtcgtggcacctatgtcaccaaatgatgggaaaggccgttgcagtacgcctcaagagacaggcggaatccataattcgactttatcgcgatcgaactcaccaacgccggaagcgggtgacataacctctgagatggccatgcgagactctgcagagcaatttcgtcctcgccacaactccatgacctgtccggagccccttgctcattgtagccctacacgctcagtcagtcagccagcaccgagtcctcaggtgtctacatcacctgttgctgctgctacacaaactcccgagactccaaacaatgtgcaggtgaaagaaagtgagccggcagccaccgaaaacaaacctcctcagggcccctcgcgcggacgtggttcatctcgcggacgggggttccggggacgtcatcgcggtagcaacgcaggaaggggtggtggtcgacgcaacgtatccaacccaaaacagacctcaggcaaggccagtggctcacagcccaaaaatcaggacaaacctgctacatcgacttagagacacatagatacctccttaatcactgcttttgatttcctcctttttcccaattttccgcccctaatgcatttattcagctatacgggcggctacttatacacatacacggtttagagagagaggggatgacaccgatgtcaagacacgagatcacgacttatggattgccgacggacactaacgatgggctagaagcattcatttcgactcttatttcacttcgaccctggcgacggggacggatcgcggtcatgcatgttaccgaatagatgacagcatagataggcgcttacaggtgccgtttttgacaagatagacattagacagacttctccgttgagagcaagagcaatcaatagacaccgttttattcttcgtggtattgcattgacttgttcttttattaaagcatcgagcgagcttcgtaagtcgtgacatgcgtaatctatccatcaatctcgtcaaaagagccttattggctcgctgctgttaaagatgccccctctgcccctctgcccctctgcgcgcatgatatatatctctgtcgtgtgtctccagcaagaaccctttttacccacaccgactttctcgccgctgtggcctcgtttcttctttctagcttgttctgtgggcgttggagcaaggggttcgtatcgcaatactgtgctttgagctgtccctagaaaattatcgcaaagccaaatcaggtctttactggggacctgaacctggaccaggaggcgctccacgaccacgaccagcaccacctcctcccatcatgttgcgggccatctcggcgatgttgggatcgctcatcagggcactcatgtcgggcatgccgccacctgaaccgaaagagtcggccatctcgcgcagacggggattggacatgaggttggccatcatgttggggtcggacatgaggttctgggccatgctcgcgaacatggggttgttcatgatggagctgagatcgggcatgccaccgccgccgccgccaccacctccgccgaacattcctgcgagactgctgagatctggcatgccgcctgcaccggcacctgcgccggggctaggggcggagcgtgacgcgggactggcgctgtcgcgctcttcggcctcgagctcgtcgacgcggcgtttcgctgtctcgtagcccttcttcatggggtccgagccgccgttcccctcgtactcgatgcccttcttgtaggcctccatgctgccctttgcgtcgccgagggcgtagcgggcgaggccgaggcgggaccaggctttcgtgtatgtcgggtcggaggcgacggcagcctcggcgtcggcgcgggcgctctcgtggtccttggctgcggagaaggcggcggcgcggttggagaggaagagggcgttgcccgggttcagggcgagggcttggccgtagaggtcgatggctttggggtagtctttggcgttcatggctttgttgccctgcaccttgaggtcctcggcgcgtgccttctcctcgtctgtgggcagcttggcggtgggttcggcgttgggggtcgtggatgagtcggcggatgcggaggtagaggaagcggcggcgggagcggtggacttcagcttctcgtagacgccgtagatctgggcgaggttctgggtgccgatggcagcgcggatggcggcatcgtcggtggggtcgaccttgaagctctccgagatgcagttgacggcgacctcgatgctctccttgtcctcggagcccagcgtgccgtcctcgcacgacgtgttgaggaagtggcagatggcgagcgccaggcgctgcttggatgtcgtggcctgcgttgcgtggccgccgtcagagagagcgtgcgtctttagtgaggatatcagtattgttttgtacaacttaccatgtttactgtgccaatatttctgacacttggggattatcggcggaaagtctaagagaacacaaggaaggcggcaaaaaaggatgaagaggtactaaacacagcgaaagcagcgcaacaagggaggaatgttgtccaggacagcgaagtagatgtccaaagtttcagcctgatcgccgaactgtgggattttttcgagatggttccagtcagcacaggagcacatggagggacgccgtgtggagggggagaggggccactgactccaggggaccaaagtgggtggggttggaggggcagccagattgcgcccctctctcagct

SEQ ID NO: 16129 - DNA, 1215 bp, Muscodor strobelii
  misc_feature: SGI cDNA ID NO. 565357
  misc_feature: Encodes the peptide sequence at SEQ ID NO 16130
atgcttattgaaataactacggcgacgggaacgccggccagcgaggccattgcagccatggaaagcatcaccagctcagaagagatgagtgatgttcagcggtttgagactatcgaagctgcccaaaaactgataagccggctccaaacaaaagaagagagggcgtacgaaattggattcagttggccagttatctttgcctcactccagagttgtctggacctgggcttatgggaaggatggaggaacactggccgcaacacgatgacactgtccgaactttgtaacgtgtgcagacatgaagttgaccccaaattgcttcgtcgaatgctacgcctcttggcagcagtcaatatcgtcgacgaatcgggcgaagacacttacaaggcaaccccttttacactcgcttgcggtgaaagagaaacattcgtgccgcaatgcatcgattgctccaccttccattatcagatgtcaggcctcagtttacctaagtatctggcaaagattggttataaagagcccgaggatgcggtgaactcaaactacgcggattggtctcctggtcatctggacgcctatgccagatgccaagctgacccaacggcacaagatgtattctctggcttcatgcgaggctggtcagggtacaagaagccatgggtcgaattttttgacaccactactctccttaagggtgtagacttgagatcagcaccattgtgcgtggatataggaggacaccacggcaatgatcttgtgcaactcttggaccaatatccggctctaccagaaggctcactggtgctgcaagacctgcctgagtgtgtctctgaagcgaaaggtctcagcaggcagatcaaggtcatgccacacgacatgttcagtccccagcccgtgaaaggagcccgagcttattactttcacgcggttctgcacaactggcccgattgcgacgcgctcacagcattaagacatattgcagatgcgatgaaaagggggtactcaaaactattgatcgacgacattgtaataccccgaaccggggccagctggatacaaacaacgatggacgtggagatgatgtctctttgctctgcttatgagagatctgagcttatgtgggccgaccttctaacgaaagcaggttttagaatcgtcaagatctggaaggatggccgcggaaacgaaagcttgattgaagccgaactcgcttga

SEQ ID NO: 16130 - protein, 404 aa, Muscodor strobelii
  misc_feature: SGI Peptide ID NO. 565357
  misc_feature (120)..(379): Pfam Id: PF00891 Pfam Desc: O-methyltransferase
  misc_feature (242)..(379): Pfam Id: PF00891 Pfam Desc: O-methyltransferase
  misc_feature (13)..(404): NCBI GI: 115385781 Blast Desc: conserved [Aspergillus terreus NIH2624] gi|114187884|gb|EAU29584.1| conserved [Aspergillus terreus NIH2624]
  misc_feature (15)..(404): NCBI GI: 238503662 Blast Desc: O-methyltransferase, [Aspergillus flavus NRRL3357] gi|220690534|gb|EED46883.1| O-methyltransferase, [Aspergillus flavus NRRL3357]
  misc_feature (53)..(404): NCBI GI: 46122829 Blast Desc: FG05792.1 [Gibberella zeae PH-1]
  misc_feature (13)..(404): NCBI GI: 145245013 Blast Desc: An11g08080 [Aspergillus niger] gi|134079469|emb|CAK46001.1| protein product [Aspergillus niger]
  misc_feature (69)..(403): NCBI GI: 119483534 Blast Desc: O-methyltransferase, [Neosartorya fischeri NRRL 181] gi|119409826|gb|EAW19773.1| O-methyltransferase, [Neosartorya fischeri NRRL 181]
  misc_feature (17)..(403): NCBI GI: 169622053 Blast Desc: SNOG_14240 [Phaeosphaeria nodorum SN15] gi|160704683|gb|EAT78477.2| SNOG_14240 [Phaeosphaeria nodorum SN15]
  misc_feature (17)..(404): NCBI GI: 256722561 Blast Desc: NECHADRAFT_96534 [Nectria haematococca mpVI 77-13-4]
  misc_feature (13)..(404): NCBI GI: 46111923 Blast Desc: FG02843.1 [Gibberella zeae PH-1]
  misc_feature (163)..(403): NCBI GI: 70983275 Blast Desc: O-methyltransferase [Aspergillus fumigatus Af293] gi|66844790|gb|EAL85127.1| O-methyltransferase, [Aspergillus fumigatus Af293] gi|159124051|gb|EDP49170.1| O-methyltransferase,
  misc_feature (90)..(403): NCBI GI: 169771385 Blast Desc: [Aspergillus oryzae RIB40] gi|83768021|dbj|BAE58160.1| protein product [Aspergillus oryzae]
  misc_feature (119)..(389): SWISSPROT Homolog: EC 2.1.1.110 Sterigmatocystin 8-O-methyltransferase
MLIEITTATGTPASEAIAAMESITSSEEMSDVQRFETIEAAQKLISRLQTKEERAYEIGFSWPVIFASLQSCLDLGLWEGWRNTGRNTMTLSELCNVCRHEVDPKLLRRMLRLLAAVNIVDESGEDTYKATPFTLACGERETFVPQCIDCSTFHYQMSGLSLPKYLAKIGYKEPEDAVNSNYADWSPGHLDAYARCQADPTAQDVFSGFMRGWSGYKKPWVEFFDTTTLLKGVDLRSAPLCVDIGGHHGNDLVQLLDQYPALPEGSLVLQDLPECVSEAKGLSRQIKVMPHDMFSPQPVKGARAYYFHAVLHNWPDCDALTALRHIADAMKRGYSKLLIDDIVIPRTGASWIQTTMDVEMMSLCSAYERSELMWADLLTKAGFRIVKIWKDGRGNESLIEAELA

SEQ ID NO: 16131 - DNA, 1829 bp, Muscodor strobelii
  misc_feature: SGI EST ID NO. CUFF.38101.0
  misc_feature: Variant of the nucleotide sequence at SEQ ID NO 16129
cggagcgcagatggcttactccagagagatgcgctcatgaaacagcccagacagcgtcgcaagaacccgcctttaatgacctgggtccttgttcgaaggatcaggaatcgcgcccttagtaacgccatgataagacgtcttatccctaatttggatatgtgaggagcctcgcggcgtccccttaactcaacacttgcgttcgaaaagaggggaacccagcagctagagtgatacaaaatcgttgccagcagtgcaattggctgttaagatgcttatattctaacaatccagcgttgtccgagctttccagattcatacccatccaagatcaagcgttacgaaccataaaagacttataccgtatactgttgtaaccgaatctccaatcaccatgcttattgaaataactacggcgacgggaacgccggccagcgaggccattgcagccatggaaagcatcaccagctcagaagagatgagtgatgttcagcggtttgagactatcgaagctgcccaaaaactgataagccggctccaaacaaaagaagagagggcgtacgaaattggattcagttggccagttatctttgcctcactccagagttgtctggacctgggcttatgggaaggatggaggaacactggccgcaacacgatgacactgtccgaactttgtaacgtgtgcagacatgaagttgaccccaaattgcttcgtcgaatgctacgcctcttggcagcagtcaatatcgtcgacgaatcgggcgaagacacttacaaggcaaccccttttacactcgcttgcggtgaaagagaaacattcgtgccgcaatgcatcgattgctccaccttccattatcagatgtcaggcctcagtttacctaagtatctggcaaagattggttataaagagcccgaggatgcggtgaactcaaactacgcggattggtctcctggtcatctggacgcctatgccagatgccaagctgacccaacggcacaagatgtattctctggcttcatgcgaggctggtcagggtacaagaagccatgggtcgaattttttgacaccactactctccttaagggtgtagacttgagatcagcaccattgtgcgtggatataggaggacaccacggcaatgatcttgtgcaactcttggaccaatatccggctctaccagaaggctcactggtgctgcaagacctgcctgagtgtgtctctgaagcgaaaggtctcagcaggcagatcaaggtcatgccacacgacatgttcagtccccagcccgtgaaaggagcccgagcttattactttcacgcggttctgcacaactggcccgattgcgacgcgctcacagcattaagacatattgcagatgcgatgaaaagggggtactcaaaactattgatcgacgacattgtaataccccgaaccggggccagctggatacaaacaacgatggacgtggagatgatgtctctttgctctgcttatgagagatctgagcttatgtgggccgaccttctaacgaaagcaggttttagaatcgtcaagatctggaaggatggccgcggaaacgaaagcttgattgaagccgaactcgcttgatgaagacacgaatggaacgaaggaatgaaagtttaattgtgtttgataatataacgatgtaacgtcctgagatttgaacaagcagccgagctgaggaatttgctaactgagagctgtagatggattataggacgagagtcaatgcgtgtaatcttatagtagtgtattactgtcacttccgagaacttttcatactagtctgtccataatacgtctctctcca

SEQ ID NO: 16132 - DNA, 876 bp, Muscodor strobelii
  misc_feature: SGI cDNA ID NO. 565358
  misc_feature: Elevated expression when VOC is produced
  misc_feature: Encodes the peptide sequence at SEQ ID NO 16133
atgaagttctctgctatcgctgcgggcgctgtatttgccgcctccgttgccgttgctgctcccaatactgttgcacgatgggctaagcatgaggctcgtcgcgctggccgtagcggcggcttcagacaacctgccgaagatgatggtgtttatgcgaccccctgtattcaagagctgacttacgacatgcgaaccgatgatgagctgacattgcatttcgaatatactagcaaggtcaacggcaccgacaagaacgttgactactccactaactgggccggtgccgtattgagctcctccggatataccaaagttgttggcactttcaccgtacctagtcctaaagccgtgaatggcaaagccggctctgcctctgcttgggtcggcatcgatggtgacacttgcggtactgccattttacagactggcctagacttcaatgtcgcggccaacggtaaagtttcgtacgacgcttggtacgagtggtaccccgactatgcctacgacttctccggcatctccttcagcgctggcgatcaggttactgttactgtggttgcttcgtccacgagcgccggaactgccacaatcaagaacttgagcactggcaagagcgtgtcccacagcttcagcagcgagagcagcaagctctgtgagtacgatgctgagtggatcgttgaagactacgagtccggtggctcgctggtttccctcgccaattttggcactgtcaccttcaccggtgcctctgcagtcaagagcggctcgaccgtcggtgtcaccggagctgacatcctcgacatcaagcagagtggcactgtttacacggactgctctacctctggtagcagtaccgtcacctgcaagtacgtctaa

SEQ ID NO: 16133 - protein, 291 aa, Muscodor strobelii
  misc_feature: SGI Peptide ID NO. 565358
  misc_feature (89)..(291): Pfam Id: PF01828 Pfam Desc: Peptidase A4 family
  misc_feature (1)..(291): NCBI GI: 154293948 Blast Desc: BC1G_14153 [Botryotinia fuckeliana B05.10] gi|150845125|gb|EDN20318.1| BC1G_14153 [Botryotinia fuckeliana B05.10]
  misc_feature (1)..(291): NCBI GI: 73543258 Blast Desc: acidic protease 1 [Botryotinia fuckeliana]
  misc_feature (1)..(271): NCBI GI: 6984107 Blast Desc: AF221843_1 acid protease [Sclerotinia sclerotiorum]
  misc_feature (1)..(271): NCBI GI: 156050497 Blast Desc: SS1G_07836 [Sclerotinia sclerotiorum 1980] gi|154692236|gb|EDN91974.1| SS1G_07836 [Sclerotinia sclerotiorum 1980]
  misc_feature (78)..(291): NCBI GI: 212534108 Blast Desc: aspergillopepsin, [Penicillium marneffei ATCC 18224] gi|210069609|gb|EEA23699.1| aspergillopepsin, [Penicillium marneffei ATCC 18224]
  misc_feature (1)..(274): NCBI GI: 119474281 Blast Desc: aspergillopepsin, [Neosartorya fischeri NRRL 181] gi|119407169|gb|EAW17119.1| aspergillopepsin, [Neosartorya fischeri NRRL 181]
  misc_feature (84)..(290): NCBI GI: 242789335 Blast Desc: aspergillopepsin, [Talaromyces stipitatus ATCC 10500] gi|218717927|gb|EED17347.1| aspergillopepsin, [Talaromyces stipitatus ATCC 10500]
  misc_feature (1)..(274): NCBI GI: 70986250 Blast Desc: aspergillopepsin [Aspergillus fumigatus Af293] gi|66846248|gb|EAL86581.1| aspergillopepsin, [Aspergillus fumigatus Af293] gi|159128238|gb|EDP53353.1| aspergillopepsin,
  misc_feature (1)..(291): NCBI GI: 189193169 Blast Desc: acid protease [Pyrenophora tritici-repentis Pt-1C-BFP] gi|187978487|gb|EDU45113.1| acid protease [Pyrenophora tritici-repentis Pt-1C-BFP]
  misc_feature (1)..(291): NCBI GI: 238499183 Blast Desc: aspergillopepsin, [Aspergillus flavus NRRL3357] gi|220692579|gb|EED48925.1| aspergillopepsin, [Aspergillus flavus NRRL3357]
  misc_feature (78)..(291): SWISSPROT Homolog: EC 3.4.23.19 Aspergillopepsin II
  misc_feature: Useful for introducing or modulating the production of volatile compounds
MKFSAIAAGAVFAASVAVAAPNTVARWAKHEARRAGRSGGFRQPAEDDGVYATPCIQELTYDMRTDDELTLHFEYTSKVNGTDKNVDYSTNWAGAVLSSSGYTKVVGTFTVPSPKAVNGKAGSASAWVGIDGDTCGTAILQTGLDFNVAANGKVSYDAWYEWYPDYAYDFSGISFSAGDQVTVTVVASSTSAGTATIKNLSTGKSVSHSFSSESSKLCEYDAEWIVEDYESGGSLVSLANFGTVTFTGASAVKSGSTVGVTGADILDIKQSGTVYTDCSTSGSSTVTCKYV

SEQ ID NO: 16134 - DNA, 1416 bp, Muscodor strobelii
  misc_feature: SGI EST ID NO. CUFF.38107.0
  misc_feature: Variant of the nucleotide sequence at SEQ ID NO 16132
gacaaatgtagccacgtcttcttgttggtgcggaactgagggcgctctgttgttgtatctatggagccaaatataatctgtctggttataaaagaccgacttggtgtcaacaacgctgatcactcgtgtttcttcatcttgctcgtctcagcccaaacaacccgctcgttatttcgccaactgcttcagtccccgctcgtcatcatgaagttctctgctatcgctgcgggcgctgtatttgccgcctccgttgccgttgctgctcccaatactgttgcacgatgggctaagcatgaggctcgtcgcgctggccgtagcggcggcttcagacaacctgccgaagatgatggtgtttatgcggtatgtgatacgttctctaagccatatgactagactcgatgtttctctgtccttccagaccccctgtattcaagagctgacttacgacagtatgtgaaatcgaaatttgttgaatcagcgcaagtccggcccttaagaggccttgatcagtgcgaaccgatgatgagctgacattgcatttcgaatatactagcaaggtcaacggcaccgacaagaacgttgactactccactaactgggccggtgccgtattgagctcctccggatataccaaagttgttggcactttcaccgtacctagtcctaaagccgtgaatggcaaagccggctctgcctctgcttgggtcggcatcgatggtgacacttgcggtactgccattttacagactggcctagacttcaatgtcgcggccaacggtaaagtttcgtacgacgcttggtacgagtggtaccccgactatgcctacgacttctccggcatctccttcagcgctggcgatcaggttactgttactgtggttgcttcgtccacgagcgccggaactgccacaatcaagaacttgagcactggcaagagcgtgtcccacagcttcagcagcgagagcagcaagctctgtgagtacgatgctgagtggatcgttgaagactacgagtccggtggctcgctggtttccctcgccaattttggcactgtcaccttcaccggtgcctctgcagtcaagagcggctcgaccgtcggtgtcaccggagctgacatcctcgacatcaagcagagtggcactgtttacacggactgctctacctctggtagcagtaccgtcacctgcaagtacgtctaataatgcgacaggggcttgagacagggagccgacatcctaataatgggatggtcgctatgaagtgctctttctatgacacctcattatcaacgacaaggcgcgcaaacatcatcgctcgacgatcattctcgtatattgggaacacatggaggcggtgaatgtatacagctgtattattcggtagctgataaatagatgtcttgcattcatctcaaag

SEQ ID NO: 16135 - DNA, 807 bp, Muscodor strobelii
  misc_feature: SGI cDNA ID NO. 565359
  misc_feature: Encodes the peptide sequence at SEQ ID NO 16136
atgcgctcgcctgcgtttgaaaatacgagtcttctggtcgatatggcggaccatgagattccggaacattacgaaccagtcgcaagcaaagaagcagttgctgggtattatcatcctcatccggccggccttgaggtcgcgccaaatcaacccaaatcgacctatgtatatgactattcagatcgaacgaattcgcaagaacggacgatactcggcttaagaagggcaacattctttctatctctcgccctcgtggtcgtcattcttgccgcgggcatcggagcaggagtaggaggttctatagcagtaaacaatgccaagaaatcatgtacaacgaattctaccagcccagcgataggtgactcttcgtcgccaatgtcgatagtcaccaccaccgccacggtgacaacaacgatacaagctggtgctacatctgcaacaacagacaggcttgttgtccccactggtgttgtcgccttagattgccctgctctctcaggcacatcccaaaccataaagctcggcgcaaagtcatgggtcttcgacctcacgtgtgggacagatttctttggtggtgatatcggggccgttattgtatattccattaacgattgtatgcaagcttgcgccgcgcacaactacttctcaaacgacgactcgtgtcagcacgtcacatttaatgcgaatcaaacggccgagataccaaaggactacgggaactgttggttgaaaacaggagacgtgcagaacactgacggacggagcaacggcgtctgtggagctcaaatatccagcttcccagaataa

SEQ ID NO: 16136 - protein, 268 aa, Muscodor strobelii
  misc_feature: SGI Peptide ID NO. 565359
  misc_feature (61)..(244): NCBI GI: 171681678 Blast Desc: protein product [Podospora anserina] gi|170940798|emb|CAP66447.1| protein product [Podospora anserina]
  misc_feature (133)..(245): NCBI GI: 116201765 Blast Desc: [Chaetomium globosum CBS 148.51] gi|88177285|gb|EAQ84753.1| [Chaetomium globosum CBS 148.51]
  misc_feature (137)..(216): NCBI GI: 145606424 Blast Desc: [Magnaporthe grisea 70-15] gi|145014088|gb|EDJ98729.1| [Magnaporthe grisea 70-15]
  misc_feature (38)..(246): NCBI GI: 189190300 Blast Desc: [Pyrenophora tritici-repentis Pt-1C-BFP] gi|187973095|gb|EDU40594.1| [Pyrenophora tritici-repentis Pt-1C-BFP]
  misc_feature (154)..(238): NCBI GI: 85083372 Blast Desc: NCU05125 [Neurospora crassa OR74A] gi|28881415|emb|CAD70532.1| [Neurospora crassa] gi|28918196|gb|EAA27875.1| [Neurospora crassa OR74A]
  misc_feature (65)..(244): NCBI GI: 261361403 Blast Desc: conserved [Verticillium albo-atrum VaMs.102]
  misc_feature (75)..(244): NCBI GI: 256730172 Blast Desc: NECHADRAFT_82894 [Nectria haematococca mpVI 77-13-4]
  misc_feature (36)..(258): NCBI GI: 145606338 Blast Desc: [Magnaporthe grisea 70-15] gi|145014027|gb|EDJ98668.1| [Magnaporthe grisea 70-15]
  misc_feature (41)..(246): NCBI GI: 258573067 Blast Desc: [Uncinocarpus reesii 1704] gi|237900981|gb|EEP75382.1| [Uncinocarpus reesii 1704]
  misc_feature (73)..(244): NCBI GI: 171682896 Blast Desc: protein product [Podospora anserina] gi|170941407|emb|CAP67058.1| protein product [Podospora anserina]
MRSPAFENTSLLVDMADHEIPEHYEPVASKEAVAGYYHPHPAGLEVAPNQPKSTYVYDYSDRTNSQERTILGLRRATFFLSLALVVVILAAGIGAGVGGSIAVNNAKKSCTTNSTSPAIGDSSSPMSIVTTTATVTTTIQAGATSATTDRLVVPTGVVALDCPALSGTSQTIKLGAKSWVFDLTCGTDFFGGDIGAVIVYSINDCMQACAAHNYFSNDDSCQHVTFNANQTAEIPKDYGNCWLKTGDVQNTDGRSNGVCGAQISSFPE

SEQ ID NO: 16137 - DNA, 1446 bp, Muscodor strobelii
  misc_feature: SGI EST ID NO. CUFF.38124.1
  misc_feature: Variant of the nucleotide sequence at SEQ ID NO 16135
cgagaatcgtagtacaagccaatcactgtcctcctgaacttgtatggcccagtagcaaaaacagactttttgcccggtcagacttggcgaagcgttctcttcggatttactttccgagacacaaatggccggataactcactaagagacaactaatttatgcccttcgatcggggccttaagcatattcattacgttcgttcgtggctttgtattaaaaatctgaaaccatacgaacgggaagttcggacattatcgcgtgaaactatttcatgagagggctgcgaccgaaaagcctaagaggaggccgactgcgaagataccagcaccgcgcttgccgaatctcttcgcttgatccttcgagagacaatatacgggcgcatgcgctcgcctgcgtttgaaaatacgagtcttctggtcgatatggcggaccatgagattccggaacattacgaaccagtcgcaagcaaagaagcagttgctgggtattatcatcctcatccggccggccttgaggtcgcgccaaatcaacccaaatcgacctatgtatatgactattcagatcgaacgaattcgcaagaacggacgatactcggcttaagaagggcaacattctttctatctctcgccctcgtggtcgtcattcttgccgcgggcatcggagcaggagtaggaggttctatagcagtaaacaatgccaagaaatcatgtacaacgaattctaccagcccagcgataggtgactcttcgtcgccaatgtcgatagtcaccaccaccgccacggtgacaacaacgatacaagctggtgctacatctgcaacaacagacaggcttgttgtccccactggtgttgtcgccttagattgccctgctctctcaggcacatcccaaaccataaagctcggcgcaaagtcatgggtcttcgacctcacgtgtgggacagatttctttggtggtgatatcggggccgttattgtatattccattaacgattgtatgcaagcttgcgccgcgcacaactacttctcaaacgacgactcgtgtcagcacgtcacatttaatgcgaatcaaacggccgagataccaaaggactacgggaactgttggttgaaaacaggagacgtgcagaacactgacggacggagcaacggcgtctgtggagctcaaatatccagcttcccagaataatcaaacggcaggcttgatagcggtagttttaaggccgcgagtgggtggtttcttgggcgacatggtgatcgacatttgggttgcatagcgggtattagcgtgttttttgctgttaaaagtgttgtaatttctagacacaattctgcactggctgaagcccagtatattcctacggacagaagataccgggtaagcttcattcctttctatgtatataattcaatagcatatctgcttcgaggaatcaattgacttgatt

SEQ ID NO: 16138 - DNA, 615 bp, Muscodor strobelii
  misc_feature: SGI cDNA ID NO. 565360
  misc_feature: Encodes the peptide sequence at SEQ ID NO 16139
atggcagcacgaacatataccgccaatagggacatattcacccggcccgctccgtcagccgtgacatacgatctttcggtccctgatcgggcgacgattactctaccacctggctctacatggacatctggcccgcactggcatagcactcacaccgagtttcttcaagtgctatcaggccaagcagaagtcatgctagccggggaagtcatcgcagccgtagggtctgctgatggtgttgttacagtcacacgaaatacagttcatgaatggaagcgaagtcagacggccggtctggatgaggaccttgtggtgagagaatggactgaccccaaagatggccagaaggaggcattctttcggaatctcaacggaattatcttggatgctattaaggatggagatgggagctggcggatgcggacactcaatctagagctattcaatctattttggaggcaggataactggccagtgattttatcagcttcttggccgggttggatacaaggggctgtcacgaagacaacgctggcgagtgcagtggtccttgggagaatccttggctgccacggcgtctacgatggatattacaagaaagatcgtgcaacatga

SEQ ID NO: 16139 - protein, 204 aa, Muscodor strobelii
  misc_feature: SGI Peptide ID NO. 565360
  misc_feature (31)..(92): Pfam Id: PF07883 Pfam Desc: Cupin domain
  misc_feature (18)..(201): NCBI GI: 238482379 Blast Desc: AFLA_075110 [Aspergillus flavus NRRL3357] gi|220700478|gb|EED56816.1| AFLA_075110 [Aspergillus flavus NRRL3357]
  misc_feature (43)..(197): NCBI GI: 256735662 Blast Desc: NECHADRAFT_75743 [Nectria haematococca mpVI 77-13-4]
  misc_feature (12)..(163): NCBI GI: 256733823 Blast Desc: NECHADRAFT_77361 [Nectria haematococca mpVI 77-13-4]
  misc_feature (4)..(140): NCBI GI: 145237292 Blast Desc: An07g02070 [Aspergillus niger] gi|134075760|emb|CAK48108.1| protein product [Aspergillus niger]
  misc_feature (1)..(160): NCBI GI: 169607042 Blast Desc: SNOG_06574 [Phaeosphaeria nodorum SN15] gi|160707141|gb|EAT86405.2| SNOG_06574 [Phaeosphaeria nodorum SN15]
  misc_feature (32)..(203): NCBI GI: 145615111 Blast Desc: MGG_13035 [Magnaporthe grisea 70-15] gi|145022021|gb|EDK06041.1| MGG_13035 [Magnaporthe grisea 70-15]
MAARTYTANRDIFTRPAPSAVTYDLSVPDRATITLPPGSTWTSGPHWHSTHTEFLQVLSGQAEVMLAGEVIAAVGSADGVVTVTRNTVHEWKRSQTAGLDEDLVVREWTDPKDGQKEAFFRNLNGIILDAIKDGDGSWRMRTLNLELFNLFWRQDNWPVILSASWPGWIQGAVTKTTLASAVVLGRILGCHGVYDGYYKKDRAT

SEQ ID NO: 16140 - DNA, 1235 bp, Muscodor strobelii
  misc_feature: SGI EST ID NO. CUFF.38129.0
  misc_feature: Variant of the nucleotide sequence at SEQ ID NO 16138
ctgagtatagctatttcacgccctatcgatggatatttgaacacgttccaatctgcaatagcgaatgctgcatatagttcccaccaatgaatataggagaagggtaggaaaagatcaatcgacgaagcgaggggataagaaacgccaagaagggctcaaagatctcaacttcatacatgctaggagccgataattgcttcactgcctcaactgctaccgttgcataacacatcatacagccatggcagcacgaacatataccgccaatagggacatattcacccggcccgctccgtcagccgtgacatacgatctttcggtccctgatcgggcgacgattactctaccacctggctctacatggacatctggcccgcactggcatagcactcacaccgagtttcttcaagtgctatcaggccaagcagaagtcatgctagccggggaagtcatcgcagccgtagggtctgctgatggtgttgttacagtcacacgaaatacagttcatgaatggaagcgaagtcagacggccggtctggatgaggaccttgtggtgagagaatggactgaccccaaagatggccagaaggaggcattctttcggaatctcaacggaattatcttggatgctattaaggatggagatgggagctggcggatgcggacactcaatctagagctattcaatctattttggaggcaggataactggccagtgattttatcagcttcttggccgggttggatacaaggggctgtcacgaagacaacgctggcgagtgcagtggtccttgggagaatccttggctgccacggcgtctacgatggatattacaagaaagatcgtgcaacatgagcgggtagcacgaactccaatatgcgacacaacttttcctttagtgcaatatctacctactttacgagctgttgagtcacatccatctaacctggcatttcatcgtatcagcagagggagaggtgagggggcggggccatggctcttccttcgacgggatacagaagagaaacgcaagggctatcaccagatgaaaagcggtgtaatgaagagactacaattggtagtaaaggcacagtagagggtcctttagatagcctctgaatcattgccgcatagacgacggtagcgtctcgccacgcgcatccgccaccgattttgtcatcttgcgcgatgtaaagtgtattataccccacagtgattgtctagaatccgggag

SEQ ID NO: 16141 - DNA, 2808 bp, Muscodor strobelii
  misc_feature: SGI cDNA ID NO. 565361
  misc_feature: Elevated expression when VOC is produced
  misc_feature: Encodes the peptide sequence at SEQ ID NO 16142
atggctcgcactaagaattcacgccgtggcaatcaacgttcgcggaacgtccctccacgccagcatgtgtccaatgatccggccgttgctgctgcgcagagggaggctgaaagacgcgagagaattctcgctgatcaacgtcgtactgctgctaaatggcgaccgaagattcccgaggtccgcaagtgtaacttcgagaacttcaagaaccgcttccatggtcttgaggagaaggactatgccattgagtgtctgatgagcggggctacgtttcaaggccaagttcgtcgtgagagagcatctcgtcgtaaggaagagattgcacgtcttcgccagagctggctctcttggggccagccaaagcaccatgagcaacctcggcagacccaaaccaagagagacatagaagacagagctcgaagagagaagcgagccgaagcactccaggccaacgacactgaaatccagcgtattcggattcagtctcagccagtgcttggtcatctgacatccttgctgagcgatactgagaaccgatcgacaccgcgaacgttcgtacgaccgttcaaggccctcgtgtatctccagcctaagatgaaggagattctcggaaccctcgaggaaaaatggggcgacgttgaagatctcgaggagtcggagcctgagaaatctggagaggcaactcctgaggaggtagaggttgtcgaagttgaagatgccaaagagccttctgctgagaaggacggggacgaggaagatgatgacgatgcagagtctgttctctctgttgactccaatgcggaggaccaggaaggtattatggacagcgttgaagcactgcgggatatgcggtgctacgtcaacttcatcgacaacgaggtgatgcccatgtatgcacagtacgatggaaccggagccgaccgcgtcaagttcgatgacctctggtctctcttccgcgttggtgacttggtctatatgcctgccggtggagaaaccgcaggtcgttatcatgaactctggcgtgtttaccgtgtggaagtccctgagcccgaggcagagtatcctagctccggaggctgggaattcttcgccgatgacctgcaacagaacaagaaagccacattcaacgtcttcgcctactctatcgatcatgatggcaacaacttcggagcagttcgccataccttctcgcttgcctcgttcccgggtgagcgcctcatcgaatcgcttgaagttttccctatccgctatcgccatgattaccagcggctcttggagacactgaaggatcaaggtcgtgccttccagcacttccttgccgatcgccaccagtcgtataatgcatggactctgaccagaaaccctccctttgacacccaggaggcagaggacgagatcttgcgcgatgagcagggagagccgatgcgtcaccccgagttcgtcgagagtgacgttatcgtcgacatggctgaagcatatcagaagaatcccgattggagacccaagttccacagacttacagccaacaaaggtcaacgttacgagacgtgcgacgacgacatgaatatccagcactggctcgacgggggacggcagtcacttgcctatgcccaggtcgagcttgtgcaggtctcagatggtgttgagatgcgacagcgacgtgagaacctcgcttcggacacgttcctgcgccagcggctaaagggcgagcgccggtacgagatccagccgcaggctctcgagcttcgcgacgaggatctcgtattgctgccgaagcgaatgttcgcgtatgctttacgcgagcgccgctttgtgcccgtcaacacgaactttcttaagcccattcgtcgtcaaccgggagtgtttgagaacttaaagatcttgaaagactacaaggacattgtgcgaggcctcgtggcctcccacttccagcgaaaagcgctcgagcgccgctacgttgacatgtcgacagagggaccaagccaagatctgatccaaaacaagggtcgtggcttggtcgtcttgctccatggtgtgcccggtgtgggcaagaccgctactgctgaggctgtggcaatggagtacagaaaacctctattcgtcattacgtgcggcgacctcggactaaccccgtccgaggtggaatcgtccctctccaacgtgttccggctcgcacacctctgggattgcgtactactgctggacgaggcggatgtgttcctctcgcagcgctcgaagctggatatgaagcgcaacgcgctcgtgtcggtattcctccgggtcttggagtactacaacggtctgctcttcctaacgactaaccgcgtcggaaccatcgacgaggcgttcaagtcacgcattcacatgtcgctgtactatccgcctctcgacaagacgcagacgcgcgatatcttccgtctcaacatctccaagctgcgcgagatcgagactcagcgccaggagatgactggtgaccctcctctgcttattaaggagagtgagatcatcgactttgctggcaagcactttgaggataatgctcggtctactggttgctggaacggacgacagattcgcaatgctttccagatcacgtcgagcttggcgcatcataactacactatgcagagcgagagtgcgcgctccatgggcaagcagccccccgccgggcccgtgctggaccgtggactgtttgagaaggtccagatgtcgacgcagagctttgatcgtcacatgatggagtcgaagggattcgatggcgacttgccacttcgaagcacgtttcatcaggagacacgctttgaataa

SEQ ID NO: 16142 - protein, 935 aa, Muscodor strobelii
  misc_feature: SGI Peptide ID NO. 565361
  misc_feature (673)..(856): Pfam Id: PF00004 Pfam Desc: ATPase family associated with various cellular activities (AAA)
  misc_feature (673)..(813): Pfam Id: PF00004 Pfam Desc: ATPase family associated with various cellular activities (AAA)
  misc_feature (1)..(935): NCBI GI: 46114954 Blast Desc: FG03319.1 [Gibberella zeae PH-1]
  misc_feature (33)..(935): NCBI GI: 256724231 Blast Desc: [Nectria haematococca mpVI 77-13-4]
  misc_feature (59)..(917): NCBI GI: 119467011 Blast Desc: AAA family ATPase, [Neosartorya fischeri NRRL 181] gi|119405464|gb|EAW15415.1| AAA family ATPase, [Neosartorya fischeri NRRL 181]
  misc_feature (58)..(886): NCBI GI: 256725321 Blast Desc: NECHADRAFT_45867 [Nectria haematococca mpVI 77-13-4]
  misc_feature (35)..(917): NCBI GI: 116203341 Blast Desc: CHGG_09555 [Chaetomium globosum CBS 148.51] gi|88178073|gb|EAQ85541.1| CHGG_09555 [Chaetomium globosum CBS 148.51]
  misc_feature (58)..(933): NCBI GI: 116201997 Blast Desc: CHGG_08883 [Chaetomium globosum CBS 148.51] gi|88177401|gb|EAQ84869.1| CHGG_08883 [Chaetomium globosum CBS 148.51]
  misc_feature (55)..(916): NCBI GI: 67526315 Blast Desc: AN3615.2 [Aspergillus nidulans FGSC A4] gi|40740633|gb|EAA59823.1| AN3615.2 [Aspergillus nidulans FGSC A4] gi|259481858|tpe|CBF75772.1| TPA: conserved [Aspergillus FGSC
  misc_feature (70)..(919): NCBI GI: 256726318 Blast Desc: NECHADRAFT_43342 [Nectria haematococca mpVI 77-13-4]
  misc_feature (60)..(919): NCBI GI: 145237766 Blast Desc: An07g04480 [Aspergillus niger] gi|134076004|emb|CAK48198.1| protein product [Aspergillus niger]
  misc_feature (283)..(917): NCBI GI: 171681389 Blast Desc: protein product [Podospora anserina] gi|170940653|emb|CAP65881.1| protein product [Podospora anserina]
  misc_feature: Useful for introducing or modulating the production of volatile compounds
MARTKNSRRGNQRSRNVPPRQHVSNDPAVAAAQREAERRERILADQRRTAAKWRPKIPEVRKCNFENFKNRFHGLEEKDYAIECLMSGATFQGQVRRERASRRKEEIARLRQSWLSWGQPKHHEQPRQTQTKRDIEDRARREKRAEALQANDTEIQRIRIQSQPVLGHLTSLLSDTENRSTPRTFVRPFKALVYLQPKMKEILGTLEEKWGDVEDLEESEPEKSGEATPEEVEVVEVEDAKEPSAEKDGDEEDDDDAESVLSVDSNAEDQEGIMDSVEALRDMRCYVNFIDNEVMPMYAQYDGTGADRVKFDDLWSLFRVGDLVYMPAGGETAGRYHELWRVYRVEVPEPEAEYPSSGGWEFFADDLQQNKKATFNVFAYSIDHDGNNFGAVRHTFSLASFPGERLIESLEVFPIRYRHDYQRLLETLKDQGRAFQHFLADRHQSYNAWTLTRNPPFDTQEAEDEILRDEQGEPMRHPEFVESDVIVDMAEAYQKNPDWRPKFHRLTANKGQRYETCDDDMNIQHWLDGGRQSLAYAQVELVQVSDGVEMRQRRENLASDTFLRQRLKGERRYEIQPQALELRDEDLVLLPKRMFAYALRERRFVPVNTNFLKPIRRQPGVFENLKILKDYKDIVRGLVASHFQRKALERRYVDMSTEGPSQDLIQNKGRGLVVLLHGVPGVGKTATAEAVAMEYRKPLFVITCGDLGLTPSEVESSLSNVFRLAHLWDCVLLLDEADVFLSQRSKLDMKRNALVSVFLRVLEYYNGLLFLTTNRVGTIDEAFKSRIHMSLYYPPLDKTQTRDIFRLNISKLREIETQRQEMTGDPPLLIKESEIIDFAGKHFEDNARSTGCWNGRQIRNAFQITSSLAHHNYTMQSESARSMGKQPPAGPVLDRGLFEKVQMSTQSFDRHMMESKGFDGDLPLRSTFHQETRFE

SEQ ID NO: 16143 - DNA, 5053 bp, Muscodor strobelii
  misc_feature: SGI EST ID NO. CUFF.39325.0
  misc_feature: Variant of the nucleotide sequence at SEQ ID NO 16141
ggggctaatagctggccattgtgtggttagatgtgtataaagatgcccgaattgccaacttcatatataacatctgtatcatctctatgactgcgaatctatctctgcacatcgcttgagaagatccgagtggtctgatatctcgcatcataatttcatctagtattttggtcttgtattctccgcccactatggctcgcactaagaattcacgccgtggcaatcaacgttcgcggaacgtccctccacgccagcatgtgtccaatgatccggccgttgctgctgcgcagagggaggctgaaagacgcgagagaattctcgctgatcaacgtcgtactgctgctaaatggcgaccgaagattcccgaggtccgcaagtgtaacttcgagaacttcaagaaccgcttccatggtcttgaggagaaggactatgccattgagtgtctgatgagcggggctacgtttcaaggccaagttcgtcgtgagagagcatctcgtcgtaaggaagagattgcacgtcttcgccagagctggctctcttggggccagccaaagcaccatgagcaacctcggcagacccaaaccaagagagacatagaagacagagctcgaagagagaagcgagccgaagcactccaggccaacgacactgaaatccagcgtattcggattcagtctcagccagtgcttggtcatctgacatccttgctgagcgatactgagaaccgatcgacaccgcgaacgttcgtacgaccgttcaaggccctcgtgtatctccagcctaagatgaaggagattctcggaaccctcgaggaaaaatggggcgacgttgaagatctcgaggagtcggagcctgagaaatctggagaggcaactcctgaggaggtagaggttgtcgaagttgaagatgccaaagagccttctgctgagaaggacggggacgaggaagatgatgacgatgcagagtctgttctctctgttgactccaatgcggaggaccaggaaggtattatggacagcgttgaagcactgcgggatatgcggtgctacgtcaacttcatcgacaacgaggtgatgcccatgtatgcacagtacgatggaaccggagccgaccgcgtcaagttcgatgacctctggtctctcttccgcgttggtgacttggtctatatgcctgccggtggagaaaccgcaggtcgttatcatgaactctggcgtgtttaccgtgtggaagtccctgagcccgaggcagagtatcctagctccggaggctgggaattcttcgccgatgacctgcaacagaacaagaaagccacattcaacgtcttcgcctactctatcgatcatgatggcaacaacttcggagcagttcgccataccttctcgcttgcctcgttcccgggtgagcgcctcatcgaatcgcttgaagttttccctatccgctatcgccatgattaccagcggctcttggagacactgaaggatcaaggtcgtgccttccagcacttccttgccgatcgccaccagtcgtataatgcatggactctgaccagaaaccctccctttgacacccaggaggcagaggacgagatcttgcgcgatgagcagggagagccgatgcgtcaccccgagttcgtcgagagtgacgttatcgtcgacatggctgaagcatatcagaagaatcccgattggagacccaagttccacagacttacagccaacaaaggtcaacgttacgagacgtgcgacgacgacatgaatatccagcactggctcgacgggggacggcagtcacttgcctatgcccaggtcgagcttgtgcaggtctcagatggtgttgagatgcgacagcgacgtgagaacctcgcttcggacacgttcctgcgccagcggctaaagggcgagcgccggtacgagatccagccgcaggctctcgagcttcgcgacgaggatctcgtattgctgccgaagcgaatgttcgcgtatgctttacgcgagcgccgctttgtgcccgtcaacacgaactttcttaagcccattcgtcgtcaaccgggagtgtttgagaacttaaagatcttgaaagactacaaggacattgtgcgaggcctcgtggcctcccacttccagcgaaaagcgctcgagcgccgctacgttgacatgtcgacagagggaccaagccaagatctgatccaaaacaagggtcgtggcttggtcgtcttgctccatggtgtgcccggtgtgggcaagaccgctactgctgaggctgtggcaatggagtacagaaaacctctattcgtcattacgtgcggcgacctcggactaaccccgtccgaggtggaatcgtccctctccaacgtgttccggctcgcacacctctgggattgcgtactactgctggacgaggcggatgtgttcctctcgcagcgctcgaagctggatatgaagcgcaacgcgctcgtgtcggtattcctccgggtcttggagtactacaacggtctgctcttcctaacgactaaccgcgtcggaaccatcgacgaggcgttcaagtcacgcattcacatgtcgctgtactatccgcctctcgacaagacgcagacgcgcgatatcttccgtctcaacatctccaagctgcgcgagatcgagactcagcgccaggagatgactggtgaccctcctctgcttattaaggagagtgagatcatcgactttgctggcaagcactttgaggataatgctcggtctactggttgctggaacggacgacagattcgcaatgctttccagatcacgtcgagcttggcgcatcataactacactatgcagagcgagagtgcgcgctccatgggcaagcagccccccgccgggcccgtgctggaccgtggactgtttgagaaggtccagatgtcgacgcagagctttgatcgtcacatgatggagtcgaagggattcgatggcgacttgccacttcgaagcacgtttcatcaggagacacgctttgaataagcatgataaagtgatgggataacgaatgtgattcattggcatatacggcacagaaataggcttgggtttttttctttctgggtttaacggttatatgtggttacgttatttactatcatgagcaatcagttggttacgcacaacttaggtatgggagatacaattgaaacttgcgcgatactgagatactgtccgaattgaacgcgccatgaaaaagtcttcattgcgtgattaatgattgatctgaatatacagttgtaattgaaaacccaaacgcctccaatgcttatatctaatgaattcaatccttcttacaagacgttgtccggctgatgagtagcaaattggtagcacgtgatacactcaaaagcaagcgcactctcctatgtcgcttcgtgatatacataattcatgaaattctcagtcgtccaatccagatgtagatgcaactaagtgcggacattccgctgttcagaattcttgacccttctataaggccggttcatagtcttcttgtacttgatgtagaggaagaaggcgtccttcaggactacgaaaagacagcctccgatgaaactccggccccaacgctgctgcaacaaacccgttggaccgccccacgagggcttgcttacgaaacggctcgggagagcgaggcgcattagctcacccattccatagcagacaccggggaaaacaagggcgcccgcgatgaagtttatggggttcgaccgattggcggcatcggctgctctgtttgggcgattctgcccgttttgcgccgggtcgggatcgtcgacttcgtcaatctgaatatctatatcgaaatcgaggaacggcacgactggagcgcgtgcaggctcagcttgaacctcgggttcgggctcgggagcatttgagacgtatgccgtatgggaaccttgttctatcgctgcggcttgggcgcgggctgcccaggtcttttccaagttgtcggacaatgatctgtgaatgcggaagtaggacgactttatgagtggatagaaggctactacatgctcgggcggtggtggccaggcgaggacatttactgattgattgtaaattgtcaagtactatattttatggattagtatcgcgatccaggatccagtaccatgagacgcgactcaccatcagggaaaatgggatccccacgatatcaccaacgcccagacgattaattatgagccatgggcctatcaggggcaagaggccaaaatgtaaccaatccctcgaaggtactggagttcgtcgaaagaagctgggcgcaggcgagcgatccaccctgtccaagaatgccagcgtgacatccggcccagcaaaccagctgatggcatgcgctccgtatgtagcagagctcacgatagatccagctgccaggaagcccagcagaactctcggcgaccatatggagaagcccctgttcaagacattgttgagctgaaggacggggtcgtatcgctcagtgacggtgatgggcgatttgcacacggggcacttgacgtccttgtcctgtgcttctaagtcgttaacccaagccagaaggcattcctggtgcccttcgagagaacacgtgcagggtgtcgaccagtccgcaggtaggttgtcctcggactcgtccacaaggcagacgaagcatcgacgttcgttcgcggccggtccggaagtaggtatcggcgttgtctctgcggatccggggcctaagccgtcaggtgcggagtcttggtcttggtcttggtcttgagagacaatcacgggggtgtctgagagatcattcgaatggctttgcgacgagtcgggagaggacgccatgttgtgaagggagatgtcgggaggatgagaaatggtcgttggcggacaaccgtcgtcgtgtgtagtatagtggcagtggataacggataactgtgcttcatctatattccattatcgggtatgctgtatttctgtcggcggctcagctgggctatggcgttgcgcaacgagttagtatcaggtttgaggcttgcaggctgggcgttttgcttttgcgcttc

SEQ ID NO: 16144 - DNA, 1326 bp, Muscodor strobelii
  misc_feature: SGI cDNA ID NO. 565362
  misc_feature: Encodes the peptide sequence at SEQ ID NO 16145
atggcgtcctctcccgactcgtcgcaaagccattcgaatgatctctcagacacccccgtgattgtctctcaagaccaagaccaagaccaagactccgcacctgacggcttaggccccggatccgcagagacaacgccgatacctacttccggaccggccgcgaacgaacgtcgatgcttcgtctgccttgtggacgagtccgaggacaacctacctgcggactggtcgacaccctgcacgtgttctctcgaagggcaccaggaatgccttctggcttgggttaacgacttagaagcacaggacaaggacgtcaagtgccccgtgtgcaaatcgcccatcaccgtcactgagcgatacgaccccgtccttcagctcaacaatgtcttgaacaggggcttctccatatggtcgccgagagttctgctgggcttcctggcagctggatctatcgtgagctctgctacatacggagcgcatgccatcagctggtttgctgggccggatgtcacgctggcattcttggacagggtggatcgctcgcctgcgcccagcttctttcgacgaactccagtaccttcgagggattggttacattttggcctcttgcccctgataggcccatggctcataattaatcgtctgggcgttggtgatatcgtggggatcccattttccctgatgtacttgacaatttacaatcaatcagtaaatgtcctcgcctggccaccaccgcccgagcatgtagtagccttctatccactcataaagtcgtcctacttccgcattcacagatcattgtccgacaacttggaaaagacctgggcagcccgcgcccaagccgcagcgatagaacaaggttcccatacggcatacgtctcaaatgctcccgagcccgaacccgaggttcaagctgagcctgcacgcgctccagtcgtgccgttcctcgatttcgatatagatattcagattgacgaagtcgacgatcccgacccggcgcaaaacgggcagaatcgcccaaacagagcagccgatgccgccaatcggtcgaaccccataaacttcatcgcgggcgcccttgttttccccggtgtctgctatggaatgggtgagctaatgcgcctcgctctcccgagccgtttcgtaagcaagccctcgtggggcggtccaacgggtttgttgcagcagcgttggggccggagtttcatcggaggctgtcttttcgtagtcctgaaggacgccttcttcctctacatcaagtacaagaagactatgaaccggccttatagaagggtcaagaattctgaacagcggaatgtccgcacttag

SEQ ID NO: 16145 - protein, 441 aa, Muscodor strobelii
  misc_feature: SGI Peptide ID NO. 565362
  misc_feature (59)..(109): Pfam Id: PF00097 Pfam Desc: Zinc finger, C3HC4 type (RING finger)
  misc_feature (57)..(436): NCBI GI: 255936803 Blast Desc: Pc13g10060 [Penicillium chrysogenum Wisconsin 54-1255] gi|211584048|emb|CAP92075.1| Pc13g10060 [Penicillium chrysogenum Wisconsin 54-1255]
  misc_feature (2)..(438): NCBI GI: 119491861 Blast Desc: RING finger domain protein [Neosartorya fischeri NRRL 181] gi|119411585|gb|EAW21528.1| RING finger domain protein [Neosartorya fischeri NRRL 181]
  misc_feature (17)..(440): NCBI GI: 121705548 Blast Desc: RING finger domain protein [Aspergillus clavatus NRRL 1] gi|119399183|gb|EAW09611.1| RING finger domain protein [Aspergillus clavatus NRRL 1]
  misc_feature (28)..(440): NCBI GI: 70999740 Blast Desc: RING finger domain protein [Aspergillus fumigatus Af293] gi|66852224|gb|EAL92549.1| RING finger domain protein [Aspergillus fumigatus Af293] gi|159127599|gb|EDP52714.1| RING
  misc_feature (3)..(436): NCBI GI: 238487040 Blast Desc: RING finger domain protein [Aspergillus flavus NRRL3357] gi|220699637|gb|EED55976.1| RING finger domain protein [Aspergillus flavus NRRL3357]
  misc_feature (57)..(441): NCBI GI: 240108331 Blast Desc: C3HC4 type (RING finger) zinc finger containing protein [Coccidioides posadasii C735 delta SOWgp]
  misc_feature (31)..(436): NCBI GI: 225556617 Blast Desc: RING finger domain-containing protein [Ajellomyces capsulatus G186AR]
  misc_feature (57)..(438): NCBI GI: 242782371 Blast Desc: RING finger domain protein [Talaromyces stipitatus ATCC 10500] gi|218720132|gb|EED19551.1| RING finger domain protein [Talaromyces stipitatus ATCC 10500]
  misc_feature (57)..(441): NCBI GI: 119187075 Blast Desc: CIMG_03585 [Coccidioides immitis RS]
  misc_feature (14)..(440): NCBI GI: 258563692 Blast Desc: conserved [Uncinocarpus reesii 1704] gi|237908098|gb|EEP82499.1| conserved [Uncinocarpus reesii 1704]
MASSPDSSQSHSNDLSDTPVIVSQDQDQDQDSAPDGLGPGSAETTPIPTSGPAANERRCFVCLVDESEDNLPADWSTPCTCSLEGHQECLLAWVNDLEAQDKDVKCPVCKSPITVTERYDPVLQLNNVLNRGFSIWSPRVLLGFLAAGSIVSSATYGAHAISWFAGPDVTLAFLDRVDRSPAPSFFRRTPVPSRDWLHFGLLPLIGPWLIINRLGVGDIVGIPFSLMYLTIYNQSVNVLAWPPPPEHVVAFYPLIKSSYFRIHRSLSDNLEKTWAARAQAAAIEQGSHTAYVSNAPEPEPEVQAEPARAPVVPFLDFDIDIQIDEVDDPDPAQNGQNRPNRAADAANRSNPINFIAGALVFPGVCYGMGELMRLALPSRFVSKPSWGGPTGLLQQRWGRSFIGGCLFVVLKDAFFLYIKYKKTMNRPYRRVKNSEQRNVRT

SEQ ID NO: 16146 - DNA, 2926 bp, Muscodor strobelii
  misc_feature: SGI EST ID NO. CUFF.39326.2
  misc_feature: Variant of the nucleotide sequence at SEQ ID NO 16144
cgcaaaagcaaaacgcccagcctgcaagcctcaaacctgatactaactcgttgcgcaacgccatagcccagctgagccgccgacagaaatacagcatacccgataatggaatatagatgaagcacagttatccgttatccactgccactatactacacacgacgacggttgtccgccaacgaccatttctcatcctcccgacatctcccttcacaacatggcgtcctctcccgactcgtcgcaaagccattcgaatgatctctcagacacccccgtgattgtctctcaagaccaagaccaagaccaagactccgcacctgacggcttaggccccggatccgcagagacaacgccgatacctacttccggaccggccgcgaacgaacgtcgatgcttcgtctgccttgtggacgagtccgaggacaacctacctgcggactggtcgacaccctgcacgtgttctctcgaagggcaccaggaatgccttctggcttgggttaacgacttagaagcacaggacaaggacgtcaagtgccccgtgtgcaaatcgcccatcaccgtcactgagcgatacgaccccgtccttcagctcaacaatgtcttgaacaggggcttctccatatggtcgccgagagttctgctgggcttcctggcagctggatctatcgtgagctctgctacatacggagcgcatgccatcagctggtttgctgggccggatgtcacgctggcattcttggacagggtggatcgctcgcctgcgcccagcttctttcgacgaactccagtaccttcgagggattggttacattttggcctcttgcccctgataggcccatggctcataattaatcgtctgggcgttggtgatatcgtggggatcccattttccctgatgtacttgacaatttacaatcaatcagtaaatgtcctcgcctggccaccaccgcccgagcatgtagtagccttctatccactcataaagtcgtcctacttccgcattcacagatcattgtccgacaacttggaaaagacctgggcagcccgcgcccaagccgcagcgatagaacaaggttcccatacggcatacgtctcaaatgctcccgagcccgaacccgaggttcaagctgagcctgcacgcgctccagtcgtgccgttcctcgatttcgatatagatattcagattgacgaagtcgacgatcccgacccggcgcaaaacgggcagaatcgcccaaacagagcagccgatgccgccaatcggtcgaaccccataaacttcatcgcgggcgcccttgttttccccggtgtctgctatggaatgggtgagctaatgcgcctcgctctcccgagccgtttcgtaagcaagccctcgtggggcggtccaacgggtttgttgcagcagcgttggggccggagtttcatcggaggctgtcttttcgtagtcctgaaggacgccttcttcctctacatcaagtacaagaagactatgaaccggccttatagaagggtcaagaattctgaacagcggaatgtccgcacttagttgcatctacatctggattggacgactgagaatttcatgaattatgtatatcacgaagcgacataggagagtgcgcttgcttttgagtgtatcacgtgctaccaatttgctactcatcagccggacaacgtcttgtaagaaggattgaattcattagatataagcattggaggcgtttgggttttcaattacaactgtatattcagatcaatcattaatcacgcaatgaagactttttcatggcgcgttcaattcggacagtatctcagtatcgcgcaagtttcaattgtatctcccatacctaagttgtgcgtaaccaactgattgctcatgatagtaaataacgtaaccacatataaccgttaaacccagaaagaaaaaaacccaagcctatttctgtgccgtatatgccaatgaatcacattcgttatcccatcactttatcatgcttattcaaagcgtgtctcctgatgaaacgtgcttcgaagtggcaagtcgccatcgaatcccttcgactccatcatgtgacgatcaaagctctgcgtcgacatctggaccttctcaaacagtccacggtccagcacgggcccggcggggggctgcttgcccatggagcgcgcactctcgctctgcatagtgtagttatgatgcgccaagctcgacgtgatctggaaagcattgcgaatctgtcgtccgttccagcaaccagtagaccgagcattatcctcaaagtgcttgccagcaaagtcgatgatctcactctccttaataagcagaggagggtcaccagtcatctcctggcgctgagtctcgatctcgcgcagcttggagatgttgagacggaagatatcgcgcgtctgcgtcttgtcgagaggcggatagtacagcgacatgtgaatgcgtgacttgaacgcctcgtcgatggttccgacgcggttagtcgttaggaagagcagaccgttgtagtactccaagacccggaggaataccgacacgagcgcgttgcgcttcatatccagcttcgagcgctgcgagaggaacacatccgcctcgtccagcagtagtacgcaatcccagaggtgtgcgagccggaacacgttggagagggacgattccacctcggacggggttagtccgaggtcgccgcacgtaatgacgaatagaggttttctgtactccattgccacagcctcagcagtagcggtcttgcccacaccgggcacaccatggagcaagacgaccaagccacgacccttgttttggatcagatcttggcttggtccctctgtcgacatgtcaacgtagcggcgctcgagcgcttttcgctggaagtgggaggccacgaggcctcgcacaatgtccttgtagtctttcaagatctgc

SEQ ID NO: 16147 - DNA, 837 bp, Muscodor strobelii
  misc_feature: SGI cDNA ID NO. 565363
  misc_feature: Encodes the peptide sequence at SEQ ID NO 16148
atgaagttcccattgactataattgcactcgctgcagaatttacgaatgtaatcgctgcaccccaggatccggataagactttggtgacccttattcggcctacaaggaccagcattgcccaacactctgatgcgactatttcacaaccaccagtcttgcaggcgcgagatggtcaatatgtgattaccctcgtaaactctcacacggcgcccatcgagacacaccacgttgtcaaccgagacttcgtaaacttgatagaggcaccacacgcgcttcacgatgatgcgggagtgatcgaggtgggagcggagtccataatcactctgccacaaggttgggccggcaatcttgccgtggccgaaaaagggtacatgaccccagacagcaattcgttgctcgagggctcgttcgtactccaagatgcagggtcacaatttccgcaaatcacccttgatgttagctacgtagatggattcactgtccccataacttgcgcatgtgaaaacgaggttcgcctgggttgcaatctggacttgaatcgcagatgtccggccatacatcaactaagcgaaaaggcctgtagaaacccaagccgagagttgcccgtcggacagcatgaagccttcatgaatgactgtgctggtatggcctacacatatcccacggacgatatggcgtctatcaatggtattcctggctgcaacgacaggattcgatgttgcgttggaacggcctgtagacctcatcctcatcagacggtgtgcccagatggaaatggtggcgaggtagcttgtggtcatcctggggtcatgatggaatccgccatcttatcatag

SEQ ID NO: 16148 - protein, 278 aa, Muscodor strobelii
  misc_feature: SGI Peptide ID NO. 565363
  misc_feature (61)..(252): NCBI GI: 212544009 Blast Desc: PMAA_049590 [Penicillium marneffei ATCC 18224] gi|210067066|gb|EEA21159.1| PMAA_049590 [Penicillium marneffei ATCC 18224]
  misc_feature (62)..(252): NCBI GI: 242788311 Blast Desc: conserved [Talaromyces stipitatus ATCC 10500] gi|218721340|gb|EED20759.1| conserved [Talaromyces stipitatus ATCC 10500]
MKFPLTIIALAAEFTNVIAAPQDPDKTLVTLIRPTRTSIAQHSDATISQPPVLQARDGQYVITLVNSHTAPIETHHVVNRDFVNLIEAPHALHDDAGVIEVGAESIITLPQGWAGNLAVAEKGYMTPDSNSLLEGSFVLQDAGSQFPQITLDVSYVDGFTVPITCACENEVRLGCNLDLNRRCPAIHQLSEKACRNPSRELPVGQHEAFMNDCAGMAYTYPTDDMASINGIPGCNDRIRCCVGTACRPHPHQTVCPDGNGGEVACGHPGVMMESAILS

SEQ ID NO: 16149 - DNA, 1527 bp, Muscodor strobelii
  misc_feature: SGI cDNA ID NO. 565364
  misc_feature: Reduced expression when VOC is produced
  misc_feature: Encodes the peptide sequence at SEQ ID NO 16150
atgactgttttccagcggctgtcattggtggccgccattgcttctactgtctctgcacagcttcaacaacctttgatatcccaggatcagctaccgctggtcactgataagacggcaagcaagccactggttgataccgatgagctccaggctagtatcagcattgagagccttttcgagcgtgcgaatgatctgtacgagatcgcaacggtctcagaagatcagtatggccatcccacgcgtgtcattggcagcaagggccatcgcagaacacttgaatatgttgcggccgagatcgataaattaggcgactactacacatactcaacccagccctttcccgccgtcatgggtcaagtttttcaatctcgtttggtccttggccacgatgtacccagttcggccagaccaatgtcattgacgcctccgaccgctaagaaggagcccgtttacgctaatgtgatcctcgttgacaatgttggatgccaagcttctgactacccggcggaactggatggcaatatcgcgtttataaagcgtggcaaatgttcatttggcgtcaaatccgaactcgcaggaaacgctggtgctgtagccgcaatcgtgtacaactcggagcctggcgaactcagcggaaccctcaatgccgtgtcgcacaatcatgttgccacgtttggtctttccgatgcagatgccgctccagtcatcaagaagctcaaggcaggaaagactgtggattccatcgctttcattgactctattgtcgaaaccatcaacacgacaaacatcatcatacaaacgagagaaggcgacccggagaactgtgtcatgctaggtggtcacagcgactctgtcggcgaaggccccggaatcaacgatgatgggtctggcagtttgtcattgctcgaagtggctacacgtttgactcagttcagcgtcaagaattgcgtgcgatttgcttggtgggctggtgaggaggagggtcttctcggatccgactactatgtagacaccctttccgaagaggagaatcagaagatccgccttttcatggattacgatatgatgggcagccccaactttgcctatcaaatctataatgcgacgaatgcggttaatcccactggttctgaacaacttcgtaatctatacatcgattggtatgagtcaaagggcttgaactacacattcattccattcgacggaagaagtgattacgacgcgtttattcgcaacggaattcctggcggcggaatcgcaacaggcgccgaaggtatcaagacgaaagaggaagaagccatgttcggcggcaaagctggtgattggtttgacccatgctaccaccaattatgcgacgatgttggcaacgtcaacgccactgcatggttgatgaatacacagcttattgcccattctgttgcaacctatgctctttcgttcgacaacttcccaaagagggagtctacacgtgctagtgggctttacgagagtgaaacaaattaccacggcagatatcttgttaggtaa

SEQ ID NO: 16150 - protein, 508 aa, Muscodor strobelii
  misc_feature: SGI Peptide ID NO. 565364
  misc_feature (140)..(239): Pfam Id: PF02225 Pfam Desc: PA domain
  misc_feature (274)..(463): Pfam Id: PF04389 Pfam Desc: Peptidase family M28
  misc_feature (140)..(213): Pfam Id: PF02225 Pfam Desc: PA domain
  misc_feature (1)..(502): NCBI GI: 169620726 Blast Desc: SNOG_13567 [Phaeosphaeria nodorum SN15] gi|160704093|gb|EAT79014.2| SNOG_13567 [Phaeosphaeria nodorum SN15]
  misc_feature (1)..(507): NCBI GI: 189194043 Blast Desc: aminopeptidase Y precursor [Pyrenophora tritici-repentis Pt-1C-BFP] gi|187978924|gb|EDU45550.1| aminopeptidase Y precursor [Pyrenophora tritici-repentis
  misc_feature (7)..(507): NCBI GI: 259481508 Blast Desc: TPA: aminopeptidase, (AFU_orthologue; AFUA_2G00220) [Aspergillus nidulans FGSC A4]
  misc_feature (9)..(507): NCBI GI: 154308695 Blast Desc: BC1G_07770 [Botryotinia fuckeliana B05.10] gi|150852721|gb|EDN27913.1| BC1G_07770 [Botryotinia fuckeliana B05.10]
  misc_feature (6)..(506): NCBI GI: 156050627 Blast Desc: SS1G_07901 [Sclerotinia sclerotiorum 1980] gi|154692301|gb|EDN92039.1| SS1G_07901 [Sclerotinia sclerotiorum 1980]
  misc_feature (9)..(507): NCBI GI: 256726420 Blast Desc: [Nectria haematococca mpVI 77-13-4]
  misc_feature (5)..(506): NCBI GI: 46124299 Blast Desc: FG06527.1 [Gibberella zeae PH-1]
  misc_feature (7)..(506): NCBI GI: 145234839 Blast Desc: An03g01660 [Aspergillus niger] gi|134057742|emb|CAK38139.1| protein product [Aspergillus niger]
  misc_feature (7)..(507): NCBI GI: 67526921 Blast Desc: AN3918.2 [Aspergillus nidulans FGSC A4] gi|40740037|gb|EAA59227.1| AN3918.2 [Aspergillus nidulans FGSC A4]
  misc_feature (1)..(507): NCBI GI: 121711164 Blast Desc: aminopeptidase, [Aspergillus clavatus NRRL 1] gi|119401348|gb|EAW11772.1| aminopeptidase, [Aspergillus clavatus NRRL 1]
  misc_feature (14)..(490): SWISSPROT Homolog: EC 3.4.11.15 Aminopeptidase Y
  misc_feature: Useful for introducing or modulating the production of volatile compounds
MTVFQRLSLVAAIASTVSAQLQQPLISQDQLPLVTDKTASKPLVDTDELQASISIESLFERANDLYEIATVSEDQYGHPTRVIGSKGHRRTLEYVAAEIDKLGDYYTYSTQPFPAVMGQVFQSRLVLGHDVPSSARPMSLTPPTAKKEPVYANVILVDNVGCQASDYPAELDGNIAFIKRGKCSFGVKSELAGNAGAVAAIVYNSEPGELSGTLNAVSHNHVATFGLSDADAAPVIKKLKAGKTVDSIAFIDSIVETINTTNIIIQTREGDPENCVMLGGHSDSVGEGPGINDDGSGSLSLLEVATRLTQFSVKNCVRFAWWAGEEEGLLGSDYYVDTLSEEENQKIRLFMDYDMMGSPNFAYQIYNATNAVNPTGSEQLRNLYIDWYESKGLNYTFIPFDGRSDYDAFIRNGIPGGGIATGAEGIKTKEEEAMFGGKAGDWFDPCYHQLCDDVGNVNATAWLMNTQLIAHSVATYALSFDNFPKRESTRASGLYESETNYHGRYLVR

SEQ ID NO: 16151 - DNA, 1934 bp, Muscodor strobelii
  misc_feature: SGI EST ID NO. CUFF.38176.1
  misc_feature: Variant of the nucleotide sequence at SEQ ID NO 16149
ggggacccaataaatgcccggccggtgtcgcagatacacttgagtcgtcatggccttcgtgtttctcagacttcccttggttcaccagagctggcattgaaactcgatagacaactgctggcaagatgactgttttccagcggctgtcattggtggccgccattgcttctactgtctctgcacagcttcaacaacctttgatatcccaggatcagctaccgctggtcactgataagacggcaagcaagccactggttgataccgatgagctccaggctagtatcagcattgagagccttttcgagcgtgcgaatgatctgtacgagatcgcaacggtctcagaagatcagtatggccatcccacgcgtgtcattggcagcaagggccatcgcagaacacttgaatatgttgcggccgagatcgataaattaggcgactactacacatactcaacccagccctttcccgccgtcatgggtcaagtttttcaatctcgtttggtccttggccacgatgtacccagttcggccagaccaatgtcattgacgcctccgaccgctaagaaggagcccgtttacgctaatgtgatcctcgttgacaatgttggatgccaagcttctgactacccggcggaactggatggcaatatcgcgtttataaagcgtggcaaatgttcatttggcgtcaaatccgaactcgcaggaaacgctggtgctgtagccgcaatcgtgtacaactcggagcctggcgaactcagcggaaccctcaatgccgtgtcgcacaatcatgttgccacgtttggtctttccgatgcagatgccgctccagtcatcaagaagctcaaggcaggaaagactgtggattccatcgctttcattgactctattgtcgaaaccatcaacacgacaaacatcatcatacaaacgagagaaggcgacccggagaactgtgtcatgctaggtggtcacagcgactctgtcggcgaaggccccggaatcaacgatgatgggtctggcagtttgtcattgctcgaagtggctacacgtttgactcagttcagcgtcaagaattgcgtgcgatttgcttggtgggctggtgaggaggagggtcttctcggatccgactactatgtagacaccctttccgaagaggagaatcagaagatccgccttttcatggattacgatatgatgggcagccccaactttgcctatcaaatctataatgcgacgaatgcggttaatcccactggttctgaacaacttcgtaatctatacatcgattggtatgagtcaaagggcttgaactacacattcattccattcgacggaagaagtgattacgacgcgtttattcgcaacggaattcctggcggcggaatcgcaacaggcgccgaaggtatcaagacgaaagaggaagaagccatgttcggcggcaaagctggtgattggtttgacccatgctaccaccaattatgcgacgatgttggcaacgtcaacgccactgcatggttgatgaatacacagcttattgcccattctgttgcaacctatgctctttcgttcgacaacttcccaaagagggagtctacacgtgctagtgggctttacgagagtgaaacaaattaccacggcagatatcttgttaggtaataggccttatccgttgtattcggcgttgttaagcgcaggttttggtcgacatgtgaatactgtaacataagcatggagtggtcggcgttgagctatttcgatgggacgtacaacacaatatctcgattagaaagagcatgatagagcgataccaatcacactatgaaattatagagatagagagaactaatacaatcaaatcgagaggcatttcatgatgctattcgatcattttttcgcaacgtcgagcctggaagtccccaaattgtcagtatccacccg

SEQ ID NO: 16152 - DNA, 636 bp, Muscodor strobelii
  misc_feature: SGI cDNA ID NO. 565365
  misc_feature: Encodes the peptide sequence at SEQ ID NO 16153
atgcatctaacaaccctcttcctcctcctccccagtctcaccaccgccatcccaacaacgaaacctctcccccaagcccaactcgaagcattcaaaccacctataataatatcctcttcattctccggaaacgggtgtccgcaaaccgcacaaccgaaactgatctcttccacatggccaaacttctccttccgactcccagccttcagcgtctctacagataacggagtccaaggaaagacgcagaattgtcaagcgcacttgaatctcggaggcggcacaccgggctgggaggtcgcgctgcgagagctgtggtcgactggccatgtgacgctcgagggcgagggagtcgctttgacggagtattttacggcaacggccacgcagtccatcgccaatacaggtgacggcgcgatttcgaggaatctcaactggcacactgccatcccgacggatgacttggtttggtcgccgtgtatagaagaagatggctatgttggcttagtgaatgtcaattttcgtatggtgcttacgtcttctaatgctgctgcgcatgggtattatggtgctgcggcgaattcgtctgttcaggagcggtttggatgggtttggagacgatgtgggactggtagctag

SEQ ID NO: 16153 - protein, 211 aa, Muscodor strobelii
  misc_feature: SGI Peptide ID NO. 565365
  misc_feature (34)..(207): NCBI GI: 116181114 Blast Desc: CHGG_01185 [Chaetomium globosum CBS 148.51] gi|88185482|gb|EAQ92950.1| CHGG_01185 [Chaetomium globosum CBS 148.51]
  misc_feature (34)..(207): NCBI GI: 39972983 Blast Desc: MGG_07786 [Magnaporthe grisea 70-15] gi|145012561|gb|EDJ97215.1| MGG_07786 [Magnaporthe grisea 70-15]
  misc_feature (34)..(207): NCBI GI: 171695792 Blast Desc: protein product [Podospora anserina] gi|170948138|emb|CAP60302.1| protein product [Podospora anserina]
  misc_feature (34)..(207): NCBI GI: 85111891 Blast Desc: NCU00757 [Neurospora crassa OR74A] gi|28925923|gb|EAA34918.1| [Neurospora crassa OR74A]
  misc_feature (1)..(207): NCBI GI: 169621257 Blast Desc: SNOG_13837 [Phaeosphaeria nodorum SN15] gi|111057741|gb|EAT78861.1| SNOG_13837 [Phaeosphaeria nodorum SN15]
  misc_feature (13)..(207): NCBI GI: 39941306 Blast Desc: [Magnaporthe grisea 70-15] gi|145022233|gb|EDK06253.1| [Magnaporthe grisea 70-15]
  misc_feature (9)..(207): NCBI GI: 85116560 Blast Desc: NCU02483 [Neurospora crassa OR74A] gi|28926879|gb|EAA35841.1| conserved [Neurospora crassa OR74A]
  misc_feature (9)..(207): NCBI GI: 38567106 Blast Desc: conserved [Neurospora crassa]
  misc_feature (3)..(207): NCBI GI: 116194011 Blast Desc: CHGG_06723 [Chaetomium globosum CBS 148.51] gi|88182636|gb|EAQ90104.1| CHGG_06723 [Chaetomium globosum CBS 148.51]
  misc_feature (36)..(207): NCBI GI: 170940276 Blast Desc: protein product [Podospora anserina]
MHLTTLFLLLPSLTTAIPTTKPLPQAQLEAFKPPIIISSSFSGNGCPQTAQPKLISSTWPNFSFRLPAFSVSTDNGVQGKTQNCQAHLNLGGGTPGWEVALRELWSTGHVTLEGEGVALTEYFTATATQSIANTGDGAISRNLNWHTAIPTDDLVWSPCIEEDGYVGLVNVNFRMVLTSSNAAAHGYYGAAANSSVQERFGWVWRRCGTGS

SEQ ID NO: 16154 - DNA, 804 bp, Muscodor strobelii
  misc_feature: SGI cDNA ID NO. 565366
  misc_feature: Encodes the peptide sequence at SEQ ID NO 16155
atgtatacaccgacgccgccgccgccggcacccccaccaaagcccagcagccacgatgtcagtcggcttgggacaccatcgacaaactctccccatccatttagcccagacaatagctataccggcggcctagagagcatgggagtcagcaacggtcggataccgaacaacgaggcatctggcttgataccagccccgtcgacggcgccaggaggagctatgcgacagtaccaccaccagcagcagcctataccagatcctggcgatgcttggattcccagcatattagaggataaatcaaaacaagacctagccgaaatcctctccaccccgtccctcctccaagcgctcaacctctcgcaagaaaccatacatccctccctcgcccaatcccaagacctactcctctcctccctctccgaaaacgtcggactcgcccaacatctaaccgagctcgagtcccgcctcgaacaccaacgcgcatccacacaagcgcagcttctctccgcgcacgcattagaaaggcagtggagggcgaaacaagcagatacagacgcggcgctagccccctttgcgcccgcggcgttgtatactaggttgacgcaggcgctgcaggagcaggagatgctttgtgcggctatggaggagagctttttggagggtagtggggaggatggcgggttggcgacggagagggaagtgctggattgggttagacggtatagggaggcgagacggttgtgttatttgaggggggagaggaaggagaggtggaatgagagacgggttggggggtggcggtag

SEQ ID NO: 16155 - protein, 267 aa, Muscodor strobelii
  misc_feature: SGI Peptide ID NO. 565366
  misc_feature (8)..(267): NCBI GI: 46108884 Blast Desc: FG01324.1 [Gibberella zeae PH-1]
  misc_feature (1)..(267): NCBI GI: 85090870 Blast Desc: NCU09900 [Neurospora crassa OR74A] gi|28920001|gb|EAA29389.1| conserved [Neurospora crassa OR74A]
  misc_feature (16)..(267): NCBI GI: 154304065 Blast Desc: BC1G_09668 [Botryotinia fuckeliana B05.10] gi|150854303|gb|EDN29495.1| BC1G_09668 [Botryotinia fuckeliana B05.10]
  misc_feature (46)..(267): NCBI GI: 156030605 Blast Desc: SS1G_14398 [Sclerotinia sclerotiorum 1980] gi|154700789|gb|EDO00528.1| SS1G_14398 [Sclerotinia sclerotiorum 1980]
  misc_feature (101)..(267): NCBI GI: 171688009 Blast Desc: protein product [Podospora anserina] gi|170943966|emb|CAP69618.1| protein product [Podospora anserina]
  misc_feature (8)..(267): NCBI GI: 39976903 Blast Desc: MGG_06354 [Magnaporthe grisea 70-15] gi|145016244|gb|EDK00734.1| MGG_06354 [Magnaporthe grisea 70-15]
  misc_feature (87)..(267): NCBI GI: 169608315 Blast Desc: SNOG_07228 [Phaeosphaeria nodorum SN15] gi|160701620|gb|EAT85879.2| SNOG_07228 [Phaeosphaeria nodorum SN15]
  misc_feature (80)..(267): NCBI GI: 189189340 Blast Desc: conserved [Pyrenophora tritici-repentis Pt-1C-BFP] gi|187972615|gb|EDU40114.1| conserved [Pyrenophora tritici-repentis Pt-1C-BFP]
  misc_feature (16)..(267): NCBI GI: 121702047 Blast Desc: conserved [Aspergillus clavatus NRRL 1] gi|119397431|gb|EAW07862.1| conserved [Aspergillus clavatus NRRL 1]
  misc_feature (16)..(267): NCBI GI: 70995148 Blast Desc: AFUA_1G09720 [Aspergillus fumigatus Af293] gi|66849974|gb|EAL90301.1| AFUA_1G09720 [Aspergillus fumigatus Af293] gi|159131095|gb|EDP56208.1| AFUB_009170 [Aspergillus
MYTPTPPPPAPPPKPSSHDVSRLGTPSTNSPHPFSPDNSYTGGLESMGVSNGRIPNNEASGLIPAPSTAPGGAMRQYHHQQQPIPDPGDAWIPSILEDKSKQDLAEILSTPSLLQALNLSQETIHPSLAQSQDLLLSSLSENVGLAQHLTELESRLEHQRASTQAQLLSAHALERQWRAKQADTDAALAPFAPAALYTRLTQALQEQEMLCAAMEESFLEGSGEDGGLATEREVLDWVRRYREARRLCYLRGERKERWNERRVGGWR

SEQ ID NO: 16156 - DNA, 1812 bp, Muscodor strobelii
  misc_feature: SGI EST ID NO. CUFF.38166.0
  misc_feature: Variant of the nucleotide sequence at SEQ ID NO 16154
tgccgcgggaggttccgcttaggtattggagctccccgagcttaggtacctgcaggcatctagtgccacagtaccaggttgaaccagtttcaccagttaccactgcatgtgacgccagctacttccctcaacaacattaagacagcaacgaatgatacacggcattcaaccacaagaatactcggatcttagctacagacattcacggaaatcagtagtccagaagccatgtatacaccgacgccgccgccgccggcacccccaccaaagcccagcagccacgatgtcagtcggcttgggacaccatcgacaaactctccccatccatttagcccagacaatagctataccggcggcctagagagcatgggagtcagcaacggtcggataccgaacaacgaggcatctggcttgataccagccccgtcgacggcgccaggaggagctatgcgacagtaccaccaccagcagcagcctataccagatcctggcgatgcttggattcccagcatattagaggataaatcaaaacaagacctagccgaaatcctctccaccccgtccctcctccaagcgctcaacctctcgcaagaaaccatacatccctccctcgcccaatcccaagacctactcctctcctccctctccgaaaacgtcggactcgcccaacatctaaccgagctcgagtcccgcctcgaacaccaacgcgcatccacacaagcgcagcttctctccgcgcacgcattagaaaggcagtggagggcgaaacaagcagatacagacgcggcgctagccccctttgcgcccgcggcgttgtatactaggttgacgcaggcgctgcaggagcaggagatgctttgtgcggctatggaggagagctttttggagggtagtggggaggatggcgggttggcgacggagagggaagtgctggattgggttagacggtatagggaggcgagacggttgtgttatttgaggggggagaggaaggagaggtggaatgagagacgggttggggggtggcggtagtgtggttgttgttacgattgcgaaatcattctcgaggccgaacagaccatttgccccacgtcgattcttgatcatgccgagcttcgtgatgggccgtgttgtcggactcaatggccgtggctacctaatgactacgcggtcaacgatgtgggcacaggtgattagatgctcaaagacgccggacgcggtatttaagggggagtttggggagagaaaagggtcacgaggatacgcctgatggtacactttaggtattctgagggacggttcagcatcacgaaaagaacttcgcgcttattgccatcgccatcatataaacacatacaaactgttcaatgagcggaacaccgctccatgcggcaacgacatggggcattctagtccactgagaccacataccaaggaatgttccagagataggcattcactaggtgtgcaaacacgtacccatctcaagcttcgaagaaaaggccattcaaaatcgtaagcagcagcacgaaggagaccgagaaaaaggcaacacacacaatctacccatagtaggtgcacctacgttgaatacatgtattttaaagaaggttgactcccaccaacagcgtaagtaagttggcccagtggtcgcgtcatctagccctatctaggagagtctgtgtttgattccgcggcataccgatttctcgttcttcctaatctcgttttttgcctatcaggtttgaaagactcatcagccatgagaccatgttcacagtcaatagtcttcggaaatactaattataagat

SEQ ID NO: 16157 - DNA, 2790 bp, Muscodor strobelii
  misc_feature: SGI cDNA ID NO. 565367
  misc_feature: Encodes the peptide sequence at SEQ ID NO 16158
atgctggcgcagaggcctcagcggatctcgggtctgcccttcgaccagatggcagacgaagacgactacgatacggatgttgccgagaatctgcacgacatgactttcattacagatgccgaaaacttttccaggtcgctcgataccctctcctactccaaacattccaccgccgatcaacgagccgaccacttcgatctggtcgacaagtactatcactatgctgcgaaaaaggttcgtgaacttcgccagtcgcgaggcccccctgcagaccgcgattcttccagccaggactctatggatctagatgaggcagacgaagcgccctcggccgcaagccaggctgaagacctcaagtattgggagcaagaggcacaggtgtgggacctcttgcgccgtgttctgccactccgatactcgaagcgcaatactctgcgacccctccgacgcgagatctctaagttccagtcatcagctgatgtctgggaggacttcctacagtccgacctggtggctcaagagcgcaaggctattctcgaatgcctccagaccagtgcagacgaatctcgggctcgcgtcaatgacatggtcaaggactatgagaaacaggcgaatcgaggttccatgaccgcccacggttggctccatacgcgactgctcctcaagaagcagaaatcgaccggtggctgggtagggcctttggaccccaaaagctctgacgctggcaggatggtaaccgacgacaagaagacacccctcgtcacgcagctcgacccagatgccgtcacgcgacaaggccggaagctggaatctggggacgaatttttcgagcgcgccatctggctgggatgctatgaactcctccgtcgcggcagaagcttgaaagagatccgaggtttctgtgacgaacgagaccaggtctggcgagctgtgagcatgtcagccatgccgctgtctaaaatggcggacctcgaaccggtctctactgacccaatggccatcttactctggcgtcgtacctgctttgccctcgcccgccaaggcggcatcaatgattacgaaagggcagtatacggaattctctcgggagatatttctagtgtggagaagatatgcacaaactgggatgacttcgttttcgcccactacaattcattgttaagagctcagtttgatgactttgtcatgaagcgatcaccccctgacgctactgcagccattcgtcaaagcttttcttctttcaatgcccttcaattccatggagactcatcatcagctagcgagcgcctcgtgagctctctggagtccaacagggccacccaagccgaggctaaaacgcccatgaaggctctccaagcagccatcatctcggacaacctgacacaatatatgcatgacctcggcgcagtattaggcaagcgtgctaacttgaacgggccgtcatatctcatccctgagatcgatagcgattcggttgatgccgacgatcctcggttctgtcaacttcatgatcaccaaggactacgtgtcgcaacgcatgtctatctggtcataaccagtctcgaccgcctcaagggcggcgaggcagccgagttggcagccaggcctaaagcccaggacaatatcatcgcgacctatgtcagcacgctacgattgtctggtctgacagatttcatgccgctttactgctccaaactggacgaagaccgaggtttctacacgctcagccgcaatattagtcgtgttgtggacgcgcacaacagaaatgacctcttgaggaacatggagaaactcgggatggatattggcagatttgttttctaccagccttattcgcttctagacagtttccctataacggatccacctccgccagcctttggggctttttcgatcttcttgcaggaaacaccgggattgagatacggccgacccatgaaagctgacttctttggtgatgagtcggcgactatggatctcgtcgacgagccccttatctcgtcccttgagtggtttctcctagtggaaggtctatgggacgaatttttccaagcgggcacactggtctacaaacggtttctcaagaccttcaacctgcaatcagcacgcagcctgtgtgagcgtgtcaaatgcgccgacatcttccgaaagaaggccggcctcacaatccctaacgataacgatgtttcatggttcgcagatgcatattcgtctgccagagagggcatctttgaagatgacggcctaagtgcagaggaaattgccaaggccaagccctttttcgagttggaatgcctcgtacgtgtgctcgacgcgatagaaaccgttgcgtccactgtacgactagagcaaactcccggcgaagttgccggcaaggagatgtggagctacatcggcgaggagttgaagaaaatcaagagttgtatggggcctctgatggatgggtggctcttggagtcagctgaagacgaagactttgcgtacattcgagatgcgtatcttaccgagacggtgctcggctttgtcagcgtcctacacgttacaggcacacacttgtcgagggacaacttgctggagtgcatggaactggcgtcagtgattgccaagaaggattccgatgtggcggcagcgatgatgaaggctgggcgaatgaaggaactggtggagggcttcgctggcgtgagtaaggctctcgccatcagtgccgcggagaagagatcgctgggcagcagcagcaagaaggccagagagaggggctggagccgcgagctgtggcaggttaagaagtaa

SEQ ID NO: 16158 - protein, 929 aa, Muscodor strobelii
  misc_feature: SGI Peptide ID NO. 565367
  misc_feature (336)..(387): Pfam Id: PF04121 Pfam Desc: Nuclear pore protein 84 / 107
  misc_feature (39)..(928): NCBI GI: 256735022 Blast Desc: NECHADRAFT_31808 [Nectria haematococca mpVI 77-13-4]
  misc_feature (10)..(928): NCBI GI: 116180262 Blast Desc: CHGG_00759 [Chaetomium globosum CBS 148.51] gi|88185056|gb|EAQ92524.1| CHGG_00759 [Chaetomium globosum CBS 148.51]
  misc_feature (39)..(928): NCBI GI: 85111725 Blast Desc: NCU09814 [Neurospora crassa OR74A] gi|28925837|gb|EAA34838.1| [Neurospora crassa OR74A]
  misc_feature (38)..(928): NCBI GI: 171687981 Blast Desc: protein product [Podospora anserina] gi|170943952|emb|CAP69604.1| protein product [Podospora anserina]
  misc_feature (39)..(928): NCBI GI: 46108882 Blast Desc: FG01323.1 [Gibberella zeae PH-1]
  misc_feature (38)..(928): NCBI GI: 156053367 Blast Desc: SS1G_06851 [Sclerotinia sclerotiorum 1980] gi|154704629|gb|EDO04368.1| SS1G_06851 [Sclerotinia sclerotiorum 1980]
  misc_feature (39)..(928): NCBI GI: 145615651 Blast Desc: MGG_05736 [Magnaporthe grisea 70-15] gi|145022441|gb|EDK06461.1| MGG_05736 [Magnaporthe grisea 70-15]
  misc_feature (115)..(912): NCBI GI: 145239527 Blast Desc: An08g02930 [Aspergillus niger] gi|134076921|emb|CAK45330.1| protein product [Aspergillus niger]
  misc_feature (25)..(928): NCBI GI: 238839089 Blast Desc: conserved [Microsporum canis CBS 113480]
  misc_feature (41)..(898): NCBI GI: 226285908 Blast Desc: conserved [Paracoccidioides brasiliensis Pb01]
MLAQRPQRISGLPFDQMADEDDYDTDVAENLHDMTFITDAENFSRSLDTLSYSKHSTADQRADHFDLVDKYYHYAAKKVRELRQSRGPPADRDSSSQDSMDLDEADEAPSAASQAEDLKYWEQEAQVWDLLRRVLPLRYSKRNTLRPLRREISKFQSSADVWEDFLQSDLVAQERKAILECLQTSADESRARVNDMVKDYEKQANRGSMTAHGWLHTRLLLKKQKSTGGWVGPLDPKSSDAGRMVTDDKKTPLVTQLDPDAVTRQGRKLESGDEFFERAIWLGCYELLRRGRSLKEIRGFCDERDQVWRAVSMSAMPLSKMADLEPVSTDPMAILLWRRTCFALARQGGINDYERAVYGILSGDISSVEKICTNWDDFVFAHYNSLLRAQFDDFVMKRSPPDATAAIRQSFSSFNALQFHGDSSSASERLVSSLESNRATQAEAKTPMKALQAAIISDNLTQYMHDLGAVLGKRANLNGPSYLIPEIDSDSVDADDPRFCQLHDHQGLRVATHVYLVITSLDRLKGGEAAELAARPKAQDNIIATYVSTLRLSGLTDFMPLYCSKLDEDRGFYTLSRNISRVVDAHNRNDLLRNMEKLGMDIGRFVFYQPYSLLDSFPITDPPPPAFGAFSIFLQETPGLRYGRPMKADFFGDESATMDLVDEPLISSLEWFLLVEGLWDEFFQAGTLVYKRFLKTFNLQSARSLCERVKCADIFRKKAGLTIPNDNDVSWFADAYSSAREGIFEDDGLSAEEIAKAKPFFELECLVRVLDAIETVASTVRLEQTPGEVAGKEMWSYIGEELKKIKSCMGPLMDGWLLESAEDEDFAYIRDAYLTETVLGFVSVLHVTGTHLSRDNLLECMELASVIAKKDSDVAAAMMKAGRMKELVEGFAGVSKALAISAAEKRSLGSSSKKARERGWSRELWQVKK

SEQ ID NO: 16159 - DNA, 3255 bp, Muscodor strobelii
  misc_feature: SGI EST ID NO. CUFF.38173.0
  misc_feature: Variant of the nucleotide sequence at SEQ ID NO 16157
cttcagacttcgatatactggctacagcgaccatctgcaaagcgcggtactctgcctcttctcccagagatctgaagagattggcctacccaacaagacaaacggcttccactcccaagactggtatttgcaggtgggcgagtgggcgcacgcaagcgcaaggaaacatgcgagctggcctagcaacaggctgcccttagacttgatcgacgcctcgtttggggctacatttccacacaatgctggcgcagaggcctcagcggatctcgggtctgcccttcgaccagatggcagacgaagacgactacgatacggatgttgccgagaatctgcacgacatgactttcattacagatgccgaaaacttttccaggtcgctcgataccctctcctactccaaacattccaccgccgatcaacgagccgaccacttcgatctggtcgacaagtactatcactatgctgcgaaaaaggttcgtgaacttcgccagtcgcgaggcccccctgcagaccgcgattcttccagccaggactctatggatctagatgaggcagacgaagcgccctcggccgcaagccaggctgaagacctcaagtattgggagcaagaggcacaggtgtgggacctcttgcgccgtgttctgccactccgatactcgaagcgcaatactctgcgacccctccgacgcgagatctctaagttccagtcatcagctgatgtctgggaggacttcctacagtccgacctggtggctcaagagcgcaaggctattctcgaatgcctccagaccagtgcagacgaatctcgggctcgcgtcaatgacatggtcaaggactatgagaaacaggcgaatcgaggttccatgaccgcccacggttggctccatacgcgactgctcctcaagaagcagaaatcgaccggtggctgggtagggcctttggaccccaaaagctctgacgctggcaggatggtaaccgacgacaagaagacacccctcgtcacgcagctcgacccagatgccgtcacgcgacaaggccggaagctggaatctggggacgaatttttcgagcgcgccatctggctgggatgctatgaactcctccgtcgcggcagaagcttgaaagagatccgaggtttctgtgacgaacgagaccaggtctggcgagctgtgagcatgtcagccatgccgctgtctaaaatggcggacctcgaaccggtctctactgacccaatggccatcttactctggcgtcgtacctgctttgccctcgcccgccaaggcggcatcaatgattacgaaagggcagtatacggaattctctcgggagatatttctagtgtggagaagatatgcacaaactgggatgacttcgttttcgcccactacaattcattgttaagagctcagtttgatgactttgtcatgaagcgatcaccccctgacgctactgcagccattcgtcaaagcttttcttctttcaatgcccttcaattccatggagactcatcatcagctagcgagcgcctcgtgagctctctggagtccaacagggccacccaagccgaggctaaaacgcccatgaaggctctccaagcagccatcatctcggacaacctgacacaatatatgcatgacctcggcgcagtattaggcaagcgtgctaacttgaacgggccgtcatatctcatccctgagatcgatagcgattcggttgatgccgacgatcctcggttctgtcaacttcatgatcaccaaggactacgtgtcgcaacgcatgtctatctggtcataaccagtctcgaccgcctcaagggcggcgaggcagccgagttggcagccaggcctaaagcccaggacaatatcatcgcgacctatgtcagcacgctacgattgtctggtctgacagatttcatgccgctttactgctccaaactggacgaagaccgaggtttctacacgctcagccgcaatattagtcgtgttgtggacgcgcacaacagaaatgacctcttgaggaacatggagaaactcgggatggatattggcagatttgttttctaccagccttattcgcttctagacagtttccctataacggatccacctccgccagcctttggggctttttcgatcttcttgcaggaaacaccgggattgagatacggccgacccatgaaagctgacttctttggtgatgagtcggcgactatggatctcgtcgacgagccccttatctcgtcccttgagtggtttctcctagtggaaggtctatgggacgaatttttccaagcgggcacactggtctacaaacggtttctcaagaccttcaacctgcaatcagcacgcagcctgtgtgagcgtgtcaaatgcgccgacatcttccgaaagaaggccggcctcacaatccctaacgataacgatgtttcatggttcgcagatgcatattcgtctgccagagagggcatctttgaagatgacggcctaagtgcagaggaaattgccaaggccaagccctttttcgagttggaatgcctcgtacgtgtgctcgacgcgatagaaaccgttgcgtccactgtacgactagagcaaactcccggcgaagttgccggcaaggagatgtggagctacatcggcgaggagttgaagaaaatcaagagttgtatggggcctctgatggatgggtggctcttggagtcagctgaagacgaagactttgcgtacattcgagatgcgtatcttaccgagacggtgctcggctttgtcagcgtcctacacgttacaggcacacacttgtcgagggacaacttgctggagtgcatggaactggcgtcagtgattgccaagaaggattccgatgtggcggcagcgatgatgaaggctgggcgaatgaaggaactggtggagggcttcgctggcgtgagtaaggctctcgccatcagtgccgcggagaagagatcgctgggcagcagcagcaagaaggccagagagaggggctggagccgcgagctgtggcaggttaagaagtaaagatggtagcactagagttgtcaagcttgtgtcttgtgtaaaaaacccgttatggcgtaccggcattgcaaggcgattggatttataggtgacggaacaaaacgttaataaggcgcccaggggcacacgtctatggggctggcagcatatgtttatgctgacgattaattaaaaactgctaccaagaacaaaacctacatggtgtcagggacatgaaatatatttc

SEQ ID NO: 16160 - DNA, 303 bp, Muscodor strobelii
  misc_feature: SGI cDNA ID NO. 565368
  misc_feature: Encodes the peptide sequence at SEQ ID NO 16161
atgtctggagagaacgattcgggcagccctgctgctgagcgcaatgaggcgcctgccagtggcgaacatctgaacatcaaggtcaccgataacaacaacgaggtcttcttcaagatcaagcgctccactaagctcgagaagctcatgactgccttctgcgagcgccagggcaagaacgtcgactctgtacgcttcctgttcgagggccagcgcgtacagaagaccgacactcccgactcgctggagatgaccgatggtgacactctcgaggtccaccaggagcaagtcggcggctctttctga

SEQ ID NO: 16161 - protein, 100 aa, Muscodor strobelii
  misc_feature: SGI Peptide ID NO. 565368
  misc_feature (27)..(96): Pfam Id: PF00240 Pfam Desc: Ubiquitin family
  misc_feature (1)..(99): NCBI GI: 46108880 Blast Desc: FG01322.1 [Gibberella zeae PH-1]
  misc_feature (1)..(98): NCBI GI: 171687985 Blast Desc: protein product [Podospora anserina] gi|170943954|emb|CAP69606.1| protein product [Podospora anserina]
  misc_feature (2)..(98): NCBI GI: 85111723 Blast Desc: NCU09813 [Neurospora crassa OR74A] gi|28925836|gb|EAA34837.1| NCU09813 [Neurospora crassa OR74A]
  misc_feature (1)..(99): NCBI GI: 261357301 Blast Desc: SMT3 [Verticillium albo-atrum VaMs.102]
  misc_feature (22)..(99): NCBI GI: 116180266 Blast Desc: conserved [Chaetomium globosum CBS 148.51] gi|88185058|gb|EAQ92526.1| conserved [Chaetomium globosum CBS 148.51]
  misc_feature (22)..(99): NCBI GI: 39941652 Blast Desc: conserved [Magnaporthe grisea 70-15] gi|145022442|gb|EDK06462.1| conserved [Magnaporthe grisea 70-15]
  misc_feature (6)..(98): NCBI GI: 119495814 Blast Desc: ubiquitin-like modifier SUMO, [Neosartorya fischeri NRRL 181] gi|119412846|gb|EAW22787.1| ubiquitin-like modifier SUMO, [Neosartorya fischeri NRRL 181]
  misc_feature (6)..(98): NCBI GI: 238498394 Blast Desc: ubiquitin-like modifier SUMO, [Aspergillus flavus NRRL3357] gi|220693706|gb|EED50051.1| ubiquitin-like modifier SUMO, [Aspergillus flavus NRRL3357]
  misc_feature (12)..(98): NCBI GI: 145239531 Blast Desc: An08g02950 [Aspergillus niger] gi|134076923|emb|CAK45332.1| protein product [Aspergillus niger]
  misc_feature (10)..(100): NCBI GI: 67518049 Blast Desc: AN1191.2 [Aspergillus nidulans FGSC A4] gi|40746628|gb|EAA65784.1| AN1191.2 [Aspergillus nidulans FGSC A4] gi|62913865|gb|AAY21909.1| small ubiquitin-related modifier ;
MSGENDSGSPAAERNEAPASGEHLNIKVTDNNNEVFFKIKRSTKLEKLMTAFCERQGKNVDSVRFLFEGQRVQKTDTPDSLEMTDGDTLEVHQEQVGGSF

SEQ ID NO: 16162 - DNA, 1165 bp, Muscodor strobelii
  misc_feature: SGI EST ID NO. CUFF.38271.1
  misc_feature: Variant of the nucleotide sequence at SEQ ID NO 16160
tctaaagtcgttgtaggtgcgatagacttgaatgctctttgcgattggctgatacattgaagacatttgggccgataggtgagtgcagcaggcagtttcgatgttgcacgcagcgatggcacaagctggaagcgacgaccaccaccccgccgtacttcctggcttacctgggctccagagggcgacttattttcctcgaccgtgaatcttcctccgacgccataacacaagacccttcccattctttgttttcttcgcctagcgaaccaaaaacacacacagacctctcgccttcgcttcaactttccatcgacaccatcgctggtccaaactgaagccgatccccactgcgcggtccgaatatagtcgctcgatcatccgatctcttagataactccacctcgacattccacaacctctcgccaacatgtctggagagaacgattcgggcagccctgctgctgagcgcaatgaggcgcctgccagtggcgaacatctgaacatcaaggtcaccgataacaacaacgaggtcttcttcaagatcaagcgctccactaagctcgagaagctcatgactgccttctgcgagcgccagggcaagaacgtcgactctgtacgcttcctgttcgagggccagcgcgtacagaagaccgacactcccgactcgctggagatgaccgatggtgacactctcgaggtccaccaggagcaagtcggcggctctttctgattttcctcgtaccgacaactaccggcccttctgacagtccttcatatgtcagcaaactttgacaagggtccatcaatcgatgatagtacacacgccgtaccggaaaggatagagcaatgcaaatcaccacggcagcagtgacacttttgtctcttgcgcgaaatagatcactcacaagtagagagagcaacggatcgcgaacattacaaaaagggcaagactggatggacatatatgggcaaagtacctgaccatgtttggcacgccatacaaccagcaggattccccgaggcgtttggggggcgggtatctaagtggactttgtatgcgatcgcagcttcttgctttgccatagcatcaggagttgctttgctcttgttttccttctgataatgacaccaaaaaaaaatccaactgattctgatatcagaaaac

SEQ ID NO: 16163 - DNA, 2577 bp, Muscodor strobelii
  misc_feature: SGI cDNA ID NO. 565369
  misc_feature: Encodes the peptide sequence at SEQ ID NO 16164
atgtcgctgcgcagcaaacccaaggagggatcctcctcgtcgaggaaggtatcgccaccttcagcctcatacatggacaatgaccaatttgctgcgtaccttgccggcctgcgagagaatcgtgtcagtcgtccagcaggagctcgaccgccgccagtatccatgagatcacgacctgaacctgcgactggacggccttttattggcggcgactccatacaatccgagcggtccagtaactaccggccaacttcttctgacatgaacaacagaccccgaggcagtcgacccagcgttgccggtagtgtgacttcgcgatactcgatgagcagcactacaggcaaagactacttccccgaggatgcctcccagcctcccaagcctggcgatgtaatcccaagtcgcacgtacatcgagcgtggccaaaggtggatggagaaagaagaagcatactcaattcatcaagcaatgaacgacatggatcttcgtgacaagctgaaacaggagggccagaagcaggatcaagccaaagaagacgacgacgactcacgcctctacaatgctgctttgaacgaagctgccgagttggtgtggaatcatgagcatggtgtcaagccacgagaggcagacacaccctacaaatacaagtctcatctccgtagaaattcctatgcccacgctcgtactgccagcgccgggcgctacggaagtgacattgctccgacaggcctcgcacgagattcctactattctggaagttcatctggtagcgacagagactccctctctggtagtgctcgtgagagtatggatcagccacgaacgacttctagaaccatctctggggtctccaacacgtcgggtgccttaggtacctcaagtggaactcggaagagttctggtggtcgccgtcgcagtagtgttcgacgcaacatcagtggagagatccaaaagcccttctctggcgatcagatttgggaggaggaacctgagagctctgcagaagccagcgcacgccgcccgcagctccctgatcactctcgtcctttgaacaacaagacaagaaatcctcatactaaagttcatttcggccctgatgtttcacacaactcctctgctattccgcccgctgccactgcaaagcctgttgtttcccggactgagatccacaagaatccaccatcacagtctcgaaatccgaactacactaccaacccttctgattctccccgtgcatctcaagacctcccaaccaagaacggcattgagttgcgaagcgacgatattcgccaggctacaagcaagcgcgtggcagaccgaagcacaaagctccctaccccgtccgcggtcactgatagccccggacgtcccatcgtaagctttgataaaaactggaaagctccggaagaggtggctactgactcatacccagaagagtcccgccgagtccctctcgggatcgcagcagagcgtcaagagccgcaaggctcgcagccgcctctcccttctatcacatatacgtcggctgtttcggcctcgacgtcggacccaaaacggccatcgggtcgttcagcgcccatcccaagtattcagctagaatctgaagacacttcggaaagtcctgagattcctcgcggaattcctagcattgctatatcgggagataatcaaccgtctatacctactatcgttctgcctggcgatgatggggacgatgtcgacacaatggccggtatgtccataccgaccattataactcccgatgatgcgcctaccgcaaagccctctgctagacctctgccaacaccagccaaaaccccgtcacatcttcggaatgcgagaagtggagcaccaccaccccaaggccactggtctcccgcccccggcgcatcccgtcgttcgacggcaatatgtcacgaatgcgaccatccgatcgagggccgctttgtagctctcaggggagcagaggagcgctttcatccacagtgttttcgatgttattcttgtggtacaggtctcgaggctctggagatcagtccagaacctgagcatttccgcggtccgagactggagcgcattcgtcgaagagcagcaggagagatcttggaagagacacccggacagactatggcggaagatggagatgaacgactgagattcttctgtcacttagactggcatgagctgttcgcaccgagatgcaaacattgcaaaactccgattctaggggaacatgttgtagcgctgggagagcattggcattatggacatttcttctgcgcggagtgcggcgacccgtttgagcgcggcatgacgcatatcgagaaggatggatatgcttggtgtgtctcgtgccagactaaacgcaccgaaagacgtgcgcccaagtgtcgacgctgtaggaaggcggtcattggacagtatgtcatggctctgggcggtgagtggcatgatgagtgttttcgatgtgcgacttgtggaggcgggtttgatgatgggcagattttccctgttggtgagggagatgaggcgagggttttgtgtacggggtgtagggctagggagctcaagatgtga

SEQ ID NO: 16164 - protein, 858 aa, Muscodor strobelii
  misc_feature: SGI Peptide ID NO. 565369
  misc_feature (734)..(790): Pfam Id: PF00412 Pfam Desc: LIM domain
  misc_feature (797)..(856): Pfam Id: PF00412 Pfam Desc: LIM domain
  misc_feature (638)..(691): Pfam Id: PF00412 Pfam Desc: LIM domain
  misc_feature (734)..(778): Pfam Id: PF00412 Pfam Desc: LIM domain
  misc_feature (638)..(671): Pfam Id: PF00412 Pfam Desc: LIM domain
  misc_feature (797)..(827): Pfam Id: PF00412 Pfam Desc: LIM domain
  misc_feature (1)..(857): NCBI GI: 39941654 Blast Desc: MGG_05738 [Magnaporthe grisea 70-15] gi|145022443|gb|EDK06463.1| MGG_05738 [Magnaporthe grisea 70-15]
  misc_feature (1)..(857): NCBI GI: 171687987 Blast Desc: protein product [Podospora anserina] gi|170943955|emb|CAP69607.1| protein product [Podospora anserina]
  misc_feature (14)..(857): NCBI GI: 256735023 Blast Desc: NECHADRAFT_30860 [Nectria haematococca mpVI 77-13-4]
  misc_feature (15)..(857): NCBI GI: 46108878 Blast Desc: FG01321.1 [Gibberella zeae PH-1]
  misc_feature (1)..(857): NCBI GI: 156053065 Blast Desc: SS1G_06700 [Sclerotinia sclerotiorum 1980] gi|154704478|gb|EDO04217.1| SS1G_06700 [Sclerotinia sclerotiorum 1980]
  misc_feature (25)..(858): NCBI GI: 154318367 Blast Desc: BC1G_03351 [Botryotinia fuckeliana B05.10] gi|150842874|gb|EDN18067.1| BC1G_03351 [Botryotinia fuckeliana B05.10]
  misc_feature (1)..(801): NCBI GI: 116180268 Blast Desc: CHGG_00762 [Chaetomium globosum CBS 148.51] gi|88185059|gb|EAQ92527.1| CHGG_00762 [Chaetomium globosum CBS 148.51]
  misc_feature (559)..(857): NCBI GI: 85111721 Blast Desc: NCU09812 [Neurospora crassa OR74A] gi|28925835|gb|EAA34836.1| conserved [Neurospora crassa OR74A]
  misc_feature (5)..(857): NCBI GI: 225558895 Blast Desc: LIM domain-containing protein [Ajellomyces capsulatus G186AR]
  misc_feature (12)..(857): NCBI GI: 240109924 Blast Desc: LIM domain containing protein [Coccidioides posadasii C735 delta SOWgp]
MSLRSKPKEGSSSSRKVSPPSASYMDNDQFAAYLAGLRENRVSRPAGARPPPVSMRSRPEPATGRPFIGGDSIQSERSSNYRPTSSDMNNRPRGSRPSVAGSVTSRYSMSSTTGKDYFPEDASQPPKPGDVIPSRTYIERGQRWMEKEEAYSIHQAMNDMDLRDKLKQEGQKQDQAKEDDDDSRLYNAALNEAAELVWNHEHGVKPREADTPYKYKSHLRRNSYAHARTASAGRYGSDIAPTGLARDSYYSGSSSGSDRDSLSGSARESMDQPRTTSRTISGVSNTSGALGTSSGTRKSSGGRRRSSVRRNISGEIQKPFSGDQIWEEEPESSAEASARRPQLPDHSRPLNNKTRNPHTKVHFGPDVSHNSSAIPPAATAKPVVSRTEIHKNPPSQSRNPNYTTNPSDSPRASQDLPTKNGIELRSDDIRQATSKRVADRSTKLPTPSAVTDSPGRPIVSFDKNWKAPEEVATDSYPEESRRVPLGIAAERQEPQGSQPPLPSITYTSAVSASTSDPKRPSGRSAPIPSIQLESEDTSESPEIPRGIPSIAISGDNQPSIPTIVLPGDDGDDVDTMAGMSIPTIITPDDAPTAKPSARPLPTPAKTPSHLRNARSGAPPPQGHWSPAPGASRRSTAICHECDHPIEGRFVALRGAEERFHPQCFRCYSCGTGLEALEISPEPEHFRGPRLERIRRRAAGEILEETPGQTMAEDGDERLRFFCHLDWHELFAPRCKHCKTPILGEHVVALGEHWHYGHFFCAECGDPFERGMTHIEKDGYAWCVSCQTKRTERRAPKCRRCRKAVIGQYVMALGGEWHDECFRCATCGGGFDDGQIFPVGEGDEARVLCTGCRARELKM

SEQ ID NO: 16165 - DNA, 3417 bp, Muscodor strobelii
  misc_feature: SGI EST ID NO. CUFF.38192.2
  misc_feature: Variant of the nucleotide sequence at SEQ ID NO 16163
ccggcaacagcgatccaaaacaatgttaggcatgaacgacccttgctcggccgttatttctttgatttccagtttatgcgctggagatccagacccccattcggtcgccaatcggtgactcaggcgccagacacatcatcgtacgtttcgacctgtcttgcaaccaccaccgcctcttctcctctgcactgtatatgttttacttgcatgcataggtagagcatatgagagctttctccctgccaacgccttgtctcaccgactgtaaacatagcctatcatcatcatttccactctgcataagctatttgatcgcaagctgctcttgtcgccaggcaaaacactcttcaacgcatcaccgccaacgatagtgacaacaccaatactgttgttgccttgacataaccttcgagactcgttgctcacttttgaattggcccgagggaggaccactaatgtcgctgcgcagcaaacccaaggagggatcctcctcgtcgaggaaggtatcgccaccttcagcctcatacatggacaatgaccaatttgctgcgtaccttgccggcctgcgagagaatcgtgtcagtcgtccagcaggagctcgaccgccgccagtatccatgagatcacgacctgaacctgcgactggacggccttttattggcggcgactccatacaatccgagcggtccagtaactaccggccaacttcttctgacatgaacaacagaccccgaggcagtcgacccagcgttgccggtagtgtgacttcgcgatactcgatgagcagcactacaggcaaagactacttccccgaggatgcctcccagcctcccaagcctggcgatgtaatcccaagtcgcacgtacatcgagcgtggccaaaggtggatggagaaagaagaagcatactcaattcatcaagcaatgaacgacatggatcttcgtgacaagctgaaacaggagggccagaagcaggatcaagccaaagaagacgacgacgactcacgcctctacaatgctgctttgaacgaagctgccgagttggtgtggaatcatgagcatggtgtcaagccacgagaggcagacacaccctacaaatacaagtctcatctccgtagaaattcctatgcccacgctcgtactgccagcgccgggcgctacggaagtgacattgctccgacaggcctcgcacgagattcctactattctggaagttcatctggtagcgacagagactccctctctggtagtgctcgtgagagtatggatcagccacgaacgacttctagaaccatctctggggtctccaacacgtcgggtgccttaggtacctcaagtggaactcggaagagttctggtggtcgccgtcgcagtagtgttcgacgcaacatcagtggagagatccaaaagcccttctctggcgatcagatttgggaggaggaacctgagagctctgcagaagccagcgcacgccgcccgcagctccctgatcactctcgtcctttgaacaacaagacaagaaatcctcatactaaagttcatttcggccctgatgtttcacacaactcctctgctattccgcccgctgccactgcaaagcctgttgtttcccggactgagatccacaagaatccaccatcacagtctcgaaatccgaactacactaccaacccttctgattctccccgtgcatctcaagacctcccaaccaagaacggcattgagttgcgaagcgacgatattcgccaggctacaagcaagcgcgtggcagaccgaagcacaaagctccctaccccgtccgcggtcactgatagccccggacgtcccatcaagagtcccgccgagtccctctcgggatcgcagcagagcgtcaagagccgcaaggctcgcagccgcctctcccttctatcacatatacgtcggctgtttcggcctcgacgtcggacccaaaacggccatcgggtcgttcagcgcccatcccaagtattcagctagaatctgaagacacttcggaaagtcctgagattcctcgcggaattcctagcattgctatatcgggagataatcaaccgtctatacctactatcgttctgcctggcgatgatggggacgatgtcgacacaatggccggtatgtccataccgaccattataactcccgatgatgcgcctaccgcaaagccctctgctagacctctgccaacaccagccaaaaccccgtcacatcttcggaatgcgagaagtggagcaccaccaccccaaggccactggtctcccgcccccggcgcatcccgtcgttcgacggcaatatgtcacgaatgcgaccatccgatcgagggccgctttgtagctctcaggggagcagaggagcgctttcatccacagtgttttcgatgttattcttgtggtacaggtctcgaggctctggagatcagtccagaacctgagcatttccgcggtccgagactggagcgcattcgtcgaagagcagcaggagagatcttggaagagacacccggacagactatggcggaagatggagatgaacgactgagattcttctgtcacttagactggcatgagctgttcgcaccgagatgcaaacattgcaaaactccgattctaggggaacatgttgtagcgctgggagagcattggcattatggacatttcttctgcgcggagtgcggcgacccgtttgagcgcggcatgacgcatatcgagaaggatggatatgcttggtgtgtctcgtgccagactaaacgcaccgaaagacgtgcgcccaagtgtcgacgctgtaggaaggcggtcattggacagtatgtcatggctctgggcggtgagtggcatgatgagtgttttcgatgtgcgacttgtggaggcgggtttgatgatgggcagattttccctgttggtgagggagatgaggcgagggttttgtgtacggggtgtagggctagggagctcaagatgtgatgtgacgtgagatgctgttatgacttttgatgatggtatggaaatggaaatggaaatggaaacgagggatgattgagatggtggcgcttgtttggtgtgttatgagctatgggcgttttgttggttcgcgttgctttgctctgctttggctttgtcatgagaggttcatgttgcggttgcgatttgaaacttttttatgatgaggtctgttgcattggtgttgttctgtatgagtatgatgagtcgtcagtatgtggttagagcaagccggcggttaatgcattgttatgtctctcagtttcggtctatctatgtcgtgatcttttacttattttcaaggcaatgagtagcaacagctcatcattcgggtgtacagtctgctcaaagatatacatgtcttcagcgcgttcatagttcgagtaatggtaccatctcaagacgtg

SEQ ID NO: 16166 - DNA, 843 bp, Muscodor strobelii
  misc_feature: SGI cDNA ID NO. 565370
  misc_feature: Encodes the peptide sequence at SEQ ID NO 16167
atgtccataccgaccattataactcccgatgatgcgcctaccgcaaagccctctgctagacctctgccaacaccagccaaaaccccgtcacatcttcggaatgcgagaagtggagcaccaccaccccaaggccactggtctcccgcccccggcgcatcccgtcgttcgacggcaatatgtcacgaatgcgaccatccgatcgagggccgctttgtagctctcaggggagcagaggagcgctttcatccacagtgttttcgatgttattcttgtggtacaggtctcgaggctctggagatcagtccagaacctgagcatttccgcggtccgagactggagcgcattcgtcgaagagcagcaggagagatcttggaagagacacccggacagactatggcggaagatggagatgaacgactgagattcttctgtcacttagactggcatgagctgttcgcaccgagatgcaaacattgcaaaactccgattctaggggaacatgttgtagcgctgggagagcattggcattatggacatttcttctgcgcggagtgcggcgacccgtttgagcgcggcatgacgcatatcgagaaggatggatatgcttggtgtgtctcgtgccagactaaacgcaccgaaagacgtgcgcccaagtgtcgacgctgtaggaaggcggtcattggacagtatgtcatggctctgggcggtgagtggcatgatgagtgttttcgatgtgcgacttgtggaggcgggtttgatgatgggcagattttccctgttggtgagggagatgaggcgagggttttgtgtacggggtgtagggctagggagctcaagatgtga

SEQ ID NO: 16167 - protein, 280 aa, Muscodor strobelii
  misc_feature: SGI Peptide ID NO. 565370
  misc_feature (156)..(212): Pfam Id: PF00412 Pfam Desc: LIM domain
  misc_feature (219)..(278): Pfam Id: PF00412 Pfam Desc: LIM domain
  misc_feature (60)..(113): Pfam Id: PF00412 Pfam Desc: LIM domain
  misc_feature (156)..(200): Pfam Id: PF00412 Pfam Desc: LIM domain
  misc_feature (60)..(93): Pfam Id: PF00412 Pfam Desc: LIM domain
  misc_feature (219)..(249): Pfam Id: PF00412 Pfam Desc: LIM domain
  misc_feature (3)..(279): NCBI GI: 256735023 Blast Desc: NECHADRAFT_30860 [Nectria haematococca mpVI 77-13-4]
  misc_feature (3)..(279): NCBI GI: 39941654 Blast Desc: MGG_05738 [Magnaporthe grisea 70-15] gi|145022443|gb|EDK06463.1| MGG_05738 [Magnaporthe grisea 70-15]
  misc_feature (2)..(279): NCBI GI: 171687987 Blast Desc: protein product [Podospora anserina] gi|170943955|emb|CAP69607.1| protein product [Podospora anserina]
  misc_feature (3)..(279): NCBI GI: 46108878 Blast Desc: FG01321.1 [Gibberella zeae PH-1]
  misc_feature (2)..(279): NCBI GI: 85111721 Blast Desc: NCU09812 [Neurospora crassa OR74A] gi|28925835|gb|EAA34836.1| conserved [Neurospora crassa OR74A]
  misc_feature (1)..(280): NCBI GI: 154318367 Blast Desc: BC1G_03351 [Botryotinia fuckeliana B05.10] gi|150842874|gb|EDN18067.1| BC1G_03351 [Botryotinia fuckeliana B05.10]
  misc_feature (3)..(280): NCBI GI: 156053065 Blast Desc: SS1G_06700 [Sclerotinia sclerotiorum 1980] gi|154704478|gb|EDO04217.1| SS1G_06700 [Sclerotinia sclerotiorum 1980]
  misc_feature (2)..(223): NCBI GI: 116180268 Blast Desc: CHGG_00762 [Chaetomium globosum CBS 148.51] gi|88185059|gb|EAQ92527.1| CHGG_00762 [Chaetomium globosum CBS 148.51]
  misc_feature (2)..(279): NCBI GI: 242768934 Blast Desc: LIM domain protein [Talaromyces stipitatus ATCC 10500] gi|218724863|gb|EED24280.1| LIM domain protein [Talaromyces stipitatus ATCC 10500]
  misc_feature (2)..(279): NCBI GI: 212542445 Blast Desc: LIM domain protein [Penicillium marneffei ATCC 18224] gi|210066284|gb|EEA20377.1| LIM domain protein [Penicillium marneffei ATCC 18224]
MSIPTIITPDDAPTAKPSARPLPTPAKTPSHLRNARSGAPPPQGHWSPAPGASRRSTAICHECDHPIEGRFVALRGAEERFHPQCFRCYSCGTGLEALEISPEPEHFRGPRLERIRRRAAGEILEETPGQTMAEDGDERLRFFCHLDWHELFAPRCKHCKTPILGEHVVALGEHWHYGHFFCAECGDPFERGMTHIEKDGYAWCVSCQTKRTERRAPKCRRCRKAVIGQYVMALGGEWHDECFRCATCGGGFDDGQIFPVGEGDEARVLCTGCRARELKM

SEQ ID NO: 16168 - DNA, 3417 bp, Muscodor strobelii; identical to SEQ ID NO: 16165
  misc_feature: SGI EST ID NO. CUFF.38192.2
  misc_feature: Variant of the nucleotide sequence at SEQ ID NO 16166

SEQ ID NO: 16169 - DNA, 1443 bp, Muscodor strobelii
  misc_feature: SGI cDNA ID NO. 565371
  misc_feature: Encodes the peptide sequence at SEQ ID NO 16170
atgctaggcgactttggccgttctcataagcgttctcacaagcgttctcacaccctcgacaacatcttcaacgcgcagtcccgatactcgaaaatgccggatctggcgtcgctgcgaccgacgaaaagagcgaagaaagtcagcaagattgtcatctcttcctatgtgctcgactggataattctggtgatcgtcggcctgataggctacttcctgggcgagaaggtcacacccaataagcgacacttcagcttgcaggatcccaatatttccttcccggtaacagaacatgaaaccgtcaattcgggattcctcctagtctacaacacagccgtgcccgtcggcgtgatcctcctcgtcgcactgatcctcgtcccgggccgcaccgtcccgcgcggcacaccgcagtccctgatctggaagcgaaagttctgggagctacacataggatggctgggcctggcgctgtcgctcatctcggcatggatcataacgcagggcatgaagaacctcttcggcaagccgcgccctgacctcctcatgcggtgtcagccagacgtcgccaatgtgatgaagtacatcgtcggcttcaataccccttccgacgacggcacccagtcgggcccatacaacggccagctagtcagcgcagatatctgcaagaaccccgataaagccttcctcgacgacggcttccggtcctatccatccggccactcgtcatctgccgccgcaggattgatatacctctctttcttcctcgccagcaaattcgccataaccctccccttcgtgcctcaagagaccatctcgcggaacaccagcgccgtctctgcattcccctcccgcatccggcaccgaaaccactcaccgcacaacctctcctccacaaacaccgcctacgagcccaccgacgaagaccccctcgacccctccatcaccaagcaaatcggcgtccacaacgcaacagtgcaagcggtccggcaacaagccgccgcgccccccgtctacctcctgcttctcgcggtgcttccattcttcctcgcggtgttcatcgcctcgtcgcggtggttcgacttccgccaccacggcttcgacatcctcttcgggttcataattgggaccatcacggcctatttctcattccggtactaccacatgccgacgcgatccggcgggggctgggcctggggacccagaagtcgtgctaaggcgtactgggctggtttgggatcctggagctacgctactgatgttcggcattgggaacggcctggtgatgaggaggaggaggggaattttacgagtggtgggaatggacagatgaatgatggggatattgaattgggggtacgacggagggatcagaatcagcctgacagtcacccgagcgaggtcggtaggagtatgacgcttgattctaggagagaggctgaggtgtag

SEQ ID NO: 16170 - protein, 480 aa, Muscodor strobelii
  misc_feature: SGI Peptide ID NO. 565371
  misc_feature (150)..(390): Pfam Id: PF01569 Pfam Desc: PAP2 superfamily
  misc_feature (43)..(430): NCBI GI: 171680293 Blast Desc: protein product [Podospora anserina] gi|170939773|emb|CAP64999.1| protein product [Podospora anserina]
  misc_feature (29)..(430): NCBI GI: 116206918 Blast Desc: CHGG_02752 [Chaetomium globosum CBS 148.51] gi|88183349|gb|EAQ90817.1| CHGG_02752 [Chaetomium globosum CBS 148.51]
  misc_feature (90)..(430): NCBI GI: 85111251 Blast Desc: NCU02755 [Neurospora crassa OR74A] gi|28925589|gb|EAA34612.1| conserved [Neurospora crassa OR74A]
  misc_feature (35)..(465): NCBI GI: 46108814 Blast Desc: FG01289.1 [Gibberella zeae PH-1]
  misc_feature (40)..(430): NCBI GI: 39941478 Blast Desc: MGG_05650 [Magnaporthe grisea 70-15] gi|145022338|gb|EDK06358.1| MGG_05650 [Magnaporthe grisea 70-15]
  misc_feature (43)..(465): NCBI GI: 256734333 Blast Desc: NECHADRAFT_89917 [Nectria haematococca mpVI 77-13-4]
  misc_feature (41)..(450): NCBI GI: 154318191 Blast Desc: BC1G_03263 [Botryotinia fuckeliana B05.10] gi|150842786|gb|EDN17979.1| BC1G_03263 [Botryotinia fuckeliana B05.10]
  misc_feature (77)..(449): NCBI GI: 156062188 Blast Desc: SS1G_01210 [Sclerotinia sclerotiorum 1980] gi|154696546|gb|EDN96284.1| SS1G_01210 [Sclerotinia sclerotiorum 1980]
  misc_feature (74)..(462): NCBI GI: 169607829 Blast Desc: SNOG_06977 [Phaeosphaeria nodorum SN15] gi|160701502|gb|EAT85628.2| SNOG_06977 [Phaeosphaeria nodorum SN15]
  misc_feature (38)..(455): NCBI GI: 189189668 Blast Desc: PAP2 domain containing protein [Pyrenophora tritici-repentis Pt-1C-BFP] gi|187972779|gb|EDU40278.1| PAP2 domain containing protein [Pyrenophora tritici-repentis
MLGDFGRSHKRSHKRSHTLDNIFNAQSRYSKMPDLASLRPTKRAKKVSKIVISSYVLDWIILVIVGLIGYFLGEKVTPNKRHFSLQDPNISFPVTEHETVNSGFLLVYNTAVPVGVILLVALILVPGRTVPRGTPQSLIWKRKFWELHIGWLGLALSLISAWIITQGMKNLFGKPRPDLLMRCQPDVANVMKYIVGFNTPSDDGTQSGPYNGQLVSADICKNPDKAFLDDGFRSYPSGHSSSAAAGLIYLSFFLASKFAITLPFVPQETISRNTSAVSAFPSRIRHRNHSPHNLSSTNTAYEPTDEDPLDPSITKQIGVHNATVQAVRQQAAAPPVYLLLLAVLPFFLAVFIASSRWFDFRHHGFDILFGFIIGTITAYFSFRYYHMPTRSGGGWAWGPRSRAKAYWAGLGSWSYATDVRHWERPGDEEEEGNFTSGGNGQMNDGDIELGVRRRDQNQPDSHPSEVGRSMTLDSRREAEV

SEQ ID NO: 16171 - DNA, 2057 bp, Muscodor strobelii
  misc_feature: SGI EST ID NO. CUFF.38280.0
  misc_feature: Variant of the nucleotide sequence at SEQ ID NO 16169
gcggagcgcgcaggtcgccatggggtctgcacgccggtacgaagaagtaaacgaaacgctgaatgtgcctaaattcctgaactcctttgtgcaattcgaaatagaaacgctagatcttggctgtggtggaggagggagtacgaatcagtttgcccacagccaaaacgccgagccattgatcatcggcattgcttggctaggacattagagtggaatgtaataagttagacattaggggtgagaactggagagcttttatagtttcaattctaggtctagctgcagtccatttcattcatcattgcgctcgtttccctttgatacccatttccgtccctccttcctttcccccctttccccattcgacaagagaatgctaggcgactttggccgttctcataagcgttctcacaagcgttctcacaccctcgacaacatcttcaacgcgcagtcccgatactcgaaaatgccggatctggcgtcgctgcgaccgacgaaaagagcgaagaaagtcagcaagattgtcatctcttcctatgtgctcgactggataattctggtgatcgtcggcctgataggctacttcctgggcgagaaggtcacacccaataagcgacacttcagcttgcaggatcccaatatttccttcccggtaacagaacatgaaaccgtcaattcgggattcctcctagtctacaacacagccgtgcccgtcggcgtgatcctcctcgtcgcactgatcctcgtcccgggccgcaccgtcccgcgcggcacaccgcagtccctgatctggaagcgaaagttctgggagctacacataggatggctgggcctggcgctgtcgctcatctcggcatggatcataacgcagggcatgaagaacctcttcggcaagccgcgccctgacctcctcatgcggtgtcagccagacgtcgccaatgtgatgaagtacatcgtcggcttcaataccccttccgacgacggcacccagtcgggcccatacaacggccagctagtcagcgcagatatctgcaagaaccccgataaagccttcctcgacgacggcttccggtcctatccatccggccactcgtcatctgccgccgcaggattgatatacctctctttcttcctcgccagcaaattcgccataaccctccccttcgtgcctcaagagaccatctcgcggaacaccagcgccgtctctgcattcccctcccgcatccggcaccgaaaccactcaccgcacaacctctcctccacaaacaccgcctacgagcccaccgacgaagaccccctcgacccctccatcaccaagcaaatcggcgtccacaacgcaacagtgcaagcggtccggcaacaagccgccgcgccccccgtctacctcctgcttctcgcggtgcttccattcttcctcgcggtgttcatcgcctcgtcgcggtggttcgacttccgccaccacggcttcgacatcctcttcgggttcataattgggaccatcacggcctatttctcattccggtactaccacatgccgacgcgatccggcgggggctgggcctggggacccagaagtcgtgctaaggcgtactgggctggtttgggatcctggagctacgctactgatgttcggcattgggaacggcctggtgatgaggaggaggaggggaattttacgagtggtgggaatggacagatgaatgatggggatattgaattgggggtacgacggagggatcagaatcagcctgacagtcacccgagcgaggtcggtaggagtatgacgcttgattctaggagagaggctgaggtgtaggataccttactcaataatgggtctgaggcgtgattttgtctgattagaattataatgcgctggaaggcgcaattgtgggaaaagagaaataggtacaggttacatatacaataatctcacggtttatataccttatctgaatttgccccttgcatattgatgtgttggtccggggataggggtggcggtgttgctgctgggccagtatgatattaatatctacgcgcgagcagcgtattcg

SEQ ID NO: 16172 - DNA, 774 bp, Muscodor strobelii
  misc_feature: SGI cDNA ID NO. 565372
  misc_feature: Encodes the peptide sequence at SEQ ID NO 16173
atgatggaggagtttgcatcggagtccgatagtgactacactagctattggcgagactggttcatctcatccaggggcaatgaatacttctgcgagatcgacgaggattacctcacggatagatttaacttgaccggtctcaacacggaggtccagtactatcagtacgcgttggatcttattaccgacgtcttcgatctcgattgtgacgatgacatgcgcgagaccatcgagaagtctgcccgtcacctctacggcctcatccatgcgcgatacatcgttacaactaggggtctatccaaaatgctcgacaagtacaagaaggccgacttcggcaaatgccctcgcgtcttctgccactcacatcccctcttacccatgggccagacagacacagcccaccaaaagcccgtgaagctgtactgcgtccgctgtgaagacgtctacaaccccaagtcatcccgtcacgccgccattgacggcgcctacttcggcacgtccttccacaacatcatgttccaggtctatcccgccttggtgccgcccaagagctccgagcgctacatcccccgcgtctacggtttcaaggtccatgcccctgccactttaatccgttggcagaacggccaacgtgccgatatgcttagaaggcttaggaagatggaagttgaaagcgggtttaaagacgacgtggccgatgatgatttggacgaggaagatgatgaggacgaagagctgggcccggaaggtgatgccatgcatgttgtgggttag

SEQ ID NO: 16173 - protein, 257 aa, Muscodor strobelii
  misc_feature: SGI Peptide ID NO. 565372
  misc_feature (17)..(188): Pfam Id: PF01214 Pfam Desc: Casein kinase II regulatory subunit
  misc_feature (1)..(228): NCBI GI: 256735037 Blast Desc: NECHADRAFT_74480 [Nectria haematococca mpVI 77-13-4]
  misc_feature (2)..(228): NCBI GI: 154318245 Blast Desc: casein kinase II beta subunit [Botryotinia fuckeliana B05.10] gi|150842813|gb|EDN18006.1| casein kinase II beta subunit [Botryotinia fuckeliana B05.10]
  misc_feature (2)..(228): NCBI GI: 46108812 Blast Desc: FG01288.1 [Gibberella zeae PH-1]
  misc_feature (13)..(227): NCBI GI: 171680291 Blast Desc: protein product [Podospora anserina] gi|170939772|emb|CAP64998.1| protein product [Podospora anserina]
  misc_feature (2)..(228): NCBI GI: 116206920 Blast Desc: conserved [Chaetomium globosum CBS 148.51] gi|88183350|gb|EAQ90818.1| conserved [Chaetomium globosum CBS 148.51]
  misc_feature (2)..(228): NCBI GI: 164427743 Blast Desc: casein kinase II beta subunit [Neurospora crassa OR74A] gi|30580434|sp|Q8TG11.1|CSK2C_NEUCR RecName: Full=Casein kinase II subunit beta-2; Short=CK II beta-2 casein kinase II II
  misc_feature (2)..(227): NCBI GI: 240111910 Blast Desc: Casein kinase II beta chain 2, [Coccidioides posadasii C735 delta SOWgp]
  misc_feature (2)..(227): NCBI GI: 119173743 Blast Desc: casein kinase II beta chain [Coccidioides immitis RS]
  misc_feature (2)..(227): NCBI GI: 261194727 Blast Desc: casein kinase subunit II beta [Ajellomyces dermatitidis SLH14081] gi|239588306|gb|EEQ70949.1| casein kinase subunit II beta [Ajellomyces dermatitidis SLH14081] casein kinase
  misc_feature (2)..(227): NCBI GI: 212542893 Blast Desc: casein kinase 2 beta' regulatory subunit Ckb2, [Penicillium marneffei ATCC 18224] gi|210066508|gb|EEA20601.1| casein kinase 2 beta' regulatory subunit Ckb2, [Penicillium ATCC
MMEEFASESDSDYTSYWRDWFISSRGNEYFCEIDEDYLTDRFNLTGLNTEVQYYQYALDLITDVFDLDCDDDMRETIEKSARHLYGLIHARYIVTTRGLSKMLDKYKKADFGKCPRVFCHSHPLLPMGQTDTAHQKPVKLYCVRCEDVYNPKSSRHAAIDGAYFGTSFHNIMFQVYPALVPPKSSERYIPRVYGFKVHAPATLIRWQNGQRADMLRRLRKMEVESGFKDDVADDDLDEEDDEDEELGPEGDAMHVVG

SEQ ID NO: 16174 - DNA, 1458 bp, Muscodor strobelii
  misc_feature: SGI EST ID NO. CUFF.38302.0
  misc_feature: Variant of the nucleotide sequence at SEQ ID NO 16172
ggcgcctccagtgacgggaatttgagaactccctaccaccacctccctcgccgactaccttcgttagctcctacctacggcaatagcctgcagcttcgccgacgtgaacctactcgaccgaatagctgttaggacaattccgaaccggctgcgacgcccgggcctccctgcgcgaatggaataatagtgtgcgaaacacaagcagtctagcaaagcacgtagaaaaagcctgggacgtagctcctaggctttgccgcatccatgatggaggagtttgcatcggagtccgatagtgactacactagctattggcgagactggttcatctcatccaggggcaatgaatacttctgcgagatcgacgaggattacctcacggatagatttaacttgaccggtctcaacacggaggtccagtactatcagtacgcgttggatcttattaccgacgtcttcgatctcgattgtgacgatgacatgcgcgagaccatcgagaagtctgcccgtcacctctacggcctcatccatgcgcgatacatcgttacaactaggggtctatccaaaatgctcgacaagtacaagaaggccgacttcggcaaatgccctcgcgtcttctgccactcacatcccctcttacccatgggccagacagacacagcccaccaaaagcccgtgaagctgtactgcgtccgctgtgaagacgtctacaaccccaagtcatcccgtcacgccgccattgacggcgcctacttcggcacgtccttccacaacatcatgttccaggtctatcccgccttggtgccgcccaagagctccgagcgctacatcccccgcgtctacggtttcaaggtccatgcccctgccactttaatccgttggcagaacggccaacgtgccgatatgcttagaaggcttaggaagatggaagttgaaagcgggtttaaagacgacgtggccgatgatgatttggacgaggaagatgatgaggacgaagagctgggcccggaaggtgatgccatgcatgttgtgggttagagctgggttgcgttctcaagtgagtcgctgttcatgatggcgatgatcctaccgtggtgtcctggtggaagtaacgatgaatatggcactgtcgcatgacaatgctacgacatcaagtattaggtggagttggcgcctcgagtggtgctaagagtgagttcgaaaagacgcggtcggaggaaatagcccagtgctacataaatgcgaacagaatatcccgtagtaccggcgttccggcgagggcgggtgtggagttttaatgatgagcggcgtttgaggcgcaaaaatacattctgtctgccatgtcttttgggcttcttttctgtgtgaaatgagtgacgtgtgtttgtgattgcttcatgtgtaagatggcaagatgtatcagcttgaacgtcgtctttatttgcgcatcttctactgtga

SEQ ID NO: 16175 - DNA, 1221 bp, Muscodor strobelii
  misc_feature: SGI cDNA ID NO. 565373
  misc_feature: Encodes the peptide sequence at SEQ ID NO 16176
atgtacaggtactcagaagaaccgcccatctatccatcgttatcatgggcactatctggtcgtcctactgatgagaagcgtctctttcaatacttccaaaatgttatagctccgaacatgaaaacattaaataaccaatcgctcggatctatcctgattcgacttgccctgtctgaaacttcgcattctggccgtgccgtccagcaagccatactagcattggcttcactccaccgtaatggaatgcaacgcgaagcagcagagttaaaacattcatcaataaaaaacctcctcgtcgcaacaactcgcggcataaacgatagcgagatcatacagcatgtgaccgccaccatgattctttgtgccttcgaggtcctgcatcactttatctccccaggtagtttcacggacgagtggctatggttcgttaacagtgccaagaatctggttagcagcatccctacagacatctttaagcaagaggttttactcctgccccttactgaatgggtctaccatcatgaagcaactagcatttttgctcgcctacattggcggccccgtatgatcaaaccatcgaaaggatcgaacttggcactaccagcaaccacagtagccttccacaaagtcgacgcgccagctccacagcaccatgccctgcaattgctcaccaaagtctgcgatacccttcggccctcttccgatcccgtgacttatacggacacgtacaagatcaaagtgacaggcctgcggcaacaagctgagcacaactgggccatatctaaggtttccaaagcagacttggcaaccgcagagacggaaacccgatttctcgtcatgacggaactttaccacctgtcgactctcatatatctctaccgcgcgtcagagacgacgtttttcacagacccgaggctcatatccggctgggctgaaagagggtttctgctgctgagcgctctaggtacatgtgatcggacgctaccattcatcatcatcggcgcagaagctgctacagacgaggaacgcatagacattttggagatactggaaatcacatctcggcagcatcaagtccgattcaagcactgcctaagtcaatttctacattctctctggaatcaggatgatctgcatgcggagcgcgatcttagagtggattatattgagaaattcactgctgttgttagcagggctgatgtaccaccgcccttcgagtaa

SEQ ID NO: 16176 - protein, 406 aa, Muscodor strobelii
  misc_feature: SGI Peptide ID NO. 565373
  misc_feature (44)..(397): NCBI GI: 238494944 Blast Desc: conserved [Aspergillus flavus NRRL3357] gi|220695358|gb|EED51701.1| conserved [Aspergillus flavus NRRL3357]
  misc_feature (18)..(404): NCBI GI: 256730463 Blast Desc: NECHADRAFT_73999 [Nectria haematococca mpVI 77-13-4]
  misc_feature (13)..(405): NCBI GI: 212532425 Blast Desc: conserved [Penicillium marneffei ATCC 18224] gi|210071733|gb|EEA25822.1| conserved [Penicillium marneffei ATCC 18224]
  misc_feature (47)..(405): NCBI GI: 67522384 Blast Desc: AN1649.2 [Aspergillus nidulans FGSC A4] gi|40745613|gb|EAA64769.1| [Aspergillus nidulans FGSC A4] gi|259486985|tpe|CBF85292.1| TPA: conserved [Aspergillus nidulans
  misc_feature (13)..(405): NCBI GI: 242797963 Blast Desc: TSTA_009570 [Talaromyces stipitatus ATCC 10500] gi|218716415|gb|EED15836.1| TSTA_009570 [Talaromyces stipitatus ATCC 10500]
  misc_feature (13)..(405): NCBI GI: 242797958 Blast Desc: TSTA_009570 [Talaromyces stipitatus ATCC 10500] gi|218716414|gb|EED15835.1| TSTA_009570 [Talaromyces stipitatus ATCC 10500]
  misc_feature (28)..(405): NCBI GI: 256721370 Blast Desc: NECHADRAFT_82373 [Nectria haematococca mpVI 77-13-4]
  misc_feature (7)..(405): NCBI GI: 171681172 Blast Desc: protein product [Podospora anserina] gi|170940544|emb|CAP65772.1| protein product [Podospora anserina]
  misc_feature (89)..(405): NCBI GI: 261356932 Blast Desc: conserved [Verticillium albo-atrum VaMs.102]
  misc_feature (25)..(405): NCBI GI: 169613577 Blast Desc: SNOG_09919 [Phaeosphaeria nodorum SN15] gi|111061134|gb|EAT82254.1| SNOG_09919 [Phaeosphaeria nodorum SN15]
MYRYSEEPPIYPSLSWALSGRPTDEKRLFQYFQNVIAPNMKTLNNQSLGSILIRLALSETSHSGRAVQQAILALASLHRNGMQREAAELKHSSIKNLLVATTRGINDSEIIQHVTATMILCAFEVLHHFISPGSFTDEWLWFVNSAKNLVSSIPTDIFKQEVLLLPLTEWVYHHEATSIFARLHWRPRMIKPSKGSNLALPATTVAFHKVDAPAPQHHALQLLTKVCDTLRPSSDPVTYTDTYKIKVTGLRQQAEHNWAISKVSKADLATAETETRFLVMTELYHLSTLIYLYRASETTFFTDPRLISGWAERGFLLLSALGTCDRTLPFIIIGAEAATDEERIDILEILEITSRQHQVRFKHCLSQFLHSLWNQDDLHAERDLRVDYIEKFTAVVSRADVPPPFE

SEQ ID NO: 16177 - DNA, 1760 bp, Muscodor strobelii
  misc_feature: SGI EST ID NO. CUFF.38195.0
  misc_feature: Variant of the nucleotide sequence at SEQ ID NO 16175
gttatagctccgaacatgaaaacattaaataaccaatcgctcggatctatcctgattcgacttgccctgtctgaaacttcgcattctggccgtgccgtccagcaagccatactagcattggcttcactccaccgtaatggaatgcaacgcgaagcagcagagttaaaacattcatcaataaaaaacctcctcgtcgcaacaactcgcggcataaacgatagcgagatcatacagcatgtgaccgccaccatgattctttgtgccttcgaggtcctgcatcactttatctccccaggtagtttcacggacgagtggctatggttcgttaacagtgccaagaatctggttagcagcatccctacagacatctttaagcaagaggttttactcctgccccttactgaatgggtctaccatcatgaagcaactagcatttttgctcgcctacattggcggccccgtatgatcaaaccatcgaaaggatcgaacttggcactaccagcaaccacagtagccttccacaaagtcgacgcgccagctccacagcaccatgccctgcaattgctcaccaaagtctgcgatacccttcggccctcttccgatcccgtgacttatacggacacgtacaagatcaaagtgacaggcctgcggcaacaagctgagcacaactgggccatatctaaggtttccaaagcagacttggcaaccgcagagacggaaacccgatttctcgtcatgacggaactttaccacctgtcgactctcatatatctctaccgcgcgtcagagacgacgtttttcacagacccgaggctcatatccggctgggctgaaagagggtttctgctgctgagcgctctaggtacatgtgatcggacgctaccattcatcatcatcggcgcagaagctgctacagacgaggaacgcatagacattttggagatactggaaatcacatctcggcagcatcaagtccgattcaagcactgcctaagtcaatttctacattctctctggaatcaggatgatctgcatgcggagcgcgatcttagagtggattatattgagaaattcactgctgttgttagcagggctgatgtaccaccgcccttcgagtaaagcgacgctatcggatgggaaatctaggctttgctgctatcatgtatactcgtttatgaatactccttgcattgagaaaattcattatagaccgaataaaatgtatgattattcgcctctagatgtttcatagaaaatgagtgcatcgacgtcaggaaggacataatattgcgtatgtgatgagcatttccgaagaacactttgtgctctatggtgagcaaatgcgatacgacagcttacgtaacatcaatatcctgttgattgaaaagcagtgaaaatattcaatcttgagcgtgggcagagttgagcatggccatgtccggactgttgtgtatacactcccacctaatgacttttggacagtaaggaagatacctgctgattggcgtaatgccattacaaatgctttcaggctcaggctgattaacttaaaaaaccgcatacaaggttcctaggtgtagtttccgcggttgaacttcgaagtgatcacaaaagcgcagatcgatccctgtagccgtacggttgggttcgcatgggacagggctgcaaggatgccgtgttataacccgtaggcagttgattataggggctgcggcacttgccactgcgttcagcctcgcctatcgacgcccggtgccccg

SEQ ID NO: 16178 - DNA, 810 bp, Muscodor strobelii
  misc_feature: SGI cDNA ID NO. 565374
  misc_feature: Reduced expression when VOC is produced
  misc_feature: Encodes the peptide sequence at SEQ ID NO 16179
atgccctcatatctcgtaacgggtgccaatcgcggcattggcttcggctatcttcgtcacctctctgaggattcttccaacaccattgtaggcattgttcgtgacaaggcggcaactgagaagaaggttgctgaggaactcggtggccgatccaacgttcacatcgttgaggctcagatcaccaactacgattcactcaagaacactgttgaacaagtttccaagatcacgggaggcagcctggactacatcatcgccaatgcagccaccaatgccaaaaatgttcctatcggcgaactggcgcaagaccgtcaagaattcctcgaagaatggaacaaagtgatgaacgtcaacgtcatagctaacgtcgacttgttcacactattcttacccctgatccagaagggtaaggcgaagaagatcatctacatctccacaggcatggcggacatcgagatggtttccaaatttgaggtctgggtggatcctctttacgccatcagcaaggctgctgcaaatgcagtggttgccaaatacgatgctcagtacagaaaggagggcattctcttcatgagcatcagcccgggtctcgtcgccacgagcatgaatactgcgcccaccgatcccaaggaaattgaagccattacctcgatgttcaaggccttccaagcttatgcacctgactggaagggcgcaattactgtcgatgagtctgttacggcagtactgaaggttattcatgattctagcatcgagaaaggagacggaggagcttttgtatcccactggggaaacaagcagtggttgtag

SEQ ID NO: 16179 - protein, 269 aa, Muscodor strobelii
  misc_feature: SGI Peptide ID NO. 565374
  misc_feature (2)..(184): Pfam Id: PF00106 Pfam Desc: short chain dehydrogenase
  misc_feature (2)..(121): Pfam Id: PF00106 Pfam Desc: short chain dehydrogenase
  misc_feature (1)..(269): NCBI GI: 256730666 Blast Desc: NECHADRAFT_29697 [Nectria haematococca mpVI 77-13-4]
  misc_feature (1)..(269): NCBI GI: 46114388 Blast Desc: FG03036.1 [Gibberella zeae PH-1]
  misc_feature (1)..(269): NCBI GI: 258575181 Blast Desc: conserved [Uncinocarpus reesii 1704] gi|237902038|gb|EEP76439.1| conserved [Uncinocarpus reesii 1704]
  misc_feature (1)..(269): NCBI GI: 226281597 Blast Desc: conserved [Paracoccidioides brasiliensis Pb01]
  misc_feature (1)..(269): NCBI GI: 119473497 Blast Desc: short chain dehydrogenase (AtsC), [Neosartorya fischeri NRRL 181] gi|119406777|gb|EAW16727.1| short chain dehydrogenase (AtsC), [Neosartorya fischeri NRRL 181]
  misc_feature (1)..(269): NCBI GI: 121714479 Blast Desc: short chain dehydrogenase (AtsC), [Aspergillus clavatus NRRL 1] gi|119403004|gb|EAW13424.1| short chain dehydrogenase (AtsC), [Aspergillus clavatus NRRL 1]
  misc_feature (1)..(269): NCBI GI: 67540978 Blast Desc: AN6659.2 [Aspergillus nidulans FGSC A4] gi|40738998|gb|EAA58188.1| AN6659.2 [Aspergillus nidulans FGSC A4] gi|259480241|tpe|CBF71192.1| TPA: short chain dehydrogenase
  misc_feature (1)..(269): NCBI GI: 261358235 Blast Desc: short chain dehydrogenase [Verticillium albo-atrum VaMs.102]
  misc_feature (1)..(269): NCBI GI: 256730091 Blast Desc: NECHADRAFT_95010 [Nectria haematococca mpVI 77-13-4]
  misc_feature (1)..(269): NCBI GI: 242772417 Blast Desc: short chain dehydrogenase (AtsC), [Talaromyces stipitatus ATCC 10500] gi|218721654|gb|EED21072.1| short chain dehydrogenase (AtsC), [Talaromyces stipitatus ATCC 10500]
  misc_feature: Useful for introducing or modulating the production of volatile compounds
MPSYLVTGANRGIGFGYLRHLSEDSSNTIVGIVRDKAATEKKVAEELGGRSNVHIVEAQITNYDSLKNTVEQVSKITGGSLDYIIANAATNAKNVPIGELAQDRQEFLEEWNKVMNVNVIANVDLFTLFLPLIQKGKAKKIIYISTGMADIEMVSKFEVWVDPLYAISKAAANAVVAKYDAQYRKEGILFMSISPGLVATSMNTAPTDPKEIEAITSMFKAFQAYAPDWKGAITVDESVTAVLKVIHDSSIEKGDGGAFVSHWGNKQWL

SEQ ID NO: 16180 - DNA, 1283 bp, Muscodor strobelii
  misc_feature: SGI EST ID NO. CUFF.38210.0
  misc_feature: Variant of the nucleotide sequence at SEQ ID NO 16178
cagggcaatatttttccagtttgcaactatttgcgaagccttgattctagcacctacgccacccactgattagcaatcatgtcgcgacacaatgcacaaactcgagctcatggaaatagtcatgcttcaagtcgaacgtacaagaggcatgagagagagatatctatataaggggagcgatatccatccaaagttcagtctggagtagaagtgatacaattatattaatgcttccaacctcacttatatacgattgtcttaattaaaattcacgacttcaacaccatgccctcatatctcgtaacgggtgccaatcgcggcattggcttcggctatcttcgtcacctctctgaggattcttccaacaccattgtaggcattgttcgtgacaaggcggcaactgagaagaaggttgctgaggaactcggtggccgatccaacgttcacatcgttgaggctcagatcaccaactacgattcactcaagaacactgttgaacaagtttccaagatcacgggaggcagcctggactacatcatcgccaatgcagccaccaatgccaaaaatgttcctatcggcgaactggcgcaagaccgtcaagaattcctcgaagaatggaacaaagtgatgaacgtcaacgtcatagctaacgtcgacttgttcacactattcttacccctgatccagaagggtaaggcgaagaagatcatctacatctccacaggcatggcggacatcgagatggtttccaaatttgaggtctgggtggatcctctttacgccatcagcaaggctgctgcaaatgcagtggttgccaaatacgatgctcagtacagaaaggagggcattctcttcatgagcatcagcccgggtctcgtcgccacgagcatgaatactgcgcccaccgatcccaaggaaattgaagccattacctcgatgttcaaggccttccaagcttatgcacctgactggaagggcgcaattactgtcgatgagtctgttacggcagtactgaaggttattcatgattctagcatcgagaaaggagacggaggagcttttgtatcccactggggaaacaagcagtggttgtagatagtatacgacctgtggtttactgtgatgtaaatcaaactctaccaaatgctttcaaaatgatagacaatcagacacgcagcgtttcgacagatcatgaccaccatttgttactacttcgtgaacattgatcaggctcctatgtagctttataaagaggggttgagcagcgaattacaatattgctt

SEQ ID NO: 16181 - DNA, 873 bp, Muscodor strobelii
  misc_feature: SGI cDNA ID NO. 565375
  misc_feature: Reduced expression when VOC is produced
  misc_feature: Encodes the peptide sequence at SEQ ID NO 16182
atgccctcatatctcgtaacgggtgccaatcgcggcattggcttcggctatcttcgtcacctctctgaggattcttccaacaccattgtaggcattgttcgtgacaaggcggcaactgagaagaaggttgctgaggaactcggtggccgatccaacgttcacatcgttgaggctcagatcaccaactacgattcactcaagaacactgttgaacaagtttccaagatcacgggaggcagcctggactacatcatcgccaatgcagccaccaatgccaaaaatgttcctatcggcgaactggcgcaagaccgtcaagaattcctcgaagaatggaacaaagtgatgaacgtcaacgtcatagctaacgtcgacttgttcacactattcttacccctgatccagaagggtaaggcgaagaagatcatctacatctccacaggcatggcggacatcgagatggtttccaaatttgaggtctgggtggatcctctttacgccatcagcaaggctgctgcaaatgcagtggttgccaaatacgatgctcagtacagaaaggagggcattctcttcatgagcatcagcccgggtctcgtcgccacgagcatgaatactgcgcccagtaagttactgcgttacttattggctaattttggagggctgacgccggttactctacgtctagccgatcccaaggaaattgaagccattacctcgatgttcaaggccttccaagcttatgcacctgactggaagggcgcaattactgtcgatgagtctgttacggcagtactgaaggttattcatgattctagcatcgagaaaggagacggaggagcttttgtatcccactggggaaacaagcagtggttgtag

SEQ ID NO: 16182 - protein, 290 aa, Muscodor strobelii
  misc_feature: SGI Peptide ID NO. 565375
  misc_feature (2)..(184): Pfam Id: PF00106 Pfam Desc: short chain dehydrogenase
  misc_feature (2)..(121): Pfam Id: PF00106 Pfam Desc: short chain dehydrogenase
  misc_feature (1)..(290): NCBI GI: 256730666 Blast Desc: NECHADRAFT_29697 [Nectria haematococca mpVI 77-13-4]
  misc_feature (1)..(290): NCBI GI: 46114388 Blast Desc: FG03036.1 [Gibberella zeae PH-1]
  misc_feature (1)..(290): NCBI GI: 258575181 Blast Desc: conserved [Uncinocarpus reesii 1704] gi|237902038|gb|EEP76439.1| conserved [Uncinocarpus reesii 1704]
  misc_feature (1)..(290): NCBI GI: 119473497 Blast Desc: short chain dehydrogenase (AtsC), [Neosartorya fischeri NRRL 181] gi|119406777|gb|EAW16727.1| short chain dehydrogenase (AtsC), [Neosartorya fischeri NRRL 181]
  misc_feature (1)..(290): NCBI GI: 226281597 Blast Desc: conserved [Paracoccidioides brasiliensis Pb01]
  misc_feature (1)..(290): NCBI GI: 67540978 Blast Desc: AN6659.2 [Aspergillus nidulans FGSC A4] gi|40738998|gb|EAA58188.1| AN6659.2 [Aspergillus nidulans FGSC A4] gi|259480241|tpe|CBF71192.1| TPA: short chain dehydrogenase
  misc_feature (1)..(290): NCBI GI: 121714479 Blast Desc: short chain dehydrogenase (AtsC), [Aspergillus clavatus NRRL 1] gi|119403004|gb|EAW13424.1| short chain dehydrogenase (AtsC), [Aspergillus clavatus NRRL 1]
  misc_feature (1)..(290): NCBI GI: 261358235 Blast Desc: short chain dehydrogenase [Verticillium albo-atrum VaMs.102]
  misc_feature (1)..(290): NCBI GI: 242772417 Blast Desc: short chain dehydrogenase (AtsC), [Talaromyces stipitatus ATCC 10500] gi|218721654|gb|EED21072.1| short chain dehydrogenase (AtsC), [Talaromyces stipitatus ATCC 10500]
  misc_feature (1)..(290): NCBI GI: 256730091 Blast Desc: NECHADRAFT_95010 [Nectria haematococca mpVI 77-13-4]
  misc_feature: Useful for introducing or modulating the production of volatile compounds
MPSYLVTGANRGIGFGYLRHLSEDSSNTIVGIVRDKAATEKKVAEELGGRSNVHIVEAQITNYDSLKNTVEQVSKITGGSLDYIIANAATNAKNVPIGELAQDRQEFLEEWNKVMNVNVIANVDLFTLFLPLIQKGKAKKIIYISTGMADIEMVSKFEVWVDPLYAISKAAANAVVAKYDAQYRKEGILFMSISPGLVATSMNTAPSKLLRYLLANFGGLTPVTLRLADPKEIEAITSMFKAFQAYAPDWKGAITVDESVTAVLKVIHDSSIEKGDGGAFVSHWGNKQWL

SEQ ID NO: 16183 - DNA, 1283 bp, Muscodor strobelii; identical to SEQ ID NO: 16180
  misc_feature: SGI EST ID NO. CUFF.38210.0
  misc_feature: Variant of the nucleotide sequence at SEQ ID NO 16181

SEQ ID NO: 16184 - DNA, 3252 bp, Muscodor strobelii
  misc_feature: SGI cDNA ID NO. 565376
  misc_feature: Encodes the peptide sequence at SEQ ID NO 16185
atgtactggcccatagggactcccaggatatatgccaccacgacagccctcgccaacacgcggcccaacaacttgcttttctctgatgatggcttgactgccaaccagagcacagaaaccgtagagtctgctgccagtagagacaacgataacaccgccgagactcgcgatgctgcgctgcccctcacgcccgtccccgtcacgcccggcatcaactcggtcgatcacgatggcttccacggcctcgacggcggccaccagtcttctgccaccggccagtctgccatacctaccgacgagcccgttgttgccctgcgagtgtcgagaactggccacttgttcgccgtcatcaccgcgtcgaccatgactgtctggcagaccaagcccaccgttgtcctcgccattgtcgtccgctccgaagcctccataagctcctacggcaccaatgtcgccctcctcctgcgacccgactcggccatattcgttgtccagaccagcctgggcttcctgatcacctactcgctcgccaccgacgccgagtccagagtgtacaagccgcgctttgccgaccacaccaacatccagaggcgacggcagagccatttcggtggtcctggcaatagcgcccctgaccagattctgctcggcccgggcgaggggggcggtgctcgagacatcagtgttcgcttcaggagagtgatcaaagtagatgctgggatcgagtgtgcgctcgctctcgacgatgagcttgttgttgctaccaggaaacctgccgctgtccagtgcataaggtggactcccgacagcgcagggacccaaacgagtaccgagctggtcagtcgcatgggatggctggagaagaagtcttcgatacaggagatgacgcatgacagacctatgaatctctctacctgggtagtcaacgatgggaaagcatatgccgtccagcgcattcgccatgacaagaattctgtcgagacggacccaaagaagctcttcaaaggctactgcttccacaatccgacgggtcccgacgaccacgccgagcgagcggttgtaaatgcccgcttttcactgattgccgtaggatgcgctgatggaagtatccgagtgtattcggcacgcgactacgtcgggaacatccctccgtcccatgttcatcgcgcacccgtctcgacgaggcactctggtaaactgacgacactcagttactcgcccgacgggtactgcctcttcgcgggctacgagaaaggatgggcaacctggagcgtgttcgggaaatcggcttgcaacagcttcggtgcggatcaggccatcacactcaacaatcgcgaagattggctgaccggtatcaacgatgcctgctgggtcggcggctcctgtgagctccttctggttggccgtcagaatgaggcaatatggtcgttagagatggctcgtagcgccgtcacgggctgctacagtcctccgaatcttttccgaaccgtcctgcaaagctcgtcgagcattatggtatacaggggctacgaccttccggatctcaccagcatatctgcagagccattcctatggcatactgcgaggataccatccagctatctgttgaatcagtggcctatcaaatgtactgttgtctcatcagatggcagatacgtcgccgtagcggggagacgcgggcttgctcactacagtgttaatagcggaagatggaagacatttacgaatgatgccatggagaatgaatttcaagttcgaggtggcatgtgttggtatcaacatattcttgtggcagcggttgaggcgaatagatcatacgaactgcgcctttattcacgagaagctgctttggacaactcgagcatcatgttcactcagcccatgcccgctcccatagtcctcattacgccgtcaggagaagattccctcctggtctatacctacgacaacctgctctatcattttgtctttgcaccagtcaatggtgtgatacagccaatccaggtcggccagattgcatttcacggaatagttcgttcacctgcgcgagtaagaggcttgagttggattttgccggagaagcaaatgcttgacggcgatccttctcaggacgttgcgtacgcttcagtactcttcttagttgatggcaagctcgttttgctccagccttcagtgaacgccgatggccacctgaaatacgatatgcgtgtcatttcccaccaagtagaattctatacgagcatgagagaccaagcagcggtcactatgctcgatgaggatcgagggcagctttctgttgatgttgatcaaggaagtttgcgcaactcattatgggtatttgagggccatgcactaaaactgtggcctgatgttcacgatgtgcttcatgctgcctcgagcgattccaacaaggaacttcctccaaccgtctctatgcctctcgacttctaccccttatctatattgcttgggaagggtattgtcctgggtgtggaagccgatctggtccagcgaagagatgtaaacttttccttctttcgattttcaattcgaacacatctatttctccccgatgttttgcagttccatctcggaggcaacgaagccgctgcagctttaagtgtagcgcggcaataccaggatttagaatactttgcccacgggcttgaaattctattgcatcacgttctagacgacgaggtcgacacatcgcctcctccagaagcagcgctactccccaaagtgttatctcttttatcatcgttcaagcaatatctcgatattgtagtccaatgtaccagaaaaaccgaggtcaggtcctggaggacactcttcgcctacctaccacccccacaagaactatttgaagagtcgctactgcgaggatcactcaagacagcaggaggctacttgctaatattacatacttttgaagaactagagactgcgtccgagcagtcggtgagattgctgtctcgagctattagagaggaggactgggaactctgcaaagaacttgcgcggttcctagcggcgatggatgagagcggagagacgctcagagaggcgatggagttggtaaagatacaagtcaaggaagggtcggacaatacggacattgtcacgaggctggaagtcccgtctttcaggagtaatgggggctcgagattacggcgacagaactcggagacgagctctgagatgacatctgtgggtagtgataccagttccgtcggcactgctagccctatgtag

SEQ ID NO: 16185 - protein, 1083 aa, Muscodor strobelii
  misc_feature: SGI Peptide ID NO. 565376
  misc_feature (770)..(1035): Pfam Id: PF07064 Pfam Desc: RIC1
  misc_feature (883)..(1013): Pfam Id: PF07064 Pfam Desc: RIC1
  misc_feature (1)..(1076): NCBI GI: 171680287 Blast Desc: protein product [Podospora anserina] gi|170939770|emb|CAP64996.1| protein product [Podospora anserina]
  misc_feature (1)..(1079): NCBI GI: 116206924 Blast Desc: CHGG_02755 [Chaetomium globosum CBS 148.51] gi|88183352|gb|EAQ90820.1| CHGG_02755 [Chaetomium globosum CBS 148.51]
  misc_feature (1)..(1071): NCBI GI: 39941576 Blast Desc: MGG_05699 [Magnaporthe grisea 70-15] gi|145022393|gb|EDK06413.1| MGG_05699 [Magnaporthe grisea 70-15]
  misc_feature (1)..(1079): NCBI GI: 46108810 Blast Desc: FG01287.1 [Gibberella zeae PH-1]
  misc_feature (1)..(1066): NCBI GI: 256735038 Blast Desc: [Nectria haematococca mpVI 77-13-4]
  misc_feature (1)..(1046): NCBI GI: 156053179 Blast Desc: SS1G_06757 [Sclerotinia sclerotiorum 1980] gi|154704535|gb|EDO04274.1| SS1G_06757 [Sclerotinia sclerotiorum 1980]
  misc_feature (1)..(1073): NCBI GI: 154318229 Blast Desc: BC1G_03282 [Botryotinia fuckeliana B05.10] gi|150842805|gb|EDN17998.1| BC1G_03282 [Botryotinia fuckeliana B05.10]
  misc_feature (153)..(1073): NCBI GI: 164427745 Blast Desc: NCU11228 [Neurospora crassa OR74A] gi|157071867|gb|EDO65316.1| NCU11228 [Neurospora crassa OR74A]
  misc_feature (2)..(1052): NCBI GI: 189189430 Blast Desc: PTRG_00721 [Pyrenophora tritici-repentis Pt-1C-BFP] gi|187972660|gb|EDU40159.1| PTRG_00721 [Pyrenophora tritici-repentis Pt-1C-BFP]
  misc_feature (2)..(1083): NCBI GI: 169607669 Blast Desc: SNOG_06893 [Phaeosphaeria nodorum SN15] gi|160701463|gb|EAT85544.2| SNOG_06893 [Phaeosphaeria nodorum SN15]
MYWPIGTPRIYATTTALANTRPNNLLFSDDGLTANQSTETVESAASRDNDNTAETRDAALPLTPVPVTPGINSVDHDGFHGLDGGHQSSATGQSAIPTDEPVVALRVSRTGHLFAVITASTMTVWQTKPTVVLAIVVRSEASISSYGTNVALLLRPDSAIFVVQTSLGFLITYSLATDAESRVYKPRFADHTNIQRRRQSHFGGPGNSAPDQILLGPGEGGGARDISVRFRRVIKVDAGIECALALDDELVVATRKPAAVQCIRWTPDSAGTQTSTELVSRMGWLEKKSSIQEMTHDRPMNLSTWVVNDGKAYAVQRIRHDKNSVETDPKKLFKGYCFHNPTGPDDHAERAVVNARFSLIAVGCADGSIRVYSARDYVGNIPPSHVHRAPVSTRHSGKLTTLSYSPDGYCLFAGYEKGWATWSVFGKSACNSFGADQAITLNNREDWLTGINDACWVGGSCELLLVGRQNEAIWSLEMARSAVTGCYSPPNLFRTVLQSSSSIMVYRGYDLPDLTSISAEPFLWHTARIPSSYLLNQWPIKCTVVSSDGRYVAVAGRRGLAHYSVNSGRWKTFTNDAMENEFQVRGGMCWYQHILVAAVEANRSYELRLYSREAALDNSSIMFTQPMPAPIVLITPSGEDSLLVYTYDNLLYHFVFAPVNGVIQPIQVGQIAFHGIVRSPARVRGLSWILPEKQMLDGDPSQDVAYASVLFLVDGKLVLLQPSVNADGHLKYDMRVISHQVEFYTSMRDQAAVTMLDEDRGQLSVDVDQGSLRNSLWVFEGHALKLWPDVHDVLHAASSDSNKELPPTVSMPLDFYPLSILLGKGIVLGVEADLVQRRDVNFSFFRFSIRTHLFLPDVLQFHLGGNEAAAALSVARQYQDLEYFAHGLEILLHHVLDDEVDTSPPPEAALLPKVLSLLSSFKQYLDIVVQCTRKTEVRSWRTLFAYLPPPQELFEESLLRGSLKTAGGYLLILHTFEELETASEQSVRLLSRAIREEDWELCKELARFLAAMDESGETLREAMELVKIQVKEGSDNTDIVTRLEVPSFRSNGGSRLRRQNSETSSEMTSVGSDTSSVGTASPM

SEQ ID NO: 16186 - DNA, 3843 bp, Muscodor strobelii
  misc_feature: SGI EST ID NO. CUFF.38214.0
  misc_feature: Variant of the nucleotide sequence at SEQ ID NO 16184
gctggactgacctcctgattgaggcgcgcatttgccaaagggtccaacagatgtctctctttgcacacatcctcgtcttccgacaaatctgattgactcattgagagtcatgcataatggattagtagcatctgtagcaccaattggcttattgtctacttagcaaatggtcctcttacgatcccgacagccctccgagcgaagccgaatgctggtccccccccagcggtgcgaagggtagtccgcaatgtactggcccatagggactcccaggatatatgccaccacgacagccctcgccaacacgcggcccaacaacttgcttttctctgatgatggcttgactgccaaccagagcacagaaaccgtagagtctgctgccagtagagacaacgataacaccgccgagactcgcgatgctgcgctgcccctcacgcccgtccccgtcacgcccggcatcaactcggtcgatcacgatggcttccacggcctcgacggcggccaccagtcttctgccaccggccagtctgccatacctaccgacgagcccgttgttgccctgcgagtgtcgagaactggccacttgttcgccgtcatcaccgcgtcgaccatgactgtctggcagaccaagcccaccgttgtcctcgccattgtcgtccgctccgaagcctccataagctcctacggcaccaatgtcgccctcctcctgcgacccgactcggccatattcgttgtccagaccagcctgggcttcctgatcacctactcgctcgccaccgacgccgagtccagagtgtacaagccgcgctttgccgaccacaccaacatccagaggcgacggcagagccatttcggtggtcctggcaatagcgcccctgaccagattctgctcggcccgggcgaggggggcggtgctcgagacatcagtgttcgcttcaggagagtgatcaaagtagatgctgggatcgagtgtgcgctcgctctcgacgatgagcttgttgttgctaccaggaaacctgccgctgtccagtgcataaggtggactcccgacagcgcagggacccaaacgagtaccgagctggtcagtcgcatgggatggctggagaagaagtcttcgatacaggagatgacgcatgacagacctatgaatctctctacctgggtagtcaacgatgggaaagcatatgccgtccagcgcattcgccatgacaagaattctgtcgagacggacccaaagaagctcttcaaaggctactgcttccacaatccgacgggtcccgacgaccacgccgagcgagcggttgtaaatgcccgcttttcactgattgccgtaggatgcgctgatggaagtatccgagtgtattcggcacgcgactacgtcgggaacatccctccgtcccatgttcatcgcgcacccgtctcgacgaggcactctggtaaactgacgacactcagttactcgcccgacgggtactgcctcttcgcgggctacgagaaaggatgggcaacctggagcgtgttcgggaaatcggcttgcaacagcttcggtgcggatcaggccatcacactcaacaatcgcgaagattggctgaccggtatcaacgatgcctgctgggtcggcggctcctgtgagctccttctggttggccgtcagaatgaggcaatatggtcgttagagatggctcgtagcgccgtcacgggctgctacagtcctccgaatcttttccgaaccgtcctgcaaagctcgtcgagcattatggtatacaggggctacgaccttccggatctcaccagcatatctgcagagccattcctatggcatactgcgaggataccatccagctatctgttgaatcagtggcctatcaaatgtactgttgtctcatcagatggcagatacgtcgccgtagcggggagacgcgggcttgctcactacagtgttaatagcggaagatggaagacatttacgaatgatgccatggagaatgaatttcaagttcgaggtggcatgtgttggtatcaacatattcttgtggcagcggttgaggcgaatagatcatacgaactgcgcctttattcacgagaagctgctttggacaactcgagcatcatgttcactcagcccatgcccgctcccatagtcctcattacgccgtcaggagaagattccctcctggtctatacctacgacaacctgctctatcattttgtctttgcaccagtcaatggtgtgatacagccaatccaggtcggccagattgcatttcacggaatagttcgttcacctgcgcgagtaagaggcttgagttggattttgccggagaagcaaatgcttgacggcgatccttctcaggacgttgcgtacgcttcagtactcttcttagttgatggcaagctcgttttgctccagccttcagtgaacgccgatggccacctgaaatacgatatgcgtgtcatttcccaccaagtagaattctatacgagcatgagagaccaagcagcggtcactatgctcgatgaggatcgagggcagctttctgttgatgttgatcaaggaagtttgcgcaactcattatgggtatttgagggccatgcactaaaactgtggcctgatgttcacgatgtgcttcatgctgcctcgagcgattccaacaaggaacttcctccaaccgtctctatgcctctcgacttctaccccttatctatattgcttgggaagggtattgtcctgggtgtggaagccgatctggtccagcgaagagatgtaaacttttccttctttcgattttcaattcgaacacatctatttctccccgatgttttgcagttccatctcggaggcaacgaagccgctgcagctttaagtgtagcgcggcaataccaggatttagaatactttgcccacgggcttgaaattctattgcatcacgttctagacgacgaggtcgacacatcgcctcctccagaagcagcgctactccccaaagtgttatctcttttatcatcgttcaagcaatatctcgatattgtagtccaatgtaccagaaaaaccgaggtcaggtcctggaggacactcttcgcctacctaccacccccacaagaactatttgaagagtcgctactgcgaggatcactcaagacagcaggaggctacttgctaatattacatacttttgaagaactagagactgcgtccgagcagtcggtgagattgctgtctcgagctattagagaggaggactgggaactctgcaaagaacttgcgcggttcctagcggcgatggatgagagcggagagacgctcagagaggcgatggagttggtaaagatacaagtcaaggaagggtcggacaatacggacattgtcacgaggctggaagtcccgtctttcaggagtaatgggggctcgagattacggcgacagaactcggagacgagctctgagatgacatctgtgggtagtgataccagttccgtcggcactgctagccctatgtagagtagatagggaaagaatctggatatcggaatcaaagactaagtctttactaccttatgacgatccttggtatgaccggggcgtcatgtcaagtgtgctgttgcttaacgttttcgtattacgtattggataaaaagcaagtattaccgctcgaaaaataatcgcaatagcaagcaggggggaggcagggaaaaaaaagtgtaaaagataaaaaattggcaaaagggtaatgcctcggttcgaaccggtgttctctgcgctcagacgctacctgaaacgtagtctgactgcgtttcaacctgactaacttgaccagaattggtggtgacctcggtggtcacccg

SEQ ID NO: 16187 - DNA, 1044 bp, Muscodor strobelii
  misc_feature: SGI cDNA ID NO. 565377
  misc_feature: Encodes the peptide sequence at SEQ ID NO 16188
atggcgcccaccgctggccgttcggctctgcgtgcctctgctgttccagaaaggttcaaaagtatgatacccaacttgcggcccaccatctatcatgacccaagcatcatcccaaagaccaccaagaaagatgacgacgacgaagataccaacaagaacatccgtactattgcctggaatcctctaggcacgtatctggcgacgggttgtatggacaagactttacgtgtctggaatattgatagaccgaacgtcaggcagacgactgaactgagaggacatgcggcttccatcgagaaggttgctttcaatcctgtcaaggaacttgagttgtgtagcgtgagccttgatggcgtggtgagattctgggatgtgaagactaaggctgtcctcaacgaagttaaaggcctaggcgagacttttaccctcgcatgggcccctaaaggtgattatgtcgtggtcggcaacaaggaggacaaactgtttgtgctgtccccaactgaaagcactcctatagcctcacatcagcaacctgttgagaccaacaacatcatatttgattggggtggtgagagactgttcacgaccacgggtgggggcaggacgagaattctccagttccccagcttcgagccagcctaccaattcgactacaaggagggaccagacaaggaattcatgttggcagggcacacttcatcgtgcattgcggctgatctgcatccgcaaaatagattcctagctacaggtggtacggactcgctcatagccctttgggacacgagtgaatggaattgtgttcgtacggttacgaagatgacgggcccagttcgaagtctatctttttcttgggatgggctctttctcgttggcggtagcaatcatggtaccgggatcgaggtgactctgtccgaaactggtgaacaccttggcacgatcaagacctcgtcgccggctcctgttgtggcatgggcacccaataagtacaccattgcatatactgattcgggcagtttgaggacaattggggcaaaccccaaataa

SEQ ID NO: 16188 - protein, 347 aa, Muscodor strobelii
  misc_feature: SGI Peptide ID NO. 565377
  misc_feature (41)..(79): Pfam Id: PF00400 Pfam Desc: WD domain, G-beta repeat
  misc_feature (222)..(260): Pfam Id: PF00400 Pfam Desc: WD domain, G-beta repeat
  misc_feature (85)..(124): Pfam Id: PF00400 Pfam Desc: WD domain, G-beta repeat
  misc_feature (51)..(79): Pfam Id: PF00400 Pfam Desc: WD domain, G-beta repeat
  misc_feature (11)..(340): NCBI GI: 46108820 Blast Desc: FG01292.1 [Gibberella zeae PH-1]
  misc_feature (1)..(345): NCBI GI: 154318231 Blast Desc: BC1G_03283 [Botryotinia fuckeliana B05.10] gi|150842806|gb|EDN17999.1| BC1G_03283 [Botryotinia fuckeliana B05.10]
  misc_feature (1)..(345): NCBI GI: 156053177 Blast Desc: SS1G_06756 [Sclerotinia sclerotiorum 1980] gi|154704534|gb|EDO04273.1| SS1G_06756 [Sclerotinia sclerotiorum 1980]
  misc_feature (11)..(345): NCBI GI: 256735035 Blast Desc: [Nectria haematococca mpVI 77-13-4]
  misc_feature (17)..(281): NCBI GI: 261356576 Blast Desc: THO complex subunit 3 [Verticillium albo-atrum VaMs.102]
  misc_feature (54)..(316): NCBI GI: 164427747 Blast Desc: NCU02753 [Neurospora crassa OR74A] gi|157071868|gb|EAA34610.2| conserved [Neurospora crassa OR74A]
  misc_feature (49)..(345): NCBI GI: 171680285 Blast Desc: protein product [Podospora anserina] gi|170939769|emb|CAP64995.1| protein product [Podospora anserina]
  misc_feature (79)..(281): NCBI GI: 145615583 Blast Desc: MGG_05698 [Magnaporthe grisea 70-15] gi|145022392|gb|EDK06412.1| MGG_05698 [Magnaporthe grisea 70-15]
  misc_feature (17)..(344): NCBI GI: 238843785 Blast Desc: THO complex subunit 3 [Microsporum canis CBS 113480]
  misc_feature (17)..(344): NCBI GI: 258570327 Blast Desc: conserved [Uncinocarpus reesii 1704] gi|237904237|gb|EEP78638.1| conserved [Uncinocarpus reesii 1704]
  misc_feature (54)..(297): SWISSPROT Homolog: EC 2.7.11.1 Non-specific serine/threonine protein kinase
MAPTAGRSALRASAVPERFKSMIPNLRPTIYHDPSIIPKTTKKDDDDEDTNKNIRTIAWNPLGTYLATGCMDKTLRVWNIDRPNVRQTTELRGHAASIEKVAFNPVKELELCSVSLDGVVRFWDVKTKAVLNEVKGLGETFTLAWAPKGDYVVVGNKEDKLFVLSPTESTPIASHQQPVETNNIIFDWGGERLFTTTGGGRTRILQFPSFEPAYQFDYKEGPDKEFMLAGHTSSCIAADLHPQNRFLATGGTDSLIALWDTSEWNCVRTVTKMTGPVRSLSFSWDGLFLVGGSNHGTGIEVTLSETGEHLGTIKTSSPAPVVAWAPNKYTIAYTDSGSLRTIGANPK

SEQ ID NO: 16189 - DNA, 10857 bp, Muscodor strobelii
  misc_feature: SGI EST ID NO. CUFF.38387.2
  misc_feature: Variant of the nucleotide sequence at SEQ ID NO 16187
tgccaaactaccccttctaggtttggtgtcttaatcccattgagttccacgggtaggcacctgcccaaccccacgcgtcaaccgtaccttgcagaggctcccgcttccgttcccagctacctacataatacaagggcattgagcctcgtctcatttcaattccatgcagaatcgcgaaattcacaaccttcaacctctggctctttaaaaattaattgtccattttacggtggcttattggatttccaaacactcatcacagttaagccccgtttcaaaaagtagtgaagcacattggccggtacctactagttcttgatagaccaacacccaattttctcaacagctcatagcaccctctggaccatttattccaatcacgaggtacatcggtgctatagtaacacaactctccgcagcgatatcaccagctgtcactcgtccggcttacgggacgcatgcgaaacagtgtcgcccattgaaaaatggcgcccaccgctggccgttcggctctgcgtgcctctgctgttccagaaaggttcaaaagtatgatacccaacttgcggcccaccatctatcatgacccaagcatcatcccaaagaccaccaagaaagatgacgacgacgaagataccaacaagaacatccgtactattgcctggaatcctctaggcacgtatctggcgacgggttgtatggacaagactttacgtgtctggaatattgatagaccgaacgtcaggcagacgactgaactgagaggacatgcggcttccatcgagaaggttgctttcaatcctgtcaaggaacttgagttgtgtagcgtgagccttgatggcgtggtgagattctgggatgtgaagactaaggctgtcctcaacgaagttaaaggcctaggcgagacttttaccctcgcatgggcccctaaaggtgattatgtcgtggtcggcaacaaggaggacaaactgtttgtgctgtccccaactgaaagcactcctatagcctcacatcagcaacctgttgagaccaacaacatcatatttgattggggtggtgagagactgttcacgaccacgggtgggggcaggacgagaattctccagttccccagcttcgagccagcctaccaattcgactacaaggagggaccagacaaggaattcatgttggcagggcacacttcatcgtgcattgcggctgatctgcatccgcaaaatagattcctagctacaggtggtacggactcgctcatagccctttgggacacgagtgaatggaattgtgttcgtacggttacgaagatgacgggcccagttcgaagtctatctttttcttgggatgggctctttctcgttggcggtagcaatcatggtaccgggatcgaggtgactctgtccgaaactggtgaacaccttggcacgatcaagacctcgtcgccggctcctgttgtggcatgggcacccaataagtacaccattgcatatactgattcgggcagtttgaggacaattggggcaaaccccaaataagaatattttccaatctcctaagaaggaccaagctcgtcttcgacgcacacggaaagcttaggagtccgagacgacattacaaacataacatagatgtggaacctgtactttaaagtgaatgtcgttccagcacgatcaccattgaaggcatcgctagccaggggaaattgtggctagaaatgttcgcagtttttctcatcgagataccttaggcgaggagtaagcgcggaggaacatcccgccggcagaagcttgttcgctggagtacgaatgaatgagacatcgttgtcgcatgcaacatctagtagtagagctatgcgcaatccgaccacgatgaggcattccagacatggcattctgttgccaatagatgcaccaccatctttaagactcgagcgttgccacgtgaacagaggggaacacaaggtctgcgattccgttcttaaaaaaagaaattcagtatcaatggctacaaactcgctgcaaagctagttgtttttactggtgaaagtcgaacctccgtgaacgcaaattggcctgaagatttggttttctgtctcggctcggtttcatcatctggatcaatgaacctcacgatggagaaactcaaatcagggtcttcctagcagacgcacgacatagcacggtgggtgcgtacgatgattcccatgctgtggaaggttacaatatcttgccgtagagtcaggaaatagtataagaagtgctctctgccaatgatgttccctgctgccgctcagctggccgtttggacatcggcagggctgcagggatatccagaattttaaaacgttggagaagccaaccacaggcatgggtggctgatgtcgtcctttcgctgctgcctcgagtgcatttattgtccaccagggatggcaggtaatgatgattctttttcagctgtatgcactgacacacactggatattctgatgagcagtattcatgcagagaagcgtgtggccatgctcctatcgtcttcctcggtacatcattccactactctgtacgaaggaaatggtatcgatgcatctactgcatagactagattaataagcaccgcccgccaactggacagcgccccgcggcccccggtcatgactctaccaccaggctatctagactagacattagggatggttgcaggtttttgatctgggtcggtctgtagcatttcggtgtcgcatgcgtgtgtgtagtgttcgtatatgatagaatcgccaaggttggcctcgaatgaagttcgcaatccatcacggttggcactaagcttgatcggagttggcgaagagctcacaacccggttccgtcagaattggagttggagccacctcatcaccactttccactctacagttatcttgccggcctatcgacatcgtctgcaatacacagttggtgcgggcgtcaacgacttggcgccccctttcagtcctagctgtcggattgctgtcttcaatctgactctaatcattcttgacatttgatctacgatccccgcaaaagttgcgattcaatcgtagcgcattatctagacaaaagaccccttcttttcatgaccaaggccggtttctttcacccgaccgaccgagcgacacgaccgagtacctccgtcttccgctaccgccacttcaacgaccgatacggaagatcaggccgccaggaactggcgttggcgccaccagatcaccgcatccgacgataaggcagtgcctctgaccttcttttgacgatctgtccgctgtcggtcgcaataagctgctgttgtctacattggcacgccatcccttatcaagcgcttgcgcgaccggtgtcaaccaggcagtgtagctggaacagcttgccttgacgcctgtgagatacaccaccgactggattggattgctgctcgcatatctctagcttcaaaatgtcgccgacagcagattcgacagaggcaaatggcaacgagtcggcctctcctcttacggacaatagcccacccgctgatgcggcaccgaccgtgccacgcaacaacaatgatgtacccaaacccaagaggctagcgtgcatgatctgccggaagagaaagctacgctgcgatggcattaagcccagttgcagcacatgcacaaggctcggccattcatgcgcatacgatgaagttaggaaaaagagcgggccgaagcgtggatatgtgaaggctttggaagagaggcttaagcaagtggaggaactattaaagacgcaggagcccagcactagcacaagccccgaagccatgaagacacccaacatggcctttgaacagcttcgaaaccagcaagcgaatgcggcgcccaatttcaccgtcaacaacccctcgatagccatagccagtgatcgtgacatggacaggtggcgcttgaacggagagtcgccgcaaggacaaggacaagccaccgggaatggtatcgaggattttaacaacttcgcagcgggacatatgcaaatgcccatgaacaatatggacccaagcttcacgtgggaaatgatcggcctgggtttggaagagccacttccaccgcaagaaactatcgatgagttgcatcagatattcttcgagaagatacacccatctttacctatgattcacaagtttcggtatttagcagcgatgaatctagcaccaaaccaacgcccgcccgtggcactcagatacgcaatctggactctagcatgttcgattacagaaaaatacagcgatctcaaggagctattttatcagcgtgcccgtaaatatgtggaggccgacatgatcaaaggctacggcgaacatttaatcaccattgctcattgtcaatgccacatattgttggcatcgtatgagttcaagatgatgtactttccaagggcatggatgagtactggcgcaggtgtgcgccttgcacaaatgattggtcttcaccgaatcgatggagctggtctagacgtaaagcaatgtcttccgccgccacgtgactggacggagagggaagagcgacggagaaccttctggatggcgttttgcgaagacagatatgccagtatcggaacaggctggcctatgacgattgacgaacgggatatcatgactaacttaccatcttccgaggatgctttcaacttaagtcggccagaaacgacacaaaccttggctgagaccatgagccccgccggagcggccaaattatcttcgttcggtggcatagtactgatggcctgcctatttggccgtaacctcacccatcttcaccgtcccgatgttgacgatcgcgatcacgatatgaacggtgaattctggaaacggcatcgcaatatggacaacattctcttaaacacatctctttgtctccctaatcaactcaaactacctaatgggatcggcaatcccaacgtcgtatttaccaacatgaacatacatacctcaaccatatgtcttcatcaagcggccattttcaaggcggatcggaatcgactgcctccaactgtcagtgccgagagtaaagtccgttgcattacagccgcgaatgaaatcgcaagtatcatgagaatggtttctcatcttgatcttgccgcaatgaaccctttcatttccttctgtctatatgtcgctgcacgagttttcgtgcagtatctaaaaagtcggcccgaagacagtcagacagcggattcgctacgattcctccttgccgctatgaatgcgctcaagaggaagaatcctctgacagaatcattcctggtacaactggatgtagacttggaggcgttaggtttacgtataccgaaactcaaaactgcattcccacggagtacagacagcccaacccccggaaccgcgggcgcaggaaaggcacccgaaggtcagcctgaactccccggcgtcatcgcctcggacaatggctgtaattacatggtctttgacaaaggcaaccctcttactgcccctgatattgttcagccagagctccagaatcaggcaactgaagtacctcagcctgtctttggttctcagcaatggtattccgtagatcagcaactaccaacaaatggacaagcgccagtaccagacaacggcggcatgaacatcgttattccaccagttatgtacaggtcattagtcgaaagccagagtagcgagactggtaacgaaatgtcagtatcgtccaatccagacggccagtcaaatcgaccaacaccgaactcgagtaccgggtcagatcaccggcggagtgcggcgggcgtcgccggaacgcctttcgagacgagtcctggcgggccacatcaaagtttcgtcgtccagaggacagaagcggatacacaaacacatttcttcccagaccaaggctttgggcgcggtttaaactcggctcgggcttttggcatcccagatacaccgagtaatgacttctcgatcccttcagaatgggagaatggacaagtgggtatgacgcccagaacgaccgaggcaatactacagggcctctcgaatatggaaaacatggacggtattgagatgtgggatgtcggaccctgatgaacatcgattacttacgatggtgactacgacaaagagggcatgagcctgaaatcacgaaatatattctttatgacgactcagggattctattagaatttggcgaaccgggaaagggtagatgggtaatggtatgcacaagggtacctgaggcaatattcaacgctgggcgagatgattctttggatatgagcgagacacaagcacaggcgaaacaagtgcttgggaatggcatgatacctcggtgccgaggcttggattgagggtctactgcttaagaggtgcccctgacattatactacgcgatcagatcagctgctagtgagcgatctggtttatccactcctgtaatgtaaaaaagatgcagatgactttattattgaaggcaggcgcatgtgtagctgttttttgctcccttttccccagacttccccggatccttcctctattgcggcatggcatttagcccgagggagaaggcggaggagcagggggtcttgttggattgtcagcttggggtatgcatatggcagcagagggggttgagagagacgagctatgcatccatcccgagcgctcttgcatgatgggattgaaagacccctgatagtgaggatcccacaagttttcatgattcataattgatatatgaacaagatgggcctcgaaacacatccacttaagccacattgccacgatatctttatgcatataccgatcatctggcccaacaccagccagagacaggctgctgggtccagattcatgctcagctccggccattttgcttacttgggaagtaacacatgacgataatgttcaatcagtttaaaaagaaatcaatgatgagctaccgcggcccgagacttgaatccggacgtacggacaagcattcgaccccatgtctcgactctctcatctgtcagcgtgggtctttgcttcgtcatgagtctatgtcggcggacgaaagacatggaaaacagacacacagaccaaagatgtggtgttgtacaaatggctctcgcgctggcaattgatgctctagtagagcgcggctgaaaaagagtgacgtatggcttggcctatccctcgcgtggcagtacggccagcgcagcacaggcagcatgtctacgtgtagttcggaaagatatgatgccaggccacgttccaacttccaatgacaggcgtcccgtttgcgtagcgtgttgatctgattatcgtgagggattccaacggctaggtttagtgccactaacattcgcgctccaaaaccccacttcggagcccacttcaactcgcagccttgacatggacccctgcttagatcgagcagctctagacggcacagaggccaaacgttctggcctggcttgcctgttcgggacgcattacagatagtgtccaaaggcgggccaaggtcgcgaggcgggggcagcaggactatcacgggctatccagtgctattgcccgtgcagccgtctccctctgacaacctgtgcctgtgaaaatgtggatatgggtgtgtgtatgtgtgtgcgtctgtttgctgaccatgaccgaaaagacgacagtacgcgtgagggacgactcggactatactcgtatactcgtcgtacctcgccatctgacagatgcagagacagacagacacacgtcaacctgcgtaggtttcggtcgcgcaagctggtaccgagagcatagtcggatgtgagtctgatctgtacctacatgcagtgtcgcagacatataaaggttatgtcatctggactgtcccggagccacgattcctcctgccccaggaagccgataatggtccgatttggcccaacgctggctgaccacgacgcttcttatatctccatcgccagcccaactcgcagtccccatcccaatccagccaggcggcaacggccacgagcgaccgctccccgtgctccgtccattcttttagttccaagattgtttagtttgctaatttcctcgtatcttctgctgcttgcccttgaccggcgccccgttcgttatcgccggttttgtctacacgtctacgtaaccgactagtctgccgactgactataactacctctactgcctatactccattattgatcgtccccttctactcttggctcgacctttttgttgtcactgcccctcttcgtctcaattcctttccccttcgcttctctcgtccgccgccaagactgctttgtccttgcttttggtttctggtgaacaccttgtgttggtgtgtttgtggtgtgttttgacggactgcgatatgggctggggtcgggtgtcgttgagctgcggtggtcccaggcattctaagcggccatagcagcaagctgtattaattgacatatttcaagagccatcatggaccacatctctgtacacttcccatctccagacgataccctctcccacgaaatacaccatcactcgaggcggccttcggagtcgcattatcgcattggggggctgtcggctcttgaactgcccctcgatagctccgaatccctctatcaaccacatctgcagcgtctaaactcagtccctgctctgcccattgtgcaccacgacttcagccatcttgcccaagacagcttcgaacgcgatcaccatctcccctccttgccgactcatctgcatcgccgttcccatacccagacttctgccgagctgcagcaaccgcatcatcatgtggtgtccagtcctctgcctccgcacactagaccacctctccacggccctttcggcgccttggcgcccattgtgcccataacacaggctggtgggcaacctcttctacactctgaggatgacgtgttttcttccccaaccggcccttctcccatgggcggcattgcggaggcttccgatccgcgaccacacggacaattggtaaacagggtagttatagatccaccaaatctccaggcctggcgtgataagttattccatgttgacgatacaatcactttgacgaatgatgaattcgagacctatttcccccatattgataatgtatactcacatcgttcgacgcaaaagtacaagcggaaaaacttcatttctcattactgggattgccggatgaaagggcgtccaccaggtacgccaaagtctgatgacccctccaaaaagaaacgaaagcggtttgctcgagaaagggatctctgtgatgtcaagatcaagatcacagagcattttcctaatgccactttctctccggacggcacgctcaatcttacccagccaggcgtatttcagacattgcaacccttccccgatgggacaccgcgatcacctgacggcttcatagccggtgaaaagtactggacgatacagagagtcaatggaaatggcggaaatggtaagggagacggcgttccagggccccataagcatacgctggaaaagagcgacgagatcaaaaagtccactgtgcagaggattcttgcagcccaggaaaaagaggctaagaaaatccaaaaatcgcctcagccaaagcggccgtctggtaatgccatgttgactgctaagaagcactctaaagagcatggtctaaagctgtatgcggcaagcttttgccccttttcacaacgagtgtggatagcgttagaagcaaaaggcatgcaatatcaatactgcgagacggatccatttaagcgtccaactcatttgctagaggcgaatcctcgaggaatgacaccggctatccgagaaggcgactgggcaagtggtgagagcactgtgatattggaatatctcgaagatcacgataggagacttcctctactgccaactgatcctagactcaaggcaaactgcagattatggattgatcatatcaatgccaaaatagtgccagcattctttgccttgatgagagcacaagagctcgcaagacaacaagattgtattgagaggctacgaagtgagattatggccctaacgcaggctgcagacgaacgaggcccttattttcttggcagcgacttatgcctcgttgacgttcatcttgcccctttcgcacttcgtatgtctcgcatattacgcgaataccgtaactggagcgatcatatgccaggaacacgatggcatcagtggtctgactcgctcgagaaaaatccacatatccaggctaccacgagttcggatgaactatacatcgaaacgattgacaccgttctgaaaagtcgtgcgccatctactgacccatctcgtgcctaaaggagggtaaaagtcgtattttcgaagttttcattacgtaacggaaaacaggatagacagagaaacagggagaacgacacacgtgtacagatggaccggagtgtcaatgaacgatttagtatggagttggacggaaccagattatctgcgactgattttttcacttctaggaacacatgagagatgttttttgagactgctaaaagcgatctgtggcttccattggtgtctttatagactcatatagatggggccgagacaccgagaggtaattgtctttggtcggagcacagcacacttccttggcatattttcggcccggaaaaggatcattgggttggttggaatcgttgatttgcatggtacaactttggatttgggtttggcattttgggaaatgggagatgatttcggttggtaattttgcaaagactcagaatgaagtgagatacgtagatattgcaagagacttgagaacaagaatagttaatggaagttgaaagttggtcatccagagcctactcgcgactcatttgtg

SEQ ID NO: 16190 - DNA, 2625 bp, Muscodor strobelii
  misc_feature: SGI cDNA ID NO. 565378
  misc_feature: Encodes the peptide sequence at SEQ ID NO 16191
atgtcgccgacagcagattcgacagaggcaaatggcaacgagtcggcctctcctcttacggacaatagcccacccgctgatgcggcaccgaccgtgccacgcaacaacaatgatgtacccaaacccaagaggctagcgtgcatgatctgccggaagagaaagctacgctgcgatggcattaagcccagttgcagcacatgcacaaggctcggccattcatgcgcatacgatgaagttaggaaaaagagcgggccgaagcgtggatatgtgaaggctttggaagagaggcttaagcaagtggaggaactattaaagacgcaggagcccagcactagcacaagccccgaagccatgaagacacccaacatggcctttgaacagcttcgaaaccagcaagcgaatgcggcgcccaatttcaccgtcaacaacccctcgatagccatagccagtgatcgtgacatggacaggtggcgcttgaacggagagtcgccgcaaggacaaggacaagccaccgggaatggtatcgaggattttaacaacttcgcagcgggacatatgcaaatgcccatgaacaatatggacccaagcttcacgtgggaaatgatcggcctgggtttggaagagccacttccaccgcaagaaactatcgatgagttgcatcagatattcttcgagaagatacacccatctttacctatgattcacaagtttcggtatttagcagcgatgaatctagcaccaaaccaacgcccgcccgtggcactcagatacgcaatctggactctagcatgttcgattacagaaaaatacagcgatctcaaggagctattttatcagcgtgcccgtaaatatgtggaggccgacatgatcaaaggctacggcgaacatttaatcaccattgctcattgtcaatgccacatattgttggcatcgtatgagttcaagatgatgtactttccaagggcatggatgagtactggcgcaggtgtgcgccttgcacaaatgattggtcttcaccgaatcgatggagctggtctagacgtaaagcaatgtcttccgccgccacgtgactggacggagagggaagagcgacggagaaccttctggatggcgttttgcgaagacagatatgccagtatcggaacaggctggcctatgacgattgacgaacgggatatcatgactaacttaccatcttccgaggatgctttcaacttaagtcggccagaaacgacacaaaccttggctgagaccatgagccccgccggagcggccaaattatcttcgttcggtggcatagtactgatggcctgcctatttggccgtaacctcacccatcttcaccgtcccgatgttgacgatcgcgatcacgatatgaacggtgaattctggaaacggcatcgcaatatggacaacattctcttaaacacatctctttgtctccctaatcaactcaaactacctaatgggatcggcaatcccaacgtcgtatttaccaacatgaacatacatacctcaaccatatgtcttcatcaagcggccattttcaaggcggatcggaatcgactgcctccaactgtcagtgccgagagtaaagtccgttgcattacagccgcgaatgaaatcgcaagtatcatgagaatggtttctcatcttgatcttgccgcaatgaaccctttcatttccttctgtctatatgtcgctgcacgagttttcgtgcagtatctaaaaagtcggcccgaagacagtcagacagcggattcgctacgattcctccttgccgctatgaatgcgctcaagaggaagaatcctctgacagaatcattcctggtacaactggatgtagacttggaggcgttaggtttacgtataccgaaactcaaaactgcattcccacggagtacagacagcccaacccccggaaccgcgggcgcaggaaaggcacccgaaggtcagcctgaactccccggcgtcatcgcctcggacaatggctgtaattacatggtctttgacaaaggcaaccctcttactgcccctgatattgttcagccagagctccagaatcaggcaactgaagtacctcagcctgtctttggttctcagcaatggtattccgtagatcagcaactaccaacaaatggacaagcgccagtaccagacaacggcggcatgaacatcgttattccaccagttatgtacaggtcattagtcgaaagccagagtagcgagactggtaacgaaatgtcagtatcgtccaatccagacggccagtcaaatcgaccaacaccgaactcgagtaccgggtcagatcaccggcggagtgcggcgggcgtcgccggaacgcctttcgagacgagtcctggcgggccacatcaaagtttcgtcgtccagaggacagaagcggatacacaaacacatttcttcccagaccaaggctttgggcgcggtttaaactcggctcgggcttttggcatcccagatacaccgagtaatgacttctcgatcccttcagaatgggagaatggacaagtgggtatgacgcccagaacgaccgaggcaatactacagggcctctcgaatatggaaaacatggacggtattgagatgtgggatgtcggaccctga

SEQ ID NO: 16191 - protein, 874 aa, Muscodor strobelii
  misc_feature: SGI Peptide ID NO. 565378
  misc_feature (45)..(83): Pfam Id: PF00172 Pfam Desc: Fungal Zn(2)-Cys(6) binuclear cluster domain
  misc_feature (299)..(401): Pfam Id: PF04082 Pfam Desc: Fungal specific transcription factor domain
  misc_feature (36)..(871): NCBI GI: 116206928 Blast Desc: CHGG_02757 [Chaetomium globosum CBS 148.51] gi|88183354|gb|EAQ90822.1| CHGG_02757 [Chaetomium globosum CBS 148.51]
  misc_feature (24)..(871): NCBI GI: 171680283 Blast Desc: protein product [Podospora anserina] gi|170939768|emb|CAP64994.1| protein product [Podospora anserina]
  misc_feature (18)..(869): NCBI GI: 46108822 Blast Desc: FG01293.1 [Gibberella zeae PH-1]
  misc_feature (82)..(873): NCBI GI: 261356577 Blast Desc: binuclear zinc transcription factor [Verticillium albo-atrum VaMs.102]
  misc_feature (29)..(873): NCBI GI: 154318235 Blast Desc: BC1G_03285 [Botryotinia fuckeliana B05.10] gi|150842808|gb|EDN18001.1| BC1G_03285 [Botryotinia fuckeliana B05.10]
  misc_feature (41)..(848): NCBI GI: 189189574 Blast Desc: binuclear zinc transcription factor [Pyrenophora tritici-repentis Pt-1C-BFP] gi|187972732|gb|EDU40231.1| binuclear zinc transcription factor [Pyrenophora tritici-repentis
  misc_feature (35)..(780): NCBI GI: 121708246 Blast Desc: C6 transcription factor Prf, [Aspergillus clavatus NRRL 1] gi|119400220|gb|EAW10646.1| C6 transcription factor Prf, [Aspergillus clavatus NRRL 1]
  misc_feature (26)..(669): NCBI GI: 156053173 Blast Desc: SS1G_06754 [Sclerotinia sclerotiorum 1980] gi|154704532|gb|EDO04271.1| SS1G_06754 [Sclerotinia sclerotiorum 1980]
  misc_feature (3)..(624): NCBI GI: 119173624 Blast Desc: CIMG_10246 [Coccidioides immitis RS]
  misc_feature (20)..(623): NCBI GI: 159125462 Blast Desc: C6 transcription factor Prf, [Aspergillus fumigatus A1163]
MSPTADSTEANGNESASPLTDNSPPADAAPTVPRNNNDVPKPKRLACMICRKRKLRCDGIKPSCSTCTRLGHSCAYDEVRKKSGPKRGYVKALEERLKQVEELLKTQEPSTSTSPEAMKTPNMAFEQLRNQQANAAPNFTVNNPSIAIASDRDMDRWRLNGESPQGQGQATGNGIEDFNNFAAGHMQMPMNNMDPSFTWEMIGLGLEEPLPPQETIDELHQIFFEKIHPSLPMIHKFRYLAAMNLAPNQRPPVALRYAIWTLACSITEKYSDLKELFYQRARKYVEADMIKGYGEHLITIAHCQCHILLASYEFKMMYFPRAWMSTGAGVRLAQMIGLHRIDGAGLDVKQCLPPPRDWTEREERRRTFWMAFCEDRYASIGTGWPMTIDERDIMTNLPSSEDAFNLSRPETTQTLAETMSPAGAAKLSSFGGIVLMACLFGRNLTHLHRPDVDDRDHDMNGEFWKRHRNMDNILLNTSLCLPNQLKLPNGIGNPNVVFTNMNIHTSTICLHQAAIFKADRNRLPPTVSAESKVRCITAANEIASIMRMVSHLDLAAMNPFISFCLYVAARVFVQYLKSRPEDSQTADSLRFLLAAMNALKRKNPLTESFLVQLDVDLEALGLRIPKLKTAFPRSTDSPTPGTAGAGKAPEGQPELPGVIASDNGCNYMVFDKGNPLTAPDIVQPELQNQATEVPQPVFGSQQWYSVDQQLPTNGQAPVPDNGGMNIVIPPVMYRSLVESQSSETGNEMSVSSNPDGQSNRPTPNSSTGSDHRRSAAGVAGTPFETSPGGPHQSFVVQRTEADTQTHFFPDQGFGRGLNSARAFGIPDTPSNDFSIPSEWENGQVGMTPRTTEAILQGLSNMENMDGIEMWDVGP

SEQ ID NO: 16192 - DNA, 10857 bp, Muscodor strobelii; identical to SEQ ID NO: 16189
  misc_feature: SGI EST ID NO. CUFF.38387.2
  misc_feature: Variant of the nucleotide sequence at SEQ ID NO 16190

SEQ ID NO: 16193 - DNA, 1860 bp, Muscodor strobelii
  misc_feature: SGI cDNA ID NO. 565379
  misc_feature: Reduced expression when VOC is produced
  misc_feature: Encodes the peptide sequence at SEQ ID NO 16194
atggaccacatctctgtacacttcccatctccagacgataccctctcccacgaaatacaccatcactcgaggcggccttcggagtcgcattatcgcattggggggctgtcggctcttgaactgcccctcgatagctccgaatccctctatcaaccacatctgcagcgtctaaactcagtccctgctctgcccattgtgcaccacgacttcagccatcttgcccaagacagcttcgaacgcgatcaccatctcccctccttgccgactcatctgcatcgccgttcccatacccagacttctgccgagctgcagcaaccgcatcatcatgtggtgtccagtcctctgcctccgcacactagaccacctctccacggccctttcggcgccttggcgcccattgtgcccataacacaggctggtgggcaacctcttctacactctgaggatgacgtgttttcttccccaaccggcccttctcccatgggcggcattgcggaggcttccgatccgcgaccacacggacaattggtaaacagggtagttatagatccaccaaatctccaggcctggcgtgataagttattccatgttgacgatacaatcactttgacgaatgatgaattcgagacctatttcccccatattgataatgtatactcacatcgttcgacgcaaaagtacaagcggaaaaacttcatttctcattactgggattgccggatgaaagggcgtccaccaggtacgccaaagtctgatgacccctccaaaaagaaacgaaagcggtttgctcgagaaagggatctctgtgatgtcaagatcaagatcacagagcattttcctaatgccactttctctccggacggcacgctcaatcttacccagccaggcgtatttcagacattgcaacccttccccgatgggacaccgcgatcacctgacggcttcatagccggtgaaaagtactggacgatacagagagtcaatggaaatggcggaaatggtaagggagacggcgttccagggccccataagcatacgctggaaaagagcgacgagatcaaaaagtccactgtgcagaggattcttgcagcccaggaaaaagaggctaagaaaatccaaaaatcgcctcagccaaagcggccgtctggtaatgccatgttgactgctaagaagcactctaaagagcatggtctaaagctgtatgcggcaagcttttgccccttttcacaacgagtgtggatagcgttagaagcaaaaggcatgcaatatcaatactgcgagacggatccatttaagcgtccaactcatttgctagaggcgaatcctcgaggaatgacaccggctatccgagaaggcgactgggcaagtggtgagagcactgtgatattggaatatctcgaagatcacgataggagacttcctctactgccaactgatcctagactcaaggcaaactgcagattatggattgatcatatcaatgccaaaatagtgccagcattctttgccttgatgagagcacaagagctcgcaagacaacaagattgtattgagaggctacgaagtgagattatggccctaacgcaggctgcagacgaacgaggcccttattttcttggcagcgacttatgcctcgttgacgttcatcttgcccctttcgcacttcgtatgtctcgcatattacgcgaataccgtaactggagcgatcatatgccaggaacacgatggcatcagtggtctgactcgctcgagaaaaatccacatatccaggctaccacgagttcggatgaactatacatcgaaacgattgacaccgttctgaaaagtcgtgcgccatctactgacccatctcgtgcctaa

SEQ ID NO: 16194 - protein, 619 aa, Muscodor strobelii
  misc_feature: SGI Peptide ID NO. 565379
  misc_feature (396)..(468): Pfam Id: PF02798 Pfam Desc: Glutathione S-transferase, N-terminal domain
  misc_feature (121)..(619): NCBI GI: 156052911 Blast Desc: SS1G_06623 [Sclerotinia sclerotiorum 1980] gi|154704401|gb|EDO04140.1| SS1G_06623 [Sclerotinia sclerotiorum 1980]
  misc_feature (110)..(608): NCBI GI: 256735033 Blast Desc: NECHADRAFT_74474 [Nectria haematococca mpVI 77-13-4]
  misc_feature (179)..(604): NCBI GI: 225559803 Blast Desc: conserved [Ajellomyces capsulatus G186AR]
  misc_feature (179)..(602): NCBI GI: 119194479 Blast Desc: CIMG_01614 [Coccidioides immitis RS]
  misc_feature (158)..(614): NCBI GI: 261191797 Blast Desc: glutathione transferase [Ajellomyces dermatitidis SLH14081] gi|239589622|gb|EEQ72265.1| glutathione transferase [Ajellomyces dermatitidis SLH14081]
  misc_feature (158)..(614): NCBI GI: 239608636 Blast Desc: glutathione transferase [Ajellomyces dermatitidis ER-3]
  misc_feature (152)..(610): NCBI GI: 238843834 Blast Desc: conserved [Microsporum canis CBS 113480]
  misc_feature (179)..(604): NCBI GI: 121708124 Blast Desc: glutathione transferase, [Aspergillus clavatus NRRL 1] gi|119400184|gb|EAW10610.1| glutathione transferase, [Aspergillus clavatus NRRL 1]
  misc_feature (50)..(610): NCBI GI: 226290141 Blast Desc: glutathione S-transferase [Paracoccidioides brasiliensis Pb18]
  misc_feature (179)..(610): NCBI GI: 240105298 Blast Desc: Glutathione S-transferase, N-terminal domain containing protein [Coccidioides posadasii C735 delta SOWgp]
  misc_feature: Useful for introducing or modulating the production of volatile compounds
MDHISVHFPSPDDTLSHEIHHHSRRPSESHYRIGGLSALELPLDSSESLYQPHLQRLNSVPALPIVHHDFSHLAQDSFERDHHLPSLPTHLHRRSHTQTSAELQQPHHHVVSSPLPPHTRPPLHGPFGALAPIVPITQAGGQPLLHSEDDVFSSPTGPSPMGGIAEASDPRPHGQLVNRVVIDPPNLQAWRDKLFHVDDTITLTNDEFETYFPHIDNVYSHRSTQKYKRKNFISHYWDCRMKGRPPGTPKSDDPSKKKRKRFARERDLCDVKIKITEHFPNATFSPDGTLNLTQPGVFQTLQPFPDGTPRSPDGFIAGEKYWTIQRVNGNGGNGKGDGVPGPHKHTLEKSDEIKKSTVQRILAAQEKEAKKIQKSPQPKRPSGNAMLTAKKHSKEHGLKLYAASFCPFSQRVWIALEAKGMQYQYCETDPFKRPTHLLEANPRGMTPAIREGDWASGESTVILEYLEDHDRRLPLLPTDPRLKANCRLWIDHINAKIVPAFFALMRAQELARQQDCIERLRSEIMALTQAADERGPYFLGSDLCLVDVHLAPFALRMSRILREYRNWSDHMPGTRWHQWSDSLEKNPHIQATTSSDELYIETIDTVLKSRAPSTDPSRA

SEQ ID NO: 16195 - DNA, 10857 bp, Muscodor strobelii; identical to SEQ ID NO: 16189
  misc_feature: SGI EST ID NO. CUFF.38387.2
  misc_feature: Variant of the nucleotide sequence at SEQ ID NO 16193

SEQ ID NO: 16196 - DNA, 2025 bp, Muscodor strobelii
  misc_feature: SGI cDNA ID NO. 565380
  misc_feature: Reduced expression when VOC is produced
  misc_feature: Encodes the peptide sequence at SEQ ID NO 16197
atggaggccagtcggggccctcccagggtcaagaacaaggccgccgcgccagttcagatctctgccgagcagctgctgagagaggctgtcgaccgccaagacactggtgtacaggccccaacccaacgcttcgaggatctcgaggagctccatgagtttcaggggcgcaagcgcaagggcttcgaggactatgtcaggcgcaataggattaatatgaacaactggatgaaatatgccgcctgggaactcgagcagaaagaattcaagcgcgcccgctccatcttcgagcgcgccctcgacgtcgatgccacctccgtcgtcctatggatccgatacatcgaggccgagatgaagaacaggaacatcaaccacgcgaggaatctgctcgaccgcgccgtcaccatccttccccgcgttgacaagctgtggtacaaatatgtctacatggaggagatgctgggaaacattccaggtacacgacaggttttcgagagatggatgacgtgggaacccgaggaggctgcctggagcgcctacatcaagatggagaagcgatacaatgagttcgaccgcgctcgtgctgtctttgaacgctttaccatcgtacatcccgagccgcggaactggatcaaatgggccaaatttgaggaggaattcggaaccagtgacatggttcgcgaggtctttggcgctgctgtcgaggcattgggagatgagttcgtagacgaacgactcttcattgcatatgccaggtatgaggccaagctcaaagagtacgaaagggctcgtgctatctacaaatatgcgctagaccgtcttccccgatccaaatccatggggctacacaagtcttataccaccttcgaaaagcaatacggcgataaggacggtgtcgaggacgtcgtcttatccaagcgcagacgtctttacgaggatcagatcaaggagaaccccaaaaactacgatatatggttcgattacgctcgccttgaggagacatctggcgacttggaccgcgttcgagacgtttacgagcgagctgtggcacagattcctccaacacaggaaaaacggcattggcgtcgttatatctatttatggatattctatgccctctgggaagagatggatgcgaaagatttggaccgggctcgacagatttacaagttatgcctggatctcgttcctcacaaaaagttcacgttcgctaaagtctggttgatgaaagcccaattcgagatccgtcaaggcgaattaacggctgcacggaaatctctgggccaggcaatcggtatgtgtcccaaggacaagttgttcaagggttacgtcgagttggagctcaagctgtttgagtttgtgagatgtcgcacactttacgaaaagcatattgaatggaactcttcgaactgccagacctggatcaagtttgccgagcttgagagaggactggatgatctggaccgagcgcgcgctattttcgaacttgccatttctcagccaatgctggatatgccagaactgttgtggaaagcctacatagacttcgaagaagaggagggcgaatacgagagaactcgcgatctgtatgagcgtctacttgagaagacagaccacgtcaaggtctggatcagctacgcgcacttcgagatcaatattcctgatgacgaagaggaagccgaggaggaagcagaagaaaaacccgtcagcgatgaggcaaaagcaagagctcgcaaggtatttgagcgcgcgcataagagcatgaaagagaaagaactcaaggaagaacgcgtctctctactcaatgcctggctatcgttcgagaggactcatggctctgaggaggatattgacaaggtccagaagcagatgccgaggaagacgaagcgcaggcgcagactcgaagacgatactttcgaggagtacgtcgattacatcttcccggctgacgatgagcagacgcagagtgtctctcagatgctggctatggcgtctgcttggaagcagggcggcgcgacgatcacgtaa

SEQ ID NO: 16197 - protein, 674 aa, Muscodor strobelii
  misc_feature: SGI Peptide ID NO. 565380
  misc_feature (187)..(218): Pfam Id: PF02184 Pfam Desc: HAT (Half-A-TPR) repeat
  misc_feature (86)..(118): Pfam Id: PF02184 Pfam Desc: HAT (Half-A-TPR) repeat
  misc_feature (520)..(551): Pfam Id: PF02184 Pfam Desc: HAT (Half-A-TPR) repeat
  misc_feature (521)..(551): Pfam Id: PF02184 Pfam Desc: HAT (Half-A-TPR) repeat
  misc_feature (2)..(669): NCBI GI: 154314646 Blast Desc: BC1G_04032 [Botryotinia fuckeliana B05.10] gi|150848654|gb|EDN23847.1| BC1G_04032 [Botryotinia fuckeliana B05.10]
  misc_feature (1)..(668): NCBI GI: 256735031 Blast Desc: [Nectria haematococca mpVI 77-13-4]
  misc_feature (1)..(671): NCBI GI: 238498556 Blast Desc: cell cycle control protein (Cwf4), [Aspergillus flavus NRRL3357] gi|220693787|gb|EED50132.1| cell cycle control protein (Cwf4), [Aspergillus flavus NRRL3357]
  misc_feature (1)..(667): NCBI GI: 145239345 Blast Desc: An08g02000 [Aspergillus niger] gi|134076826|emb|CAK39880.1| protein product [Aspergillus niger]
  misc_feature (1)..(671): NCBI GI: 259488420 Blast Desc: TPA: Pre-mRNA-splicing factor clf1 [Source:UniProtKB/Swiss-Prot;Acc:Q5BDX1] [Aspergillus nidulans FGSC A4]
  misc_feature (1)..(671): NCBI GI: 169781742 Blast Desc: [Aspergillus oryzae RIB40] gi|83774076|dbj|BAE64201.1| protein product [Aspergillus oryzae]
  misc_feature (1)..(674): NCBI GI: 119495949 Blast Desc: cell cycle control protein (Cwf4), [Neosartorya fischeri NRRL 181] gi|119412911|gb|EAW22852.1| cell cycle control protein (Cwf4), [Neosartorya fischeri NRRL 181]
  misc_feature (1)..(668): NCBI GI: 242767872 Blast Desc: cell cycle control protein (Cwf4), [Talaromyces stipitatus ATCC 10500] gi|218724651|gb|EED24068.1| cell cycle control protein (Cwf4), [Talaromyces stipitatus ATCC 10500]
  misc_feature (1)..(674): NCBI GI: 70995249 Blast Desc: cell cycle control protein (Cwf4) [Aspergillus fumigatus Af293] gi|74672728|sp|Q4WT84.1|CLF1_ASPFU RecName: Full=Pre-mRNA-splicing factor clf1 gi|66850021|gb|EAL90348.1|
  misc_feature (1)..(671): NCBI GI: 46108836 Blast Desc: FG01300.1 [Gibberella zeae PH-1]
  misc_feature: Useful for introducing or modulating the production of volatile compounds
MEASRGPPRVKNKAAAPVQISAEQLLREAVDRQDTGVQAPTQRFEDLEELHEFQGRKRKGFEDYVRRNRINMNNWMKYAAWELEQKEFKRARSIFERALDVDATSVVLWIRYIEAEMKNRNINHARNLLDRAVTILPRVDKLWYKYVYMEEMLGNIPGTRQVFERWMTWEPEEAAWSAYIKMEKRYNEFDRARAVFERFTIVHPEPRNWIKWAKFEEEFGTSDMVREVFGAAVEALGDEFVDERLFIAYARYEAKLKEYERARAIYKYALDRLPRSKSMGLHKSYTTFEKQYGDKDGVEDVVLSKRRRLYEDQIKENPKNYDIWFDYARLEETSGDLDRVRDVYERAVAQIPPTQEKRHWRRYIYLWIFYALWEEMDAKDLDRARQIYKLCLDLVPHKKFTFAKVWLMKAQFEIRQGELTAARKSLGQAIGMCPKDKLFKGYVELELKLFEFVRCRTLYEKHIEWNSSNCQTWIKFAELERGLDDLDRARAIFELAISQPMLDMPELLWKAYIDFEEEEGEYERTRDLYERLLEKTDHVKVWISYAHFEINIPDDEEEAEEEAEEKPVSDEAKARARKVFERAHKSMKEKELKEERVSLLNAWLSFERTHGSEEDIDKVQKQMPRKTKRRRRLEDDTFEEYVDYIFPADDEQTQSVSQMLAMASAWKQGGATIT

SEQ ID NO: 16198 - DNA, 2647 bp, Muscodor strobelii
  misc_feature: SGI EST ID NO. CUFF.38277.0
  misc_feature: Variant of the nucleotide sequence at SEQ ID NO 16196
ttcaggccaccgtccagcaccaccaactctgaagactaaacttcagcttgtccttccatccaatcgtcgcacgcgcattgctggaagcattcgacagctgtgctgcaccactcgccgaccattcgaacaccaatctaccgcatcgtcccctgagtgcgcgccatccaactccaagatggaggccagtcggggccctcccagggtcaagaacaaggccgccgcgccagttcagatctctgccgagcagctgctgagagaggctgtcgaccgccaagacactggtgtacaggccccaacccaacgcttcgaggatctcgaggagctccatgagtttcaggggcgcaagcgcaagggcttcgaggactatgtcaggcgcaataggattaatatgaacaactggatgaaatatgccgcctgggaactcgagcagaaagaattcaagcgcgcccgctccatcttcgagcgcgccctcgacgtcgatgccacctccgtcgtcctatggatccgatacatcgaggccgagatgaagaacaggaacatcaaccacgcgaggaatctgctcgaccgcgccgtcaccatccttccccgcgttgacaagctgtggtacaaatatgtctacatggaggagatgctgggaaacattccaggtacacgacaggttttcgagagatggatgacgtgggaacccgaggaggctgcctggagcgcctacatcaagatggagaagcgatacaatgagttcgaccgcgctcgtgctgtctttgaacgctttaccatcgtacatcccgagccgcggaactggatcaaatgggccaaatttgaggaggaattcggaaccagtgacatggttcgcgaggtctttggcgctgctgtcgaggcattgggagatgagttcgtagacgaacgactcttcattgcatatgccaggtatgaggccaagctcaaagagtacgaaagggctcgtgctatctacaaatatgcgctagaccgtcttccccgatccaaatccatggggctacacaagtcttataccaccttcgaaaagcaatacggcgataaggacggtgtcgaggacgtcgtcttatccaagcgcagacgtctttacgaggatcagatcaaggagaaccccaaaaactacgatatatggttcgattacgctcgccttgaggagacatctggcgacttggaccgcgttcgagacgtttacgagcgagctgtggcacagattcctccaacacaggaaaaacggcattggcgtcgttatatctatttatggatattctatgccctctgggaagagatggatgcgaaagatttggaccgggctcgacagatttacaagttatgcctggatctcgttcctcacaaaaagttcacgttcgctaaagtctggttgatgaaagcccaattcgagatccgtcaaggcgaattaacggctgcacggaaatctctgggccaggcaatcggtatgtgtcccaaggacaagttgttcaagggttacgtcgagttggagctcaagctgtttgagtttgtgagatgtcgcacactttacgaaaagcatattgaatggaactcttcgaactgccagacctggatcaagtttgccgagcttgagagaggactggatgatctggaccgagcgcgcgctattttcgaacttgccatttctcagccaatgctggatatgccagaactgttgtggaaagcctacatagacttcgaagaagaggagggcgaatacgagagaactcgcgatctgtatgagcgtctacttgagaagacagaccacgtcaaggtctggatcagctacgcgcacttcgagatcaatattcctgatgacgaagaggaagccgaggaggaagcagaagaaaaacccgtcagcgatgaggcaaaagcaagagctcgcaaggtatttgagcgcgcgcataagagcatgaaagagaaagaactcaaggaagaacgcgtctctctactcaatgcctggctatcgttcgagaggactcatggctctgaggaggatattgacaaggtccagaagcagatgccgaggaagacgaagcgcaggcgcagactcgaagacgatactttcgaggagtacgtcgattacatcttcccggctgacgatgagcagacgcagagtgtctctcagatgctggctatggcgtctgcttggaagcagggcggcgcgacgatcacgtaaatatgtgctactgtagaattagcgtgaaacagattgcattagcgaatgtattattgggtacgatcagctattaagttgtacatccgcaagatggaggtgttatctgaaatagggccaggcagaccgggacgcaggccatgacccaaataagtcatacgtctacaagcattatgtcagccattgacctgaatgaatccgctaaactgggtaaagtgccgacaagggaacgattctggtgtcaaagctggacacttagtagtatttccacaatcaaaattcagggcgtaggttccgagatcttgcaattctgccagcaaatgtatacatcagaacgatagtgacgtatgcccctgcgctagaactgtctctgggtacgttaagagagtaactcagcttgatgtacacccataggtagaagataaaagtagataggactagagaacacag

SEQ ID NO: 16199 - DNA, 1815 bp, Muscodor strobelii
  misc_feature: SGI cDNA ID NO. 565381
  misc_feature: Reduced expression when VOC is produced
  misc_feature: Encodes the peptide sequence at SEQ ID NO 16200
atgtcgacgttagcggacgagctgttacaggacttcgaggactccggttccgaaaatggcgatatccagaacgagcccgatctcgacttggaccgtccaaccgtcgccgaccgcaatcacgatgataacgacatggctctcgacggcgatgaggacgggcttaaagaccccgacggagacgaagacatggccggcgtagatgaggtagtcgacaccatggaagacgaagatgcagccaaggctagaatagagaagatgcagctgggcaacgtcaaagacgtgcgcaaggtctcgagtctcatggacagactagaacccctcctcaaggatattgctcagtaccagtcgaagccactgtcgcaggccactaccaacatcggcaacatcgaagacaacccagaatacaagattctcaccgagtccaacaccctgtcaacgcagattgacggcgagatcatgaaggtccataagttcatcagggaccactactcagcccgcttccccgagcttgagactctgattcagaacccgatagaatacgccaaagtcgtaaccatcctgggcaacgggcccatggattctgacagcatcaaagccatccagggttctaccgacaatacgttgggcgaatctctcaggaccatcttggatggcccttctcttatgattgtgacattagaagccacaacgagcaaaggtcaagaaatttcgcaggaagagctggatcgcatcctcagagcctgtcatatgatgatcaagatggagaaagcaaagaagacattgacagcatacgtccagtcgcgaatgagcatatttgcgcccaacctgacagccgtcgtcggctctctcacagccgcccaactcatcaacaccgcgggtggtctcaccaacttgtcaagggtcccagcttgcaatatcgccgcgtggggtaccaacaagtcgaggaactcggcattcgctacaaatgtcgccatcagacagcagggatttctatattactcacccattattcgcggcataccagacgatgttaagaagaaagccatgaaggcagttgctgcaaagttggtcttggctgcgcgcgcggacacgagtcattctaacccagatggttcgtatggagaggaccttcgtaatcagtgtctgaaccgtttagacaaaatcacagagccaccggccaacaaggggcaccgtgctctcccagcacccgatgataagccatccaagaaacgaggtggtcgtcaagccagaaagcagaaagaggcggtcgctctgacagagctcagaaaggcacaaaatcgcttggctttcggcaaggaagagaaagagacggattatactacaggcgattcgaccgtcggattgggcatgatcggccaagctggcgacggccgtattcgcagcatgcagatcgacaacagaacgcgcgcaaaactcagtcagaagcacaagggctggggtggcgcgacccctatcggtggctcagcgtcctcactgcgtggtttcgggcaagcagggaacaacattgaccttcgaggcaaaggcctgcgcacatccggggttggctcgaccattgggggtggggctggaacggcatcctctctcgccttcaccccagttcagggtcttgagctcgtggatccgaagaatcaagccgagctctcacgcaagcggaaggcagaggaagaccgctggtttaagggtggcactttcacccaggttggaggtgctgctagctccgcaaatcctcataagaaagttaatacaggggccagcgggatgatgcttccgccagccctgccaacgaaaaaatag

SEQ ID NO: 16200 - protein, 604 aa, Muscodor strobelii
  misc_feature: SGI Peptide ID NO. 565381
  misc_feature (243)..(391): Pfam Id: PF01798 Pfam Desc: snoRNA binding domain
  misc_feature (137)..(189): Pfam Id: PF08060 Pfam Desc: NOSIC (NUC001) domain
  misc_feature (63)..(603): NCBI GI: 154314644 Blast Desc: BC1G_04031 [Botryotinia fuckeliana B05.10] gi|150848653|gb|EDN23846.1| BC1G_04031 [Botryotinia fuckeliana B05.10]
  misc_feature (70)..(603): NCBI GI: 156053257 Blast Desc: SS1G_06796 [Sclerotinia sclerotiorum 1980] gi|154704574|gb|EDO04313.1| SS1G_06796 [Sclerotinia sclerotiorum 1980]
  misc_feature (1)..(604): NCBI GI: 46108834 Blast Desc: FG01299.1 [Gibberella zeae PH-1]
  misc_feature (1)..(594): NCBI GI: 261194775 Blast Desc: pre-mRNA splicing factor [Ajellomyces dermatitidis SLH14081] gi|239588330|gb|EEQ70973.1| pre-mRNA splicing factor [Ajellomyces dermatitidis SLH14081]
  misc_feature (1)..(594): NCBI GI: 239613392 Blast Desc: pre-mRNA splicing factor [Ajellomyces dermatitidis ER-3]
  misc_feature (1)..(592): NCBI GI: 145615603 Blast Desc: MGG_13154 [Magnaporthe grisea 70-15] gi|145022413|gb|EDK06433.1| MGG_13154 [Magnaporthe grisea 70-15]
  misc_feature (1)..(598): NCBI GI: 261356579 Blast Desc: pre-mRNA-processing factor 31 [Verticillium albo-atrum VaMs.102]
  misc_feature (1)..(592): NCBI GI: 116206942 Blast Desc: CHGG_02764 [Chaetomium globosum CBS 148.51] gi|88183361|gb|EAQ90829.1| CHGG_02764 [Chaetomium globosum CBS 148.51]
  misc_feature (1)..(592): NCBI GI: 171680271 Blast Desc: protein product [Podospora anserina] gi|170939762|emb|CAP64988.1| protein product [Podospora anserina]
  misc_feature (1)..(599): NCBI GI: 226285312 Blast Desc: pre-mRNA-processing factor 31 [Paracoccidioides brasiliensis Pb01]
  misc_feature: Useful for introducing or modulating the production of volatile compounds
MSTLADELLQDFEDSGSENGDIQNEPDLDLDRPTVADRNHDDNDMALDGDEDGLKDPDGDEDMAGVDEVVDTMEDEDAAKARIEKMQLGNVKDVRKVSSLMDRLEPLLKDIAQYQSKPLSQATTNIGNIEDNPEYKILTESNTLSTQIDGEIMKVHKFIRDHYSARFPELETLIQNPIEYAKVVTILGNGPMDSDSIKAIQGSTDNTLGESLRTILDGPSLMIVTLEATTSKGQEISQEELDRILRACHMMIKMEKAKKTLTAYVQSRMSIFAPNLTAVVGSLTAAQLINTAGGLTNLSRVPACNIAAWGTNKSRNSAFATNVAIRQQGFLYYSPIIRGIPDDVKKKAMKAVAAKLVLAARADTSHSNPDGSYGEDLRNQCLNRLDKITEPPANKGHRALPAPDDKPSKKRGGRQARKQKEAVALTELRKAQNRLAFGKEEKETDYTTGDSTVGLGMIGQAGDGRIRSMQIDNRTRAKLSQKHKGWGGATPIGGSASSLRGFGQAGNNIDLRGKGLRTSGVGSTIGGGAGTASSLAFTPVQGLELVDPKNQAELSRKRKAEEDRWFKGGTFTQVGGAASSANPHKKVNTGASGMMLPPALPTKK

SEQ ID NO: 16201 - DNA, 3326 bp, Muscodor strobelii
  misc_feature: SGI EST ID NO. CUFF.38317.0
  misc_feature: Variant of the nucleotide sequence at SEQ ID NO 16199
ccactatgacaggagaaaagcgactttggaaatgggtgcattgatcgtcaaaccgttttatgcacgtattgcagccactcgagcgcgtcaagagctccactttatttctttctcccgcgaacacatgcgcctgccttcagccttctggtcgcatttcgcagttgccactccatctttaaattcaacctcgccacgtaatcaccgcacccaccacatccaccgcaaccattgtaccagtgccccgcgcgcacactcacatccgttttgtggcagactaactcaccatcggcaagatgtcgacgttagcggacgagctgttacaggacttcgaggactccggttccgaaaatggcgatatccagaacgagcccgatctcgacttggaccgtccaaccgtcgccgaccgcaatcacgatgataacgacatggctctcgacggcgatgaggacgggcttaaagaccccgacggagacgaagacatggccggcgtagatgaggtagtcgacaccatggaagacgaagatgcagccaaggctagaatagagaagatgcagctgggcaacgtcaaagacgtgcgcaaggtctcgagtctcatggacagactagaacccctcctcaaggatattgctcagtaccagtcgaagccactgtcgcaggccactaccaacatcggcaacatcgaagacaacccagaatacaagattctcaccgagtccaacaccctgtcaacgcagattgacggcgagatcatgaaggtccataagttcatcagggaccactactcagcccgcttccccgagcttgagactctgattcagaacccgatagaatacgccaaagtcgtaaccatcctgggcaacgggcccatggattctgacagcatcaaagccatccagggttctaccgacaatacgttgggcgaatctctcaggaccatcttggatggcccttctcttatgattgtgacattagaagccacaacgagcaaaggtcaagaaatttcgcaggaagagctggatcgcatcctcagagcctgtcatatgatgatcaagatggagaaagcaaagaagacattgacagcatacgtccagtcgcgaatgagcatatttgcgcccaacctgacagccgtcgtcggctctctcacagccgcccaactcatcaacaccgcgggtggtctcaccaacttgtcaagggtcccagcttgcaatatcgccgcgtggggtaccaacaagtcgaggaactcggcattcgctacaaatgtcgccatcagacagcagggatttctatattactcacccattattcgcggcataccagacgatgttaagaagaaagccatgaaggcagttgctgcaaagttggtcttggctgcgcgcgcggacacgagtcattctaacccagatggttcgtatggagaggaccttcgtaatcagtgtctgaaccgtttagacaaaatcacagagccaccggccaacaaggggcaccgtgctctcccagcacccgatgataagccatccaagaaacgaggtggtcgtcaagccagaaagcagaaagaggcggtcgctctgacagagctcagaaaggcacaaaatcgcttggctttcggcaaggaagagaaagagacggattatactacaggcgattcgaccgtcggattgggcatgatcggccaagctggcgacggccgtattcgcagcatgcagatcgacaacagaacgcgcgcaaaactcagtcagaagcacaagggctggggtggcgcgacccctatcggtggctcagcgtcctcactgcgtggtttcgggcaagcagggaacaacattgaccttcgaggcaaaggcctgcgcacatccggggttggctcgaccattgggggtggggctggaacggcatcctctctcgccttcaccccagttcagggtcttgagctcgtggatccgaagaatcaagccgagctctcacgcaagcggaaggcagaggaagaccgctggtttaagggtggcactttcacccaggttggaggtgctgctagctccgcaaatcctcataagaaagttaatacaggggccagcgggatgatgcttccgccagccctgccaacgaaaaaatagaattcttcaatttcctctgtatcccttttatcttgcccccgacatcgtatcatatcatacacccccgagacgaggtcagcggtgagacccgagatacctaaacgcggtctactgctccctacatatatgatcaggggagaacgtggtgtgtgcggggggcagatgggatgtggtagaaatccatggctggcattttgagggggcatggcgtaccggggacagggaatcgggtcggttatgggcaagcttggcgttccttcgaggtgctgtggcttgggcagctcttttgtctgcctgtcctgcaaggtagctagctagctatcgttgctgctcacataggcaccatactgcgaactatttgattttgattttcaatctattattaccttcggctccatacgatacgaaacgtgtatacggtgatccttggcgcatattgtcgaaagtccacacacataagatggcatgcgcatggcgcatcgaagacggcgcgtgtttgggttcgataagcaatatcgtgttaatctatgtaaagcaaaagcttcatagggccgtgggtcccggagctgacttcggcagataattgataaggttggcattcaactgatccttcccatgtggtattgagtttgtaatagcgtagagttatcccccaattgagtttgttcagcagctgtatagctgcgtagcgctaactctgtcaagatccctgattttcttgacaaccaacatttgcatgttggtgtagactagctacccaaggtgagatgaggggttcgtggtcccttgatctaccgggtgagatacagagatgcggtttatttgcttccagctgttccgagactatctcccgtcatgcagggtctggatcgatatagctgttagtcttatcaagccgtaacatgttcgtcgttcagccctggaccctgggggccacggataaaacggatgggaattgttgcgatacaacgaacagcgaaagctagatagactagagtctagcccatacatgtaggtatatgtagaaagagttaaatggcgcgtgcgttagtaaatagaagctgtcatcgcaatgttttgaatctaatggcgcacagctcaactatcggtgtctacttgcagtagttcatccgtgtcaatgaggacacttcaggcacgcagcatgcatgaattcagatcaaatggcaagaaaccatgttcaatgaagctctgcacaat

SEQ ID NO: 16202 - DNA, 801 bp, Muscodor strobelii
  misc_feature: SGI cDNA ID NO. 565382
  misc_feature: Reduced expression when VOC is produced
  misc_feature: Encodes the peptide sequence at SEQ ID NO 16203
atgcaagccagagacgctacaggccgtcaggtgtcgttgctgaacgacgacatctacgctagccgcccctcatatccgtcaccacctcactatgcgtcgtcaggaggcgatcgctcgccgctctcccacactccggagctcttgcggtcaaactcttacgattccaatgccagcttcgacccatactcacccatgactccgagtgttcatgactattcatctaggccattctacgatgattacatccaagacaagcagctagccttgccccggcgacctgcctatgcatctaccatgcgtaccgaatcttatgatgatgacagctccaataattcttcggaaaagccaggcaagcgatatccttgccggtaccgtgacacccatggctgcgaaaaaacattcacaacatctggtcatgcatcccggcattccaagatacacacagctgaaaaggctgtgcaatgtacattcgccggctgccacaaaaagtttacccgggcagacaacatgaagcagcacctcgagactcatttcaaagataaatccagatcatccacctcctccaagtccaagagctcttccatgtcctccacgaagcgtggatcggtgtcttcaaaaacatctggcagtagatcgtcccgcgatgttcagatgtgggatgtagacgactatgatgttccttcgcccgatgccacttgggacatgcgcggtttgaatgctcctttagtgatgcggccaaatgctgctcggactagcagtggtttagatgcactagccgctatcgcatgtcaagaagcataa

SEQ ID NO: 16203 - protein, 266 aa, Muscodor strobelii
  misc_feature: SGI Peptide ID NO. 565382
  misc_feature (153)..(177): Pfam Id: PF00096 Pfam Desc: Zinc finger, C2H2 type
  misc_feature (1)..(266): NCBI GI: 46108832 Blast Desc: FG01298.1 [Gibberella zeae PH-1]
  misc_feature (1)..(265): NCBI GI: 256734330 Blast Desc: [Nectria haematococca mpVI 77-13-4]
  misc_feature (1)..(265): NCBI GI: 171680273 Blast Desc: protein product [Podospora anserina] gi|170939763|emb|CAP64989.1| protein product [Podospora anserina]
  misc_feature (1)..(266): NCBI GI: 85118621 Blast Desc: NCU02713 [Neurospora crassa OR74A] gi|28927295|gb|EAA36250.1| conserved [Neurospora crassa OR74A] gi|38567206|emb|CAE76498.1| related to transcriptional repressor
  misc_feature (1)..(266): NCBI GI: 145615609 Blast Desc: MGG_13156 [Magnaporthe grisea 70-15] gi|145022417|gb|EDK06437.1| MGG_13156 [Magnaporthe grisea 70-15]
  misc_feature (2)..(265): NCBI GI: 116206936 Blast Desc: CHGG_02761 [Chaetomium globosum CBS 148.51] gi|88183358|gb|EAQ90826.1| CHGG_02761 [Chaetomium globosum CBS 148.51]
  misc_feature (1)..(183): NCBI GI: 154314626 Blast Desc: BC1G_04022 [Botryotinia fuckeliana B05.10] gi|150848644|gb|EDN23837.1| BC1G_04022 [Botryotinia fuckeliana B05.10]
  misc_feature (102)..(187): NCBI GI: 156053249 Blast Desc: SS1G_06792 [Sclerotinia sclerotiorum 1980] gi|154704570|gb|EDO04309.1| SS1G_06792 [Sclerotinia sclerotiorum 1980]
  misc_feature (119)..(177): NCBI GI: 121701949 Blast Desc: C2H2 transcription factor (Egr2), [Aspergillus clavatus NRRL 1] gi|119397382|gb|EAW07813.1| C2H2 transcription factor (Egr2), [Aspergillus clavatus NRRL 1]
  misc_feature (119)..(190): NCBI GI: 255940160 Blast Desc: Pc16g04990 [Penicillium chrysogenum Wisconsin 54-1255] gi|211585472|emb|CAP93169.1| Pc16g04990 [Penicillium chrysogenum Wisconsin 54-1255]
  misc_feature: Useful for introducing or modulating the production of volatile compounds
MQARDATGRQVSLLNDDIYASRPSYPSPPHYASSGGDRSPLSHTPELLRSNSYDSNASFDPYSPMTPSVHDYSSRPFYDDYIQDKQLALPRRPAYASTMRTESYDDDSSNNSSEKPGKRYPCRYRDTHGCEKTFTTSGHASRHSKIHTAEKAVQCTFAGCHKKFTRADNMKQHLETHFKDKSRSSTSSKSKSSSMSSTKRGSVSSKTSGSRSSRDVQMWDVDDYDVPSPDATWDMRGLNAPLVMRPNAARTSSGLDALAAIACQEA

SEQ ID NO: 16204 - DNA, 2046 bp, Muscodor strobelii
  misc_feature: SGI cDNA ID NO. 565383
  misc_feature: Reduced expression when VOC is produced
  misc_feature: Encodes the peptide sequence at SEQ ID NO 16205
atgtcgtcgtacgatccgtatgacgctccgccgcgccaacatcatcaccattcatcgcggcgctactatgacgaacgcagggaacctcgttatgagacaacacaagagactgtgtacagagtaaatcctaccaggaataatgctcttgtgccccgcgcccgcgaggacagtgacctctctgtagaagaagtgcgccgggactttcctcccccaggctattcgcgagacattcgccgcgcaaggtctgcggagcccggttacgatgactactaccatgatccgcggcgcgatgtgccccggggcaagaaggctggtagtgtctactatgaagaagaagagcgcactcgcaagcgcgtcttaagcaagcaagaacaaatcctcgctgctgtcgccggtggtattattgctgctggcgctaaggaagtatgggatcgccgcgaagctaagcagaatggttccgacgtccaccgcaactatgcagcctctgccgccctcggtgctgccggcgctttggctggctaccagggcactgaattctataacaagcacaacaataaagaggaaaagaagtccacctatatggttcataaaggtcgcgatggccgtgtcgtcgagtactattccgacgaagacgaagatcctcgtagtcacaaagggaacaagtctttccttgagaatgccctctccgccgctggactcgggggtgccatcaaggcactgacgggcggaagtgacgatcgtgaaagctacaagtccaggagccgcagaggtagccctgattctcaccgctcaactcgctcgcgcggtgacacgcccgcggctagaatgcagaaggcggccaaagcctctttgattgctggcgctgcagaagcattccgggttgccaaggaacctggcgcctggaaaggcgagaagctgaagcgagttgtcacagcggctgttggcgctggcgctattgatgcagctcatgatcctactaaagacaccaagcggcatttgttagagtctgttcttggtggtatcgtcggtaatcgtgttttgaatggctctcgaaaggatatcgaagaagatcgcaatacaggccgaagccgttctcgatcgcgcgctcgctcgggaagccgtagtcgcggtggtactggtttggccgcactggccacggctggtctcggtgcgctcggtgcgaagaagctcgtcgagagccggagtcgatcgcgatctcgccgcagtagctttgactcatacgatagccgctacgacagtcgtgagctctcacctcgaagaaagcgcagtcgcagccgtagcattgtcgatggggccagacgcagtcttgccaagattgggttgggcaatgggcctgatgacgagcgcgacgatcgctctgctcgaggagacaggagtcggggctatgatgatcgttatgacgatgatgaacattatatgaggggaggaagaggacccgaggatgactattacgatgatcgttcactcggacgcagccgaagtggttcccgttcacgaggtaggtcaagttcagtttctagcagtgatttaggagattcggacacagacatgaagaagcaaaagagtatgaggagaaagcagatgctcactgcgggattggcaacggtcgcgactattcacgcagcacataatgtctaccagagcatggaagcgcggaatgcgaggcagagagcagtgcatgagggcaagctgagccctcaagaagccaaaaagctcaagaccaaggccatgatgcaagatgccgcttcgatcggtatcgcagccatgggtatcaagggcgctgtttctgaactcaaggaagtgaaagagcagaaccagatggtgaaggaatggaaggaagagaggcaaaagcgtcacgagaaacgtgtggagaggctcaaacgagccaacgatgaccataattcaaggtctcgagatgacggctacgcgacactgtctgcacctcaaaccacccgctatgccgatgccaacccatactcggccgctttacctgccccgccaatgggctatgatagtcgacggtaa

SEQ ID NO: 16205 - protein, 681 aa, Muscodor strobelii
  misc_feature: SGI Peptide ID NO. 565383
  misc_feature (41)..(668): NCBI GI: 164427775 Blast Desc: NCU02718 [Neurospora crassa OR74A] gi|157071879|gb|EAA35867.2| [Neurospora crassa OR74A]
  misc_feature (1)..(452): NCBI GI: 116206946 Blast Desc: CHGG_02766 [Chaetomium globosum CBS 148.51] gi|88183363|gb|EAQ90831.1| CHGG_02766 [Chaetomium globosum CBS 148.51]
  misc_feature (1)..(361): NCBI GI: 256734328 Blast Desc: NECHADRAFT_98661 [Nectria haematococca mpVI 77-13-4]
  misc_feature (1)..(361): NCBI GI: 46108838 Blast Desc: FG01301.1 [Gibberella zeae PH-1]
  misc_feature (7)..(361): NCBI GI: 261356581 Blast Desc: conserved [Verticillium albo-atrum VaMs.102]
  misc_feature (1)..(452): NCBI GI: 171680253 Blast Desc: protein product [Podospora anserina] gi|170939753|emb|CAP64979.1| protein product [Podospora anserina]
  misc_feature (492)..(678): NCBI GI: 154318499 Blast Desc: BC1G_03417 [Botryotinia fuckeliana B05.10] gi|150842940|gb|EDN18133.1| BC1G_03417 [Botryotinia fuckeliana B05.10]
  misc_feature (492)..(678): NCBI GI: 156052921 Blast Desc: SS1G_06628 [Sclerotinia sclerotiorum 1980] gi|154704406|gb|EDO04145.1| SS1G_06628 [Sclerotinia sclerotiorum 1980]
  misc_feature (270)..(680): NCBI GI: 121701951 Blast Desc: conserved [Aspergillus clavatus NRRL 1] gi|119397383|gb|EAW07814.1| conserved [Aspergillus clavatus NRRL 1]
  misc_feature (225)..(610): NCBI GI: 145239361 Blast Desc: An08g02090 [Aspergillus niger] gi|134076835|emb|CAK45256.1| [Aspergillus niger]
  misc_feature: Useful for introducing or modulating the production of volatile compounds
MSSYDPYDAPPRQHHHHSSRRYYDERREPRYETTQETVYRVNPTRNNALVPRAREDSDLSVEEVRRDFPPPGYSRDIRRARSAEPGYDDYYHDPRRDVPRGKKAGSVYYEEEERTRKRVLSKQEQILAAVAGGIIAAGAKEVWDRREAKQNGSDVHRNYAASAALGAAGALAGYQGTEFYNKHNNKEEKKSTYMVHKGRDGRVVEYYSDEDEDPRSHKGNKSFLENALSAAGLGGAIKALTGGSDDRESYKSRSRRGSPDSHRSTRSRGDTPAARMQKAAKASLIAGAAEAFRVAKEPGAWKGEKLKRVVTAAVGAGAIDAAHDPTKDTKRHLLESVLGGIVGNRVLNGSRKDIEEDRNTGRSRSRSRARSGSRSRGGTGLAALATAGLGALGAKKLVESRSRSRSRRSSFDSYDSRYDSRELSPRRKRSRSRSIVDGARRSLAKIGLGNGPDDERDDRSARGDRSRGYDDRYDDDEHYMRGGRGPEDDYYDDRSLGRSRSGSRSRGRSSSVSSSDLGDSDTDMKKQKSMRRKQMLTAGLATVATIHAAHNVYQSMEARNARQRAVHEGKLSPQEAKKLKTKAMMQDAASIGIAAMGIKGAVSELKEVKEQNQMVKEWKEERQKRHEKRVERLKRANDDHNSRSRDDGYATLSAPQTTRYADANPYSAALPAPPMGYDSRR

SEQ ID NO: 16206 - DNA, 3332 bp, Muscodor strobelii
  misc_feature: SGI EST ID NO. CUFF.38424.0
  misc_feature: Variant of the nucleotide sequence at SEQ ID NO 16204
cgggggtcgagggtgtgttctctttgatgcatccaagttggttctaacgggtttgatacgtgccccgccttagaagaaaagacggaaatcagttgatgccgtggtctgttcccaacaatctgcagttcgaaaccactggtttctaataccagtacatctccccatcatctcctgctccgaaatcacccctccttcaattactcgtaactcaactgagcacatctctctttccattactcgcacctgagtataaacttgaaagtcagataattatcgtctattgccaccttatactataaactatacgaaactctatctattaccgacaaccaagaaagtgtgactgattcaagtctgtaccctatcgtttacgcatttgctcatcatgtcgtcgtacgatccgtatgacgctccgccgcgccaacatcatcaccattcatcgcggcgctactatgacgaacgcagggaacctcgttatgagacaacacaagagactgtgtacagagtaaatcctaccaggaataatgctcttgtgccccgcgcccgcgaggacagtgacctctctgtagaagaagtgcgccgggactttcctcccccaggctattcgcgagacattcgccgcgcaaggtctgcggagcccggttacgatgactactaccatgatccgcggcgcgatgtgccccggggcaagaaggctggtagtgtctactatgaagaagaagagcgcactcgcaagcgcgtcttaagcaagcaagaacaaatcctcgctgctgtcgccggtggtattattgctgctggcgctaaggaagtatgggatcgccgcgaagctaagcagaatggttccgacgtccaccgcaactatgcagcctctgccgccctcggtgctgccggcgctttggctggctaccagggcactgaattctataacaagcacaacaataaagaggaaaagaagtccacctatatggttcataaaggtcgcgatggccgtgtcgtcgagtactattccgacgaagacgaagatcctcgtagtcacaaagggaacaagtctttccttgagaatgccctctccgccgctggactcgggggtgccatcaaggcactgacgggcggaagtgacgatcgtgaaagctacaagtccaggagccgcagaggtagccctgattctcaccgctcaactcgctcgcgcggtgacacgcccgcggctagaatgcagaaggcggccaaagcctctttgattgctggcgctgcagaagcattccgggttgccaaggaacctggcgcctggaaaggcgagaagctgaagcgagttgtcacagcggctgttggcgctggcgctattgatgcagctcatgatcctactaaagacaccaagcggcatttgttagagtctgttcttggtggtatcgtcggtaatcgtgttttgaatggctctcgaaaggatatcgaagaagatcgcaatacaggccgaagccgttctcgatcgcgcgctcgctcgggaagccgtagtcgcggtggtactggtttggccgcactggccacggctggtctcggtgcgctcggtgcgaagaagctcgtcgagagccggagtcgatcgcgatctcgccgcagtagctttgactcatacgatagccgctacgacagtcgtgagctctcacctcgaagaaagcgcagtcgcagccgtagcattgtcgatggggccagacgcagtcttgccaagattgggttgggcaatgggcctgatgacgagcgcgacgatcgctctgctcgaggagacaggagtcggggctatgatgatcgttatgacgatgatgaacattatatgaggggaggaagaggacccgaggatgactattacgatgatcgttcactcggacgcagccgaagtggttcccgttcacgaggtaggtcaagttcagtttctagcagtgatttaggagattcggacacagacatgaagaagcaaaagagtatgaggagaaagcagatgctcactgcgggattggcaacggtcgcgactattcacgcagcacataatgtctaccagagcatggaagcgcggaatgcgaggcagagagcagtgcatgagggcaagctgagccctcaagaagccaaaaagctcaagaccaaggccatgatgcaagatgccgcttcgatcggtatcgcagccatgggtatcaagggcgctgtttctgaactcaaggaagtgaaagagcagaaccagatggtgaaggaatggaaggaagagaggcaaaagcgtcacgagaaacgtgtggagaggctcaaacgagccaacgatgaccataattcaaggtctcgagatgacggctacgcgacactgtctgcacctcaaaccacccgctatgccgatgccaacccatactcggccgctttacctgccccgccaatgggctatgatagtcgacggtaaaagcagctaatgccttataatcttaagtggcatttgaatgttcctactagctggctacaagcacgctgtcacggttcacgacttaacgaccgctcatgaaatcccggctcttttggtgtttgggaactcactttacgcacgcgcaagataagactgttggaaaatgaactagaagatgtggagctgtttttatctctacactgcttggccaatcccgcatgtgtctgctacattctcctcagatagatgcaatatggcctcatttacatattcctctttgcgtttctgacttttaaagaatattcccactgatttggttctttttgtgacagatgggcatcgtcgccaccaacacgcgcgttaaatatcaaaggaagaaaaaaaaaaatacgactggggtcacgcatgcaggcagaacgggaggaggcggcacagccgttaaaagagatcaagtgggttttagaacaggagggtcctgccacgaggtgcagctatcgtcagctccatcgccgattggagagaagaaggaatgcgtggcatgcacgaacacgcatccctagttgtaccaaagtctaggattgagacagatgccagtcaataggtagtatcgggaaaccattgtgggtaacatatctcaaaagagctggatactggtagaaagttggccaatggtggacttcgttgtacgtatttttggtttcgaaatgtcgcgggacattgctttccacgttgagacgggatctagcggtgtaggagcgatcggagatccgggaggtacggaacgaaacagttagattaagttggatgctatcttatgagctatgaatgtctcacgaattttcttgcctcatatcgtccagacttgcccgcttgaatacaattataaatctgtttctatcac

SEQ ID NO: 16207 - DNA, 2538 bp, Muscodor strobelii
  misc_feature: SGI cDNA ID NO. 565384
  misc_feature: Reduced expression when VOC is produced
  misc_feature: Encodes the peptide sequence at SEQ ID NO 16208
atgtctagttctgctaccttctcctacgcacaggctatcaagggccattcggccactcagtcagctatgtcccaatcgaaccccaccagccaggcgccatcagccacgggaagtcagagccgtgagccgaacaccaccaccaacacgagcaccagagcaccctctgttgctgtgtccactacctccaacgatgtcgatgccactcgcagcacccgaagtgcatcagcaaagcctgaggcttccggttcaaatatctccgaagccggctccaagtcagagcaaggcgcaacatcagcgcccgttgccgagtcaagcaattcctcttcgcgtgcagcagagcaggctcaatctgataatgcagccaaaagctccaccgatgcgcgaggacgcgcatccaacgtcggttctgatgctgccgacaacaatgagaacaagaagggcaggaagcccaagagaggcaagaatgccgacaaggacgccgaatccagcaaggaacaggatggctcgcctgtgcctgccccgaaagtagagctcactgaagctcggatacctgaggtcaatatctgggttcagaggcaggcgcaggccgccaaaacaaagcccgcaatggaccctactgcacccgctgcaagcaccgtgggacccaactcagtacgacaagcaaacacagatcccaaacaacggctgccatccagccagccagctgagagcagcgccacatctgctacaaacaagggttttaagaaagacggcgaacagctaagaaatggcggtaatcaaggcccgagacgggccggccctcgaggctccagggtccaagagaaggaacccgagaacatgaatcttctgcccaacaactctacatcatggccgacaccagagacagccgcagtcaactcgaagcctgcacctcccactcaagccgacaaagaagatcaggaatcaacgactgcaaagcccaagaagaaaggatggacgcccatggaaattgaccacagtgcataccagcctccgttcactggacgggccccacgaggtggacgtacaggcggtggccgcaacggacgtgatgctgctggtaacagtcacgcagcggcaaacgtttcggaaaaagctcaggaggccagctcaggagctcgtagcaactctggccccagacgtgcccccgccgaaggctctgggcaccgagaaggacgcaagggcgctccgcaatcagaccagtctaaggcacccaaggagtcagcacctgacagtgcaagtgctgaacagcccaaaccaaacggaattgtcaatggcaccgcccctctacaagccgccccccgcggctcaagctcacagcgtcgtgccgaggataccaatgccaaaaacagcgaatcccacaaggatacgagagcgcagggcaatcgtgatagccatcatcctggccaaaatggtagcaaccaccgcggagagcgtaccagaggtggcggccgtggtcgaggtggttaccccagctccaacacccctaatggtatgcctcaccatactcagcaacagtatatttcgccgaatggttactacccagcaaatggacctcgtcaaatgccacagtatatagctggctaccaacccatggcttaccccaactcatttcctactcaatcagggcccggtcatcgtagacctggttcgatgtccaccccacgtggagcagggtcatctcgtcccgcaaacggcagaatgccaaaccttccgcctatggggatgtcctacgacgccatgtaccacccggccaatggcggtatgtatcctatggatcaagctttcatgcagcctgaacattaccagaatatccagaggcagctggagttctacttctctcccaacaacttggtctcggatttctatatgcgacgtcatatggacagccagggatttgtcgagatgaatgtgttggctacatttccccggctctccgcgatgaccaacggtgatatcaacattgtcatcagtgcttgcatgagcttgcctgggcttgacacaatcatcggtgaggacactgttgttcgcgtgcgcaacaaggaagagtggcaacaatgggtgctggaatccgcgtcgagagacccttcggcccgtcatgatggtcctcaaaatccacagcccttgcatcctatgcctcccatgatgtctcctacctatccagttgaacagcctccgatgttctcgccctcccaggagcacagttttggcggttactccaacgggtacggccttgcacctctggcattacctaccatgaacggggtaaatggtatgaatggggtgaacggccacgcacctccacatgagtctcagctttctgctactgtcccagaattttcgcctggcactctatctggattctcaactggcaatgataacaacagtgctccaaagtcaatgaagaatactgccagcaaagacacgcaatccactctagaagattctgccccggcaagcaacgattcagagcacctccaaaacggagtctcacatacccacgaacctaacggccaataa

SEQ ID NO: 16208 - protein, 845 aa, Muscodor strobelii
  misc_feature: SGI Peptide ID NO. 565384
  misc_feature (611)..(669): Pfam Id: PF05383 Pfam Desc: La domain
  misc_feature (3)..(788): NCBI GI: 171680257 Blast Desc: protein product [Podospora anserina] gi|170939755|emb|CAP64981.1| protein product [Podospora anserina]
  misc_feature (19)..(788): NCBI GI: 116206950 Blast Desc: CHGG_02768 [Chaetomium globosum CBS 148.51] gi|88183365|gb|EAQ90833.1| CHGG_02768 [Chaetomium globosum CBS 148.51]
  misc_feature (573)..(837): NCBI GI: 256734325 Blast Desc: NECHADRAFT_74465 [Nectria haematococca mpVI 77-13-4]
  misc_feature (428)..(791): NCBI GI: 154287226 Blast Desc: [Ajellomyces capsulatus NAm1] gi|150408049|gb|EDN03590.1| [Ajellomyces capsulatus NAm1]
  misc_feature (611)..(791): NCBI GI: 156030695 Blast Desc: SS1G_14443 [Sclerotinia sclerotiorum 1980] gi|154700834|gb|EDO00573.1| SS1G_14443 [Sclerotinia sclerotiorum 1980]
  misc_feature (611)..(791): NCBI GI: 154292751 Blast Desc: BC1G_14760 [Botryotinia fuckeliana B05.10] gi|150845842|gb|EDN21035.1| BC1G_14760 [Botryotinia fuckeliana B05.10]
  misc_feature (565)..(791): NCBI GI: 239613434 Blast Desc: conserved [Ajellomyces dermatitidis ER-3]
  misc_feature (4)..(799): NCBI GI: 67521662 Blast Desc: AN1288.2 [Aspergillus nidulans FGSC A4] gi|40746725|gb|EAA65881.1| AN1288.2 [Aspergillus nidulans FGSC A4] gi|259488388|tpe|CBF87788.1| TPA: La domain family nidulans
  misc_feature (428)..(791): NCBI GI: 225559737 Blast Desc: conserved [Ajellomyces capsulatus G186AR]
  misc_feature (551)..(788): NCBI GI: 169763828 Blast Desc: [Aspergillus oryzae RIB40] gi|238489791|ref|XP_002376133.1| lupus la ribonucleoprotein, [Aspergillus flavus NRRL3357] gi|83770842|dbj|BAE60975.1| protein
  misc_feature: Useful for introducing or modulating the production of volatile compounds
MSSSATFSYAQAIKGHSATQSAMSQSNPTSQAPSATGSQSREPNTTTNTSTRAPSVAVSTTSNDVDATRSTRSASAKPEASGSNISEAGSKSEQGATSAPVAESSNSSSRAAEQAQSDNAAKSSTDARGRASNVGSDAADNNENKKGRKPKRGKNADKDAESSKEQDGSPVPAPKVELTEARIPEVNIWVQRQAQAAKTKPAMDPTAPAASTVGPNSVRQANTDPKQRLPSSQPAESSATSATNKGFKKDGEQLRNGGNQGPRRAGPRGSRVQEKEPENMNLLPNNSTSWPTPETAAVNSKPAPPTQADKEDQESTTAKPKKKGWTPMEIDHSAYQPPFTGRAPRGGRTGGGRNGRDAAGNSHAAANVSEKAQEASSGARSNSGPRRAPAEGSGHREGRKGAPQSDQSKAPKESAPDSASAEQPKPNGIVNGTAPLQAAPRGSSSQRRAEDTNAKNSESHKDTRAQGNRDSHHPGQNGSNHRGERTRGGGRGRGGYPSSNTPNGMPHHTQQQYISPNGYYPANGPRQMPQYIAGYQPMAYPNSFPTQSGPGHRRPGSMSTPRGAGSSRPANGRMPNLPPMGMSYDAMYHPANGGMYPMDQAFMQPEHYQNIQRQLEFYFSPNNLVSDFYMRRHMDSQGFVEMNVLATFPRLSAMTNGDINIVISACMSLPGLDTIIGEDTVVRVRNKEEWQQWVLESASRDPSARHDGPQNPQPLHPMPPMMSPTYPVEQPPMFSPSQEHSFGGYSNGYGLAPLALPTMNGVNGMNGVNGHAPPHESQLSATVPEFSPGTLSGFSTGNDNNSAPKSMKNTASKDTQSTLEDSAPASNDSEHLQNGVSHTHEPNGQ

SEQ ID NO: 16209 - DNA, 5219 bp, Muscodor strobelii
  misc_feature: SGI EST ID NO. CUFF.38308.1
  misc_feature: Variant of the nucleotide sequence at SEQ ID NO 16207
aaaaaattatcttttttttttccctctcccactcccactggactactcgtctgttgtctgcagacaagccaaaaacccttccactttctcactccccgcgcacatgctaccaaacgcacaaaacctgtgaattggttgttttttccccttgcctcatatcctctctcccctcaggtacccgtcgtctcttttgcctcataacccctcctgcgacctgtctgtctcatccggcccgcttgagttgaggtcatcccataaccgcacctttttttccggacgcaaagaatcgggacatcaggggattaactgacttgtgtcttatacgccacttactcactggtcgtccgctactgacaggcacattcaccccattcaccacggttgaagtgactgaactcgtgtgtcgggcaacctcccacacgcgtacaagtacggtacctttgggtcggcacgacttcaagttaggaaagagctctcactgtcactgtcgcaacgcgaaaggtgcgttcgcttcactcagcaaccgctacagctgcagcatttgcagtggagagtgaattgtctgtcattgcatcggagatagctcgactcaggtgcactttattttttattagttgtgccccgtcttcgtaactaagggtgcgctcttctcccctccaacatcgagagcacggttctgcatctcgaccacttttgcgtgtcgaacttgcctgcacgtatagtccccagcccgccaaacacgaaactcttattgtgtttggccaccctttcctcggtccttgcgcctcctgccctgtcgttggacacaggctcgctaggctcctccaaggcttccccgagggtccattttcacaccataagtgcgtctccaagcagctgccctcagccagcagacagcaccccttgcacgcactctagacgttagaggacggcacaacgaaacttgtcctacacattacagtttgttgtgcactcattctagccgccatccgcacgacctgcgaccttcttcctcgctgcccctgtagtttgtcctgaaccgataattgtcgagttcagctgcacaatccgagggcccttgtgcatccaccacgatccgattacagtgcattgagcttctttgcttgtctccccgcacccactggccgaaaataagattttctgcgactgtgtcctggacacacctgaacttttctaggcctgtcgtagtttcagtcaactgccactcgtcgagtcagccatcactgcaatatacgtctctccatcctttctgggcttcgcaccgtcaagcacatacagctcaggacagccacgccatcgtctcagccttcccaggaagaacaacaacttgcaggtgcactcacagtgctttagggaagcttgagtccctgtcgagttggtgacagtggtctgagtgttctctctggtcgagggtacgcagaagaccacgctgcaagcgtcctgtttcggatcttgcactctaaacaaacctgctgttggccaggtcatatctagacacaatgtctagttctgctaccttctcctacgcacaggctatcaagggccattcggccactcagtcagctatgtcccaatcgaaccccaccagccaggcgccatcagccacgggaagtcagagccgtgagccgaacaccaccaccaacacgagcaccagagcaccctctgttgctgtgtccactacctccaacgatgtcgatgccactcgcagcacccgaagtgcatcagcaaagcctgaggcttccggttcaaatatctccgaagccggctccaagtcagagcaaggcgcaacatcagcgcccgttgccgagtcaagcaattcctcttcgcgtgcagcagagcaggctcaatctgataatgcagccaaaagctccaccgatgcgcgaggacgcgcatccaacgtcggttctgatgctgccgacaacaatgagaacaagaagggcaggaagcccaagagaggcaagaatgccgacaaggacgccgaatccagcaaggaacaggatggctcgcctgtgcctgccccgaaagtagagctcactgaagctcggatacctgaggtcaatatctgggttcagaggcaggcgcaggccgccaaaacaaagcccgcaatggaccctactgcacccgctgcaagcaccgtgggacccaactcagtacgacaagcaaacacagatcccaaacaacggctgccatccagccagccagctgagagcagcgccacatctgctacaaacaagggttttaagaaagacggcgaacagctaagaaatggcggtaatcaaggcccgagacgggccggccctcgaggctccagggtccaagagaaggaacccgagaacatgaatcttctgcccaacaactctacatcatggccgacaccagagacagccgcagtcaactcgaagcctgcacctcccactcaagccgacaaagaagatcaggaatcaacgactgcaaagcccaagaagaaaggatggacgcccatggaaattgaccacagtgcataccagcctccgttcactggacgggccccacgaggtggacgtacaggcggtggccgcaacggacgtgatgctgctggtaacagtcacgcagcggcaaacgtttcggaaaaagctcaggaggccagctcaggagctcgtagcaactctggccccagacgtgcccccgccgaaggctctgggcaccgagaaggacgcaagggcgctccgcaatcagaccagtctaaggcacccaaggagtcagcacctgacagtgcaagtgctgaacagcccaaaccaaacggaattgtcaatggcaccgcccctctacaagccgccccccgcggctcaagctcacagcgtcgtgccgaggataccaatgccaaaaacagcgaatcccacaaggatacgagagcgcagggcaatcgtgatagccatcatcctggccaaaatggtagcaaccaccgcggagagcgtaccagaggtggcggccgtggtcgaggtggttaccccagctccaacacccctaatggtatgcctcaccatactcagcaacagtatatttcgccgaatggttactacccagcaaatggacctcgtcaaatgccacagtatatagctggctaccaacccatggcttaccccaactcatttcctactcaatcagggcccggtcatcgtagacctggttcgatgtccaccccacgtggagcagggtcatctcgtcccgcaaacggcagaatgccaaaccttccgcctatggggatgtcctacgacgccatgtaccacccggccaatggcggtatgtatcctatggatcaagctttcatgcagcctgaacattaccagaatatccagaggcagctggagttctacttctctcccaacaacttggtctcggatttctatatgcgacgtcatatggacagccagggatttgtcgagatgaatgtgttggctacatttccccggctctccgcgatgaccaacggtgatatcaacattgtcatcagtgcttgcatgagcttgcctgggcttgacacaatcatcggtgaggacactgttgttcgcgtgcgcaacaaggaagagtggcaacaatgggtgctggaatccgcgtcgagagacccttcggcccgtcatgatggtcctcaaaatccacagcccttgcatcctatgcctcccatgatgtctcctacctatccagttgaacagcctccgatgttctcgccctcccaggagcacagttttggcggttactccaacgggtacggccttgcacctctggcattacctaccatgaacggggtaaatggtatgaatggggtgaacggccacgcacctccacatgagtctcagctttctgctactgtcccagaattttcgcctggcactctatctggattctcaactggcaatgataacaacagtgctccaaagtcaatgaagaatactgccagcaaagacacgcaatccactctagaagattctgccccggcaagcaacgattcagagcacctccaaaacggagtctcacatacccacgaacctaacggccaataaaccggcccgcgtgtcggctcgtcttatttcagttgacgatgcatataaacttgggcgacaacttgactactcacgtgatgagtcgatgttgcaacggaatttaattgtccatatcgccaaatcgacttcgtaattattttgagagcttagattttgaactgatcttcgcccgtgatgtatgcaggcgcatattctgaggcacaaggttggctattgccgaccatttgagtttcgtggacatgaccaggtgcgcctgcatggtcatgtgtcacaaaagacgttctcgcaatggctgtctcataccattttcgatgagccaaacgcccaatggcttccttggaggctgtgatgtgagcctcgcgtctagtcactaatgaagcaaacacgaacatggcattacgcgaccctttagactaacgcaagcaagttacggcgcacacttatggagaaattctcagaacgaactacgcaaatgatcatgatttcatgatttggtattttttcagtcacgcttctttccagctccggtttcatgtctacccgcagagtcttgaatgattgtgttcagcacatctttagggggtagaaacatagggacgcatggagctctttctcgctacggctgtctcatgtctacggccgcattctggcagggaatgttgcggagatctggtctggttacatgagtgggcatgtgcaatgggcacggtcccttctagggctcactttggtcattcacctggatgctttgccatttcgagaagtggcatattgctcaattgctatgcaaatttgttttcgattttcatcgctagacaaaaagggtctcacttttttttcgcatttgcaactggctgggtgctgctgttgttttaaacgcatacaggcgttatgggcaggaaaatcgcctcactagacgctgatctaagaaggtaccatgaaaggctaggtagcccaaagttcggcaactctggcattgtgtaagaataactcgatgggaccaaaacaaataaaatgaagaaattttccaaaagctctggttttaaacctaaaaacttgaagaataatggttattgcttcgagattctcaagacagtctcaataaagccaatggaatataacttataaagaccctgttttatatagagacataaatgtgga

SEQ ID NO: 16210 - DNA, 645 bp, Muscodor strobelii
  misc_feature: SGI cDNA ID NO. 565385
  misc_feature: Encodes the peptide sequence at SEQ ID NO 16211
atggcctcatcctctttccgagaatctatgaactcgctgggctggtcgcgccgcgacgacgactacgccaacacgagccagcagaccggcctgctctcatccatcaagtccctaaaccccttcggagatcgcggctatgtccagcttcccacaaccgagggcgccggcgcccccctccctgcaagcaaccgtcgcgaggaggaggagggctggtttgtcttgagccgttgggaccgcctgctaatcttcggagcatgcaacgtcggcgctctggcttgcttcgttctctgctttgccttgtggcccatactcatggctaagccccggaaattcgtcattctttggacgtttgggtctattcttttcttgtcatcctttgcggccatgatgggccctgtgccgtatgtgcaacatttgacatctggtcctcgccgaccatttactgccgcctattttgcatcaattgcgctcaccatatatttctccatcggccttcaaaacacgattttgacattattctctgcccttgtccagattgcgtgcttgatctggtatttggtcagctatttccccatgggatcaagcggtctccgcctagcaacaacctttggagcaagaagagcagctgcttgggtgacgggctaa

SEQ ID NO: 16211 - protein, 214 aa, Muscodor strobelii
  misc_feature: SGI Peptide ID NO. 565385
  misc_feature (74)..(197): Pfam Id: PF07770 Pfam Desc: SFT2-like protein
  misc_feature (1)..(214): NCBI GI: 171680259 Blast Desc: protein product [Podospora anserina] gi|170939756|emb|CAP64982.1| protein product [Podospora anserina]
  misc_feature (1)..(214): NCBI GI: 46108848 Blast Desc: FG01306.1 [Gibberella zeae PH-1]
  misc_feature (1)..(214): NCBI GI: 164427772 Blast Desc: NCU02723 [Neurospora crassa OR74A] gi|157071878|gb|EAA35872.2| NCU02723 [Neurospora crassa OR74A]
  misc_feature (1)..(214): NCBI GI: 256734324 Blast Desc: NECHADRAFT_74464 [Nectria haematococca mpVI 77-13-4]
  misc_feature (1)..(214): NCBI GI: 156030697 Blast Desc: SS1G_14444 [Sclerotinia sclerotiorum 1980] gi|154700835|gb|EDO00574.1| SS1G_14444 [Sclerotinia sclerotiorum 1980]
  misc_feature (1)..(214): NCBI GI: 242767576 Blast Desc: Golgi traffic protein SFT2, [Talaromyces stipitatus ATCC 10500] gi|242767580|ref|XP_002341397.1| Golgi traffic protein SFT2, [Talaromyces stipitatus ATCC 10500] Golgi traffic
  misc_feature (1)..(214): NCBI GI: 212528014 Blast Desc: Golgi traffic protein SFT2, [Penicillium marneffei ATCC 18224] gi|210073562|gb|EEA27649.1| Golgi traffic protein SFT2, [Penicillium marneffei ATCC 18224]
  misc_feature (1)..(214): NCBI GI: 255940442 Blast Desc: Pc16g06540 [Penicillium chrysogenum Wisconsin 54-1255] gi|211585613|emb|CAP93324.1| Pc16g06540 [Penicillium chrysogenum Wisconsin 54-1255]
  misc_feature (1)..(213): NCBI GI: 67521680 Blast Desc: AN1297.2 [Aspergillus nidulans FGSC A4] gi|40746734|gb|EAA65890.1| AN1297.2 [Aspergillus nidulans FGSC A4] gi|259488376|tpe|CBF87769.1| TPA: Golgi traffic protein SFT2,
  misc_feature (1)..(213): NCBI GI: 121702053 Blast Desc: SFT2 domain protein [Aspergillus clavatus NRRL 1] gi|119397434|gb|EAW07865.1| SFT2 domain protein [Aspergillus clavatus NRRL 1]
MASSSFRESMNSLGWSRRDDDYANTSQQTGLLSSIKSLNPFGDRGYVQLPTTEGAGAPLPASNRREEEEGWFVLSRWDRLLIFGACNVGALACFVLCFALWPILMAKPRKFVILWTFGSILFLSSFAAMMGPVPYVQHLTSGPRRPFTAAYFASIALTIYFSIGLQNTILTLFSALVQIACLIWYLVSYFPMGSSGLRLATTFGARRAAAWVTG

SEQ ID NO: 16212 - DNA, 1708 bp, Muscodor strobelii
  misc_feature: SGI EST ID NO. CUFF.38363.0
  misc_feature: Variant of the nucleotide sequence at SEQ ID NO 16210
cgccagtgcactacgctcgcctctgtcgcaacctcatcataccttccagcaccagtacgactgttcccttgctcctacaccacgcaaaccggtcattcggccacacccagactaccggcagcaccagcgcccattttccccatcccacataccgagccgtgtcgcgcccgacgacgagaacgccagaggccagacgccagccagccagcccaccgggctacaccgaaacccaacattgacagcatccacccgactgctcccttccacatcccatatccacattccacacagcgtctcgaggccaagcttccaccagcagcggcaccatggcctcatcctctttccgagaatctatgaactcgctgggctggtcgcgccgcgacgacgactacgccaacacgagccagcagaccggcctgctctcatccatcaagtccctaaaccccttcggagatcgcggctatgtccagcttcccacaaccgagggcgccggcgcccccctccctgcaagcaaccgtcgcgaggaggaggagggctggtttgtctgtgagtctttacggcctcctttgctctcatttgcccatttgcccatttgcgccaaagtcggtgtcgttctcttagtgctttcttcctgctttctataccgcgtgtctcacgagggagcatgcgcatgcaccgcgcgccgtgtttcatccatgcacatggccaaatgccccaccaagtttcgcactcgctgaccaaagatctcgatctccttagtgagccgttgggaccgcctgctaatcttcggagcatgcaacgtcggcgctctggcttgcttcgttctctgctttgccttgtggcccatactcatggctaagccccggaaattcgtcattctttggacgtttgggtctattcttttcttgtcatcctttgcggccatgatgggccctgtgccgtatgtgcaacatttgacatctggtcctcgccgaccatttactgccgcctattttgcatcaattgcgctcaccatatatttctccatcggccttcaaaacacgattttgacattattctctgcccttgtccagattgcgtgcttgatctggtatttggtcagctatttccccatgggatcaagcggtctccgcctagcaacaacctttggagcaagaagagcagctgcttgggtgacgggctaacttttgtggattaaatgtattgtaaatttgtaagttctgaaaacaggtacgatgctattgctccttaggaagcgttcacgaatgcaatgcgggagagcccttttcattatccaatcaagacaccctaattacttgcacttgtgcatttacgatcacagcgaagcgcgttgaggcgcacttggagtttaactgtgccctccatgattaccgaactgcgattcctacagcactcagcagatcaaccatatcatctcttcaatcgttaccaaagatcgggttctgggacggggtttaagactagatatcatgagatagagtgtggcttcaagttcttgagaccccaaagatcgacaattttatgataaatgaccgatccggtcatgaatacgtcccgcaataataaaacagggttgatcgcgttgaaaccgaatagtactgcgggtagtctatcaggacatcttctgccgaccctttgcagggatcatgatctaacacctgagtgactgtcttgaatctcgtttccg

SEQ ID NO: 16213 - DNA, 1602 bp, Muscodor strobelii
  misc_feature: SGI cDNA ID NO. 565386
  misc_feature: Encodes the peptide sequence at SEQ ID NO 16214
atggcccagcacagcttcaaccacttcggtggtggccagcccaacggcggcaacgtcgacccaaatgacctcaacatgtcgggcaacttcggcgcctcatactccaacaacttcaacggcggcaacagcaacaacggacctaacggcttctttggcgatgacgaactgctcgacactctcggcggatcaccggatcccatgcacaaccagtcaggcatgcacaaccagggtcaagaattcggcgggatgaatggcatgagcatgggctactcgcaggcgatgtacacggcacaacaaaatggcaacggcatgcagatggaccagcaacatatgaatggatactcgaacactcccgatggcgagccgctccagagtcctttcgtgcacagctttggggggcagcagtttcggcaaatgcagcatcctcagtctttcggcaactcactccagtctccagtctcttattctggctctccgttggccaacgatatgaacaatgatgggaatgatcctaactatctgaatgcgaaagcccatgcaatggcgcatggcatgcagcgcaaagcctcggcgaccagaagcccgttaaccaacaagactactgcagccatgtctggtttgtcgatgaacccccgagagcccgtcagcttcggggctcagccaatccggaccacgggcgggcatcacgacaagtcgccacccgctgcgtggatgcacactcctaacagcctgtcatcatatcccggctcaggcttttcttctcctctacagcatggtctgccaagtgcccagatcgccgatgtcatgctaaaggcgggccagtctatgcctgccaagctcaataccccgaatgcagtctcgtctcaagagatgaagaggaaaagacgccgagaatctcacaacctagtcgagcgtcgtcggagagacaacatcaatgaacgaatccaggacttgagcaaattagttccttcgcacagactcgatgacgacaaggttcgaaaggcactccagaatggtcagcctatttctcccagtcttactggaatctcgagtacaggacaggcaacttcgggattggcgggccccggcgccaagcgcgctacaggcgccggcagcattacgactggccttcccatggaagagaaggacaaaggccccaataaaggggacatcctcaatggtgccgttagctggaccagagatctaatgtggatgctacatctcaaacttcagcaacaggaagagctcatcaacactattgctgagcttggcggcagcgtccccttcgatatgtctgaggacgagagacgcatgcagtctgagcttagcgaggcttggtccaagaacgacccacacacattctcgtatactcgatgtgcaggctcaggtcttcgtgtgcccaaccacacggacttcaaaggagaccctatggacggctcagaaactggtatcgtctctgtcagtcctgatagtaacggacttggcggggttggaaataatctcagcgacgaagtctactgggaacaggatgaagaaggcagtggacctgccacagccaacttcaaggaagatgacgacgcattcatggatttcgacgcatga

SEQ ID NO: 16214 - protein, 533 aa, Muscodor strobelii
  misc_feature: SGI Peptide ID NO. 565386
  misc_feature (296)..(403): Pfam Id: PF00010 Pfam Desc: Helix-loop-helix DNA-binding domain
  misc_feature (1)..(532): NCBI GI: 39941596 Blast Desc: MGG_05709 [Magnaporthe grisea 70-15] gi|145022402|gb|EDK06422.1| MGG_05709 [Magnaporthe grisea 70-15]
  misc_feature (1)..(531): NCBI GI: 256735030 Blast Desc: [Nectria haematococca mpVI 77-13-4]
  misc_feature (15)..(531): NCBI GI: 164427770 Blast Desc: NCU02724 [Neurospora crassa OR74A] gi|157071877|gb|EAA35873.2| conserved [Neurospora crassa OR74A]
  misc_feature (1)..(531): NCBI GI: 46108850 Blast Desc: FG01307.1 [Gibberella zeae PH-1]
  misc_feature (1)..(531): NCBI GI: 156030701 Blast Desc: SS1G_14446 [Sclerotinia sclerotiorum 1980] gi|154700837|gb|EDO00576.1| SS1G_14446 [Sclerotinia sclerotiorum 1980]
  misc_feature (1)..(496): NCBI GI: 171680261 Blast Desc: protein product [Podospora anserina] gi|170939757|emb|CAP64983.1| protein product [Podospora anserina]
  misc_feature (111)..(531): NCBI GI: 154289679 Blast Desc: BC1G_16026 [Botryotinia fuckeliana B05.10] gi|150848977|gb|EDN24170.1| BC1G_16026 [Botryotinia fuckeliana B05.10]
  misc_feature (19)..(532): NCBI GI: 115391755 Blast Desc: ATEG_04204 [Aspergillus terreus NIH2624] gi|114194306|gb|EAU36006.1| ATEG_04204 [Aspergillus terreus NIH2624]
  misc_feature (1)..(532): NCBI GI: 145239219 Blast Desc: An08g01380 [Aspergillus niger] gi|134076760|emb|CAK39819.1| protein product [Aspergillus niger]
  misc_feature (12)..(532): NCBI GI: 259488375 Blast Desc: TPA: GLCD gamma [Source:UniProtKB/TrEMBL;Acc:Q9HEV0] [Aspergillus nidulans FGSC A4]
MAQHSFNHFGGGQPNGGNVDPNDLNMSGNFGASYSNNFNGGNSNNGPNGFFGDDELLDTLGGSPDPMHNQSGMHNQGQEFGGMNGMSMGYSQAMYTAQQNGNGMQMDQQHMNGYSNTPDGEPLQSPFVHSFGGQQFRQMQHPQSFGNSLQSPVSYSGSPLANDMNNDGNDPNYLNAKAHAMAHGMQRKASATRSPLTNKTTAAMSGLSMNPREPVSFGAQPIRTTGGHHDKSPPAAWMHTPNSLSSYPGSGFSSPLQHGLPSAQIADVMLKAGQSMPAKLNTPNAVSSQEMKRKRRRESHNLVERRRRDNINERIQDLSKLVPSHRLDDDKVRKALQNGQPISPSLTGISSTGQATSGLAGPGAKRATGAGSITTGLPMEEKDKGPNKGDILNGAVSWTRDLMWMLHLKLQQQEELINTIAELGGSVPFDMSEDERRMQSELSEAWSKNDPHTFSYTRCAGSGLRVPNHTDFKGDPMDGSETGIVSVSPDSNGLGGVGNNLSDEVYWEQDEEGSGPATANFKEDDDAFMDFDA

SEQ ID NO: 16215 - DNA, 3686 bp, Muscodor strobelii
  misc_feature: SGI EST ID NO. CUFF.38612.0
  misc_feature: Variant of the nucleotide sequence at SEQ ID NO 16213
cggagagagcgccaaggcttggaagccactgtccaatctgatccatacggaggctcgccccaaaccgcccgcccgcccgcaactcaccaggctgtcaggaataagtgagaggaggtacccacatcgcccgtcctatctcaccgttctttgcgcccgccctagagctcccctcatatccgaagcctccattcacattcgatatccatttccccttctctcgttcaatgcgcctgtaggctgtcagctctccctggtcagctcatcgcatttggaagttggaagcagttggtcaataatccgtactttggtcgatttgaagtaaagtgcagcttgcctcccatcgcaacctggctcacttccacatccacctactactgggtactgtacaaccactcacagttcctttgcctggtgcctacctacccttcttacaaccccaccatcagagcagggattagccatcgcccgttcaggcatcccgccctcacctcaccgtccacagctccgttcgacaacttgacaaacttgaccgaaaggccctctctcacttggacggcaactccctgcagctcttcagccttgaattcctctcatctcgcccactgtgttctgaaaagccacagctcgtaacaagtgaaatcaccacaaactagaagtgtgaaagtttgaacgtagaagcgacgagacgctcgattataactagtcgcctcggcccgcccagtcgtttgttttacgaggcaccactaccctgccctgccgtgccctctctcaccagaggcaacaaaaccagcgcattcctcggccacaccctgcgtatctcactctatcgccatcttctcggtcttgcaccactcactcactcccctctctgaccgcctttcgtctcatagaccgcatttgcattactcggtctcgggtcgtcgcaacttgccctgctcaccactcaccgtcgcacttgaatgccaacgtccaagtaggctggcgcttgtccaccaatcaagacgtgcatccttgttctcgacaaatcattgatcctccgattcggacgtctgcaccactcagcgacacgagaaagagacaaaagaaagcagctcaattcagccaggcctgctccttccccttctctttttttggccgttgactagcgatccgacaatccaagcgacaccgctgcaggtagtattcctccttcccacatctacgcctgcatatcctgtatttgcgcccacacgttcccgcgcctccactcctccactccttccgactgcctctttccggtgttctatggccgtgtagcctcgagccttgtgcacctttgtagcatcggccttgcactgcgaccgcaattcgtcggcgtttcttgtgcgaccaagtaaatacggttccttggtcgcctcgcgctgcgtcacatacggtaccctctgcgtacacaccaccactccacatttctctcggctctggtaacacacaaacaccatggcccagcacagcttcaaccacttcggtggtggccagcccaacggcggcaacgtcgacccaaatgacctcaacatgtcgggcaacttcggcgcctcatactccaacaacttcaacggcggcaacagcaacaacggacctaacggcttctttggcgatgacgaactgctcgacactctcggcggatcaccggatcccatgcacaaccagtcaggcatgcacaaccagggtcaagaattcggcgggatgaatggcatgagcatgggctactcgcaggcgatgtacacggcacaacaaaatggcaacggcatgcagatggaccagcaacatatgaatggatactcgaacactcccgatggcgagccgctccagagtcctttcgtgcacagctttggggggcagcagtttcggcaaatgcagcatcctcagtctttcggcaactcactccagtctccagtctcttattctggctctccgttggccaacgatatgaacaatgatgggaatgatcctaactatctgaatgcgaaagcccatgcaatggcgcatggcatgcagcgcaaagcctcggcgaccagaagcccgttaaccaacaagactactgcagccatgtctggtttgtcgatgaacccccgagagcccgtcagcttcggggctcagccaatccggaccacgggcgggcatcacgacaagtcgccacccgctgcgtggatgcacactcctaacagcctgtcatcatatcccggctcaggcttttcttctcctctacagcatggtctgccaagtgcccagatcgccgatgtcatgctaaaggcgggccagtctatgcctgccaagctcaataccccgaatgcagtctcgtctcaagagatgaagaggaaaagacgccgagaatctcacaacctagtcgagcgtcgtcggagagacaacatcaatgaacgaatccaggacttgagcaaattagttccttcgcacagactcgatgacgacaaggttcgaaaggcactccagaatggtcagcctatttctcccagtcttactggaatctcgagtacaggacaggcaacttcgggattggcgggccccggcgccaagcgcgctacaggcgccggcagcattacgactggccttcccatggaagagaaggacaaaggccccaataaaggggacatcctcaatggtgccgttagctggaccagagatctaatgtggatgctacatctcaaacttcagcaacaggaagagctcatcaacactattgctgagcttggcggcagcgtccccttcgatatgtctgaggacgagagacgcatgcagtctgagcttagcgaggcttggtccaagaacgacccacacacattctcgtatactcgatgtgcaggctcaggtcttcgtgtgcccaaccacacggacttcaaaggagaccctatggacggctcagaaactggtatcgtctctgtcagtcctgatagtaacggacttggcggggttggaaataatctcagcgacgaagtctactgggaacaggatgaagaaggcagtggacctgccacagccaacttcaaggaagatgacgacgcattcatggatttcgacgcatgagataacttctgcgtctgatagtcgtaatctagcgtccggtcgcatccccgcgacctttgattttctttccatctgcacattccctctgctccacaacatttgctcggatattacattggacatattggaaatatgtcaatcgcattcataggatggtttcggtgtggtcacggcgtttctcagatcacggcgtcggcacatgattcggctgatggatgggtggcgtcttgtctccctttggcgctccgtattacagcaatgcgagtgagggactgattttcttttctttcgttatttcttttgttcattgtgcatttacgggaagatacctcaacctcgacaacggagtttcaggggcatactatcggacggccacggggcgtggtcgtccttgcttttgttcgtcatttgattgcatcatctgttcccgcggttgacaggtttgatttttgaggccagcgttcccgagctcgttgtacgagcccatgtagccatgttcaacccgtatttggcactataatcctcatgtagccgtgaccctctgaaagggcgctggcgggctatgctaagcaagctacctatatataacacttgaacacattgccaac

SEQ ID NO: 16216 - DNA, 2499 bp, Muscodor strobelii
  misc_feature: SGI cDNA ID NO. 565387
  misc_feature: Encodes the peptide sequence at SEQ ID NO 16217
atggcggcccctgtcctcccgaacacgtcaaactttctgggtgtagctctggtcgtcaatcgcttgagagatgggccgcgcttcgtatttcactatccagatcagatattgacggataagaagaggcatgtgactgcggtgcgcgactcaaaagatgagctagacgatgacgatgaagccctgctgctgaatcatctcacccagcgacccttcgaggccacgtcaggatctcttcctagcggcgctggtctacagtgttggaatcatgacgaccacttcgagaccgagagcggttcgcagattgtgccgtgggagcatgttgctgggtatccgactcgtgatctcgagagccttttgacaccatctcgggcgtttcacaaaaagctcttccaggtgtccttggaccagctgtgcttcgtgtcttctcctgtctatgttccagaggagaatggcgtctgggggaagaagaagcgacagcccaaaaataaaccgccaaaatcaccggaaaatggcgaatcagcaaataaagacggttcggcatcctcaacgctattagcagttgacgcgccacagatcgaaatcaaggacgcggttgatgataatgccacgaacagtaacagcggaaatggcaataatggaaccgatgaggcagaggagaagaaaagcggcatgcccatgttcaatcttgtgttcatactcaaccccaagaaacacgaggctaatgagcttgccgacgtattatacacgcacatcatgaaaaagatcaataaggccttcaagtatagccaacagaagagtgactttgtctggaaagagtcgaaacgtatcctcacattgaaagataaaaatcgcgaagcaaaaaccaagatgagcgtcctttggaaggaaatcctcgaagtatcgtcacttgcagcctgtatagaggatatatacaacgcagtatctcagaacaagatcgcagccttacagcttgaaactgccgagggcaccattactcactcggtgcaaattccggtgccattctatctaacagacttgccgccagaagaagaggcagcaaatactcgaggtctatggattaccacagcaaataacttcgtcgaagaggatagtctacatgatccgtctttcctagataagaattttggcattttgctcatgagcgaggagaagaagattgtcgctgagctccaggcagatgcggatgctgatgaggccaccgccgccatgattcagtttgttcgactttccaaacctactatgtcattccatcaaatcagtcaaagcagtggactttcaccagctcaagtccgtaaatatgcacagcacttcattttctggcggcgcggaatcgccatcccgcccttacacatgcgtgatgtatacacactctcacccaatgccgacgcatctctattgccacgcgcaagccaagcatggtctcgcgcatttcccttggcaccacatctcgccgattttctcgcggaattatctgctgctccacggccatacaagtggttctgtccatccaagaaccaccgaccaacttacctccagatgctagcatggctgatgcgtggaggctgggtaacacagctctgcactttcgcttacgtcgtagtctggccggagatcatatatgaagtcgaatatgagcttgagcaacaagcagaagcagctagatgggaaaaagagcaacaacagcaaggccaagagaccgacaaggacaaaagtaaagaaccgcagcatctaggaaaccaagatcaagaagacgacagagaccaccgacgcatccaccctccatccccagcaggctcttcgtcaactgcccgcggcggcggacccccatccatctcagcatcctcaaccaacctcgacctctccgcctcagccaccagctcagccgacggtcccataacaacctctattggatccctagctctccgtccatcacccacctccctaacagacatccctcaacccccttcaccatcccaaccccaaagccccatctcctccgaacccgcctccgcatcaacaagtcccccagaaatccccaaaacacccggtgaacgcttcgcgctcgccgcccgtctcagcagaatagcagacaaagaagcccgcgaatcctacgaacgctccgcagccttctcccgcaaagtgatccccgtccccacctcccacccttccttaaacacatccccacacctctcccacctaaccccctacataatcgtcgacgcccggcgcgcatccgggcgagactccctctacctctccgccatccagcgtcggttcaccgacccccgcgtccgcgccgcctggcccgtactatggaagtacttcaacgggaaaaccgccctagaacgcgtagccctcggtgggacgctgggaagtgatggtgatagagacgataagttcaagttcaagaagcggaaagaagcatgggctctcatgacgctcatgagtgagtatctggtttgtgttcggcactggtga

SEQ ID NO: 16217 - protein, 832 aa, Muscodor strobelii
  misc_feature: SGI Peptide ID NO. 565387
  misc_feature (6)..(652): Pfam Id: PF03666 Pfam Desc: Uncharacterised protein family (UPF0171)
  misc_feature (382)..(541): Pfam Id: PF03666 Pfam Desc: Uncharacterised protein family (UPF0171)
  misc_feature (1)..(766): NCBI GI: 85116748 Blast Desc: NCU02725 [Neurospora crassa OR74A] gi|28926913|gb|EAA35874.1| conserved [Neurospora crassa OR74A]
  misc_feature (1)..(832): NCBI GI: 145615597 Blast Desc: MGG_05712 [Magnaporthe grisea 70-15] gi|145022404|gb|EDK06424.1| MGG_05712 [Magnaporthe grisea 70-15]
  misc_feature (1)..(666): NCBI GI: 171680263 Blast Desc: protein product [Podospora anserina] gi|170939758|emb|CAP64984.1| protein product [Podospora anserina]
  misc_feature (1)..(689): NCBI GI: 116206958 Blast Desc: CHGG_02772 [Chaetomium globosum CBS 148.51] gi|88183369|gb|EAQ90837.1| CHGG_02772 [Chaetomium globosum CBS 148.51]
  misc_feature (1)..(547): NCBI GI: 46108852 Blast Desc: FG01308.1 [Gibberella zeae PH-1]
  misc_feature (1)..(547): NCBI GI: 256734323 Blast Desc: NECHADRAFT_89906 [Nectria haematococca mpVI 77-13-4]
  misc_feature (10)..(557): NCBI GI: 156052929 Blast Desc: SS1G_06632 [Sclerotinia sclerotiorum 1980] gi|154704410|gb|EDO04149.1| SS1G_06632 [Sclerotinia sclerotiorum 1980]
  misc_feature (10)..(557): NCBI GI: 154318505 Blast Desc: BC1G_03420 [Botryotinia fuckeliana B05.10] gi|150842943|gb|EDN18136.1| BC1G_03420 [Botryotinia fuckeliana B05.10]
  misc_feature (1)..(556): NCBI GI: 255940394 Blast Desc: Pc16g06300 [Penicillium chrysogenum Wisconsin 54-1255] gi|211585589|emb|CAP93300.1| Pc16g06300 [Penicillium chrysogenum Wisconsin 54-1255]
  misc_feature (104)..(556): NCBI GI: 242767631 Blast Desc: UPF0171 domain protein [Talaromyces stipitatus ATCC 10500] gi|218724603|gb|EED24020.1| UPF0171 domain protein [Talaromyces stipitatus ATCC 10500]
MAAPVLPNTSNFLGVALVVNRLRDGPRFVFHYPDQILTDKKRHVTAVRDSKDELDDDDEALLLNHLTQRPFEATSGSLPSGAGLQCWNHDDHFETESGSQIVPWEHVAGYPTRDLESLLTPSRAFHKKLFQVSLDQLCFVSSPVYVPEENGVWGKKKRQPKNKPPKSPENGESANKDGSASSTLLAVDAPQIEIKDAVDDNATNSNSGNGNNGTDEAEEKKSGMPMFNLVFILNPKKHEANELADVLYTHIMKKINKAFKYSQQKSDFVWKESKRILTLKDKNREAKTKMSVLWKEILEVSSLAACIEDIYNAVSQNKIAALQLETAEGTITHSVQIPVPFYLTDLPPEEEAANTRGLWITTANNFVEEDSLHDPSFLDKNFGILLMSEEKKIVAELQADADADEATAAMIQFVRLSKPTMSFHQISQSSGLSPAQVRKYAQHFIFWRRGIAIPPLHMRDVYTLSPNADASLLPRASQAWSRAFPLAPHLADFLAELSAAPRPYKWFCPSKNHRPTYLQMLAWLMRGGWVTQLCTFAYVVVWPEIIYEVEYELEQQAEAARWEKEQQQQGQETDKDKSKEPQHLGNQDQEDDRDHRRIHPPSPAGSSSTARGGGPPSISASSTNLDLSASATSSADGPITTSIGSLALRPSPTSLTDIPQPPSPSQPQSPISSEPASASTSPPEIPKTPGERFALAARLSRIADKEARESYERSAAFSRKVIPVPTSHPSLNTSPHLSHLTPYIIVDARRASGRDSLYLSAIQRRFTDPRVRAAWPVLWKYFNGKTALERVALGGTLGSDGDRDDKFKFKKRKEAWALMTLMSEYLVCVRHW

SEQ ID NO: 16218 - DNA, 3099 bp, Muscodor strobelii
  misc_feature: SGI EST ID NO. CUFF.38312.0
  misc_feature: Variant of the nucleotide sequence at SEQ ID NO 16216
gttaggactatacctagaatcgactattttaacgtggctagtccgttcataggcgtgttgcgcgcgatgttcaatgctgtatcacagtagcgcttattttgttcagggcctaggtgtcgatgcgacagttcgaggttcttgcccctccgcctcccctgtcaactcttttgaatcaacgtccatcccacctaatcttttcgcctattctaatattgacctctacgctcggattgcaacgttcacatgtgcaaaatcttaatgtataattgtatgagcccatcttcctgaaaggtggtgggattgggaggaagtggatcgatctggaaactcatatcatggcggcccctgtcctcccgaacacgtcaaactttctgggtgtagctctggtcgtcaatcgcttgagagatgggccgcgcttcgtatttcactatccagatcagatattgacggataagaagaggcatgtgactgcggtgcgcgactcaaaagatgagctagacgatgacgatgaagccctgctgctgaatcatctcacccagcgacccttcgaggccacgtcaggatctcttcctagcggcgctggtctacagtgttggaatcatgacgaccacttcgagaccgagagcggttcgcagattgtgccgtgggagcatgttgctgggtatccgactcgtgatctcgagagccttttgacaccatctcgggcgtttcacaaaaagctcttccaggtgtccttggaccagctgtgcttcgtgtcttctcctgtctatgttccagaggagaatggcgtctgggggaagaagaagcgacagcccaaaaataaaccgccaaaatcaccggaaaatggcgaatcagcaaataaagacggttcggcatcctcaacgctattagcagttgacgcgccacagatcgaaatcaaggacgcggttgatgataatgccacgaacagtaacagcggaaatggcaataatggaaccgatgaggcagaggagaagaaaagcggcatgcccatgttcaatcttgtgttcatactcaaccccaagaaacacgaggctaatgagcttgccgacgtattatacacgcacatcatgaaaaagatcaataaggccttcaagtatagccaacagaagagtgactttgtctggaaagagtcgaaacgtatcctcacattgaaagataaaaatcgcgaagcaaaaaccaagatgagcgtcctttggaaggaaatcctcgaagtatcgtcacttgcagcctgtatagaggatatatacaacgcagtatctcagaacaagatcgcagccttacagcttgaaactgccgagggcaccattactcactcggtgcaaattccggtgccattctatctaacagacttgccgccagaagaagaggcagcaaatactcgaggtctatggattaccacagcaaataacttcgtcgaagaggatagtctacatgatccgtctttcctagataagaattttggcattttgctcatgagcgaggagaagaagattgtcgctgagctccaggcagatgcggatgctgatgaggccaccgccgccatgattcagtttgttcgactttccaaacctactatgtcattccatcaaatcagtcaaagcagtggactttcaccagctcaagtccgtaaatatgcacagcacttcattttctggcggcgcggaatcgccatcccgcccttacacatgcgtgatgtatacacactctcacccaatgccgacgcatctctattgccacgcgcaagccaagcatggtctcgcgcatttcccttggcaccacatctcgccgattttctcgcggaattatctgctgctccacggccatacaagtggttctgtccatccaagaaccaccgaccaacttacctccagatgctagcatggctgatgcgtggaggctgggtaacacagctctgcactttcgcttacgtcgtagtctggccggagatcatatatgaagtcgaatatgagcttgagcaacaagcagaagcagctagatgggaaaaagagcaacaacagcaaggccaagagaccgacaaggacaaaagtaaagaaccgcagcatctaggaaaccaagatcaagaagacgacagagaccaccgacgcatccaccctccatccccagcaggctcttcgtcaactgcccgcggcggcggacccccatccatctcagcatcctcaaccaacctcgacctctccgcctcagccaccagctcagccgacggtcccataacaacctctattggatccctagctctccgtccatcacccacctccctaacagacatccctcaacccccttcaccatcccaaccccaaagccccatctcctccgaacccgcctccgcatcaacaagtcccccagaaatccccaaaacacccggtgaacgcttcgcgctcgccgcccgtctcagcagaatagcagacaaagaagcccgcgaatcctacgaacgctccgcagccttctcccgcaaagtgatccccgtccccacctcccacccttccttaaacacatccccacacctctcccacctaaccccctacataatcgtcgacgcccggcgcgcatccgggcgagactccctctacctctccgccatccagcgtcggttcaccgacccccgcgtccgcgccgcctggcccgtactatggaagtacttcaacgggaaaaccgccctagaacgcgtagccctcggtgggacgctgggaagtgatggtgatagagacgataagttcaagttcaagaagcggaaagaagcatgggctctcatgacgctcatgagtgagtatctggtttgtgttcggcactggtgaggtagatggacgtagggaaccatttcgaggatgttgcttggtatgatacctgtgtatatatctagtgataagatgggtggttgatatgctactggagaatatggaggctccttctatacagtacgtaaagcactatagtgtcataattgtctttgttacatgaatggatcctcgcatgtcattatcaaaagcggcctgctcgcgcaaaccccagaaattagttgggtagcatccatccagcttacttcgtagtccttcttagttt

SEQ ID NO: 16219 - DNA, 711 bp, Muscodor strobelii
  misc_feature: SGI cDNA ID NO. 565388
  misc_feature: Encodes the peptide sequence at SEQ ID NO 16220
atgcgcataaaacgcacccaccaggcatatgctgccttcgcagctgcgacctcgaccttctacacagcactcgccgatacagtcgatcctctgggctattccgacatccaagcattcctcccgatcaatatcaaagacatcacatgcccagccaattacttcagctgtgaggacgaaggtcctgccttcgacaacacctgctgcgagaatggtcaggaatgctctttagacgcccagtcaagtgctgcctgctgccctacttcagcgacatgcaccggtgttgcgcccggccaaacagcgaccgctacatacgtgagcaactcgtacttcgcattcccagttgtaccgacatcctacagcaatgcgggagcatgttccctggccctgaatgactgtaataccaactacagagcatgtgtgtctgatctcgagggtattgggagcggttacggtgtgactattcaagtcccgggcggcggaggaacaacagtagcaccagcagtaacatccttcccgtcggccacagcaacctcgatgtgttccagtctatcgctctctgcctgccatggccttagtggaggctcatgcgcacaaggaacccatggcgctattatagtcggcaatgcgaatgtggcatcgcgcccaatcgctgcttcgacagtcgccgtcattgctgggttcggactggccctcatcggcggctatatctag

SEQ ID NO: 16220 - protein, 236 aa, Muscodor strobelii
  misc_feature: SGI Peptide ID NO. 565388
  misc_feature (34)..(215): NCBI GI: 171680337 Blast Desc: protein product [Podospora anserina] gi|170939795|emb|CAP65021.1| protein product [Podospora anserina]
  misc_feature (3)..(196): NCBI GI: 256734289 Blast Desc: NECHADRAFT_74398 [Nectria haematococca mpVI 77-13-4]
  misc_feature (49)..(233): NCBI GI: 39941448 Blast Desc: MGG_05635 [Magnaporthe grisea 70-15] gi|145022319|gb|EDK06339.1| MGG_05635 [Magnaporthe grisea 70-15]
  misc_feature (36)..(157): NCBI GI: 116206884 Blast Desc: CHGG_02735 [Chaetomium globosum CBS 148.51] gi|88183332|gb|EAQ90800.1| CHGG_02735 [Chaetomium globosum CBS 148.51]
  misc_feature (45)..(198): NCBI GI: 164422780 Blast Desc: NCU09375 [Neurospora crassa OR74A] gi|157069818|gb|EAA34510.2| NCU09375 [Neurospora crassa OR74A]
  misc_feature (42)..(203): NCBI GI: 46108972 Blast Desc: FG01368.1 [Gibberella zeae PH-1]
  misc_feature (45)..(198): NCBI GI: 156062192 Blast Desc: SS1G_01212 [Sclerotinia sclerotiorum 1980] gi|154696548|gb|EDN96286.1| SS1G_01212 [Sclerotinia sclerotiorum 1980]
  misc_feature (45)..(203): NCBI GI: 154318205 Blast Desc: BC1G_03270 [Botryotinia fuckeliana B05.10] gi|150842793|gb|EDN17986.1| BC1G_03270 [Botryotinia fuckeliana B05.10]
  misc_feature (17)..(233): NCBI GI: 240109895 Blast Desc: CPC735_034000 [Coccidioides posadasii C735 delta SOWgp]
  misc_feature (32)..(196): NCBI GI: 145229787 Blast Desc: An01g07770 [Aspergillus niger] gi|134055313|emb|CAK43875.1| protein product [Aspergillus niger]
MRIKRTHQAYAAFAAATSTFYTALADTVDPLGYSDIQAFLPINIKDITCPANYFSCEDEGPAFDNTCCENGQECSLDAQSSAACCPTSATCTGVAPGQTATATYVSNSYFAFPVVPTSYSNAGACSLALNDCNTNYRACVSDLEGIGSGYGVTIQVPGGGGTTVAPAVTSFPSATATSMCSSLSLSACHGLSGGSCAQGTHGAIIVGNANVASRPIAASTVAVIAGFGLALIGGYI

SEQ ID NO: 16221 - DNA, 1147 bp, Muscodor strobelii
  misc_feature: SGI EST ID NO. CUFF.38315.0
  misc_feature: Variant of the nucleotide sequence at SEQ ID NO 16219
atcgaaatccccaatccccaatctgtaaagcaatcagcagtggaacaataatttcaagctccaatttttattgtctttcgccgtgtgtctctataatccagctctgaactcctgccgtgagaagcaacgccgcgtcaataagcctgcctgaaaagctatcaatgcccaatcttgcatcgccgtcgtaacatcagcaatgcgcataaaacgcacccaccaggcatatgctgccttcgcagctgcgacctcgaccttctacacagcactcgccgatacagtcgatcctctgggctattccgacatccaagcattcctcccgatcaatatcaaagacatcacatgcccagccaattacttcagctgtgaggacgaaggtcctgccttcgacaacacctgctgcgagaatggtcaggaatgctctttagacgcccagtcaagtgctgcctgctgccctacttcagcgacatgcaccggtgttgcgcccggccaaacagcgaccgctacatacgtgagcaactcgtacttcgcattcccagttgtaccgacatcctacagcaatgcgggagcatgttccctggccctgaatgactgtaataccaactacagagcatgtgtgtctgatctcgagggtattgggagcggttacggtgtgactattcaagtcccgggcggcggaggaacaacagtagcaccagcagtaacatccttcccgtcggccacagcaacctcgatgtgttccagtctatcgctctctgcctgccatggccttagtggaggctcatgcgcacaaggaacccatggcgctattatagtcggcaatgcgaatgtggcatcgcgcccaatcgctgcttcgacagtcgccgtcattgctgggttcggactggccctcatcggcggctatatctagatcaatgctcgtgaactggtgtgagaaaaacacgagagatgcacaatgacgacgttacgaatatcatgattggagtttgggtatatgatgtgggaggttcgcggaattggtcgcacatccgccggatgggaacagagatgttttctaagggttttgtacatacgttgcgtataagggtttcacctagaccgatagttccaagctagggctatcacataactcaccttgaccgtcacgcag

SEQ ID NO: 16222 - DNA, 309 bp, Muscodor strobelii
  misc_feature: SGI cDNA ID NO. 565389
  misc_feature: Encodes the peptide sequence at SEQ ID NO 16223
atgagttcgtttgggagcccgggctcgggtccatacacaggcaaacctgttcctccagagcgcggcagctttcctttagatcacgatggcgaatgcaagcatgttatgacacgctacctttcttgtatcaagaaggtcaaaggcatgaatgatgatgaatgccgcctccttgctaagtcataccttgcttgccgaatggacaaaaacttgatggctcgagatgaattcaagaacctaggatttgcggaggaaacaaatgccaagtcgccatcaacgttcagctcaaaagagggagaaacgagatcataa

SEQ ID NO: 16223 - protein, 102 aa, Muscodor strobelii
  misc_feature: SGI Peptide ID NO. 565389
  misc_feature (25)..(67): Pfam Id: PF06747 Pfam Desc: CHCH domain
  misc_feature (1)..(99): NCBI GI: 261357303 Blast Desc: cytochrome c oxidase assembly protein COX19 [Verticillium albo-atrum VaMs.102]
  misc_feature (1)..(85): NCBI GI: 154318485 Blast Desc: [Botryotinia fuckeliana B05.10] gi|150842933|gb|EDN18126.1| [Botryotinia fuckeliana B05.10]
  misc_feature (1)..(91): NCBI GI: 171687993 Blast Desc: protein product [Podospora anserina] gi|170943958|emb|CAP69610.1| protein product [Podospora anserina]
  misc_feature (3)..(102): NCBI GI: 115391721 Blast Desc: [Aspergillus terreus NIH2624] gi|114194289|gb|EAU35989.1| [Aspergillus terreus NIH2624]
  misc_feature (13)..(84): NCBI GI: 156052925 Blast Desc: SS1G_06630 [Sclerotinia sclerotiorum 1980] gi|154704408|gb|EDO04147.1| SS1G_06630 [Sclerotinia sclerotiorum 1980]
  misc_feature (3)..(87): NCBI GI: 259488383 Blast Desc: TPA: cytochrome c oxidase assembly protein Cox19, (AFU_orthologue; AFUA_1G09757) [Aspergillus nidulans FGSC A4]
  misc_feature (3)..(96): NCBI GI: 146322548 Blast Desc: cytochrome c oxidase assembly protein Cox19 [Aspergillus fumigatus Af293] gi|129557722|gb|EBA27402.1| cytochrome c oxidase assembly protein Cox19, [Aspergillus Af293]
  misc_feature (3)..(88): NCBI GI: 238843774 Blast Desc: cytochrome c oxidase assembly protein COX19 [Microsporum canis CBS 113480]
  misc_feature (4)..(81): NCBI GI: 238489795 Blast Desc: cytochrome c oxidase assembly protein Cox19, [Aspergillus flavus NRRL3357] gi|220698523|gb|EED54863.1| cytochrome c oxidase assembly protein Cox19, [Aspergillus flavus
  misc_feature (3)..(95): NCBI GI: 255940396 Blast Desc: Pc16g06310 [Penicillium chrysogenum Wisconsin 54-1255] gi|211585590|emb|CAP93301.1| Pc16g06310 [Penicillium chrysogenum Wisconsin 54-1255]
MSSFGSPGSGPYTGKPVPPERGSFPLDHDGECKHVMTRYLSCIKKVKGMNDDECRLLAKSYLACRMDKNLMARDEFKNLGFAEETNAKSPSTFSSKEGETRS

SEQ ID NO: 16224 - DNA, 798 bp, Muscodor strobelii
  misc_feature: SGI EST ID NO. CUFF.38332.0
  misc_feature: Variant of the nucleotide sequence at SEQ ID NO 16222
gcgagtctcagtctcaaggcgctatcaccgattcatcatcatattacacgttgcaaatcttcaacatcgactctcaattgtaagatacttgaagagtctcactagataacatgagttcgtttgggagcccgggctcgggtccatacacaggcaaacctgttcctccagagcgcggcagctttcctttagatcacgatggcgaatgcaagcatgttatgacacgctacctttcttgtatcaagaaggtcaaaggcatgaatgatgatgaatgccgcctccttgctaagtcataccttgcttgccgaatggacaaaaacttgatggctcgagatgaattcaagaacctaggatttgcggaggaaacaaatgccaagtcgccatcaacgttcagctcaaaagagggagaaacgagatcataacacgatgagtatcactcgacatccatgtcagtaaatgtttagttggatgtcaaacatttgtacgagcagacattgaggcttgagcttgccggtgccgactatgacggcattatattcaggtcatctacggcttgtacaatcataactgtatatttaatgatctagcgtgaaaaatcgtatatgttgtgggattttcacgcgtaaatccaacagattaactgtcactgctcactcgaacttagacatgttgccctgtgcatacctaaatccatacgagagagaataaaaccattgagcacaatgtgctgttaagatctcgcttttattgtagtacagcttcggatttaaaacaaaactcagtctgtcgaatctggcttcc

SEQ ID NO: 16225 - DNA, 270 bp, Muscodor strobelii
  misc_feature: SGI cDNA ID NO. 565390
  misc_feature: Encodes the peptide sequence at SEQ ID NO 16226
atgagttcgtttgggagcccgggctcgggtccatacacaggcaaacctgttcctccagagcgcggcagctttcctttagatcacgatggcgaatgcaagcatgttatgacacgctacctttcttgtatcaagaaggtcaaaggcatgaatgatgatgaatgccgcctccttgctaagtcataccttgcttgccgaatggacaagtatgtatcctttgtctattccatcctcaagcaagcaacttcgactgacagcgggaaagaaacttga

SEQ ID NO: 16226 - protein, 89 aa, Muscodor strobelii
  misc_feature: SGI Peptide ID NO. 565390
  misc_feature (25)..(67): Pfam Id: PF06747 Pfam Desc: CHCH domain
  misc_feature (1)..(70): NCBI GI: 261357303 Blast Desc: cytochrome c oxidase assembly protein COX19 [Verticillium albo-atrum VaMs.102]
  misc_feature (4)..(80): NCBI GI: 145239255 Blast Desc: An08g01550 [Aspergillus niger] gi|134076780|emb|CAK39835.1| protein product [Aspergillus niger]
  misc_feature (1)..(67): NCBI GI: 171687993 Blast Desc: protein product [Podospora anserina] gi|170943958|emb|CAP69610.1| protein product [Podospora anserina]
  misc_feature (1)..(70): NCBI GI: 154318485 Blast Desc: [Botryotinia fuckeliana B05.10] gi|150842933|gb|EDN18126.1| [Botryotinia fuckeliana B05.10]
  misc_feature (3)..(70): NCBI GI: 115391721 Blast Desc: [Aspergillus terreus NIH2624] gi|114194289|gb|EAU35989.1| [Aspergillus terreus NIH2624]
  misc_feature (3)..(85): NCBI GI: 121702039 Blast Desc: CHCH domain protein [Aspergillus clavatus NRRL 1] gi|119397427|gb|EAW07858.1| CHCH domain protein [Aspergillus clavatus NRRL 1]
  misc_feature (3)..(70): NCBI GI: 259488383 Blast Desc: TPA: cytochrome c oxidase assembly protein Cox19, (AFU_orthologue; AFUA_1G09757) [Aspergillus nidulans FGSC A4]
  misc_feature (3)..(70): NCBI GI: 146322548 Blast Desc: cytochrome c oxidase assembly protein Cox19 [Aspergillus fumigatus Af293] gi|129557722|gb|EBA27402.1| cytochrome c oxidase assembly protein Cox19, [Aspergillus Af293]
  misc_feature (4)..(70): NCBI GI: 238489795 Blast Desc: cytochrome c oxidase assembly protein Cox19, [Aspergillus flavus NRRL3357] gi|220698523|gb|EED54863.1| cytochrome c oxidase assembly protein Cox19, [Aspergillus flavus
  misc_feature (3)..(70): NCBI GI: 255940396 Blast Desc: Pc16g06310 [Penicillium chrysogenum Wisconsin 54-1255] gi|211585590|emb|CAP93301.1| Pc16g06310 [Penicillium chrysogenum Wisconsin 54-1255]
MSSFGSPGSGPYTGKPVPPERGSFPLDHDGECKHVMTRYLSCIKKVKGMNDDECRLLAKSYLACRMDKYVSFVYSILKQATSTDSGKET

SEQ ID NO: 16227 - DNA, 798 bp, Muscodor strobelii; identical to SEQ ID NO: 16224
  misc_feature: SGI EST ID NO. CUFF.38332.0
  misc_feature: Variant of the nucleotide sequence at SEQ ID NO 16225

SEQ ID NO: 16228 - DNA, 2091 bp, Muscodor strobelii
  misc_feature: SGI cDNA ID NO. 565391
  misc_feature: Encodes the peptide sequence at SEQ ID NO 16229
atgatacgaggaaataggaaccgttgcctcactggcaagctgccgaggtacgccagtcgtaccactaatcggcggagctttggtaacacaacgtcacgtcttaactacgactcaacacttaagaacttaaagattggaagccatacacgagtgatattccagggctttacaggaaaacaagcaacggcaaacgcgcaagagtcaatcaaatggggcacaaatatcgttggtggtgtgacgccgggccgcacaggcgagcatcttggtctaccagttttaccttcagttcgaaaggccatggaagttctcaagccagatgccacaggcatatacgttgcagcccaccaggccactattgccattaaagaagcgattgaagctgaagtgcctttaatagttgttgtagcagagcacataccattacatgacttcattacgattcattccatgttgaaaactcaatctgtatccagacttgttggtgcaaactcgccagggataatatcagccgtagcaaagtgcagaatagggtttcaaccactaccatgcttcaaacctggacgtattggtatcgtggcaagatcaggtaccctaagctatgagactgcggcgtcaactctcagatctgaattaggtcaaagtctttgtatcggcgttggtggtgatattttgccagggacgtctctcaaagatggtcttaagattctcacagaggataaagataccgaagccattgcccttgtcggtgaaattggaggagaagctgagatggaggccgcggctttcattaaggaatacaattcgagagaaaagaacccgaagcctattgctgccattattggtggcaggcatacggtaccgggccgaatttttggacacgctggtgccttcactctccccggtgaaccatccgcgcaagataaaatcgaggctctacagcttgccggagccacaattgttagccacccatctcggtttggcccaacattaaaaacaatgctaacggggtcgacgccttccggccacggcataggcgcaccacgctcgtcgtcacccactcagcagagaaagatccacacagccgctcgaagaccagtgacaatgtcgcacacacatgtcaagattgcgcagaaaagatcaatatatttaacacagtctacagctttcgacctgctaacgcataggtcaataccaatatctgaagagacgacagctaatcttaaaaaacgtcttcttgcaataaccgtggatcgttcgaccaataccccttgtgtcgttgtatctccgactcttgatggagacagtaatcagatcaggagattcgactacccatacaatactggagcagctgacctcgactttaacgccatagcatcgtatatcggtcttgacgcaaacaatgtagagattatttcttcgctccgtaccataattaacgagctagtaattctcttcgcagagaatgaggcatttctcctcgagacgcatttaatctcccctggtgaggactcgccgatagccgtagcagctgctcgcttcggtttcgatgatgcagctcaccgaagtggcaagagacaagcggacatccaggctcttcgagatacaagcgttgaggatcccgctgagtttggtgtggagaaagatggtatagtctacattaagcttcctaatggccaaggagaaaacgaagttgccaatatcgggacccttgtcaacggcgccggtcttgcgatgaatacagttgatgcattggcagacgccggtgggcgagctgcaaatttcttggataccggcggcaaagcgactagtgaaacagtcaagaaaagcttcgaggtcattttaaaagatcctagagtcaaatgcattttcgtcaatatattcggcggactcacacttggcgatatgattgcgcgaggtgtcgtgctcgcctttagcgagttgcatatgagtgttcctgttgtcgtccgaattaaggggacgaatgagaaagaaggccaacgcattatcgaagatagtggacttccgctgtttgctttcgatgactttgacgaggcggcagcgaaagcgattgagctagccaaccaaaggtga

SEQ ID NO: 16229 - protein, 696 aa, Muscodor strobelii
  misc_feature: SGI Peptide ID NO. 565391
  misc_feature (44)..(139): Pfam Id: PF02629 Pfam Desc: CoA binding domain
  misc_feature (546)..(690): Pfam Id: PF00549 Pfam Desc: CoA-ligase
  misc_feature (174)..(320): Pfam Id: PF00549 Pfam Desc: CoA-ligase
  misc_feature (52)..(694): NCBI GI: 171687991 Blast Desc: protein product [Podospora anserina] gi|170943957|emb|CAP69609.1| protein product [Podospora anserina]
  misc_feature (16)..(693): NCBI GI: 169781606 Blast Desc: [Aspergillus oryzae RIB40] gi|83774008|dbj|BAE64133.1| protein product [Aspergillus oryzae]
  misc_feature (14)..(693): NCBI GI: 146322592 Blast Desc: succinyl-CoA synthetase subunit alpha [Aspergillus fumigatus Af293] gi|129557744|gb|EAL90410.2| succinyl-CoA synthetase subunit alpha, [Aspergillus fumigatus Af293] alpha
  misc_feature (14)..(694): NCBI GI: 255937433 Blast Desc: Pc13g13290 [Penicillium chrysogenum Wisconsin 54-1255] gi|211584363|emb|CAP92398.1| Pc13g13290 [Penicillium chrysogenum Wisconsin 54-1255]
  misc_feature (16)..(694): NCBI GI: 189205729 Blast Desc: succinyl-CoA ligase subunit alpha [Pyrenophora tritici-repentis Pt-1C-BFP] gi|187975292|gb|EDU41918.1| succinyl-CoA ligase subunit alpha [Pyrenophora tritici-repentis
  misc_feature (35)..(693): NCBI GI: 261203545 Blast Desc: succinyl-CoA ligase alpha-chain [Ajellomyces dermatitidis SLH14081] gi|239586771|gb|EEQ69414.1| succinyl-CoA ligase alpha-chain [Ajellomyces dermatitidis SLH14081] ligase
  misc_feature (13)..(693): NCBI GI: 121701827 Blast Desc: CoA-ligase, [Aspergillus clavatus NRRL 1] gi|119397321|gb|EAW07752.1| CoA-ligase, [Aspergillus clavatus NRRL 1]
  misc_feature (16)..(694): NCBI GI: 240109803 Blast Desc: succinyl-CoA synthetase beta chain, [Coccidioides posadasii C735 delta SOWgp]
  misc_feature (56)..(693): NCBI GI: 119495818 Blast Desc: CoA-ligase, [Neosartorya fischeri NRRL 181] gi|119412848|gb|EAW22789.1| CoA-ligase, [Neosartorya fischeri NRRL 181]
  misc_feature (14)..(693): NCBI GI: 242768237 Blast Desc: succinyl-CoA synthetase subunit alpha, [Talaromyces stipitatus ATCC 10500] gi|218724723|gb|EED24140.1| succinyl-CoA synthetase subunit alpha, [Talaromyces stipitatus ATCC 10500]
MIRGNRNRCLTGKLPRYASRTTNRRSFGNTTSRLNYDSTLKNLKIGSHTRVIFQGFTGKQATANAQESIKWGTNIVGGVTPGRTGEHLGLPVLPSVRKAMEVLKPDATGIYVAAHQATIAIKEAIEAEVPLIVVVAEHIPLHDFITIHSMLKTQSVSRLVGANSPGIISAVAKCRIGFQPLPCFKPGRIGIVARSGTLSYETAASTLRSELGQSLCIGVGGDILPGTSLKDGLKILTEDKDTEAIALVGEIGGEAEMEAAAFIKEYNSREKNPKPIAAIIGGRHTVPGRIFGHAGAFTLPGEPSAQDKIEALQLAGATIVSHPSRFGPTLKTMLTGSTPSGHGIGAPRSSSPTQQRKIHTAARRPVTMSHTHVKIAQKRSIYLTQSTAFDLLTHRSIPISEETTANLKKRLLAITVDRSTNTPCVVVSPTLDGDSNQIRRFDYPYNTGAADLDFNAIASYIGLDANNVEIISSLRTIINELVILFAENEAFLLETHLISPGEDSPIAVAAARFGFDDAAHRSGKRQADIQALRDTSVEDPAEFGVEKDGIVYIKLPNGQGENEVANIGTLVNGAGLAMNTVDALADAGGRAANFLDTGGKATSETVKKSFEVILKDPRVKCIFVNIFGGLTLGDMIARGVVLAFSELHMSVPVVVRIKGTNEKEGQRIIEDSGLPLFAFDDFDEAAAKAIELANQR

SEQ ID NO: 16230 - DNA, 2697 bp, Muscodor strobelii
  misc_feature: SGI EST ID NO. CUFF.38383.0
  misc_feature: Variant of the nucleotide sequence at SEQ ID NO 16228
ggctggtgtgggcctccgacctaaaggtcgccccgaacttacttagtaaaacaatcacctacatcatcagctacaagcctggatctagcttttcaagcattgctatttcagatatcctcaattgtcccacagtatatgaaatgtcatgaacaagtgcggtatatccattatcctcataagatgatacgaggaaataggaaccgttgcctcactggcaagctgccgaggtacgccagtcgtaccactaatcggcggagctttggtaacacaacgtcacgtcttaactacgactcaacacttaagaacttaaagattggaagccatacacgagtgatattccagggctttacaggaaaacaagcaacggcaaacgcgcaagagtcaatcaaatggggcacaaatatcgttggtggtgtgacgccgggccgcacaggcgagcatcttggtctaccagttttaccttcagttcgaaaggccatggaagttctcaagccagatgccacaggcatatacgttgcagcccaccaggccactattgccattaaagaagcgattgaagctgaagtgcctttaatagttgttgtagcagagcacataccattacatgacttcattacgattcattccatgttgaaaactcaatctgtatccagacttgttggtgcaaactcgccagggataatatcagccgtagcaaagtgcagaatagggtttcaaccactaccatgcttcaaacctggacgtattggtatcgtggcaagatcaggtaccctaagctatgagactgcggcgtcaactctcagatctgaattaggtcaaagtctttgtatcggcgttggtggtgatattttgccagggacgtctctcaaagatggtcttaagattctcacagaggataaagataccgaagccattgcccttgtcggtgaaattggaggagaagctgagatggaggccgcggctttcattaaggaatacaattcgagagaaaagaacccgaagcctattgctgccattattggtggcaggcatacggtaccgggccgaatttttggacacgctggtgccttcactctccccggtgaaccatccgcgcaagataaaatcgaggctctacagcttgccggagccacaattgttagccacccatctcggtttggcccaacattaaaaacaatgctaacggggtcgacgccttccggccacggcataggcgcaccacgctcgtcgtcacccactcagcagagaaagatccacacagccgctcgaagaccagtgacaatgtcgcacacacatgtcaagattgcgcagaaaagatcaatatatttaacacagtctacagctttcgacctgctaacgcataggtcaataccaatatctgaagagacgacagctaatcttaaaaaacgtcttcttgcaataaccgtggatcgttcgaccaataccccttgtgtcgttgtatctccgactcttgatggagacagtaatcagatcaggagattcgactacccatacaatactggagcagctgacctcgactttaacgccatagcatcgtatatcggtcttgacgcaaacaatgtagagattatttcttcgctccgtaccataattaacgagctagtaattctcttcgcagagaatgaggcatttctcctcgagacgcatttaatctcccctggtgaggactcgccgatagccgtagcagctgctcgcttcggtttcgatgatgcagctcaccgaagtggcaagagacaagcggacatccaggctcttcgagatacaagcgttgaggatcccgctgagtttggtgtggagaaagatggtatagtctacattaagcttcctaatggccaaggagaaaacgaagttgccaatatcgggacccttgtcaacggcgccggtcttgcgatgaatacagttgatgcattggcagacgccggtgggcgagctgcaaatttcttggataccggcggcaaagcgactagtgaaacagtcaagaaaagcttcgaggtcattttaaaagatcctagagtcaaatgcattttcgtcaatatattcggcggactcacacttggcgatatgattgcgcgaggtgtcgtgctcgcctttagcgagttgcatatgagtgttcctgttgtcgtccgaattaaggggacgaatgagaaagaaggccaacgcattatcgaagatagtggacttccgctgtttgctttcgatgactttgacgaggcggcagcgaaagcgattgagctagccaaccaaaggtgatgttgccttcttcatggtccacatctctcagctaaggaccgaagccgagagagtataccatttcgttacgcgaaactagcagtcggtgttcctttacgatcatctatcgtatgccatgtcattgactgcagaggtttagcttagagaaatcgatataagaattagaatttgtttgttaactcgaattgttatcctgatgtattaagttcttgtgtgcagaaaattggaagatgttccatgcttctagactttcgtaacggcccacagccctcttaagttgaggaacttctctttgatcgttgaggcacgactggcatgacgttgtagccgatctgagggcacaacgccatcgtctcttatcgcttgctctcgctctgctttattcagatgcgctcgttctaactccaagactttccacgcgcgcag

SEQ ID NO: 16231 - DNA, 1467 bp, Muscodor strobelii
  misc_feature: SGI cDNA ID NO. 565392
  misc_feature: Reduced expression when VOC is produced
  misc_feature: Encodes the peptide sequence at SEQ ID NO 16232
atgtccgagacggagaagggtcttggagggcccagtctaaacttagacccggcctcttcaacgaccgagagccctgcgccagaacgagatgaaccaccatctcaacaacatcaagaagaacttccagaaggaggatatggctgggttgtggttgtcgctgttttcttcctgaacgcacatacatgggggttgaatttagctgcattcgctatcttcctcgcacactacttgaagacgaatacttttgataccacacccttgggatatgcatttgtgggaggactttccatctctattgctttcactgcctcgcctctggcgacatggctggtaggttggagacatggcggtacgcggcgaaccatctttcttggcgtgatatttgaatcatcaggctttatagcttcctcatttgcgtctaagttatggcacatcatcctgacccaaggcgtgctattcggcctcggcctcggcctttgtttcgtagcgtcatcagcctgtacgccgcaatggtttaagaagcggcgctcattcgcaactgcaatcacgaccgcaggaacaggtttcggcggcttgctatactctttggcgactaatgccatgatccgaaatattggactctcgtggacgttcagaacactgggcattatctgctttgtagtgaacggcatagccagttacttcatcagagatcggaatgcggctgtgggctcggtcatcgtagctctcgactggaggctattcaaacgcccgccgttcattctgtttgagctctacatgattttctcccttattgcctatatcgttcttgtcttcagtatcgttgcctacggccaagctgttggactttctgatacgcaatcgtcactggtcggcgcattatttagcttggctcagggaatcggacgtcctgccgtcggcctctctagcgaccacgctggcaggctcaatgttgccatgttttccacgctttgggctggtatcctctgtttgctcgtgtggacctttggagcccgtacatatactggctgtatcgtatttgcgctgcttagtggaacgaccggtggtacactgtgggcaactgtctcccctatctgtgctgaagtagtaggattgaagatgatcccttccgctttatcggtgacatgggttgctttgatcttaccctctaccttcgccgaggccattggtctaagcttacggaagcctggcagctggggatatctagatgtgcagctgtttactgggtttctgtacattggagcgtttgtatttggttggatgctgcgcgcgtggaaagtcttggagttagaacgagcgcatctgaataaagcagagcgagagcaagcgataagagacgatggcgttgtgccctcagatcggctacaacgtcatgccagtcgtgcctcaacgatcaaagagaagttcctcaacttaagagggctgtgggccgttacgaaagtctag

SEQ ID NO: 16232 - protein, 488 aa, Muscodor strobelii
  misc_feature: SGI Peptide ID NO. 565392
  misc_feature (51)..(394): Pfam Id: PF07690 Pfam Desc: Major Facilitator Superfamily
  misc_feature (51)..(381): Pfam Id: PF07690 Pfam Desc: Major Facilitator Superfamily
  misc_feature (14)..(480): NCBI GI: 261360667 Blast Desc: Esbp6p [Verticillium albo-atrum VaMs.102]
  misc_feature (7)..(438): NCBI GI: 171687989 Blast Desc: protein product [Podospora anserina] gi|170943956|emb|CAP69608.1| protein product [Podospora anserina]
  misc_feature (4)..(486): NCBI GI: 145615653 Blast Desc: MGG_05739 [Magnaporthe grisea 70-15] gi|145022444|gb|EDK06464.1| MGG_05739 [Magnaporthe grisea 70-15]
  misc_feature (16)..(465): NCBI GI: 85111719 Blast Desc: NCU09811 [Neurospora crassa OR74A] gi|28925834|gb|EAA34835.1| [Neurospora crassa OR74A]
  misc_feature (3)..(477): NCBI GI: 189189900 Blast Desc: conserved [Pyrenophora tritici-repentis Pt-1C-BFP] gi|187972895|gb|EDU40394.1| conserved [Pyrenophora tritici-repentis Pt-1C-BFP]
  misc_feature (14)..(476): NCBI GI: 145229739 Blast Desc: An01g07530 [Aspergillus niger] gi|134055288|emb|CAK96178.1| protein product [Aspergillus niger]
  misc_feature (2)..(464): NCBI GI: 169623470 Blast Desc: SNOG_14978 [Phaeosphaeria nodorum SN15] gi|111056401|gb|EAT77521.1| SNOG_14978 [Phaeosphaeria nodorum SN15]
  misc_feature (22)..(454): NCBI GI: 156053061 Blast Desc: SS1G_06698 [Sclerotinia sclerotiorum 1980] gi|154704476|gb|EDO04215.1| SS1G_06698 [Sclerotinia sclerotiorum 1980]
  misc_feature (30)..(456): NCBI GI: 169764841 Blast Desc: [Aspergillus oryzae RIB40] gi|83764746|dbj|BAE54890.1| protein product [Aspergillus oryzae]
  misc_feature (30)..(456): NCBI GI: 238503892 Blast Desc: MFS transporter (Mch2), [Aspergillus flavus NRRL3357] gi|220690649|gb|EED46998.1| MFS transporter (Mch2), [Aspergillus flavus NRRL3357]
  misc_feature: Useful for introducing or modulating the production of volatile compounds
MSETEKGLGGPSLNLDPASSTTESPAPERDEPPSQQHQEELPEGGYGWVVVVAVFFLNAHTWGLNLAAFAIFLAHYLKTNTFDTTPLGYAFVGGLSISIAFTASPLATWLVGWRHGGTRRTIFLGVIFESSGFIASSFASKLWHIILTQGVLFGLGLGLCFVASSACTPQWFKKRRSFATAITTAGTGFGGLLYSLATNAMIRNIGLSWTFRTLGIICFVVNGIASYFIRDRNAAVGSVIVALDWRLFKRPPFILFELYMIFSLIAYIVLVFSIVAYGQAVGLSDTQSSLVGALFSLAQGIGRPAVGLSSDHAGRLNVAMFSTLWAGILCLLVWTFGARTYTGCIVFALLSGTTGGTLWATVSPICAEVVGLKMIPSALSVTWVALILPSTFAEAIGLSLRKPGSWGYLDVQLFTGFLYIGAFVFGWMLRAWKVLELERAHLNKAEREQAIRDDGVVPSDRLQRHASRASTIKEKFLNLRGLWAVTKV

SEQ ID NO: 16233 - DNA, 3228 bp, Muscodor strobelii
  misc_feature: SGI EST ID NO. CUFF.38384.1
  misc_feature: Variant of the nucleotide sequence at SEQ ID NO 16231
taggcattcgctatcttcctcgcacactacttgaagacgaatacttttgataccacacccttgggatatgcatttgtgggaggactttccatctctattgctttcactgcctcgcctctggcgacatggctggtaggttggagacatggcggtacgcggcgaaccatctttcttggcgtgatatttgaatcatcaggctttatagcttcctcatttgcgtctaagttatggcacatcatcctgacccaaggcgtgctattcggcctcggcctcggcctttgtttcgtagcgtcatcagcctgtacgccgcaatggtttaagaagcggcgctcattcgcaactgcaatcacgaccgcaggaacaggtttcggcggcttgctatactctttggcgactaatgccatgatccgaaatattggactctcgtggacgttcagaacactgggcattatctgctttgtagtgaacggcatagccagttacttcatcagagatcggaatgcggctgtgggctcggtcatcgtagctctcgactggaggctattcaaacgcccgccgttcattctgtttgagctctacatgattttctcccttattgcctatatcgttcttgtcttcagtatcgttgcctacggccaagctgttggactttctgatacgcaatcgtcactggtcggcgcattatttagcttggctcagggaatcggacgtcctgccgtcggcctctctagcgaccacgctggcaggctcaatgttgccatgttttccacgctttgggctggtatcctctgtttgctcgtgtggacctttggagcccgtacatatactggctgtatcgtatttgcgctgcttagtggaacgaccggtggtacactgtgggcaactgtctcccctatctgtgctgaagtagtaggattgaagatgatcccttccgctttatcggtgacatgggttgctttgatcttaccctctaccttcgccgaggccattggtctaagcttacggaagcctggcagctggggatatctagatgtgcagctgtttactgggtttctgtacattggagcgtttgtatttggttggatgctgcgcgcgtggaaagtcttggagttagaacgagcgcatctgaataaagcagagcgagagcaagcgataagagacgatggcgttgtgccctcagatcggctacaacgtcatgccagtcgtgcctcaacgatcaaagagaagttcctcaacttaagagggctgtgggccgttacgaaagtctagaagcatggaacatcttccaattttctgcacacaagaacttaatacatcaggataacaattcgagttaacaaacaaattctaattcttatatcgatttctctaagctaaacctctgcagtcaatgacatggcatacgatagatgatcgtaaaggaacaccgactgctagtttcgcgtaacgaaatggtatactctctcggcttcggtccttagctgagagatgtggaccatgaagaaggcaacatcacctttggttggctagctcaatcgctttcgctgccgcctcgtcaaagtcatcgaaagcaaacagcggaagtccactatcttcgataatgcgttggccttctttctcattcgtccccttaattcggacgacaacaggaacactcatatgcaactcgctaaaggcgagcacgacacctcgcgcaatcatatcgccaagtgtgagtccgccgaatatattgacgaaaatgcactatgaaaatcccatgttagtaatgcaattcgtcaatattttcgatttgggaaacttccgccgagatttaaataaaaagggatagtactttgactctaggatcttttaaaatgacctcgaagcttttcttgactgtttcactagtcgctttgccgccggtatccaagaaatttgcagctcgcccaccggcgtctgccaatgcatcaactgtattcatcgcaagaccggcgccgttgacaagggtcccgatattggcaacttcgttttctccttggccattaggaagcttaatgtagactataccatctttctccacaccaaactcagcgggatcctcaacgcttgtatctcgaagagcctggatgtccgcttgtctcttgccacttcggtgagctgcatcatcgaaaccgaagcgagcagctgctacggctatcggcgagtcctcaccaggggagattaaatgcgtctcgaggagaaatgcctcattctctgcgaagagaattactagctcgttaattatggtacggagcgaagaaataatctctacattgtttgcgtcaagaccgatatacgatgctatggcgttaaagtcgaggtcagctgctccagtattgtatgggtagtcgaatctcctgatctgattactgtctccatcaagagtcggagatacaacgacacaaggggtattggtcgaacgatccacggttattgcaagaagacgttttttaagattagctgtcgtctcttcagatattggtattgacctatgcgttagcaggtcgaaagctgtagactgtgttaaatatattgatcttttctgcgcaatcttgacatgtgtgtgcgacattgtcactggtcttcgagcggctgtgtggatctttctctgctgagtgggtgacgacgagcgtggtgcgcctatgccgtggccggaaggcgtcgaccccgttagcattgtttttaatgttgggccaaaccgagatgggtggctaacaattgtggctccggcaagctgtagagcctcgattttatcttgcgcggatggttcaccggggagagtgaaggcaccagcgtgtccaaaaattcggcccggtaccgtatgcctgccaccaataatggcagcaataggcctaagagttttcaataattagttgaggtttgctgataatatttgacgcgcaacactgacttcgggttcttttctctcgaattgtattccttaatgaaagccgcggcctccatctcagcttctcctccaatttcaccgacaagggcaatggcttcggtatctttatcctctgtgagaatcttaagaccatctttgagagacgtccctggcaaaatatcaccaccaacgccgatacaaagactttgacctaattcagatctgagagttgacgccgcagctatcgggatcggttagctgagtccgtatgttccgacgcaatagtcaagcttactctcatagcttagggtacctgatcttgc

SEQ ID NO: 16234 - DNA, 1149 bp, Muscodor strobelii
  misc_feature: SGI cDNA ID NO. 565393
  misc_feature: Encodes the peptide sequence at SEQ ID NO 16235
atgttgcagccgcggatactctcgctgacctcgtcgaggatattggcggccactcgatccaccaccgcgtccgcactctgccatcgatcctatgccacagctcaggcccagcggtctgttgcgccgccgacagactcggcgaaaccagctcccagcgctggcaaatcactgagagatacctcgtccttcctgcgcacatacaagcccatatcacccggtctgcgccatctcaagcgtcctatcaatgaccacctatggaggggcgggcctcatcgggctttgacattccccaagaagggtatggcgaagggtggccgtaacaatacgggcagaatcaccgtcaggcatcgtggtggtggtgtcaagaggaggataaggactgtcgacttccaccgctggctccccggcccccatactgtcgaacgcatcgagtacgaccccggccgcagcgcccacatcgctctccttaacgaggatgccaccgacaagaagacatatatcgtcgccgctgacggaatgagagctggcgatgtcgtacagagcttccgttctggcatccctcaagatcttatcgacagtatgggcggtatcgttgatcctggtgtgttagcggccaagaccgcgcatcggggcaactgcttgccgcttcatctgatccccgtgggtacgccagtgttcaacgtgggatcccatcccaagggaggtgccgtcttttgtcgtagtgctggcacatacgccatcgttgaaggcaaggacgaagagatgagagaggatggtgtcaaggtcgtcacaggaaaatatgttattgtgcgtcttcagagtggtgaagtcagaaaggtcagcaaagacgcgtgtgcaacgattggtgtttcgagcaatatctaccaccattaccgtcaacttggaaaggctggaagaagccgacgcttgaatatccgacccaccgtccgtggtgtggccatgaacaaagtcgaccatcctcatggtggtggtagaggtaaatcaaagggtaaccgaaaccctgtcagtccatggggtgtaccgaccaagggcggctacaagacccgcaagaagagtaatatcaataagtgggttgtcgttgcccgcccaagaaatcacggcaagcgacgaaacaagagcagttcttaa

SEQ ID NO: 16235 - protein, 382 aa, Muscodor strobelii
  misc_feature: SGI Peptide ID NO. 565393
  misc_feature (105)..(181): Pfam Id: PF00181 Pfam Desc: Ribosomal Proteins L2, RNA binding domain
  misc_feature (208)..(348): Pfam Id: PF03947 Pfam Desc: Ribosomal Proteins L2, C-terminal domain
  misc_feature (4)..(382): NCBI GI: 171680295 Blast Desc: protein product [Podospora anserina] gi|170939774|emb|CAP65000.1| protein product [Podospora anserina]
  misc_feature (61)..(381): NCBI GI: 256734332 Blast Desc: [Nectria haematococca mpVI 77-13-4]
  misc_feature (29)..(381): NCBI GI: 46108816 Blast Desc: FG01290.1 [Gibberella zeae PH-1]
  misc_feature (1)..(382): NCBI GI: 164427740 Blast Desc: 60S ribosomal protein L2, mitochondrial precursor [Neurospora crassa OR74A] gi|157071865|gb|EAA34614.2| 60S ribosomal protein L2, mitochondrial precursor [Neurospora crassa
  misc_feature (1)..(381): NCBI GI: 261356572 Blast Desc: 54S ribosomal protein RML2 [Verticillium albo-atrum VaMs.102]
  misc_feature (1)..(382): NCBI GI: 39941472 Blast Desc: MGG_05647 [Magnaporthe grisea 70-15] gi|145022335|gb|EDK06355.1| MGG_05647 [Magnaporthe grisea 70-15]
  misc_feature (1)..(379): NCBI GI: 156053171 Blast Desc: SS1G_06753 [Sclerotinia sclerotiorum 1980] gi|154704531|gb|EDO04270.1| SS1G_06753 [Sclerotinia sclerotiorum 1980]
  misc_feature (1)..(379): NCBI GI: 154318237 Blast Desc: BC1G_03286 [Botryotinia fuckeliana B05.10] gi|150842809|gb|EDN18002.1| BC1G_03286 [Botryotinia fuckeliana B05.10]
  misc_feature (1)..(377): NCBI GI: 169608079 Blast Desc: SNOG_07106 [Phaeosphaeria nodorum SN15] gi|111064637|gb|EAT85757.1| SNOG_07106 [Phaeosphaeria nodorum SN15]
  misc_feature (1)..(379): NCBI GI: 189189572 Blast Desc: 50S ribosomal protein L2 [Pyrenophora tritici-repentis Pt-1C-BFP] gi|187972731|gb|EDU40230.1| 50S ribosomal protein L2 [Pyrenophora tritici-repentis Pt-1C-BFP]
MLQPRILSLTSSRILAATRSTTASALCHRSYATAQAQRSVAPPTDSAKPAPSAGKSLRDTSSFLRTYKPISPGLRHLKRPINDHLWRGGPHRALTFPKKGMAKGGRNNTGRITVRHRGGGVKRRIRTVDFHRWLPGPHTVERIEYDPGRSAHIALLNEDATDKKTYIVAADGMRAGDVVQSFRSGIPQDLIDSMGGIVDPGVLAAKTAHRGNCLPLHLIPVGTPVFNVGSHPKGGAVFCRSAGTYAIVEGKDEEMREDGVKVVTGKYVIVRLQSGEVRKVSKDACATIGVSSNIYHHYRQLGKAGRSRRLNIRPTVRGVAMNKVDHPHGGGRGKSKGNRNPVSPWGVPTKGGYKTRKKSNINKWVVVARPRNHGKRRNKSSS

SEQ ID NO: 16236 - DNA, 1813 bp, Muscodor strobelii
  misc_feature: SGI EST ID NO. CUFF.38330.0
  misc_feature: Variant of the nucleotide sequence at SEQ ID NO 16234
catcaatcttattagaactgcacgatgattccatggcggaagtccccttgacgcgcaagtggcttgactctttgcttgagcctcattcttggacaatactagagcatagacttgaggcgtgtgatggttgaccggataaaacccggcccggccttatgtacgatagagttgtagccatttccagatactgccaagacctcgagccgggcctaacctaattcaagggtagccaagctcgaacagcagaaactttgattctgaggatagcttcaatgtcaagattttagatgcagggtcgaaacgaccattttgtaacgaccacacggcacaacggtatcggcacaggctccaccgtgcttcattggcctcaattggtatctgggcggacttggtgacaggccgatatagtcatcatgttgcagccgcggatactctcgctgacctcgtcgaggatattggcggccactcgatccaccaccgcgtccgcactctgccatcgatcctatgccacagctcaggcccagcggtctgttgcgccgccgacagactcggcgaaaccagctcccagcgctggcaaatcactgagagatacctcgtccttcctgcgcacatacaagcccatatcacccggtctgcgccatctcaagcgtcctatcaatgaccacctatggaggggcgggcctcatcgggctttgacattccccaagaagggtatggcgaagggtggccgtaacaatacgggcagaatcaccgtcaggcatcgtggtggtggtgtcaagaggaggataaggactgtcgacttccaccgctggctccccggcccccatactgtcgaacgcatcgagtacgaccccggccgcagcgcccacatcgctctccttaacgaggatgccaccgacaagaagacatatatcgtcgccgctgacggaatgagagctggcgatgtcgtacagagcttccgttctggcatccctcaagatcttatcgacagtatgggcggtatcgttgatcctggtgtgttagcggccaagaccgcgcatcggggcaactgcttgccgcttcatctgatccccgtgggtacgccagtgttcaacgtgggatcccatcccaagggaggtgccgtcttttgtcgtagtgctggcacatacgccatcgttgaaggcaaggacgaagagatgagagaggatggtgtcaaggtcgtcacaggaaaatatgttattgtgcgtcttcagagtggtgaagtcagaaaggtcagcaaagacgcgtgtgcaacgattggtgtttcgagcaatatctaccaccattaccgtcaacttggaaaggctggaagaagccgacgcttgaatatccgacccaccgtccgtggtgtggccatgaacaaagtcgaccatcctcatggtggtggtagaggtaaatcaaagggtaaccgaaaccctgtcagtccatggggtgtaccgaccaagggcggctacaagacccgcaagaagagtaatatcaataagtgggttgtcgttgcccgcccaagaaatcacggcaagcgacgaaacaagagcagttcttaagcaatccacgaactctgtatatactactcgcatgtatcatctactctctggctatttataccgaggcctgtgtatagacatgtataacaatgaaatgcaacttgacaacgacgtggttgtcaagtgcttagacgttcaaattctcagaacatattgctctcttgatcataactcatcttcagtgcgcgaactcgatgagacatcatgaccatacgtaccccctgagaccattccgtctttgaatacgcaaa

SEQ ID NO: 16237 - DNA, 1485 bp, Muscodor strobelii
  misc_feature: SGI cDNA ID NO. 565394
  misc_feature: Encodes the peptide sequence at SEQ ID NO 16238
atgccgcctgctgcccgtaccgccagggctcgcgtagcaaacgagaacgatgagaacagcaattccacgcgtctgacgcgcgcgaaggccgctgctctcgatgtcgatgtcctcgctcagcccgccaaacagccactgcagtccaagaagtccgggctgaatgctaacacagccgccacgcgccggcgcgcccttggtgacgttagcaatgtcagcaagaccgatgccgtcgagggaaagaaggtccagggcaaggtcggcctagtatcaaaggcggcacagcctactggcgttcagaagaacacgcgcaccaccgccgcaacacggactgtcctcggtgccaaggagacgaaaaagacagaggtgaagcgcgctggatcgggctcgggcgccattgccgcaggtgccgcatcccagaagcggaagatgactaccacgtccatcaagccagatccgattgctgaggagaacgagccggttcgcaagaagcgcgacactgccgagaagaagcatgagcgcaccgagtctaaggtgccaaagccaagagaagtcgttgaggtgcagcccgaggtgtacggggacgtggatttcccgcagcgcgtggagcatgtgttcccggaggacgtgaaggatttggacagcgaggacctggaagatccattcatggctgccgagtatgctaacgacatcttcgagtacctgcgtgatctcgaggtcaagtcgatccccaaccctgcctacatggaccaccaggatgacatcgaatggcgcacgcggggcattctcatcgactggctgatcgaggtgcacacgcgcttccacctgcttcccgagactctgttcctcgccatcaacatcatcgaccgtttcctgtccaagaaggtcgtacagttggaccgcttacaattggtcggtattaccgccatgttcatcgcatccaagtatgaggaagtcctttcgccgcacgttggaaatttcaagcacgtcgcggatgatgggttcacggaggaagagattctcagcgccgagcgcttcatcctctcaaccttgaattatgatttgagctaccctaaccctatgaactttcttcgccgcatctccaaggcggacaactacaacattcagactcgtaccattggtaaatacctgaccgagatcagcctcctggaccaccgctttatgagctatcgccctagccatgttgccgctgccgccatgtaccttgctcgtctcatcttcgactgtggcccatgggatcctacaattgcatactacgccggtttcactgaggaagagatcgagcctgtctttgagctcatggttgactatctcgcccggccagtaattcacgaagccttcttcaagaagtatgctagcaagaagtttatgaaggcctcaattcacacgcgcgaatgggccaagaagcatgccaagctctttggcattgtagacacgaaacaatctcttgatgaaattacgtcgtaa

SEQ ID NO: 16238 - protein, 494 aa, Muscodor strobelii
  misc_feature: SGI Peptide ID NO. 565394
  misc_feature (357)..(475): Pfam Id: PF02984 Pfam Desc: Cyclin, C-terminal domain
  misc_feature (229)..(355): Pfam Id: PF00134 Pfam Desc: Cyclin, N-terminal domain
  misc_feature (3)..(493): NCBI GI: 116206914 Blast Desc: CHGG_02750 [Chaetomium globosum CBS 148.51] gi|88183347|gb|EAQ90815.1| CHGG_02750 [Chaetomium globosum CBS 148.51]
  misc_feature (3)..(493): NCBI GI: 46108818 Blast Desc: FG01291.1 [Gibberella zeae PH-1]
  misc_feature (3)..(492): NCBI GI: 85111257 Blast Desc: G2/mitotic-specific cyclin-B [Neurospora crassa OR74A] gi|28925592|gb|EAA34615.1| G2/mitotic-specific cyclin-B [Neurospora crassa OR74A]
  misc_feature (1)..(490): NCBI GI: 156053169 Blast Desc: SS1G_06752 [Sclerotinia sclerotiorum 1980] gi|154704530|gb|EDO04269.1| SS1G_06752 [Sclerotinia sclerotiorum 1980]
  misc_feature (1)..(490): NCBI GI: 154318239 Blast Desc: BC1G_03287 [Botryotinia fuckeliana B05.10] gi|150842810|gb|EDN18003.1| BC1G_03287 [Botryotinia fuckeliana B05.10]
  misc_feature (12)..(493): NCBI GI: 171680297 Blast Desc: protein product [Podospora anserina] gi|170939775|emb|CAP65001.1| protein product [Podospora anserina]
  misc_feature (1)..(480): NCBI GI: 259481818 Blast Desc: TPA: G2/mitotic-specific cyclin-B [Source:UniProtKB/Swiss-Prot;Acc:P30284] [Aspergillus nidulans FGSC A4]
  misc_feature (14)..(480): NCBI GI: 67526381 Blast Desc: CG21_EMENI G2/mitotic-specific cyclin B [Aspergillus nidulans FGSC A4] gi|232152|sp|P30284.1|CG21_EMENI RecName: Full=G2/mitotic-specific cyclin-B gi|2706|emb|CAA45886.1| cyclin
  misc_feature (1)..(481): NCBI GI: 189189570 Blast Desc: G2/mitotic-specific cyclin CYB1 [Pyrenophora tritici-repentis Pt-1C-BFP] gi|187972730|gb|EDU40229.1| G2/mitotic-specific cyclin CYB1 [Pyrenophora tritici-repentis
  misc_feature (1)..(488): NCBI GI: 239613461 Blast Desc: nime/cyclinb [Ajellomyces dermatitidis ER-3]
MPPAARTARARVANENDENSNSTRLTRAKAAALDVDVLAQPAKQPLQSKKSGLNANTAATRRRALGDVSNVSKTDAVEGKKVQGKVGLVSKAAQPTGVQKNTRTTAATRTVLGAKETKKTEVKRAGSGSGAIAAGAASQKRKMTTTSIKPDPIAEENEPVRKKRDTAEKKHERTESKVPKPREVVEVQPEVYGDVDFPQRVEHVFPEDVKDLDSEDLEDPFMAAEYANDIFEYLRDLEVKSIPNPAYMDHQDDIEWRTRGILIDWLIEVHTRFHLLPETLFLAINIIDRFLSKKVVQLDRLQLVGITAMFIASKYEEVLSPHVGNFKHVADDGFTEEEILSAERFILSTLNYDLSYPNPMNFLRRISKADNYNIQTRTIGKYLTEISLLDHRFMSYRPSHVAAAAMYLARLIFDCGPWDPTIAYYAGFTEEEIEPVFELMVDYLARPVIHEAFFKKYASKKFMKASIHTREWAKKHAKLFGIVDTKQSLDEITS

SEQ ID NO: 16239 - DNA, 2489 bp, Muscodor strobelii
  misc_feature: SGI EST ID NO. CUFF.38341.0
  misc_feature: Variant of the nucleotide sequence at SEQ ID NO 16237
caacaacaaagcctaccatttctctccctcagtcctcaccacctccaatccccctcactgttcttcatactcttaatgccagcacttcaacaatattgagaagccattgtcttgttccgttctgcttctcttcgtcccacatcgaggctctcgcgtcgctttcgtctcatccgtctcccggcacgaactggccactgatgcttcgaagaacagcttgttgatatcgcttaataacagtaacaacaccacggaaaagacttgtccagcatttctcttccagcttaatattccatccaagtacgcgtccttgaaaccttcaaaatgccgcctgctgcccgtaccgccagggctcgcgtagcaaacgagaacgatgagaacagcaattccacgcgtctgacgcgcgcgaaggccgctgctctcgatgtcgatgtcctcgctcagcccgccaaacagccactgcagtccaagaagtccgggctgaatgctaacacagccgccacgcgccggcgcgcccttggtgacgttagcaatgtcagcaagaccgatgccgtcgagggaaagaaggtccagggcaaggtcggcctagtatcaaaggcggcacagcctactggcgttcagaagaacacgcgcaccaccgccgcaacacggactgtcctcggtgccaaggagacgaaaaagacagaggtgaagcgcgctggatcgggctcgggcgccattgccgcaggtgccgcatcccagaagcggaagatgactaccacgtccatcaagccagatccgattgctgaggagaacgagccggttcgcaagaagcgcgacactgccgagaagaagcatgagcgcaccgagtctaaggtgccaaagccaagagaagtcgttgaggtgcagcccgaggtgtacggggacgtggatttcccgcagcgcgtggagcatgtgttcccggaggacgtgaaggatttggacagcgaggacctggaagatccattcatggctgccgagtatgctaacgacatcttcgagtacctgcgtgatctcgaggtcaagtcgatccccaaccctgcctacatggaccaccaggatgacatcgaatggcgcacgcggggcattctcatcgactggctgatcgaggtgcacacgcgcttccacctgcttcccgagactctgttcctcgccatcaacatcatcgaccgtttcctgtccaagaaggtcgtacagttggaccgcttacaattggtcggtattaccgccatgttcatcgcatccaagtatgaggaagtcctttcgccgcacgttggaaatttcaagcacgtcgcggatgatgggttcacggaggaagagattctcagcgccgagcgcttcatcctctcaaccttgaattatgatttgagctaccctaaccctatgaactttcttcgccgcatctccaaggcggacaactacaacattcagactcgtaccattggtaaatacctgaccgagatcagcctcctggaccaccgctttatgagctatcgccctagccatgttgccgctgccgccatgtaccttgctcgtctcatcttcgactgtggcccatgggatcctacaattgcatactacgccggtttcactgaggaagagatcgagcctgtctttgagctcatggttgactatctcgcccggccagtaattcacgaagccttcttcaagaagtatgctagcaagaagtttatgaaggcctcaattcacacgcgcgaatgggccaagaagcatgccaagctctttggcattgtagacacgaaacaatctcttgatgaaattacgtcgtaaaatagaacgtcgatatcccacctttgtcgacaagtcttttcatggtatccctaccttgaaccgttgttcttcgtgttaggatacccagcttcgttggatggctctgtaacatctgcgactcgtatacttttgcatgtgtcagcttcccattgggttagtgctcggcaccccttccaaccgtcgcagtttggaagctagttgtgaacaattctgtcggagcatccttttcttgtgatggcctgtggtcgtcaatttctttatctgctgtttcgcgcatttcggcacatcacgcgtagtctgatcgttggcgaagcttggcatgtggcgtttggggtttgctttgggcgtaaggaatggtttctcgtttgatgacttacaagactacaatgcttaattgtcccatgtctgaaagaggtggtcggatggtgtatgatgggtcaaggcaggagagctgagggctagacttccagtcgccgcagcttcttccatggatgaggtggagccagacgggcatacttgttgtcggaatagaggaaaatgaggaaagcaacactgtacatacgctgctatgggcttccgctcagatcgtggattatgggaataagagacatgcatgactgaactttacacacgttaccattggtcctttgcttcctgagtatgaaatcgtgaggctaacaaga

SEQ ID NO: 16240 - DNA, 522 bp, Muscodor strobelii
  misc_feature: SGI cDNA ID NO. 565395
  misc_feature: Encodes the peptide sequence at SEQ ID NO 16241
atgccagcttctcaaacctcaaaacctccctctccctctccctctccaccccctgcccgggtccccctatccttctggttaatgaccggaggtcgagggccgcccccaaccatgaccggctaccggcgcatggcacacgagcgcaaagcagcctaccgagaagaacaagcccgcaaatccagcaaagcagcttcttcaaaagcccacgaggagaaacacggaccatccggtatcaaggcaatcatacagaaaattaaaggcaaaggaaagaaggagaagaaagagaaaaaggagaaaccgaaacgaaaggatcccaaggagaggtatgaacttacgagtcctatcggcgcaaaaaagagacgagaggaacacgaggaaaaggggaaagaagaggagaaagaaaaagaggaggagggagaagaggaagaggagaacgcagaggaagagcccgggaatgaggaagaagacgctgggaatgatgctaatggtgaggaagacgccgaggccgaggctgaggagtaa

SEQ ID NO: 16241 - protein, 173 aa, Muscodor strobelii
  misc_feature: SGI Peptide ID NO. 565395
MPASQTSKPPSPSPSPPPARVPLSFWLMTGGRGPPPTMTGYRRMAHERKAAYREEQARKSSKAASSKAHEEKHGPSGIKAIIQKIKGKGKKEKKEKKEKPKRKDPKERYELTSPIGAKKRREEHEEKGKEEEKEKEEEGEEEEENAEEEPGNEEEDAGNDANGEEDAEAEAEE

SEQ ID NO: 16242 - DNA, 933 bp, Muscodor strobelii
  misc_feature: SGI cDNA ID NO. 565396
  misc_feature: Encodes the peptide sequence at SEQ ID NO 16243
atgcttgaggacaaattcaagaactgtcctggggaggagcaagtgctgctgggagactaccgactgacggaccccaaccgctatgactcagctctctcaaaggagaactgggcgagcacagtggaacctggcgcggaagttgtcatgtctatactgatgaagtacatgagaggagtcaatggccgatgcgagcgagcaaactgcccgggggttcccgagcgcaagggcttgcggaaaactatttgtaacacctgcaaattagagatttactatccagaaagaccgtcaagagtagttgagcttgacacagctacagatgttaaaataaccgcagggacttcatcccatgatggaattctaaaaaatatggagccggcgaagccctttaagccctctttcggaccaatgccagtcgatcgcattcggaaggcaaaggcaaacgcaaaagctcaagccgaaaagtcgctcattaagacaatccgaagggaccggcgaatgccctcacataaatcgcgcgggaataacatcgataattttcgaagaatctacacggaggggccaatggagacgttcccgctcctcgtcgcaccggaacggatacgcaggtctgctactcgacaacgtgagaacaaaggggatatagcggcagtaaatttctgggctggagtcaatagaccgagaagcaaacgtctcgacgaggaatctaatcgggatgaaagaatccgaaaatggacacaggagcagaaacagccgccagcaggcgttctagccgagcagcccaccgctcgacgccctacaaacgcagagtcggcttctatcctctaccagagggatcttgccgcccagtacaacaagcttatatcacactatcctccatatcgggggacggacttcgtgtatagggaccgttatggtcggccagagtccccatag

SEQ ID NO: 16243 - protein, 310 aa, Muscodor strobelii
  misc_feature: SGI Peptide ID NO. 565396
  misc_feature (1)..(87): NCBI GI: 169596510 Blast Desc: SNOG_01020 [Phaeosphaeria nodorum SN15] gi|111071395|gb|EAT92515.1| SNOG_01020 [Phaeosphaeria nodorum SN15]
MLEDKFKNCPGEEQVLLGDYRLTDPNRYDSALSKENWASTVEPGAEVVMSILMKYMRGVNGRCERANCPGVPERKGLRKTICNTCKLEIYYPERPSRVVELDTATDVKITAGTSSHDGILKNMEPAKPFKPSFGPMPVDRIRKAKANAKAQAEKSLIKTIRRDRRMPSHKSRGNNIDNFRRIYTEGPMETFPLLVAPERIRRSATRQRENKGDIAAVNFWAGVNRPRSKRLDEESNRDERIRKWTQEQKQPPAGVLAEQPTARRPTNAESASILYQRDLAAQYNKLISHYPPYRGTDFVYRDRYGRPESP

SEQ ID NO: 16244 - DNA, 1897 bp, Muscodor strobelii
  misc_feature: SGI EST ID NO. CUFF.38351.0
  misc_feature: Variant of the nucleotide sequence at SEQ ID NO 16242
tccagccactagtcaagcgctcgtgtggccagtcggctcgtagcagagctcacgatagaccagacatgtcaggcttttcgattctagagcctccatggtcttctagcctagatccagatacgagaattgcagcctcaatatataaccggaggtatcagagtaatcatcgctcaaaatatcttgagccggtgtcccagcaaaatccggctgttgacaaattagctaggcctccttctgccgccatgaggagatctcgtggaaaagaaacgtcgacttccgatactgacttgtcatttgtctcctcgagcgaactgtttctatacaataaaatcagttccttctttcatcttcttcgagaccagtaagtatttgcagtcaatcccgacctcttacggtttttgtgtgaacctttgtttagtcttcgatctctacgattattcatcttatatgcattcctatacatacagtgagtacttcgcatcaagaaaaattcacatataacttagcacttgaaggtcttttttatcaaagatgatgttattcttaaacagcattgcccctcgagcaccactacaactaaacatcgtattcgaggatgttctgggcaggcgacaccttctacctttccaatacttcagaaactgggatacattccaatctatgcttgaggacaaattcaagaactgtcctggggaggagcaagtgctgctgggagactaccgactgacggaccccaaccgctatgactcagctctctcaaaggagaactgggcgagcacagtggaacctggcgcggaagttgtcatgtctatactgatgaagtacatgagaggagtcaatggccgatgcgagcgagcaaactgcccgggggttcccgagcgcaagggcttgcggaaaactatttgtaacacctgcaaattagagatttactatccagaaagaccgtcaagagtagttgagcttgacacagctacagatgttaaaataaccgcagggacttcatcccatgatggaattctaaaaaatatggagccggcgaagccctttaagccctctttcggaccaatgccagtcgatcgcattcggaaggcaaaggcaaacgcaaaagctcaagccgaaaagtcgctcattaagacaatccgaagggaccggcgaatgccctcacataaatcgcgcgggaataacatcgataattttcgaagaatctacacggaggggccaatggagacgttcccgctcctcgtcgcaccggaacggatacgcaggtctgctactcgacaacgtgagaacaaaggggatatagcggcagtaaatttctgggctggagtcaatagaccgagaagcaaacgtctcgacgaggaatctaatcgggatgaaagaatccgaaaatggacacaggagcagaaacagccgccagcaggcgttctagccgagcagcccaccgctcgacgccctacaaacgcagagtcggcttctatcctctaccagagggatcttgccgcccagtacaacaagcttatatcacactatcctccatatcgggggacggacttcgtgtatagggaccgttatggtcggccagagtccccatagaaggtgagggtacaatgtgtaatagaacattatgtagcgggcatgcaggcaaggattacggggtcttgtgcattgatggatacacgagacagctgagttgtcgagagattgcgtaccatgccgctgcatgacagatttcaatatacgagcaactaaataccaaactggaaaaagtcacaaaacatccgtccgtgtgtttgagctggctagcacatgagaatcggattggattctggaacacaagacgtcacctatttcagacaaccattatgaaattatgttattgtcgataagaatgtatcgc

SEQ ID NO: 16245 - DNA, 771 bp, Muscodor strobelii
  misc_feature: SGI cDNA ID NO. 565397
  misc_feature: Encodes the peptide sequence at SEQ ID NO 16246
atgcctacctcacgcttcaccagattgttcacccgaagatgcgccaagaagaacacaagtaccagctccattacatctctcggctccgcatcttctgaacactcagccaagcagtctctcgactatcttcgcacgcacatgcctccgccccttgggcaagtagatggatgcgatgaacgcaacgcccgagttgagggcttcagtagcgacagcgactatgaagacgttgatgagatggatgccgatctcgctgatagcgagctcctggatcccgcaccgaccgcccttccagaccctatggtcttcctaactccaacccaagacgatgagatctgctacccggcggcagagggctttatggaagtcatgcatgataagaccgacgacgaacatgatgcttacgtctctgattctgattggaccgaagtggctaagcccgattgcattgacgatgccaacgatgccgatggctacaatgccgatgccgacgaggtcaccaccaaatcattcactaccaaaagcgatcgcatcatgatgaccgaacacgatgcaaacaagaccgacactgatgaggcaatcactcaatcaagcattactgaagacaacaatgcaattatcaatggccgcgacacaaagaaggatcctgctaccatttgccatgtcaagggaactgatacaaacatgacctgccgcttccgaatccaccctcttttccgtgcgaaatacatggagaatgagttcttctccaagatggatctaaaatccgactga

SEQ ID NO: 16246 - protein, 256 aa, Muscodor strobelii
  misc_feature: SGI Peptide ID NO. 565397
MPTSRFTRLFTRRCAKKNTSTSSITSLGSASSEHSAKQSLDYLRTHMPPPLGQVDGCDERNARVEGFSSDSDYEDVDEMDADLADSELLDPAPTALPDPMVFLTPTQDDEICYPAAEGFMEVMHDKTDDEHDAYVSDSDWTEVAKPDCIDDANDADGYNADADEVTTKSFTTKSDRIMMTEHDANKTDTDEAITQSSITEDNNAIINGRDTKKDPATICHVKGTDTNMTCRFRIHPLFRAKYMENEFFSKMDLKSD

SEQ ID NO: 16247 - DNA, 1662 bp, Muscodor strobelii
  misc_feature: SGI cDNA ID NO. 565398
  misc_feature: Reduced expression when VOC is produced
  misc_feature: Encodes the peptide sequence at SEQ ID NO 16248
atggagcatcagaatgaatcaatcgaacctttcgaggaggagccgttcgatgacatccatcccggtctctcatctacacaggcaatcaacctgtacattagtcatgctttctcaacttggaatgcccggggctatgagttcgctgcaatcctcttcactgctggtgcttatccagatacactggtagcagctgctttgcgcatgataatcatctatattgctatgatcttcctctctagctctgttggtcaatgggtcgagcgctcacctaaccgactgcgaaccttactttcgacgatcatctgtaaccgaggatcagtcattctgggatctttcatctggcttttcattttgagtcaggagggcttagtcaccaatgagactacagcagacgaaacaccaagatatacgctcccacagaatgacatattgaaaggtgtggccttcgccatcgccatcacgtttgggatcatcgaacgactctctgcttctggaaacatgatctctatggagagagactgggtagtaaccgccgctgcaccgatagatgatctcacgaacttgaatgccgtgatgcggcgtatcgatcttgtctgcaaattgattgccccaattgctatatctattatcatttccgcggctggatctgttcgtgttggcgtgatctacacagcgctggctagcctcattagcatcccgattgaattgctttccgcaaaacgcgtctggaatgcatgtccagtccttcaagcccccaaacctgttgccgcaccgagccaggctcaagcacaaggcttggcgatgtctagttctacgttcatgagtagactatcattctggcagacacgcatgcgccagtacttccatggcttcgacagttatttcaggaccaccgtctgcgttccttcagtcgcacttgctcttttacacttcaatatgcttacttggagggcaacgtttatcacgtatctgatcaatgttggctattcactcaacgtcataacccttgcgcgcacaatcggttcaatctttgaaatcagtagtactattattactccatggggcattgtgtacctgggaaagagacgtcgccaaacactcgatgatcttcccgacgattcaaacgttggtttgcttcaaggtgaggaaacccatgatgccagcattagcgacgcagaaactgtggttggcctgcagcgtcttgggctgtggggaatgagctgccaactcatcaacacagtgcctgttgtgctcgccctctggattatttctaatcagcacagtcaagagacgaaggacggtgtagatagcttagtaaaaggcacaaaaactctcagcgttagctggagcatcatattattctcgttcctggcattttcgcgcctcggcgtttggatcttcgacctcacaacgcagcagctgacacagatgctcgtccccaagacagaaaggtcaagctttgccggtgttgagacctcagtcgtcaacattttcgaagttcttggcgctggagccgcaataagctttccccatgtttctcaataccgatggcttgcgctcgccagtttagtatctgtggttatcagctgggtcatgtacagtctatgggttcgtacgcagcggggtcatcttgttcactgggaaaagatcccacgtacttag

SEQ ID NO: 16248 - protein, 553 aa, Muscodor strobelii
  misc_feature: SGI Peptide ID NO. 565398
  misc_feature (18)..(548): NCBI GI: 156062114 Blast Desc: SS1G_01172 [Sclerotinia sclerotiorum 1980] gi|154696509|gb|EDN96247.1| SS1G_01172 [Sclerotinia sclerotiorum 1980]
  misc_feature (23)..(550): NCBI GI: 154297402 Blast Desc: BC1G_12105 [Botryotinia fuckeliana B05.10] gi|150858610|gb|EDN33802.1| BC1G_12105 [Botryotinia fuckeliana B05.10]
  misc_feature (1)..(549): NCBI GI: 238506427 Blast Desc: iron-regulated transporter, [Aspergillus flavus NRRL3357] gi|220689128|gb|EED45479.1| iron-regulated transporter, [Aspergillus flavus NRRL3357]
  misc_feature (1)..(549): NCBI GI: 169785431 Blast Desc: [Aspergillus oryzae RIB40] gi|83775924|dbj|BAE66043.1| protein product [Aspergillus oryzae]
  misc_feature (2)..(552): NCBI GI: 212534148 Blast Desc: iron-regulated transporter, [Penicillium marneffei ATCC 18224] gi|210069629|gb|EEA23719.1| iron-regulated transporter, [Penicillium marneffei ATCC 18224]
  misc_feature (31)..(547): NCBI GI: 256726903 Blast Desc: NECHADRAFT_4298 [Nectria haematococca mpVI 77-13-4]
  misc_feature (30)..(501): NCBI GI: 169622069 Blast Desc: SNOG_14249 [Phaeosphaeria nodorum SN15] gi|160704689|gb|EAT78486.2| SNOG_14249 [Phaeosphaeria nodorum SN15]
  misc_feature (2)..(476): NCBI GI: 242789427 Blast Desc: iron-regulated transporter, [Talaromyces stipitatus ATCC 10500] gi|218717945|gb|EED17365.1| iron-regulated transporter, [Talaromyces stipitatus ATCC 10500]
  misc_feature (22)..(546): NCBI GI: 164423277 Blast Desc: NCU08804 [Neurospora crassa OR74A] gi|157070024|gb|EAA32755.2| conserved [Neurospora crassa OR74A]
  misc_feature (13)..(363): NCBI GI: 261356249 Blast Desc: conserved [Verticillium albo-atrum VaMs.102]
  misc_feature: Useful for introducing or modulating the production of volatile compounds
MEHQNESIEPFEEEPFDDIHPGLSSTQAINLYISHAFSTWNARGYEFAAILFTAGAYPDTLVAAALRMIIIYIAMIFLSSSVGQWVERSPNRLRTLLSTIICNRGSVILGSFIWLFILSQEGLVTNETTADETPRYTLPQNDILKGVAFAIAITFGIIERLSASGNMISMERDWVVTAAAPIDDLTNLNAVMRRIDLVCKLIAPIAISIIISAAGSVRVGVIYTALASLISIPIELLSAKRVWNACPVLQAPKPVAAPSQAQAQGLAMSSSTFMSRLSFWQTRMRQYFHGFDSYFRTTVCVPSVALALLHFNMLTWRATFITYLINVGYSLNVITLARTIGSIFEISSTIITPWGIVYLGKRRRQTLDDLPDDSNVGLLQGEETHDASISDAETVVGLQRLGLWGMSCQLINTVPVVLALWIISNQHSQETKDGVDSLVKGTKTLSVSWSIILFSFLAFSRLGVWIFDLTTQQLTQMLVPKTERSSFAGVETSVVNIFEVLGAGAAISFPHVSQYRWLALASLVSVVISWVMYSLWVRTQRGHLVHWEKIPRT

SEQ ID NO: 16249 - DNA, 2254 bp, Muscodor strobelii
  misc_feature: SGI EST ID NO. CUFF.38391.3
  misc_feature: Variant of the nucleotide sequence at SEQ ID NO 16247
ccgtccgctagcgaaactcaacaccaatttcctctagtgatcctttgaccaaataaatgggaattctaaacttgttccatacatatcatattcgctttcaaatatcacaatattgtttgacacctctacgcacagcgtggaccttgtacgatcccaatggagcatcagaatgaatcaatcgaacctttcgaggaggagccgttcgatgacatccatcccggtctctcatctacacaggcaatcaacctgtacattagtcatgctttctcaacttggaatgcccggggctatgagttcgctgcaatcctcttcactgctggtgcttatccagatacactggtagcagctgctttgcggtaaggtccttcgtttcgtaggtttcgagctacttttcgcggaatagatcatatgcagtgcaatattctcttggattttgacatgaaaatcacagcatgataatcatctatattgctatgatcttcctctctagctctgttggtcaatgggtcgagcgctcacctaaccgactgcgaaccttactttcgacggtacgtgcgaaaatgctcgctccgttctcaatatcgagtcttaccggaaacaataccatataattgggtatgcactgttgcttgacgaagtggaataacattcgaacgtatgcagatcatctgtaaccgaggatcagtcattctgggatctttcatctggcttttcattttgagtcaggagggcttagtcaccaatgagactacagcagacgaaacaccaagatatacgctcccacagaatgacatattgaaaggtgtggccttcgccatcgccatcacgtttgggatcatcgaacgactctctgcttctggaaacatgatctctatggagagagactgggtagtaaccgccgctgcaccgataggtagaccgtgtatgtcgccttcttttcttgatacgatgaaactaaatctttgcggaattatcgtcattgccagactattcagggcagctaatttgacgtgttttgtccttcagatgatctcacgaacttgaatgccgtgatgcggcgtatcgatcttgtctgcaaattgattgccccaattgctatatctattatcatttccgcggctggatctgttcgtgttggcgtgatctacacagcgctggctagcctcattagcatcccgattgaattgctttccgcaaaacgcgtctggaatgcatgtccagtccttcaagcccccaaacctgttgccgcaccgagccaggctcaagcacaaggcttggcgatgtctagttctacgttcatgagtagactatcattctggcagacacgcatgcgccagtacttccatggcttcgacagttatttcaggaccaccgtctgcgttccttcagtcgcacttgctcttttacacttcaatatgcttacttggagggcaacgtttatcacgtatctgatcaatgttggctattcactcaacgtcataacccttgcgcgcacaatcggttcaatctttgaaatcagtagtactattattactccatggggcattgtgtacctgggaaagagacgtcgccaaacactcgatgatcttcccgacgattcaaacgttggtttgcttcaaggtgaggaaacccatgatgccagcattagcgacgcagaaactgtggttggcctgcagcgtcttgggctgtggggaatgagctgccaactcatcaacacagtgcctgttgtgctcgccctctggattatttctaatcagcacagtcaagagacgaaggacggtgtagatagcttagtaaaaggcacaaaaactctcagcgttagctggagcatcatattattctcgttcctggcattttcgcgcctcggcgtttggatcttcgacctcacaacgcagcagctgacacagatgctcgtccccaagacagaaaggtcaagctttgccggtgttgagacctcagtcgtcaacattttcgaagttcttggcgctggagccgcaataagctttccccatgtttctcaataccgatggcttgcgctcgccagtttagtatctgtggttatcagctgggtcatgtacagtctatgggttcgtacgcagcggggtcatcttgttcactgggaaaagatcccacgtacttaggtgaagaagcaagaggcacttgacagagtacgaaatgagaagactgaatatcatttaatacagcgttgaatcaacaaaattcctttttgccgacattctgaagtacctaggca

SEQ ID NO: 16250 - DNA, 1680 bp, Muscodor strobelii
  misc_feature: SGI cDNA ID NO. 565399
  misc_feature: Encodes the peptide sequence at SEQ ID NO 16251
atggagcatcagaatgaatcaatcgaacctttcgaggaggagccgttcgatgacatccatcccggtctctcatctacacaggcaatcaacctgtacattagtcatgctttctcaacttggaatgcccggggctatgagttcgctgcaatcctcttcactgctggtgcttatccagatacactggtagcagctgctttgcgcatgataatcatctatattgctatgatcttcctctctagctctgttggtcaatgggtcgagcgctcacctaaccgactgcgaaccttactttcgacgatcatctgtaaccgaggatcagtcattctgggatctttcatctggcttttcattttgagtcaggagggcttagtcaccaatgagactacagcagacgaaacaccaagatatacgctcccacagaatgacatattgaaaggtgtggccttcgccatcgccatcacgtttgggatcatcgaacgactctctgcttctggaaacatgatctctatggagagagactgggtagtaaccgccgctgcaccgatagttactgactgcttcaataatgatctcacgaacttgaatgccgtgatgcggcgtatcgatcttgtctgcaaattgattgccccaattgctatatctattatcatttccgcggctggatctgttcgtgttggcgtgatctacacagcgctggctagcctcattagcatcccgattgaattgctttccgcaaaacgcgtctggaatgcatgtccagtccttcaagcccccaaacctgttgccgcaccgagccaggctcaagcacaaggcttggcgatgtctagttctacgttcatgagtagactatcattctggcagacacgcatgcgccagtacttccatggcttcgacagttatttcaggaccaccgtctgcgttccttcagtcgcacttgctcttttacacttcaatatgcttacttggagggcaacgtttatcacgtatctgatcaatgttggctattcactcaacgtcataacccttgcgcgcacaatcggttcaatctttgaaatcagtagtactattattactccatggggcattgtgtacctgggaaagagacgtcgccaaacactcgatgatcttcccgacgattcaaacgttggtttgcttcaaggtgaggaaacccatgatgccagcattagcgacgcagaaactgtggttggcctgcagcgtcttgggctgtggggaatgagctgccaactcatcaacacagtgcctgttgtgctcgccctctggattatttctaatcagcacagtcaagagacgaaggacggtgtagatagcttagtaaaaggcacaaaaactctcagcgttagctggagcatcatattattctcgttcctggcattttcgcgcctcggcgtttggatcttcgacctcacaacgcagcagctgacacagatgctcgtccccaagacagaaaggtcaagctttgccggtgttgagacctcagtcgtcaacattttcgaagttcttggcgctggagccgcaataagctttccccatgtttctcaataccgatggcttgcgctcgccagtttagtatctgtggttatcagctgggtcatgtacagtctatgggttcgtacgcagcggggtcatcttgttcactgggaaaagatcccacgtacttag

SEQ ID NO: 16251 - protein, 559 aa, Muscodor strobelii
  misc_feature: SGI Peptide ID NO. 565399
  misc_feature (18)..(554): NCBI GI: 156062114 Blast Desc: SS1G_01172 [Sclerotinia sclerotiorum 1980] gi|154696509|gb|EDN96247.1| SS1G_01172 [Sclerotinia sclerotiorum 1980]
  misc_feature (23)..(556): NCBI GI: 154297402 Blast Desc: BC1G_12105 [Botryotinia fuckeliana B05.10] gi|150858610|gb|EDN33802.1| BC1G_12105 [Botryotinia fuckeliana B05.10]
  misc_feature (1)..(555): NCBI GI: 238506427 Blast Desc: iron-regulated transporter, [Aspergillus flavus NRRL3357] gi|220689128|gb|EED45479.1| iron-regulated transporter, [Aspergillus flavus NRRL3357]
  misc_feature (1)..(555): NCBI GI: 169785431 Blast Desc: [Aspergillus oryzae RIB40] gi|83775924|dbj|BAE66043.1| protein product [Aspergillus oryzae]
  misc_feature (2)..(558): NCBI GI: 212534148 Blast Desc: iron-regulated transporter, [Penicillium marneffei ATCC 18224] gi|210069629|gb|EEA23719.1| iron-regulated transporter, [Penicillium marneffei ATCC 18224]
  misc_feature (31)..(553): NCBI GI: 256726903 Blast Desc: NECHADRAFT_4298 [Nectria haematococca mpVI 77-13-4]
  misc_feature (30)..(507): NCBI GI: 169622069 Blast Desc: SNOG_14249 [Phaeosphaeria nodorum SN15] gi|160704689|gb|EAT78486.2| SNOG_14249 [Phaeosphaeria nodorum SN15]
  misc_feature (2)..(482): NCBI GI: 242789427 Blast Desc: iron-regulated transporter, [Talaromyces stipitatus ATCC 10500] gi|218717945|gb|EED17365.1| iron-regulated transporter, [Talaromyces stipitatus ATCC 10500]
  misc_feature (22)..(552): NCBI GI: 164423277 Blast Desc: NCU08804 [Neurospora crassa OR74A] gi|157070024|gb|EAA32755.2| conserved [Neurospora crassa OR74A]
  misc_feature (13)..(369): NCBI GI: 261356249 Blast Desc: conserved [Verticillium albo-atrum VaMs.102]
MEHQNESIEPFEEEPFDDIHPGLSSTQAINLYISHAFSTWNARGYEFAAILFTAGAYPDTLVAAALRMIIIYIAMIFLSSSVGQWVERSPNRLRTLLSTIICNRGSVILGSFIWLFILSQEGLVTNETTADETPRYTLPQNDILKGVAFAIAITFGIIERLSASGNMISMERDWVVTAAAPIVTDCFNNDLTNLNAVMRRIDLVCKLIAPIAISIIISAAGSVRVGVIYTALASLISIPIELLSAKRVWNACPVLQAPKPVAAPSQAQAQGLAMSSSTFMSRLSFWQTRMRQYFHGFDSYFRTTVCVPSVALALLHFNMLTWRATFITYLINVGYSLNVITLARTIGSIFEISSTIITPWGIVYLGKRRRQTLDDLPDDSNVGLLQGEETHDASISDAETVVGLQRLGLWGMSCQLINTVPVVLALWIISNQHSQETKDGVDSLVKGTKTLSVSWSIILFSFLAFSRLGVWIFDLTTQQLTQMLVPKTERSSFAGVETSVVNIFEVLGAGAAISFPHVSQYRWLALASLVSVVISWVMYSLWVRTQRGHLVHWEKIPRT

SEQ ID NO: 16252 - DNA, 2254 bp, Muscodor strobelii; identical to SEQ ID NO: 16249
  misc_feature: SGI EST ID NO. CUFF.38391.3
  misc_feature: Variant of the nucleotide sequence at SEQ ID NO 16250

SEQ ID NO: 16253 - DNA, 2127 bp, Muscodor strobelii
  misc_feature: SGI cDNA ID NO. 565400
  misc_feature: Encodes the peptide sequence at SEQ ID NO 16254
atggaatcaaccagggaaacggcggtgtattccaaagaaacatatgatgttatcgacggcatagaagagcagcactttatccagagtggcaaaactcaagacgtctcagccagcgccctttcaccagcaaatcgccgagcaggatggttcttccctgcgctgcttctattatcttccattgcggttttcacactttctggagcgttgctatccaccactcctgaagctgagtcggatggtgagcccggtcgagagacgagcggaggatctaaagggacaacgacatcatcgctccgtcgtgtaaattcagaatatgttctggaacctacgtgggagttcacagcggccccgcaagttcgagagtacgagttcgtcatcgccgatggaaatggcaaccccgacggcgtttacaaaccaatgatgattatcaataatcagttcccggggcctctgatagaaatgaacgaaaacgatgttctcgttgtcaatgtgaagaatgaagcgtcaaatgctacgtctctacactggcacggtattttccaaaatggaacaaactggatggatggagccgcaggcgttacacaatgccccattgcacctggccaatcttttcagtacaggttcaatgttaccaatcaagcaggtacatgtaagtatgtcccttacttctaccacggtcatcagggggtccaatctcttgacggcatggtaggaccaatggtggtccacagtcgaagggaggcaggcaggccgagactcccttactcgtcagacagagttattctcctgcaagattggtattatgaccaagcaagtggactcatgcgcgaagtcttatcgccgggctctgaggatgcacccatacctaacacagcactgatcaatggggtcaaccaggcgatttgctctgatcatcctagtcgggaatgcaccgaagtccaagcagcagctttgccacggctacaggtcatgcctagcgagcggcacaggctccgattcataaacgcagccggttctgcttggttccaagtagccgttgatgaacatgatgatctacaagttatcgaagttgatggtaatgtcattgcccctggtcagcgttacagcgcggttctgcgagcagatcatgaaaatggtgcgttctggcttcgtgcaaggatgctgacggcctgtttcgcaagccagcggctccctgagaatggcatcgacgaagcgaaagcaattataagctacacaaccgcgcttcgttcgcgccatggagacgatgaggaccacaacatggatcaaagcgccgatgatgataataaagaggatgaacatgacgcagatgacattgccttaccaaacaccacgtctaaactaccttttctcccaacatgtaaggatttgactgctgcgtctttccgcccatccccagcccttagagccccagagagtgcagatcgttcgtggtatttgcgggtcaatctcgccattggtgattggcggcttcagagaggtgttttaaatacttcgtccttccgccccgatttgaagcatcccacattgcatcgtgttatcgacggcctcactgagaagaacgagtcttttgcggtcgaaggcattaataatgccgcgttcgacctagaatctgaattcacgatatcaagtaacaaggttgaagttgttgacattatacttcaaaacatggacgaaaagagccacccctttcatcttcatggcaccaaaatgtgggttttgggggctggtcatggatactggcctgggtatgaagctttgggtcttcagcctgaaggcaagggtctcttagatccaaacaacgccactgtcgtggacaatcctctttatagagatacaatcactgccgaaggtttcggatgggtcttgttacgctttgtagcagacaacccgggtgcatggcttttccattgccatgttatttggcattctgaagcgggcatggcgatgcagtttctgtcgcggcttgacgtgatgcgcacttggcaactgccagatgatgtgcgcgagctgtgcaatgctgccgaagaggaactgacgaaaggagcgccgccaaaagatgagatattctttggttttcatgatgatgaggatgatgctagcgagtga

SEQ ID NO: 16254 - protein, 708 aa, Muscodor strobelii
  misc_feature: SGI Peptide ID NO. 565400
  misc_feature (257)..(414): Pfam Id: PF00394 Pfam Desc: Multicopper oxidase
  misc_feature (508)..(664): Pfam Id: PF07731 Pfam Desc: Multicopper oxidase
  misc_feature (125)..(247): Pfam Id: PF07732 Pfam Desc: Multicopper oxidase
  misc_feature (94)..(699): NCBI GI: 154317966 Blast Desc: BC1G_02966 [Botryotinia fuckeliana B05.10] gi|150843624|gb|EDN18817.1| BC1G_02966 [Botryotinia fuckeliana B05.10]
  misc_feature (46)..(698): NCBI GI: 256722710 Blast Desc: NECHADRAFT_72877 [Nectria haematococca mpVI 77-13-4]
  misc_feature (49)..(695): NCBI GI: 46126599 Blast Desc: FG07677.1 [Gibberella zeae PH-1]
  misc_feature (100)..(678): NCBI GI: 169595328 Blast Desc: SNOG_00402 [Phaeosphaeria nodorum SN15] gi|160701071|gb|EAT91897.2| SNOG_00402 [Phaeosphaeria nodorum SN15]
  misc_feature (112)..(540): NCBI GI: 156050105 Blast Desc: SS1G_07638 [Sclerotinia sclerotiorum 1980] gi|154692040|gb|EDN91778.1| SS1G_07638 [Sclerotinia sclerotiorum 1980]
  misc_feature (100)..(588): NCBI GI: 189189382 Blast Desc: L-ascorbate oxidase [Pyrenophora tritici-repentis Pt-1C-BFP] gi|187972636|gb|EDU40135.1| L-ascorbate oxidase [Pyrenophora tritici-repentis Pt-1C-BFP]
  misc_feature (71)..(680): NCBI GI: 145611248 Blast Desc: MGG_00551 [Magnaporthe grisea 70-15] gi|145018548|gb|EDK02827.1| MGG_00551 [Magnaporthe grisea 70-15]
  misc_feature (99)..(681): NCBI GI: 50545481 Blast Desc: YALI0A20273p [Yarrowia lipolytica] gi|49646143|emb|CAG84216.1| YALI0A20273p [Yarrowia lipolytica]
  misc_feature (175)..(573): NCBI GI: 237825468 Blast Desc: laccase [Clavariopsis aquatica]
  misc_feature (117)..(680): NCBI GI: 42602104 Blast Desc: multicopper oxidase 3B [Phanerochaete chrysosporium]
  misc_feature (117)..(658): SWISSPROT Homolog: EC 1.10.3.3 L-ascorbate oxidase
MESTRETAVYSKETYDVIDGIEEQHFIQSGKTQDVSASALSPANRRAGWFFPALLLLSSIAVFTLSGALLSTTPEAESDGEPGRETSGGSKGTTTSSLRRVNSEYVLEPTWEFTAAPQVREYEFVIADGNGNPDGVYKPMMIINNQFPGPLIEMNENDVLVVNVKNEASNATSLHWHGIFQNGTNWMDGAAGVTQCPIAPGQSFQYRFNVTNQAGTCKYVPYFYHGHQGVQSLDGMVGPMVVHSRREAGRPRLPYSSDRVILLQDWYYDQASGLMREVLSPGSEDAPIPNTALINGVNQAICSDHPSRECTEVQAAALPRLQVMPSERHRLRFINAAGSAWFQVAVDEHDDLQVIEVDGNVIAPGQRYSAVLRADHENGAFWLRARMLTACFASQRLPENGIDEAKAIISYTTALRSRHGDDEDHNMDQSADDDNKEDEHDADDIALPNTTSKLPFLPTCKDLTAASFRPSPALRAPESADRSWYLRVNLAIGDWRLQRGVLNTSSFRPDLKHPTLHRVIDGLTEKNESFAVEGINNAAFDLESEFTISSNKVEVVDIILQNMDEKSHPFHLHGTKMWVLGAGHGYWPGYEALGLQPEGKGLLDPNNATVVDNPLYRDTITAEGFGWVLLRFVADNPGAWLFHCHVIWHSEAGMAMQFLSRLDVMRTWQLPDDVRELCNAAEEELTKGAPPKDEIFFGFHDDEDDASE

SEQ ID NO: 16255 - DNA, 1741 bp, Muscodor strobelii
  misc_feature: SGI EST ID NO. CUFF.38372.0
  misc_feature: Variant of the nucleotide sequence at SEQ ID NO 16253
gtccggagttcgtaatcagtacggcatctccgtcagctccgcagaagagtacatgccgatgatccgaatgcaccggtcggagcttcgtggcgtgcactctaagtctagaaacggctgtgaaggttgatttattcagcacagcaatgatgccatgtcttcggcgtttatcggcgttatgtaatgcccaatcagaatcatcttgctgacagcgtgcattgcattctaacgcctttcagtagagaaatgtacgcctcctacgttcgacttcagctacagcctgcatcacgttcttcagtcaacatcataacgagcgcaagtttaatataagtggcgcttgaaaagagtaacattgcctaaaggaacacctgcgaattgaaccggagtttcgcatttgacgctggggacgtttacacatcggccttactgaatctcaccatagacggcgaaggaacacctccgagaaggttgagcagttgcattgaagccttcgttacttttgcttttgacggcatggttgggctaaagctcttccagctagagaaacgcgctgattgatttgcgaagacgttgtcggatctcatctcgagggacggagttacggagtgacaaagctatggcaagctacggttctgatcaggctctggcgcaaaatcaaggtgatagccatgcccaaatggaatcaaccagggaaacggcggtgtattccaaagaaacatatgatgttatcgacggcatagaagagcagcactttatccagagtggcaaaactcaagacgtctcagccagcgccctttcaccagcaaatcgccgagcaggatggttcttccctgcgctgcttctattatcttccattgcggttttcacactttctggagcgttgctatccaccactcctgaagctgagtcggatggtgagcccggtcgagagacgagcggaggatctaaagggacaacgacatcatcgctccgtcgtgtaaattcagaatatgttctggaacctacgtgggagttcacagcggccccgcaagttcgagagtacgagttcgtcatcgccgatggaaatggcaaccccgacggcgtttacaaaccaatgatgattatcaataatcagttcccggggcctctgatagaaatgaacgaaaacgatgttctcgttgtcaatgtgaagaatgaagcgtcaaatgctacgtctctacactggcacggtattttccaaaatggaacaaactggatggatggagccgcaggcgttacacaatgccccattgcacctggccaatcttttcagtacaggttcaatgttaccaatcaagcaggtacatacttctaccacggtcatcagggggtccaatctcttgacggcatggtaggaccaatggtggtccacagtcgaagggaggcaggcaggccgagactcccttactcgtcagacagagttattctcctgcaagattggtattatgaccaagcaagtggactcatgcgcgaagtcttatcgccgggctctgaggatgcacccatacctaacacagcactgatcaatggggtcaaccaggcgatttgctctgatcatcctagtcgggaatgcaccgaagtccaagcagcagctttgccacggctacaggtcatgcctagcgagcggcacaggctccgattcataaacgcagccggttctgcttggttccaagtagccgttgatgaacatgatgatctacaagttatcgaagttgatggtaatggt

SEQ ID NO: 16256 - DNA, 2544 bp, Muscodor strobelii
  misc_feature: SGI cDNA ID NO. 565401
  misc_feature: Encodes the peptide sequence at SEQ ID NO 16257
atgactccgacacccccgtctgctgcgacctcttcatcgggccactcgcctgaggagcagttccgggtggttcgacggagaaatcgggtgcctctcagttgttatccatgccggacgagaaagttgaaatgtaacagaggaagcccgagctgcgataattgtgtgaaacgaggagacacgcagtcttgcgtttatgctacaccgtccagccggcgcaagaaccaaagtagtagcggagctaatgcaagtcctgatgatatgcaaaatcgtattgaccgtttggaaggtttagtgctcagcttgatgcatggcggcgccaacatggacccctcgaccgttgcggcagccgccgcggccacttctcgtagtggccaaggggaagccctatcgaccgtcgatagttcctcgtcagcacgacaagatcgagacgatgaaggcgccatgagggatgacatcgaagacgccggcagcgatgtagacgataatctagctaactcattgggagtattaaaggtcgacgttgatcaaggcaagtctatgtatgtaggccaggagcactggcatacgcttctggccgacatttcagaagtcaagaatttctacgcgtctcacaaaaaggatcttgaaaatagctatcagcaggtgatgtcatctaaacctcagacagctcgaaattcacccatcttcttgctttccgccccgccagcttcggaagtggagctaagagccgagctgcctgcaaaaacagcaatcacgaccttagtatcgcgatattttaactctctagatacggcagcgagcatcatacatgggccaacgtttcagcagcaactgagagcacattggcaggatccttcgaaatcatctattatgtggataggtttattgtatggcatgctgtgtcttgcaatgcttagttaccacaaagttggtgacgaaccccctgagtggaggggaaggtcgttggaactagctgctgagtaccgactgcggacggtgcaatgtttagttgtggctgattacaccaagcctgttgagcatacagttgagaccatgttactgtatttgttcggcgagtattcctcccgttgggatgcagatcttgggctctggctcattacatccataatcacacgaatcgcattccgcatgggctatcaccgagatgcagaatggtttccgtcaatttcaccgttcaaaggggaaatgaggcggcgaacatggtctttactacgtatggcagatatcatgttctcctatcaggtatcattacctacgatgatttacgagcatgattgcgatacgaagctgccacacaacatttttgacgaagagtttggctacaatacgaaggtattaccaccgtctcggcccatcactgagcccacaccaatcgcctacatgattggaaagacaaaactttccatggaatttggtaatatattgcaagccgttacacgtgttgggcggcaggtaccgtatgatgagatccttcagcacgaccgcagacttcgagagattatggaagaatttccgccgcatctcaaacttcaacccttggaaggatcccatgaccctgtcacgctcatcatcgcaagatacaatcttaatctcttgtatcaaaaaattatgtgcatgcttcataggaagcatatgaccagagccagagaaaaccctcgctacgcccattcccgtcgtagtgctattgaggcatcattagaaacgctcggacacttgaaatcaatataccgtgagtgtcagcctaacggacggcttcgaactatgaaatggtttgtttcgtccacttctcgcgacactctgctccctactatgctcgttattcttgaactccaccacgatcacgttttaaacacgaatcgcaaaagacaagactctcaggccgcatgcttctggacattggaacagcggcaagagatgattagaactttggaggaggtccagaatatctggtcgcagttatcacaggattctgtcgaagcattcaaggcgtcaaatatcctccgaatcatgctggacaagatcaaaaacccggttccagaccctagtactattgatgcacctctcccgccggtgcagaccgagaacttgttttcaaattttggatcgaccgaaatgcagccggaacactcggctgccatgacactgggaatgttgtctggtggcattacgccagcttcgacattccaatctccaggcggtacgacgtacccgaatctcgatctcaatatgaacatcggaacagggaccggcctcactccaacaccagaattccagaccgacatgggagcggccaataacgcggcttcccccttctcgatgtttacgaatcttggcaacgggagcaatatggcaatcgaccagaattttgactgggacgcattcgacagttacgctcaaactgccaactggaccgatcagtcatttgggttcttcgcaggcaaccctgatcaacagcagcagtctcagcaagagtcgtccacagacgggtctttctcattcatgaagtcaacgcccggctcttag

SEQ ID NO: 16257 - protein, 847 aa, Muscodor strobelii
  misc_feature: SGI Peptide ID NO. 565401
  misc_feature (32)..(73): Pfam Id: PF00172 Pfam Desc: Fungal Zn(2)-Cys(6) binuclear cluster domain
  misc_feature (345)..(445): Pfam Id: PF04082 Pfam Desc: Fungal specific transcription factor domain
  misc_feature (352)..(445): Pfam Id: PF04082 Pfam Desc: Fungal specific transcription factor domain
  misc_feature (14)..(821): NCBI GI: 145608816 Blast Desc: MGG_06355 [Magnaporthe grisea 70-15] gi|145016243|gb|EDK00733.1| MGG_06355 [Magnaporthe grisea 70-15]
  misc_feature (14)..(786): NCBI GI: 164422696 Blast Desc: NCU09804 [Neurospora crassa OR74A] gi|157069782|gb|EAA34828.2| conserved [Neurospora crassa OR74A]
  misc_feature (1)..(845): NCBI GI: 116180226 Blast Desc: CHGG_00741 [Chaetomium globosum CBS 148.51] gi|88185038|gb|EAQ92506.1| CHGG_00741 [Chaetomium globosum CBS 148.51]
  misc_feature (12)..(823): NCBI GI: 156050189 Blast Desc: SS1G_07681 [Sclerotinia sclerotiorum 1980] gi|154692082|gb|EDN91820.1| SS1G_07681 [Sclerotinia sclerotiorum 1980]
  misc_feature (12)..(846): NCBI GI: 154317854 Blast Desc: BC1G_02910 [Botryotinia fuckeliana B05.10] gi|150843568|gb|EDN18761.1| BC1G_02910 [Botryotinia fuckeliana B05.10]
  misc_feature (1)..(829): NCBI GI: 256735025 Blast Desc: [Nectria haematococca mpVI 77-13-4]
  misc_feature (13)..(827): NCBI GI: 171688001 Blast Desc: protein product [Podospora anserina] gi|170943962|emb|CAP69614.1| protein product [Podospora anserina]
  misc_feature (1)..(832): NCBI GI: 46108872 Blast Desc: FG01318.1 [Gibberella zeae PH-1]
  misc_feature (1)..(832): NCBI GI: 255945693 Blast Desc: Pc20g11250 [Penicillium chrysogenum Wisconsin 54-1255] gi|211588349|emb|CAP86454.1| Pc20g11250 [Penicillium chrysogenum Wisconsin 54-1255]
  misc_feature (1)..(828): NCBI GI: 258575723 Blast Desc: conserved [Uncinocarpus reesii 1704] gi|237902309|gb|EEP76710.1| conserved [Uncinocarpus reesii 1704]
MTPTPPSAATSSSGHSPEEQFRVVRRRNRVPLSCYPCRTRKLKCNRGSPSCDNCVKRGDTQSCVYATPSSRRKNQSSSGANASPDDMQNRIDRLEGLVLSLMHGGANMDPSTVAAAAAATSRSGQGEALSTVDSSSSARQDRDDEGAMRDDIEDAGSDVDDNLANSLGVLKVDVDQGKSMYVGQEHWHTLLADISEVKNFYASHKKDLENSYQQVMSSKPQTARNSPIFLLSAPPASEVELRAELPAKTAITTLVSRYFNSLDTAASIIHGPTFQQQLRAHWQDPSKSSIMWIGLLYGMLCLAMLSYHKVGDEPPEWRGRSLELAAEYRLRTVQCLVVADYTKPVEHTVETMLLYLFGEYSSRWDADLGLWLITSIITRIAFRMGYHRDAEWFPSISPFKGEMRRRTWSLLRMADIMFSYQVSLPTMIYEHDCDTKLPHNIFDEEFGYNTKVLPPSRPITEPTPIAYMIGKTKLSMEFGNILQAVTRVGRQVPYDEILQHDRRLREIMEEFPPHLKLQPLEGSHDPVTLIIARYNLNLLYQKIMCMLHRKHMTRARENPRYAHSRRSAIEASLETLGHLKSIYRECQPNGRLRTMKWFVSSTSRDTLLPTMLVILELHHDHVLNTNRKRQDSQAACFWTLEQRQEMIRTLEEVQNIWSQLSQDSVEAFKASNILRIMLDKIKNPVPDPSTIDAPLPPVQTENLFSNFGSTEMQPEHSAAMTLGMLSGGITPASTFQSPGGTTYPNLDLNMNIGTGTGLTPTPEFQTDMGAANNAASPFSMFTNLGNGSNMAIDQNFDWDAFDSYAQTANWTDQSFGFFAGNPDQQQQSQQESSTDGSFSFMKSTPGS

SEQ ID NO: 16258 - DNA, 4545 bp, Muscodor strobelii
  misc_feature: SGI EST ID NO. CUFF.38498.0
  misc_feature: Variant of the nucleotide sequence at SEQ ID NO 16256
gcgggggcttcttcttcctcgttcttgtcgttgatatttttccagtttcccaccgtcaacttctcgagatagttgacttccgcttctccttcgagcagccttttcgccatcctagactccgaccctcaagagcctattcaccgccactgcgcaggtttcgctatacttgaaacagtctgcgactcctcttgctgtcgttggtcgctgtctgccaccgaccaccaccgactaccacagcaattcccaggtgtcgccaaaatcgaattcggggccaattgcctgacaaattcgaacgcccattgttataccccgcttttatctcgagcgcactattttcgatactcacgtcgcaagtacatggataatattgctttgggtcgcggggtttctttcttacgccgacgattgctgtagtggcgtttccccatactagtgaccttttttggtccgagtcgtaataggcatattctactctgtcattcgattgccctaccgaccggatactttagtggcttactcttagtcaaacaaatacgcaccgattagcggatagcggtttcgagcacaaggactcggctggtatactccgggttcctgtcgctgtgtcgaggtactccgacttcattgcatgcaatagtctcagtctacacagggcagatatatttgggtcaggctatacaccttactgcatgcacaagcagaagcggtccacaaagtctcgaggctcaacccctgccttagaccgtggtcgaccgtccgccatcatagttaataaggcagcgctatatttttaggaggagaatagcttgcgctttgtcatcgagcgtgccgatccgaagaaccacacgacacccttgttctgcaaggcggtctctatctccgttgtcttggtacatcgagctaaagtcacgaccttgacagccctatcatatcctcgagcgagacgcatctgtgatccaaagttctccgctcccgtgcccaacgcaagctttaggacaagctggttgtctataacggagttgggcttggtgtctttaaatacactcaactttcctaagtccggcgtgcatttttgaggcgacaatttacaatccccgagaatctcattcgtcattgcaaggcgccattcagcttgtagttcgagatgactccgacacccccgtctgctgcgacctcttcatcgggccactcgcctgaggagcagttccgggtggttcgacggagaaatcgggtgcctctcagttgttatccatgccggacgagaaaaccgaaatgcattggaaaatgctgacggaccgtctaggttgaaatgtaacagaggaagcccgagctgcgataattgtgtgaaacgaggagacacgcagtcttgcgtttatgctacaccgtccagccggcgcaagaaccaaagtagtagcggagctaatgcaagtcctgatgatatgcaaaatcgtattgaccgtttggaaggtttagtgctcagcttgatgcatggcggcgccaacatggacccctcgaccgttgcggcagccgccgcggccacttctcgtagtggccaaggggaagccctatcgaccgtcgatagttcctcgtcagcacgacaagatcgagacgatgaaggcgccatgagggatgacatcgaagacgccggcagcgatgtagacgataatctagctaactcattgggagtattaaaggtcgacgttgatcaaggcaagtctatgtatgtaggccaggagcactggcatacgcttctggccgacatttcagaagtcaagaatttctacgcgtctcacaaaaaggatcttgaaaatagctatcagcaggtgatgtcatctaaacctcagacagctcgaaattcacccatcttcttgctttccgccccgccagcttcggaagtggagctaagagccgagctgcctgcaaaaacagcaatcacgaccttagtatcgcgatattttaactctctagatacggcagcgagcatcatacatgggccaacgtttcagcagcaactgagagcacattggcaggatccttcgaaatcatctattatgtggataggtttattgtatggcatgctgtgtcttgcaatgcttagttaccacaaagttggtgacgaaccccctgagtggaggggaaggtcgttggaactagctgctgagtaccgactgcggacggtgcaatgtttagttgtggctgattacaccaagcctgttgagcatacagttgagaccatgttactgtatttgttcggcgagtattcctcccgttgggatgcagatcttgggctctggctcattacatccataatcacacgaatcgcattccgcatgggctatcaccgagatgcagaatggtttccgtcaatttcaccgttcaaaggggaaatgaggcggcgaacatggtctttactacgtatggcagatatcatgttctcctatcaggtatcattacctacgatgatttacgagcatgattgcgatacgaagctgccacacaacatttttgacgaagagtttggctacaatacgaaggtattaccaccgtctcggcccatcactgagcccacaccaatcgcctacatgattggaaagacaaaactttccatggaatttggtaatatattgcaagccgttacacgtgttgggcggcaggtaccgtatgatgagatccttcagcacgaccgcagacttcgagagattatggaagaatttccgccgcatctcaaacttcaacccttggaaggatcccatgaccctgtcacgctcatcatcgcaagatacaatcttaatctcttgtatcaaaaaattatgtgcatgcttcataggaagcatatgaccagagccagagaaaaccctcgctacgcccattcccgtcgtagtgctattgaggcatcattagaaacgctcggacacttgaaatcaatataccgtgagtgtcagcctaacggacggcttcgaactatgaaatggtttgtttcgtccacttctcgcgacactctgctccctactatgctcgttattcttgaactccaccacgatcacgttttaaacacgaatcgcaaaagacaagactctcaggccgcatgcttctggacattggaacagcggcaagagatgattagaactttggaggaggtccagaatatctggtcgcagttatcacaggattctgtcgaagcattcaaggcgtcaaatatcctccgaatcatgctggacaagatcaaaaacccggttccagaccctagtactattgatgcacctctcccgccggtgcagaccgagaacttgttttcaaattttggatcgaccgaaatgcagccggaacactcggctgccatgacactgggaatgttgtctggtggcattacgccagcttcgacattccaatctccaggcggtacgacgtacccgaatctcgatctcaatatgaacatcggaacagggaccggcctcactccaacaccagaattccagaccgacatgggagcggccaataacgcggcttcccccttctcgatgtttacgaatcttggcaacgggagcaatatggcaatcgaccagaattttgactgggacgcattcgacagttacgctcaaactgccaactggaccgatcagtcatttgggttcttcgcaggcaaccctgatcaacagcagcagtctcagcaagagtcgtccacagacgggtctttctcattcatgaagtcaacgcccggctcttaggtcgctaattgcgctgaaagacttctatcataattcccaggttaggtggatcgtccaaaatacgtctacgatgtgtttcgacattgtagtttagtagcgatcagctaaacattgggagtcagtaatacctcttttcagccaaaaatttgctcatggggggttgtctcgggagcttgcatgagtaaaatcaccacccaaacaaggaagaaaatgactcccaaagggtacataaaggactggcctggttgggtggggagaaagaaaagccggcgtttctacgggcatatcaagagtcggcgaagaagaatggtcatctaggtacatgtattattgcatcggaggccataatccttgaattctccgcaacgcggtaaatactctgctctgaaaaccggcgccgttcttttgcgcttccgtgctccgtcaggtaaatccgccgggacagtgccaggctcatcagcacaaatggtggtctcctcagccccagacttccccgcatcgtgctgtgggcagatgcacgtcactgcacacaacaaacgtgggcttcgggcgacagacttgctgcttatcacggtgagatactcggtgctatggcggaactcggtgcctattcgtcttgttttccgacgcgaactgctaaagttgctataagtagttctcctgtatttgctagcgtagaagagacacggaatagtgtgtttataggtaaacatcagatatgcagtagtttgcctatgaaatgagcatccagttttttctacaagtcgacgatatgagagaagcatgtcgttcccttttacctgtatcaagtggagaccca

SEQ ID NO: 16259 - DNA, 1818 bp, Muscodor strobelii
  misc_feature: SGI cDNA ID NO. 565402
  misc_feature: Reduced expression when VOC is produced
  misc_feature: Encodes the peptide sequence at SEQ ID NO 16260
atgagggcaattcgcagtttgttcgcggccttgtgcgcaacgaccatcagtggattgtctacgaacgattggaaaaaacagtcgatctatcagattgttaccgaccgcttcgcacgcaccgatggttccaccagtggttgttctgacaatcgctcgtactgtggcggtacatggcaaggaatcataaataaattggattacatccagggcatgggctacacggcaatttggatttcgcctatcaccaaacagatagatggctatacggcctacggagaggcatatcatggctattggcagcaagacatatacgggctgaattcgcacttcggcacagctgatgacctaaaggccttatcatcagctcttcatgaccgaggcatgtacctgatggttgatatcgtgacaaaccatatgggttataatggtggcccatcttctgtcgactacagtatctacaaccctttcaacagcgcctcagacttccactccgcatgcttcatcgattacagcaaccagaactctataataaactgctgggaaggtgacaacagtgtagcactaccagacatcaatactcaagattcaggcattcgcgataccttttcaggctgggtcactgacctcgtctcgacgtacggcattgacgggttccgtgtagatagcacgcaacaagtggagaaggatttttggcccggctttcagtctgctgcaggcgtgtatcttgtcggagagatattcaatggcgacccttcgctattcccagattggttgaactatatgagcggtgccatgaactatccggtatactattggatgacgcgattctttcagtcgacctcttcgacgtcgactgaattggtgaacggtatcaaccaatggaaaggacaaatgaagactgccacgatgggtggattcctcgagaaccatgacaatccgcgattcgcgtctctgactagcgacttgtctctcgccaagaatggcatggctttcacgcaactcatggatggtatccctattctctactatggccaggagcaaagattcagcggcgcttccgaccctaacaatcgcgagccttttttcacgaccaattatgatacgtcagcggctctttacaaatgggctgcgagcctcaatcagatccgcaaccaggccatttatgtcgatcccacttacgtggattggcaggcagtcccttcgcaaccaaacgacaagacgattgcgatgcgcaaaggcaatgctggttctcagattgtcagtgtacatactaacattggcgattccggcgcttcctactcgatcagcctcgccagtagcttcactggttttacggccaatcaggcattgacggaagtcatggcatgcacatcagtcacgacagacgggtcggggacgctatccttcatgcagggtcctgctacttcagtgttttacccgactgccaagctgtctggtagtggcgtctgtggaggtggtagcggtaacggcggcggcagtggctcctgttcgaccgtggccgtgactttcaacgagattgtcaccacatccatcgggcagaccataaaaatagtaggcaatgtttctcaactcgggagctgggacacttcgaaagccatcgccctaagtgcctctcaatacacgtcctcgaatcacttatggagcggaaccatcaacttgcccccaggcactgcggttcaatacaaattcattaacgtcgcaagcaatggcgcggtaacctgggaggccgacccgaatcggtcgtacacggtgccaacaacttgcactgcagtgactgtctcgaactcatggcgatga

SEQ ID NO: 16260 - protein, 605 aa, Muscodor strobelii
  misc_feature: SGI Peptide ID NO. 565402
  misc_feature (31)..(383): Pfam Id: PF00128 Pfam Desc: Alpha amylase, catalytic domain
  misc_feature (505)..(601): Pfam Id: PF00686 Pfam Desc: Starch binding domain
  misc_feature (400)..(490): Pfam Id: PF09260 Pfam Desc: Domain of function (DUF1966)
  misc_feature (9)..(605): NCBI GI: 171687999 Blast Desc: protein product [Podospora anserina] gi|170943961|emb|CAP69613.1| protein product [Podospora anserina]
  misc_feature (18)..(605): NCBI GI: 115385717 Blast Desc: alpha-amylase precursor [Aspergillus terreus NIH2624] gi|114187852|gb|EAU29552.1| alpha-amylase precursor [Aspergillus terreus NIH2624]
  misc_feature (1)..(605): NCBI GI: 255939426 Blast Desc: Pc16g00630 [Penicillium chrysogenum Wisconsin 54-1255] gi|211585105|emb|CAP92733.1| Pc16g00630 [Penicillium chrysogenum Wisconsin 54-1255]
  misc_feature (18)..(605): NCBI GI: 119497741 Blast Desc: alpha-amylase, [Neosartorya fischeri NRRL 181] gi|119413792|gb|EAW23731.1| alpha-amylase, [Neosartorya fischeri NRRL 181]
  misc_feature (1)..(605): NCBI GI: 159128622 Blast Desc: alpha-amylase, [Aspergillus fumigatus A1163]
  misc_feature (1)..(605): NCBI GI: 70988703 Blast Desc: alpha-amylase [Aspergillus fumigatus Af293] gi|66846839|gb|EAL87170.1| alpha-amylase, [Aspergillus fumigatus Af293]
  misc_feature (6)..(605): NCBI GI: 212531193 Blast Desc: alpha-amylase, [Penicillium marneffei ATCC 18224] gi|210071117|gb|EEA25206.1| alpha-amylase, [Penicillium marneffei ATCC 18224]
  misc_feature (11)..(605): NCBI GI: 242775754 Blast Desc: alpha-amylase, [Talaromyces stipitatus ATCC 10500] gi|218722322|gb|EED21740.1| alpha-amylase, [Talaromyces stipitatus ATCC 10500]
  misc_feature (1)..(605): NCBI GI: 104345338 Blast Desc: alpha amylase AMYI [Ophiostoma floccosum]
  misc_feature (1)..(605): NCBI GI: 121708778 Blast Desc: alpha amylase, [Aspergillus clavatus NRRL 1] gi|119400393|gb|EAW10819.1| alpha amylase, [Aspergillus clavatus NRRL 1]
  misc_feature (23)..(484): SWISSPROT Homolog: EC 3.2.1.1 Alpha-amylase
  misc_feature: Useful for introducing or modulating the production of volatile compounds
MRAIRSLFAALCATTISGLSTNDWKKQSIYQIVTDRFARTDGSTSGCSDNRSYCGGTWQGIINKLDYIQGMGYTAIWISPITKQIDGYTAYGEAYHGYWQQDIYGLNSHFGTADDLKALSSALHDRGMYLMVDIVTNHMGYNGGPSSVDYSIYNPFNSASDFHSACFIDYSNQNSIINCWEGDNSVALPDINTQDSGIRDTFSGWVTDLVSTYGIDGFRVDSTQQVEKDFWPGFQSAAGVYLVGEIFNGDPSLFPDWLNYMSGAMNYPVYYWMTRFFQSTSSTSTELVNGINQWKGQMKTATMGGFLENHDNPRFASLTSDLSLAKNGMAFTQLMDGIPILYYGQEQRFSGASDPNNREPFFTTNYDTSAALYKWAASLNQIRNQAIYVDPTYVDWQAVPSQPNDKTIAMRKGNAGSQIVSVHTNIGDSGASYSISLASSFTGFTANQALTEVMACTSVTTDGSGTLSFMQGPATSVFYPTAKLSGSGVCGGGSGNGGGSGSCSTVAVTFNEIVTTSIGQTIKIVGNVSQLGSWDTSKAIALSASQYTSSNHLWSGTINLPPGTAVQYKFINVASNGAVTWEADPNRSYTVPTTCTAVTVSNSWR

SEQ ID NO: 16261 - DNA, 2728 bp, Muscodor strobelii
  misc_feature: SGI EST ID NO. CUFF.38440.1
  misc_feature: Variant of the nucleotide sequence at SEQ ID NO 16259
gcgtttcacattgccagccattggtgcccagtaatccggagcttctcgtgggagaaacgccgacactgcaacgctttctgggtaccccagctaaacccatggcggatggacccgctcccagatcgcaagtagatgtcgcgcatgcccccatacgtcagcataatgcacaaaaccagtatgccatagggtgacaagctcaagttggagtcgctattcgtgttcaagtgccaaatgaagattagcagtcacttgtcaaaaatggggtacatgaaagcgccgacagtaccgcccagtgggtcggattgaacctactgatcaacacgtgctccgttccgtgggctcggcacgtgagacatgaaagtcggctctcggattcacatcattacgctctttccatataagacatcatgatctgtgctgtaaagttctgaagctttcatcaagtacctggtgctgcttgtccataccgtctcagtcttcacttccaaattccattccttagggctggatccttgatacccttagagtatatctcttttctacgtcctagtcgattaccttactcgaaggagcgttccgatatctaagtaaacttcactatttccacgatgagggcaattcgcagtttgttcgcggccttgtgcgcaacgaccatcagtggattgtctacgaacgattggaaaaaacagtcgatctatcagattgttaccgaccgcttcgcacgcaccgatggttccaccagtggttgttctgacaatcgctcgtactgtggcggtacatggcaaggaatcataaataaattggattacatccagggcatgggctacacggcaatttggatttcgcctatcaccaaacagatagatggctatacggcctacggagaggcatatcatggctattggcagcaagacatatacgggctgaattcgcacttcggcacagctgatgacctaaaggccttatcatcagctcttcatgaccgaggcatgtacctgatggttgatatcgtgacaaaccatatgggttataatggtggcccatcttctgtcgactacagtatctacaaccctttcaacagcgcctcagacttccactccgcatgcttcatcgattacagcaaccagaactctataataaactgctgggaaggtgacaacagtgtagcactaccagacatcaatactcaagattcaggcattcgcgataccttttcaggctgggtcactgacctcgtctcgacgtacggcattgacgggttccgtgtagatagcacgcaacaagtggagaaggatttttggcccggctttcagtctgctgcaggcgtgtatcttgtcggagagatattcaatggcgacccttcgctattcccagattggttgaactatatgagcggtgccatgaactatccggtatactattggatgacgcgattctttcagtcgacctcttcgacgtcgactgaattggtgaacggtatcaaccaatggaaaggacaaatgaagactgccacgatgggtggattcctcgagaaccatgacaatccgcgattcgcgtctctgactagcgacttgtctctcgccaagaatggcatggctttcacgcaactcatggatggtatccctattctctactatggccaggagcaaagattcagcggcgcttccgaccctaacaatcgcgagccttttttcacgaccaattatgatacgtcagcggctctttacaaatgggctgcgagcctcaatcagatccgcaaccaggccatttatgtcgatcccacttacgtggattggcaggcagtcccttcgcaaccaaacgacaagacgattgcgatgcgcaaaggcaatgctggttctcagattgtcagtgtacatactaacattggcgattccggcgcttcctactcgatcagcctcgccagtagcttcactggttttacggccaatcaggcattgacggaagtcatggcatgcacatcagtcacgacagacgggtcggggacgctatccttcatgcagggtcctgctacttcagtgttttacccgactgccaagctgtctggtagtggcgtctgtggagagtaggcaatgtttctcaactcgggagctgggacacttcgaaagccatcgccctaagtgcctctcaatacacgtcctcgaatcacttatggagcggaaccatcaacttgcccccaggcactgcggttcaatacaaattcattaacgtcgcaagcaatggcgcggtaacctgggaggccgacccgaatcggtcgtacacggtgccaacaacttgcactgcagtgactgtctcgaactcatggcgatgaatttattcttgtatatattgaagaccttgagaacatatgatcaaatcttaggagaagaagaatacgaaacacagaaacttgaagcttggaaacatgcataggggcggtgatggatactgtgcattgagccggctccctccatttggtggcgcgcgcgctcgcaaatgccccactacatcccaatatagatcctgagatgcattgatgaccaggctcccaacgttgcccctacgagttcgacaactcccgtagtattcatttagatcatctctcctcccgttttattcgttctgggcaaacatctaccacccttcgcatttgacccgcttactagagaggagctcggctgagaaacgagataactaatatgccccgaacggggtttgaaagagttcgaac

SEQ ID NO: 16262 - DNA, 930 bp, Muscodor strobelii
  misc_feature: SGI cDNA ID NO. 565403
  misc_feature: Encodes the peptide sequence at SEQ ID NO 16263
atgcgggcaatcttccgtcacctaagcatatttcctttcttctttggcgcaacactatctgactttcctcttctgcaattggccgaggagtcgaacaacttcaatagtgcgactcaagcagcagaagcactagactgcctcatgtcacgttgcgtcagattggttcgcgcatttgacccatttcgcctggctaagacgaaagcctcagaagtatcggcgtcaacattgttcgaacaacaggagctaagcgaaagactcggcacatggttttccatattctgcactattagagagcagcatgcctatcccagtgacagcgacctatccctatatcggaatttggaaatgcgatggcttgtttctaagatatggattgagattgcatcatctagaaacgaaattgcgagtgacaactatcgacagcagttcactcgcatcgtcgacctcgcacgagaagaggctagcgtcaaacaatcctctaataccaagatacgcaacagtttcaaatttgacatgggcatgcttccgctattacactttgtggttatcaaatgccggtatttgcaccttcgcttagaagctctatctttaatgcagatcctcggatgcttgagagagtcttcttgggatgcgactattatgcgtggtattgcaaagagtatcatcaagcaagaacatggtctgaacgccgactcgcgacatcttgacgaactacttcaaggtggagatataagggacgatttgccaggtgatgatcagagaatacgagagtcatggctcgaagatgagacgcgagtgagtgtcgacgagtatggatccaattatttgcagcagaagatatgtttcttcgttcgtcgatctgatgaagaggacatcagcacaatcgaagattggatttctctcccaggagatagacgtccaagtttctga

SEQ ID NO: 16263 - protein, 309 aa, Muscodor strobelii
  misc_feature: SGI Peptide ID NO. 565403
  misc_feature (4)..(300): NCBI GI: 39941334 Blast Desc: MGG_05578 [Magnaporthe grisea 70-15] gi|145022250|gb|EDK06270.1| MGG_05578 [Magnaporthe grisea 70-15]
  misc_feature (5)..(301): NCBI GI: 261358238 Blast Desc: conserved [Verticillium albo-atrum VaMs.102]
  misc_feature (1)..(285): NCBI GI: 256728059 Blast Desc: NECHADRAFT_46033 [Nectria haematococca mpVI 77-13-4]
  misc_feature (5)..(301): NCBI GI: 85112958 Blast Desc: NCU09739 [Neurospora crassa OR74A] gi|28926223|gb|EAA35205.1| [Neurospora crassa OR74A]
  misc_feature (1)..(256): NCBI GI: 46122695 Blast Desc: FG05725.1 [Gibberella zeae PH-1]
  misc_feature (1)..(229): NCBI GI: 256726744 Blast Desc: NECHADRAFT_103320 [Nectria haematococca mpVI 77-13-4]
  misc_feature (1)..(259): NCBI GI: 256735679 Blast Desc: NECHADRAFT_75777 [Nectria haematococca mpVI 77-13-4]
  misc_feature (1)..(257): NCBI GI: 46127085 Blast Desc: FG07920.1 [Gibberella zeae PH-1]
  misc_feature (32)..(233): NCBI GI: 238500209 Blast Desc: sugar transporter, [Aspergillus flavus NRRL3357] gi|220693092|gb|EED49438.1| sugar transporter, [Aspergillus flavus NRRL3357]
  misc_feature (32)..(240): NCBI GI: 169779547 Blast Desc: [Aspergillus oryzae RIB40] gi|83772977|dbj|BAE63105.1| protein product [Aspergillus oryzae]
MRAIFRHLSIFPFFFGATLSDFPLLQLAEESNNFNSATQAAEALDCLMSRCVRLVRAFDPFRLAKTKASEVSASTLFEQQELSERLGTWFSIFCTIREQHAYPSDSDLSLYRNLEMRWLVSKIWIEIASSRNEIASDNYRQQFTRIVDLAREEASVKQSSNTKIRNSFKFDMGMLPLLHFVVIKCRYLHLRLEALSLMQILGCLRESSWDATIMRGIAKSIIKQEHGLNADSRHLDELLQGGDIRDDLPGDDQRIRESWLEDETRVSVDEYGSNYLQQKICFFVRRSDEEDISTIEDWISLPGDRRPSF

SEQ ID NO: 16264 - DNA, 3008 bp, Muscodor strobelii
  misc_feature: SGI EST ID NO. CUFF.38440.4
  misc_feature: Variant of the nucleotide sequence at SEQ ID NO 16262
ggctcctgttcgaccgtggccgtgactttcaacgagattgtcaccacatccatcgggcagaccataaaaatagtaggcaatgtttctcaactcgggagctgggacacttcgaaagccatcgccctaagtgcctctcaatacacgtcctcgaatcacttatggagcggaaccatcaacttgcccccaggcactgcggttcaatacaaattcattaacgtcgcaagcaatggcgcggtaacctgggaggccgacccgaatcggtcgtacacggtgccaacaacttgcactgcagtgactgtctcgaactcatggcgatgaatttattcttgtatatattgaagaccttgagaacatatgatcaaatcttaggagaagaagaatacgaaacacagaaacttgaagcttggaaacatgcataggggcggtgatggatactgtgcattgagccggctccctccatttggtggcgcgcgcgctcgcaaatgccccactacatcccaatatagatcctgagatgcattgatgaccaggctcccaacgttgcccctacgagttcgacaactcccgtagtattcatttagatcatctctcctcccgttttattcgttctgggcaaacatctaccacccttcgcatttgacccgcttactagagaggagctcggctgagaaacgagataactaatatgccccgaacggggtttgaaagaagattgactccgctcgcgttctggaagggcccgcaaggtcaaatgtgatgaacaacatccatattgtcaacgatgttccatttctggtagatcgtgtggtggatacggcaaagctccagttggctccatttcgtggactcaattgttgcaaactcgtccggcactcacccctgattcatcggctccgagccatgaattacagggtctagattactttcgaaacataatagtgcctattttcgggaatgcattaggtggtgatttttggacaagatctgtgttacaactagcgatccagcaaaatccggcacgaaatgctgtattggccatcagttccttatatcaggatttcgtcccagtcatcggtggcattcctatgaaggctcaggtaaaggcagtcagatactataacgcagctttaaggcaagtcgcaacggcgaagtttctcgacgacaacactatacttctcctttcaatactattcacatgtattgaatttttgcgaggcgaccctgcggctgcgatcgctcattgccgccatggtatacacatactacaacatgcacataattgttctccagacatgcgggcaatcttccgtcacctaagcatatttcctttcttctttggcgcaacactatctgactttcctcttctgcaattggccgaggagtcgaacaacttcaatagtgcgactcaagcagcagaagcactagactgcctcatgtcacgttgcgtcagattggttcgcgcatttgacccatttcgcctggctaagacgaaagcctcagaagtatcggcgtcaacattgttcgaacaacaggagctaagcgaaagactcggcacatggttttccatattctgcactattagagagcagcatgcctatcccagtgacagcgacctatccctatatcggaatttggaaatgcgatggcttgtttctaagatatggattgagattgcatcatctagaaacgaaattgcgagtgacaactatcgacagcagttcactcgcatcgtcgacctcgcacgagaagaggctagcgtcaaacaatcctctaataccaagatacgcaacagtttcaaatttgacatgggcatgcttccgctattacactttgtggttatcaaatgccggtatttgcaccttcgcttagaagctctatctttaatgcagatcctcggatgcttgagagagtcttcttgggatgcgactattatgcgtggtattgcaaagagtatcatcaagcaagaacatggtctgaacgccgactcgcgacatcttgacgaactacttcaaggtggagatataagggacgatttgccaggtgatgatcagagaatacgagagtcatggctcgaagatgagacgcgagtgagtgtcgacgagtatggatccaattatttgcagcagaagatatgtttcttcgttcgtcgatctgatgaagaggacatcagcacaatcgaagattggatttctctcccaggagatagacgtccaagtttctgatatcatgactcaaaatagacaatttctgatctctcaagagacatggttccctctatcattgctctcgagtttaatagaagacagcagcttgatagttgaactacagcctgtccgttcccatgcagcccatcctttccacgatctcctcaccgagtacgttcgcttcagaggggaggccttcctctacttcaaggagatggagttaatattaacgaatagacttttgattccaacttgggttcagactcacacacggcctcgactagaagcacaacgcccgtcagatgaacggctttttctaccagcttcgcaagcacctatgtcatgactctcatcctcctcggacccatgacctttggttatctgaagcagaaatactctggaattatcttccacggcccaataaacagcgacctattccacacttgactattgctctgttattgagctcaggctggggcgcctaaattcaggtttagatcggtatagagtaaaacgggcggactagataggggccacaaaggaatggacaaaatcccgagttcctataaacgcgcagtgtatatcgttttgtggtgacaggaagcatagactacagccctagagtcgtggtttctaagagacacttggctaatttacgggcctgaaatagatcgatgtgaaaatgcgtcagagaaacattttctgctacacttacattgtagcctactctagaagacgtctcacagatagcatatatcaaatagtagtaaccgtgtaagctttgagaagcactctaaaagctta

SEQ ID NO: 16265 - DNA, 1749 bp, Muscodor strobelii
  misc_feature: SGI cDNA ID NO. 565404
  misc_feature: Encodes the peptide sequence at SEQ ID NO 16266
atgttttcacacttaaaggtcgtggctctgatagcctctgcgacaggagcattagctacgcaatgctcaattgcaggacccggctatccatcgcctgccaaattctccagcagctccttactcacggatgctattgcacaattcgaggacaatctgagtaatgtcacacttggcctcgagcctaataacacggcatgggctgtagcgctcttctcatcaaaagaaaagaaaacgttatacgaacacttctatactcctccgctcaacgtcaatgttccgaaggtcgacgccaactccgttttccgcatcgggagcgtctcaaaagtcttcagcgtttggtcttttctgttggaagttggagataagcacttcaatgatccgatcaccaaatacgtaccagagctctcaaatatcacccgcactagccgtggtaacggcgagatatacaacgatctggatcaggtccgatgggaagacgttactctcggcgagcttgcaagccacgcggctgggatgcctcgcgacgccaccgctggcgatattgctggtgtttatacttcagaagagctatcaggattagggttcccgtctctcaacaaaagcgaccttcctacttgcgaccaacctccaaatagtggtccttgcacgcgtaaagaattattctcttatctcctgaaacaacacccgatctttccaacatcccactcgcctgcatacagcaaccttgcttttacgctcctcgaattcgcacaagaagccataaccggaacatctctcagcgacgcaatgacaaagaacatatttcaggcccttggtatgaacaacagctcctactctacaccaccgacgtcgggcggcgtgattccaggaggcgacccaacaaatgtaggctgggatttcgacctcggaaatggcgccccatcgggctcactctacagctcaacatcagacatggtcaaagccggacaagccattctccaatcaacgacgatgtctcaggctgcaactcgccgatggctgaagccgttgatccaaacaggattgctcagcacggctgtaggcgcgccatgggaaatccgatatctaacgctccccaacaagcgcatgacacaactcccaacaaagcaaggagacgtcgggagctaccacgcagccatagccttctcaccagagcacgatctgggctgggtcgtactcacagccgacaacacacagtctctccagtcatccgtccgtactgatctgctcgattcgtttggttcaatattcctgcccgccgccgagtcacaagccgcggccgaagccaagaacaatttcgtggggacgtacaccgactccgcaaccaattcctctctctccattctcgagaacccgacgcacgagtccggtctcttcgtgaacagtctggtaagcaacgggaagcagatcatcggtcccgaaagcccgtttatatcgacctacggagctgggcaatccgcattgttgtttccctcgactttgaaagctgttagtaagacggcggacggtaaggggacttatgagagcaaacttgggtttaagactacgtacttcgatgaaggtccggagaatgaggttgatgatccgtgcttgttgacttggactgcgttgggtcaaccactttatggtggtgtggcgctggatgattgggtcttcgaaatgggcgaggttgggaaggccaaggctgttgatgttaggattttgagggtcaagttagggagggctgagtga

SEQ ID NO: 16266 - protein, 582 aa, Muscodor strobelii
  misc_feature: SGI Peptide ID NO. 565404
  misc_feature (41)..(419): Pfam Id: PF00144 Pfam Desc: Beta-lactamase
  misc_feature (94)..(419): Pfam Id: PF00144 Pfam Desc: Beta-lactamase
  misc_feature (5)..(571): NCBI GI: 145615418 Blast Desc: MGG_05577 [Magnaporthe grisea 70-15] gi|145022249|gb|EDK06269.1| MGG_05577 [Magnaporthe grisea 70-15]
  misc_feature (17)..(582): NCBI GI: 169765968 Blast Desc: [Aspergillus oryzae RIB40] gi|83765310|dbj|BAE55453.1| protein product [Aspergillus oryzae]
  misc_feature (24)..(581): NCBI GI: 242799287 Blast Desc: beta-lactamase, [Talaromyces stipitatus ATCC 10500] gi|218716692|gb|EED16113.1| beta-lactamase, [Talaromyces stipitatus ATCC 10500]
  misc_feature (2)..(582): NCBI GI: 67904662 Blast Desc: AN9318.2 [Aspergillus nidulans FGSC A4] gi|40747229|gb|EAA66385.1| AN9318.2 [Aspergillus nidulans FGSC A4] gi|259488153|tpe|CBF87393.1| TPA: conserved [Aspergillus FGSC
  misc_feature (7)..(582): NCBI GI: 261195506 Blast Desc: conserved [Ajellomyces dermatitidis SLH14081] gi|239588029|gb|EEQ70672.1| conserved [Ajellomyces dermatitidis SLH14081]
  misc_feature (19)..(582): NCBI GI: 240275957 Blast Desc: conserved [Ajellomyces capsulatus H143]
  misc_feature (19)..(582): NCBI GI: 225563362 Blast Desc: conserved [Ajellomyces capsulatus G186AR]
  misc_feature (19)..(582): NCBI GI: 226286817 Blast Desc: conserved [Paracoccidioides brasiliensis Pb18]
  misc_feature (5)..(581): NCBI GI: 256722357 Blast Desc: NECHADRAFT_44385 [Nectria haematococca mpVI 77-13-4]
  misc_feature (19)..(582): NCBI GI: 225684643 Blast Desc: conserved [Paracoccidioides brasiliensis Pb03]
MFSHLKVVALIASATGALATQCSIAGPGYPSPAKFSSSSLLTDAIAQFEDNLSNVTLGLEPNNTAWAVALFSSKEKKTLYEHFYTPPLNVNVPKVDANSVFRIGSVSKVFSVWSFLLEVGDKHFNDPITKYVPELSNITRTSRGNGEIYNDLDQVRWEDVTLGELASHAAGMPRDATAGDIAGVYTSEELSGLGFPSLNKSDLPTCDQPPNSGPCTRKELFSYLLKQHPIFPTSHSPAYSNLAFTLLEFAQEAITGTSLSDAMTKNIFQALGMNNSSYSTPPTSGGVIPGGDPTNVGWDFDLGNGAPSGSLYSSTSDMVKAGQAILQSTTMSQAATRRWLKPLIQTGLLSTAVGAPWEIRYLTLPNKRMTQLPTKQGDVGSYHAAIAFSPEHDLGWVVLTADNTQSLQSSVRTDLLDSFGSIFLPAAESQAAAEAKNNFVGTYTDSATNSSLSILENPTHESGLFVNSLVSNGKQIIGPESPFISTYGAGQSALLFPSTLKAVSKTADGKGTYESKLGFKTTYFDEGPENEVDDPCLLTWTALGQPLYGGVALDDWVFEMGEVGKAKAVDVRILRVKLGRAE

SEQ ID NO: 16267 - DNA, 627 bp, Muscodor strobelii
  misc_feature: SGI cDNA ID NO. 565405
  misc_feature: Reduced expression when VOC is produced
  misc_feature: Encodes the peptide sequence at SEQ ID NO 16268
atgaagttctccctcgctactctcgccggtcttgccttggccggcaacgccgctgctgctcccctggtggagcgtgccgccatggccgcagacatcattgcagccatcgctcctaagtctaagagctgtgatggccgtggcgatgaatgcatgaccaatgtccagattgctggtcccttcgttactgccatgaatcagtacaacctcaagtatcccgcgcaaatcgctgcagtgcttgctcttaccgccttcgagtcggtcgagtatcaatacaacacgaatcagtcccccggccgccccggtcagggaacctcaaacatgcagatgatcgacttcaacgtcaagtacgccgcatcgatccccgctctcaaggaccaattggctgccattggcgaccccagcaccgatgataagaagaaccaggtccttgatctagtcactgccgtcgactacaacttcggttcgggtccttggttcattaccacgcagtgctctaaggacgttgttgatgggctgaaggtcgccacggacgctgcatgggccgcgtacatgggctgcgttggtgtcgaggccactgccgagcgtacggcctactggacggcagctaagaaagcattcggcttgtaa

SEQ ID NO: 16268 - protein, 208 aa, Muscodor strobelii
  misc_feature: SGI Peptide ID NO. 565405
  misc_feature (1)..(208): NCBI GI: 256729021 Blast Desc: NECHADRAFT_40304 [Nectria haematococca mpVI 77-13-4]
  misc_feature (22)..(208): NCBI GI: 115386248 Blast Desc: conserved [Aspergillus terreus NIH2624] gi|114190663|gb|EAU32363.1| conserved [Aspergillus terreus NIH2624]
  misc_feature (21)..(208): NCBI GI: 261356328 Blast Desc: conserved [Verticillium albo-atrum VaMs.102]
  misc_feature (33)..(208): NCBI GI: 121703630 Blast Desc: conserved [Aspergillus clavatus NRRL 1] gi|119398223|gb|EAW08653.1| conserved [Aspergillus clavatus NRRL 1]
  misc_feature (32)..(208): NCBI GI: 46138889 Blast Desc: FG10959.1 [Gibberella zeae PH-1]
  misc_feature (33)..(207): NCBI GI: 119467738 Blast Desc: NFIA_051230 [Neosartorya fischeri NRRL 181] gi|119405827|gb|EAW15778.1| conserved [Neosartorya fischeri NRRL 181]
  misc_feature (11)..(208): NCBI GI: 145250175 Blast Desc: An15g00620 [Aspergillus niger] gi|134082115|emb|CAK42231.1| [Aspergillus niger]
  misc_feature (28)..(207): NCBI GI: 70984182 Blast Desc: conserved [Aspergillus fumigatus Af293] gi|66845236|gb|EAL85571.1| conserved [Aspergillus fumigatus Af293] gi|159122396|gb|EDP47517.1| conserved [Aspergillus A1163]
  misc_feature (1)..(207): NCBI GI: 67540730 Blast Desc: AN6535.2 [Aspergillus nidulans FGSC A4] gi|40738685|gb|EAA57875.1| AN6535.2 [Aspergillus nidulans FGSC A4] gi|259480106|tpe|CBF70935.1| TPA: conserved [Aspergillus FGSC
  misc_feature (49)..(206): NCBI GI: 258572622 Blast Desc: [Uncinocarpus reesii 1704] gi|237905343|gb|EEP79744.1| [Uncinocarpus reesii 1704]
  misc_feature: Useful for introducing or modulating the production of volatile compounds
MKFSLATLAGLALAGNAAAAPLVERAAMAADIIAAIAPKSKSCDGRGDECMTNVQIAGPFVTAMNQYNLKYPAQIAAVLALTAFESVEYQYNTNQSPGRPGQGTSNMQMIDFNVKYAASIPALKDQLAAIGDPSTDDKKNQVLDLVTAVDYNFGSGPWFITTQCSKDVVDGLKVATDAAWAAYMGCVGVEATAERTAYWTAAKKAFGL

SEQ ID NO: 16269 - DNA, 360 bp, Muscodor strobelii
  misc_feature: SGI cDNA ID NO. 565406
  misc_feature: Encodes the peptide sequence at SEQ ID NO 16270
atgtcgacagtaaggcccgaccccaatctccaactgttgtttcctagtttgtttcggtcccaaatcacaagtcctaacagctctacagagaaagtcttgatcctcaccgctgactcgcgcacccttgtcggcaacctgttgagctgcgaccaacaaaccaatctcgtgctgggccaggccgttgagcgtgtcattcgcgacgctgacgacgacgaagcatcaaccgaggtccccctgggcctctacattgttcgaggagacaatgtctgtgttgttggcctagtggacgagccacttgacgacagcatcaactgggaggcagtaaagggctcggcaatcggtggtatcaaacacgtctga

SEQ ID NO: 16270 - protein, 119 aa, Muscodor strobelii
  misc_feature: SGI Peptide ID NO. 565406
  misc_feature (22)..(94): Pfam Id: PF01423 Pfam Desc: LSM domain
  misc_feature (30)..(94): Pfam Id: PF01423 Pfam Desc: LSM domain
  misc_feature (30)..(118): NCBI GI: 156053235 Blast Desc: SS1G_06785 [Sclerotinia sclerotiorum 1980] gi|154704563|gb|EDO04302.1| SS1G_06785 [Sclerotinia sclerotiorum 1980]
  misc_feature (30)..(118): NCBI GI: 154314610 Blast Desc: [Botryotinia fuckeliana B05.10] gi|150848636|gb|EDN23829.1| [Botryotinia fuckeliana B05.10]
  misc_feature (26)..(116): NCBI GI: 46107166 Blast Desc: FG00466.1 [Gibberella zeae PH-1]
  misc_feature (27)..(118): NCBI GI: 171687845 Blast Desc: protein product [Podospora anserina] gi|170943884|emb|CAP69536.1| protein product [Podospora anserina]
  misc_feature (30)..(119): NCBI GI: 225679568 Blast Desc: splicing factor [Paracoccidioides brasiliensis Pb03]
  misc_feature (30)..(119): NCBI GI: 240278846 Blast Desc: small nuclear ribonucleoprotein Lsm8 [Ajellomyces capsulatus H143]
  misc_feature (30)..(119): NCBI GI: 225560095 Blast Desc: conserved [Ajellomyces capsulatus G186AR]
  misc_feature (30)..(119): NCBI GI: 154288024 Blast Desc: conserved [Ajellomyces capsulatus NAm1] gi|150408448|gb|EDN03989.1| conserved [Ajellomyces capsulatus NAm1]
  misc_feature (30)..(118): NCBI GI: 255936991 Blast Desc: Pc13g11030 [Penicillium chrysogenum Wisconsin 54-1255] gi|211584142|emb|CAP92172.1| Pc13g11030 [Penicillium chrysogenum Wisconsin 54-1255]
  misc_feature (30)..(119): NCBI GI: 242769181 Blast Desc: small nuclear ribonucleoprotein Lsm8, [Talaromyces stipitatus ATCC 10500] gi|218724913|gb|EED24330.1| small nuclear ribonucleoprotein Lsm8, [Talaromyces stipitatus ATCC 10500]
MSTVRPDPNLQLLFPSLFRSQITSPNSSTEKVLILTADSRTLVGNLLSCDQQTNLVLGQAVERVIRDADDDEASTEVPLGLYIVRGDNVCVVGLVDEPLDDSINWEAVKGSAIGGIKHV

SEQ ID NO: 16271 - DNA, 2468 bp, Muscodor strobelii
  misc_feature: SGI EST ID NO. CUFF.38522.0
  misc_feature: Variant of the nucleotide sequence at SEQ ID NO 16269
tcgcgagctttcaacacaaagcttcccgtcgttgactcaaaggtgctttccactcgccggccgacgtcgcagctgtctttggatcactaccacagcttgaagaacccgtacttggagcatatttggtttgcgcattgtttgcaagcgttgtgcaggctccggacgccgttactctctgggccgcgggctggtcgctgcgcaagcgactaccacctcaacgtgattccctccctagcaagacacaatgtcgaatctccacagttatgtcgacaagaaagtcttgatcctcaccgctgactcgcgcacccttgtcggcaacctgttgagctgcgaccaacaaaccaatctcgtgctgggccaggccgttgagcgtgtcattcgcgacgctgacgacgacgaagcatcaaccgaggtccccctgggcctctacattgttcgaggagacaatgtctgtgttgttggcctagtggacgagccacttgacgacagcatcaactgggaggcagtaaagggctcggcaatcggtggtatcaaacacgtctgagcgaggacagaaaaaggacgggcggcaaagacaaacagttggtagtccgcccataatgatacgatgggaagagagaggcttgagacttgatgctgcagagactttgttactagggtatgctcttgaccaaatgataccattacatattttgtcttgctgacacacctacggtctttgtctacatgggcagtggtccgtctgcgcaatatctctagccaaacaaccgttccatgaggaacggcgcgaaggcttcaaacccaggactactaacataccgatttattctattccctctcttagagctcagccagcccatttcgtctccaattatctcttctctggctttgccatccgctcggactcttccgcgagtatccttcacatgcattccgtgggtccattgcccagaagtctcgacgcgaatatcctcaggtgcatcctttgccaacttccactccggctgtgagcctgtgagcatataccatatggtcaatgggtcgtgaagggaaagtccgggctcttctgcgtctcctactatggagacgatctgtcggaagataccgctcatgaaagtgttgacccattggcccagcgggctttcgacagccagctctgtctcaatgcgctccatgaaatatcccatgttcaaaaggtgaggggttgtaatatcaagagggaataggctgagattcagttgcttcgataatttctccgggtattctggtagagtagtcttgtccttcggtaccggaggcatggtagatgaaggagtaggagatgtcaaggcgaagattcgagccgtagccaccgcatcggcatacgtgttaaactcggcaaagggcgtgacgtttcccggcacctcaactgctcctcccatgacagcaatctccttgactctcaagaaggtttccgggtcttccgatgcggcgagcgccaaattcgtcaatggaccaagaacgcaaatagaaatagtgtcggctggctcctccttcaatatcctcaaaatctcctggtgcgcaggtgtcttcgaaggcgtgaagtatttgtagtaagaaggctcctcgccagggccagggagaccatctttgaaaagagccttccaggtatcctcaggcgacagatgcggatgctatgccataaatcagttcctaccgaaatttcaggggtcaagtcgtggacatacagcgtcgtgtactccgtgtaagccgtcggaaccatctacgttgggttatcagaaatgctcgtagtccacaatcaagtatcgggctgcaatcatacggaagccatcctccatcaataactcgtcctcgagaggatggtcggggcccacagacacaatgggtttataagtacgcaaggcctcgaaacccaaagctttccctcgtgcctggcgccattccatctcgtggtcgagcaccttgaagagcccgacgacattgcgaagacatccctcgagcggcacgtttccatacgtcaccgaaatcatcttgacctcgagatcctcgggcgaggaagccagcgcgagcagcatggccagcacatcatcgccgcctgtggtttcgggaacaagcatgtgttagtggagtcgcttgtcttatatagcagggcagatgaactggagcctcattttctatggctctctcatcaatattgagtacttgcctgggtctgtgtcgattatgatctttcttttgggcgccatgtttagtgggtgagcgaggagcaatgggagttgggttagtagagattttttccaatctgacgacagcaaaccggaatagaccaggaaataaataatcagacacaagtctgtcacgctgtattggtaagggcgcgcctctttaagtgatgccctgcaaaagtcattcacttcacccacattatgttcggtgatggaggggttctcctcttggcagaactttgg

SEQ ID NO: 16272 - DNA, 1248 bp, Muscodor strobelii
  misc_feature: SGI cDNA ID NO. 565407
  misc_feature: Encodes the peptide sequence at SEQ ID NO 16273
atgcttgttcccgaaaccacaggcggcgatgatgtgctggccatgctgctcgcgctggcttcctcgcccgaggatctcgaggtcaagatgatttcggtgacgtatggaaacgtgccgctcgagggatgtcttcgcaatgtcgtcgggctcttcaaggtgctcgaccacgagatggaatggcgccaggcacgagggaaagctttgggtttcgaggccttgcgtacttataaacccattgtgtctgtgggccccgaccatcctctcgaggacgagttattgatggaggatggcttccatggttccgacggcttacacggagtacacgacgctcatccgcatctgtcgcctgaggatacctggaaggctcttttcaaagatggtctccctggccctggcgaggagccttcttactacaaatacttcacgccttcgaagacacctgcgcaccaggagattttgaggatattgaaggaggagccagccgacactatttctatttgcgttcttggtccattgacgaatttggcgctcgccgcatcggaagacccggaaaccttcttgagagtcaaggagattgctgtcatgggaggagcagttgaggtgccgggaaacgtcacgccctttgccgagtttaacacgtatgccgatgcggtggctacggctcgaatcttcgccttgacatctcctactccttcatctaccatgcctccggtaccgaaggacaagactactctaccagaatacccggagaaattatcgaagcaactgaatctcagcctattccctcttgatattacaacccctcaccttttgaacatgggatatttcatggagcgcattgagacagagctggctgtcgaaagcccgctgggccaatgggtcaacactttcatgagcggtatcttccgacagatcgtctccatagtaggagacgcagaagagcccggactttcccttcacgacccattgaccatatggtatatgctcacaggctcacagccggagtggaagttggcaaaggatgcacctgaggatattcgcgtcgagacttctgggcaatggacccacggaatgcatgtgaaggatactcgcggaagagtccgagcggatggcaaagccagagaagagataattggagacgaaatgggctggctgagctctaagagagggaatagaataaatcggtatgttagtagtcctgggtttgaagccttcgcgccgttcctcatggaacggttgtttggctag

SEQ ID NO: 16273 - protein, 415 aa, Muscodor strobelii
  misc_feature: SGI Peptide ID NO. 565407
  misc_feature (7)..(397): Pfam Id: PF01156 Pfam Desc: Inosine-uridine preferring nucleoside hydrolase
  misc_feature (163)..(216): Pfam Id: PF01156 Pfam Desc: Inosine-uridine preferring nucleoside hydrolase
  misc_feature (8)..(415): NCBI GI: 85111938 Blast Desc: NCU03084 [Neurospora crassa OR74A] gi|28925947|gb|EAA34941.1| conserved [Neurospora crassa OR74A]
  misc_feature (18)..(415): NCBI GI: 256735266 Blast Desc: [Nectria haematococca mpVI 77-13-4]
  misc_feature (14)..(415): NCBI GI: 46107164 Blast Desc: FG00465.1 [Gibberella zeae PH-1]
  misc_feature (8)..(415): NCBI GI: 171687847 Blast Desc: protein product [Podospora anserina] gi|170943885|emb|CAP69537.1| protein product [Podospora anserina]
  misc_feature (1)..(414): NCBI GI: 145614584 Blast Desc: MGG_04540 [Magnaporthe grisea 70-15] gi|145021484|gb|EDK05613.1| MGG_04540 [Magnaporthe grisea 70-15]
  misc_feature (8)..(415): NCBI GI: 156053237 Blast Desc: SS1G_06786 [Sclerotinia sclerotiorum 1980] gi|154704564|gb|EDO04303.1| SS1G_06786 [Sclerotinia sclerotiorum 1980]
  misc_feature (8)..(415): NCBI GI: 116180398 Blast Desc: CHGG_00827 [Chaetomium globosum CBS 148.51] gi|88185124|gb|EAQ92592.1| CHGG_00827 [Chaetomium globosum CBS 148.51]
  misc_feature (1)..(414): NCBI GI: 212542657 Blast Desc: nucleoside hydrolase, [Penicillium marneffei ATCC 18224] gi|210066390|gb|EEA20483.1| nucleoside hydrolase, [Penicillium marneffei ATCC 18224]
  misc_feature (8)..(414): NCBI GI: 119184387 Blast Desc: CIMG_07009 [Coccidioides immitis RS]
  misc_feature (20)..(414): NCBI GI: 119495604 Blast Desc: inosine-uridine preferring nucleoside hydrolase [Neosartorya fischeri NRRL 181] gi|119412745|gb|EAW22686.1| inosine-uridine preferring nucleoside hydrolase [Neosartorya NRRL
  misc_feature (8)..(224): SWISSPROT Homolog: EC 3.2.2.8 Ribosylpyrimidine nucleosidase
MLVPETTGGDDVLAMLLALASSPEDLEVKMISVTYGNVPLEGCLRNVVGLFKVLDHEMEWRQARGKALGFEALRTYKPIVSVGPDHPLEDELLMEDGFHGSDGLHGVHDAHPHLSPEDTWKALFKDGLPGPGEEPSYYKYFTPSKTPAHQEILRILKEEPADTISICVLGPLTNLALAASEDPETFLRVKEIAVMGGAVEVPGNVTPFAEFNTYADAVATARIFALTSPTPSSTMPPVPKDKTTLPEYPEKLSKQLNLSLFPLDITTPHLLNMGYFMERIETELAVESPLGQWVNTFMSGIFRQIVSIVGDAEEPGLSLHDPLTIWYMLTGSQPEWKLAKDAPEDIRVETSGQWTHGMHVKDTRGRVRADGKAREEIIGDEMGWLSSKRGNRINRYVSSPGFEAFAPFLMERLFG

SEQ ID NO: 16274 - DNA, 2381 bp, Muscodor strobelii
  misc_feature: SGI EST ID NO. CUFF.38523.1
  misc_feature: Variant of the nucleotide sequence at SEQ ID NO 16272
ccaaagttctgccaagaggagaacccctccatcaccgaacataatgtgggtgaagtgaatgacttttgcagggcatcacttaaagaggcgcgcccttaccaatacagcgtgacagacttgtgtctgattatttatttcctggtctattccggtttgctgtcgtcagattggaaaaaatctctactaacccaactcccattgctcctcgctcacccactaaacatggcgcccaaaagaaagatcataatcgacacagacccaggcggcgatgatgtgctggccatgctgctcgcgctggcttcctcgcccgaggatctcgaggtcaagatgatttcggtgacgtatggaaacgtgccgctcgagggatgtcttcgcaatgtcgtcgggctcttcaaggtgctcgaccacgagatggaatggcgccaggcacgagggaaagctttgggtttcgaggccttgcgtacttataaacccattgtgtctgtgggccccgaccatcctctcgaggacgagttattgatggaggatggcttccatggttccgacggcttacacggagtacacgacgctcatccgcatctgtcgcctgaggatacctggaaggctcttttcaaagatggtctccctggccctggcgaggagccttcttactacaaatacttcacgccttcgaagacacctgcgcaccaggagattttgaggatattgaaggaggagccagccgacactatttctatttgcgttcttggtccattgacgaatttggcgctcgccgcatcggaagacccggaaaccttcttgagagtcaaggagattgctgtcatgggaggagcagttgaggtgccgggaaacgtcacgccctttgccgagtttaacacgtatgccgatgcggtggctacggctcgaatcttcgccttgacatctcctactccttcatctaccatgcctccggtaccgaaggacaagactactctaccagaatacccggagaaattatcgaagcaactgaatctcagcctattccctcttgatattacaacccctcaccttttgaacatgggatatttcatggagcgcattgagacagagctggctgtcgaaagcccgctgggccaatgggtcaacactttcatgagcggtatcttccgacagatcgtctccatagtaggagacgcagaagagcccggactttcccttcacgacccattgaccatatggtatatgctcacaggctcacagccggagtggaagttggcaaaggatgcacctgaggatattcgcgtcgagacttctgggcaatggacccacggaatgcatgtgaaggatactcgcggaagagtccgagcggatggcaaagccagagaagagataattggagacgaaatgggctggctgagctctaagagagggaatagaataaatcggtatgttagtagtcctgggtttgaagccttcgcgccgttcctcatggaacggttgtttggctagagatattgcgcagacggaccactgcccatgtagacaaagaccgtaggtgtgtcagcaagacaaaatatgtaatggtatcatttggtcaagagcataccctagtaacaaagtctctgcagcatcaagtctcaagcctctctcttcccatcgtatcattatgggcggactaccaactgtttgtctttgccgcccgtcctttttctgtcctcgctcagacgtgtttgataccaccgattgccgagccctttactgcctcccagttgatgctgtcgtcaagtggctcgtccactaggccaacaacacagacattgtctcctcgaacaatgtagaggcccagggggacctcggttgatgcttcgtcgtcgtcagcgtcgcgaatgacacgctcaacggcctggcccagcacctggaggtgatcagttagccgtacaatgtcgcatacgccggggaaaggtgatggcgaacgagattggtttgttggtcgcagctcaacaggttgccgacaagggtgcgcgagtcagcggtgaggatcaagactttctctgtagagctgttaggacttgtgatttgggaccgaaacaaactaggaaacaacagttggagattggggtcgggccttactgtcgacataactgtggagattcgacattgtgtcttgctagggagggaatcacgttgaggtggtagtcgcttgcgcagcgaccagcccgcggcccagagagtaacggcgtccggagcctgcacaacgcttgcaaacaatgcgcaaaccaaatatgctccaagtacgggttcttcaagctgtggtagtgatccaaagacagctgcgacgtcggccggcgagtggaaagcacctttgagtcaacgacgggaagctttgtgttgaaagctcgcga

SEQ ID NO: 16275 - DNA, 1266 bp, Muscodor strobelii
  misc_feature: SGI cDNA ID NO. 565408
  misc_feature: Encodes the peptide sequence at SEQ ID NO 16276
atggcgcccaaaagaaagatcataatcgacacagacccaggcggcgatgatgtgctggccatgctgctcgcgctggcttcctcgcccgaggatctcgaggtcaagatgatttcggtgacgtatggaaacgtgccgctcgagggatgtcttcgcaatgtcgtcgggctcttcaaggtgctcgaccacgagatggaatggcgccaggcacgagggaaagctttgggtttcgaggccttgcgtacttataaacccattgtgtctgtgggccccgaccatcctctcgaggacgagttattgatggaggatggcttccatggttccgacggcttacacggagtacacgacgctcatccgcatctgtcgcctgaggatacctggaaggctcttttcaaagatggtctccctggccctggcgaggagccttcttactacaaatacttcacgccttcgaagacacctgcgcaccaggagattttgaggatattgaaggaggagccagccgacactatttctatttgcgttcttggtccattgacgaatttggcgctcgccgcatcggaagacccggaaaccttcttgagagtcaaggagattgctgtcatgggaggagcagttgaggtgccgggaaacgtcacgccctttgccgagtttaacacgtatgccgatgcggtggctacggctcgaatcttcgccttgacatctcctactccttcatctaccatgcctccggtaccgaaggacaagactactctaccagaatacccggagaaattatcgaagcaactgaatctcagcctattccctcttgatattacaacccctcaccttttgaacatgggatatttcatggagcgcattgagacagagctggctgtcgaaagcccgctgggccaatgggtcaacactttcatgagcggtatcttccgacagatcgtctccatagtaggagacgcagaagagcccggactttcccttcacgacccattgaccatatggtatatgctcacaggctcacagccggagtggaagttggcaaaggatgcacctgaggatattcgcgtcgagacttctgggcaatggacccacggaatgcatgtgaaggatactcgcggaagagtccgagcggatggcaaagccagagaagagataattggagacgaaatgggctggctgagctctaagagagggaatagaataaatcggtatgttagtagtcctgggtttgaagccttcgcgccgttcctcatggaacggttgtttggctag

SEQ ID NO: 16276 - protein, 421 aa, Muscodor strobelii
  misc_feature: SGI Peptide ID NO. 565408
  misc_feature (4)..(403): Pfam Id: PF01156 Pfam Desc: Inosine-uridine preferring nucleoside hydrolase
  misc_feature (169)..(222): Pfam Id: PF01156 Pfam Desc: Inosine-uridine preferring nucleoside hydrolase
  misc_feature (4)..(53): Pfam Id: PF01156 Pfam Desc: Inosine-uridine preferring nucleoside hydrolase
  misc_feature (1)..(421): NCBI GI: 85111938 Blast Desc: NCU03084 [Neurospora crassa OR74A] gi|28925947|gb|EAA34941.1| conserved [Neurospora crassa OR74A]
  misc_feature (1)..(421): NCBI GI: 171687847 Blast Desc: protein product [Podospora anserina] gi|170943885|emb|CAP69537.1| protein product [Podospora anserina]
  misc_feature (1)..(421): NCBI GI: 46107164 Blast Desc: FG00465.1 [Gibberella zeae PH-1]
  misc_feature (1)..(421): NCBI GI: 256735266 Blast Desc: [Nectria haematococca mpVI 77-13-4]
  misc_feature (1)..(420): NCBI GI: 145614584 Blast Desc: MGG_04540 [Magnaporthe grisea 70-15] gi|145021484|gb|EDK05613.1| MGG_04540 [Magnaporthe grisea 70-15]
  misc_feature (5)..(421): NCBI GI: 156053237 Blast Desc: SS1G_06786 [Sclerotinia sclerotiorum 1980] gi|154704564|gb|EDO04303.1| SS1G_06786 [Sclerotinia sclerotiorum 1980]
  misc_feature (1)..(421): NCBI GI: 116180398 Blast Desc: CHGG_00827 [Chaetomium globosum CBS 148.51] gi|88185124|gb|EAQ92592.1| CHGG_00827 [Chaetomium globosum CBS 148.51]
  misc_feature (4)..(420): NCBI GI: 212542657 Blast Desc: nucleoside hydrolase, [Penicillium marneffei ATCC 18224] gi|210066390|gb|EEA20483.1| nucleoside hydrolase, [Penicillium marneffei ATCC 18224]
  misc_feature (1)..(420): NCBI GI: 119184387 Blast Desc: CIMG_07009 [Coccidioides immitis RS]
  misc_feature (1)..(420): NCBI GI: 240109866 Blast Desc: Inosine-uridine preferring nucleoside hydrolase family protein [Coccidioides posadasii C735 delta SOWgp]
  misc_feature (4)..(230): SWISSPROT Homolog: EC 3.2.2.8 Ribosylpyrimidine nucleosidase
MAPKRKIIIDTDPGGDDVLAMLLALASSPEDLEVKMISVTYGNVPLEGCLRNVVGLFKVLDHEMEWRQARGKALGFEALRTYKPIVSVGPDHPLEDELLMEDGFHGSDGLHGVHDAHPHLSPEDTWKALFKDGLPGPGEEPSYYKYFTPSKTPAHQEILRILKEEPADTISICVLGPLTNLALAASEDPETFLRVKEIAVMGGAVEVPGNVTPFAEFNTYADAVATARIFALTSPTPSSTMPPVPKDKTTLPEYPEKLSKQLNLSLFPLDITTPHLLNMGYFMERIETELAVESPLGQWVNTFMSGIFRQIVSIVGDAEEPGLSLHDPLTIWYMLTGSQPEWKLAKDAPEDIRVETSGQWTHGMHVKDTRGRVRADGKAREEIIGDEMGWLSSKRGNRINRYVSSPGFEAFAPFLMERLFG

SEQ ID NO: 16277 - DNA, 2381 bp, Muscodor strobelii; identical to SEQ ID NO: 16274
  misc_feature: SGI EST ID NO. CUFF.38523.1
  misc_feature: Variant of the nucleotide sequence at SEQ ID NO 16275

SEQ ID NO: 16278 - DNA, 1197 bp, Muscodor strobelii
  misc_feature: SGI cDNA ID NO. 565409
  misc_feature: Reduced expression when VOC is produced
  misc_feature: Encodes the peptide sequence at SEQ ID NO 16279
atggatattgcgaaggactactccatctacaccaccatcggtggctgggcatttctaatactggctggtggtgtggtatactacagatctcagacaaagaccccgcgcccccagatcatcaagcagggccccagacagtcggagcctagcgtgtctggcgattccaagaagaaggccgagaaagccgcgaagcccaagccaaaacctcaagcaccctcgacgagcacgacccaacccgttgcaccgaccgtcgactacgatgcagagcaagaggaggccagcgagaagaaggcagctcgggagtttgccaagcagatgcagaaggccgtcaccggcaccaaagtcaataccaagaaatctgatgacaagcgccaaaagtctgtgaagcagtccaaggctcaggagaaggctgaggaggctgttcccgacaagttgtctgccccctcctccaccaccggtgatgccgatgacgatctgtctcctcaggtctctccggcctttgccgctgcagacagccaaggtggtgtcgccgacatgctcgagcctgtcgcttctggaccctccgtccttcgtctgacagacaccgactctgccaagaagccccaacagcgacaagccaaggccgcccagcccgtcgagaccaagaagcagcgccagaaccgcaagaaagctgaggccgccaaggctgctcgtgaggaggacgagaaagatcgcaaggtcttgatggagcagcagcgacgaactgctcgcattgctgagggccgagccgctaaggatggctccgcctttatgtccacccagaacgcttgggacaacaagcccaccaacggcagtacccctgttcagctccttgacaccgtcgaacagccccagagcgtcaagccggtagcttccaagcctgccccggtctcggccgcgcctgctgacgcctacgtcaacctgccatctgaggaggaacagttggagatgatccgagctgaggattcttggagtgaggtcaagaccaagaagaaggggaagaagaaggagactcctgcttccatccctgcagctagcactcctactgcttcgagcaccaagcctgtcaacgcgcccaagaaacccgtcttgactagcagcagctcctcttttgctgctctcacgtctgaagatatcgccgacgaggaggaggaagtggagcaggaatgggatgtatga

SEQ ID NO: 16279 - protein, 398 aa, Muscodor strobelii
  misc_feature: SGI Peptide ID NO. 565409
  misc_feature (11)..(398): NCBI GI: 39945122 Blast Desc: MGG_04543 [Magnaporthe grisea 70-15] gi|145021482|gb|EDK05611.1| MGG_04543 [Magnaporthe grisea 70-15]
  misc_feature (10)..(398): NCBI GI: 171687849 Blast Desc: protein product [Podospora anserina] gi|170943886|emb|CAP69538.1| protein product [Podospora anserina]
  misc_feature (3)..(398): NCBI GI: 256734553 Blast Desc: NECHADRAFT_74932 [Nectria haematococca mpVI 77-13-4]
  misc_feature (72)..(389): NCBI GI: 164427314 Blast Desc: NCU03083 [Neurospora crassa OR74A] gi|157071691|gb|EAA34940.2| [Neurospora crassa OR74A]
  misc_feature (8)..(398): NCBI GI: 46107162 Blast Desc: FG00464.1 [Gibberella zeae PH-1]
  misc_feature (13)..(398): NCBI GI: 261357410 Blast Desc: conserved [Verticillium albo-atrum VaMs.102]
  misc_feature (8)..(288): NCBI GI: 156053239 Blast Desc: SS1G_06787 [Sclerotinia sclerotiorum 1980] gi|154704565|gb|EDO04304.1| SS1G_06787 [Sclerotinia sclerotiorum 1980]
  misc_feature (8)..(288): NCBI GI: 154314614 Blast Desc: BC1G_04016 [Botryotinia fuckeliana B05.10] gi|150848638|gb|EDN23831.1| BC1G_04016 [Botryotinia fuckeliana B05.10]
  misc_feature (16)..(333): NCBI GI: 242769146 Blast Desc: conserved [Talaromyces stipitatus ATCC 10500] gi|218724906|gb|EED24323.1| conserved [Talaromyces stipitatus ATCC 10500]
  misc_feature (13)..(353): NCBI GI: 226281591 Blast Desc: conserved [Paracoccidioides brasiliensis Pb01]
  misc_feature: Useful for introducing or modulating the production of volatile compounds
MDIAKDYSIYTTIGGWAFLILAGGVVYYRSQTKTPRPQIIKQGPRQSEPSVSGDSKKKAEKAAKPKPKPQAPSTSTTQPVAPTVDYDAEQEEASEKKAAREFAKQMQKAVTGTKVNTKKSDDKRQKSVKQSKAQEKAEEAVPDKLSAPSSTTGDADDDLSPQVSPAFAAADSQGGVADMLEPVASGPSVLRLTDTDSAKKPQQRQAKAAQPVETKKQRQNRKKAEAAKAAREEDEKDRKVLMEQQRRTARIAEGRAAKDGSAFMSTQNAWDNKPTNGSTPVQLLDTVEQPQSVKPVASKPAPVSAAPADAYVNLPSEEEQLEMIRAEDSWSEVKTKKKGKKKETPASIPAASTPTASSTKPVNAPKKPVLTSSSSSFAALTSEDIADEEEEVEQEWDV

SEQ ID NO: 16280 - DNA, 2547 bp, Muscodor strobelii
  misc_feature: SGI EST ID NO. CUFF.38412.0
  misc_feature: Variant of the nucleotide sequence at SEQ ID NO 16278
gctcatctcacccctgattgcatcgaggctgtacctatgtccgagctacgtattcacaaaaagttgcattccaaaaactcaacgccgatttatgcaactgtgaactgattatcacttctccaagttgcagctcccagatcaatcctgccggcgacgatttacccgtctgcggctctaagagtgacagctgtctcgccactctcgggccctgtcggcgcttggctgtgccagaaacacgctcacgcaacgcactttcctcacacggcaatctggcctgattgacgctcgccgcttccgcatctccaatcactgcatcgtccaacacaccatctgttcatctgtccttgcggccatcacggtgccattgaggtgctattgacgctttctcccttttaccttctttgattcactctattgtcgccaactctcaccacaattggtgcatggtctgccatcgccaagtcactcctcgtcccctgtctcacccgaacatccgtcctcgcctgagcccgtgcaaccaagctcacatcaccttgcgcaagcttcatatcgcaccagcacttgcacaagaacgcacactctcaccgtcaattaatcacgtcaattgcatttccaaccggacgcatcacaccacacccgccgcaaaccgacagtcgtcttcacagtccacacaatggatattgcgaaggactactccatctacaccaccatcggtggctgggcatttctaatactggctggtggtgtggtatactacagatctcagacaaagaccccgcgcccccagatcatcaagcagggccccagacagtcggagcctagcgtgtctggcgattccaagaagaaggccgagaaagccgcgaagcccaagccaaaacctcaagcaccctcgacgagcacgacccaacccgttgcaccgaccgtcgactacgatgcagagcaagaggaggccagcgagaagaaggcagctcgggagtttgccaagcagatgcagaaggccgtcaccggcaccaaagtcaataccaagaaatctgatgacaagcgccaaaagtctgtgaagcagtccaaggctcaggagaaggctgaggaggctgttcccgacaagttgtctgccccctcctccaccaccggtgatgccgatgacgatctgtctcctcaggtctctccggcctttgccgctgcagacagccaaggtggtgtcgccgacatgctcgagcctgtcgcttctggaccctccgtccttcgtctgacagacaccgactctgccaagaagccccaacagcgacaagccaaggccgcccagcccgtcgagaccaagaagcagcgccagaaccgcaagaaagctgaggccgccaaggctgctcgtgaggaggacgagaaagatcgcaaggtcttgatggagcagcagcgacgaactgctcgcattgctgagggccgagccgctaaggatggctccgcctttatgtccacccagaacgcttgggacaacaagcccaccaacggcagtacccctgttcagctccttgacaccgtcgaacagccccagagcgtcaagccggtagcttccaagcctgccccggtctcggccgcgcctgctgacgcctacgtcaacctgccatctgaggaggaacagttggagatgatccgagctgaggattcttggagtgaggtcaagaccaagaagaaggggaagaagaaggagactcctgcttccatccctgcagctagcactcctactgcttcgagcaccaagcctgtcaacgcgcccaagaaacccgtcttgactagcagcagctcctcttttgctgctctcacgtctgaagatatcgccgacgaggaggaggaagtggagcaggaatgggatgtatgaggtctctcagtcacccagcatcacgcctgcctccacttctgttgcgaaacccatgaacatatcttttggcctccaccatgactcgcgcaaacccgacatggcccgcaactcctacagtgctcaccaacttctttgtacaatattccgaccacaaattatcccacgctcttcccatgagagtaccaggcaggcttggcccattttatgcagggttggatcggcatcagtgggcgggtttctggatgcctgcaacacaacagaatcgcaacgtcaccagctgtcatgctgttggctcagtgcatctctatcttccgtcagacagccgcgcccccaaacagcatctgcgttcaagctgacgcagttgccgctctatgatacggaggcattctcacagtggcgttactgcttggggaaccaatagcagaaaaaaatagcaggagtccagttctctttctttttcctttcctttgatcgtgcggtgggacaggttcggtatccattgcaaaatttcagaatcaatgggcccagagcaacacgatatggtattcaagaggacactatacttcgccggccgaccgcatcgcattgtggaaaccagagccggctggcgtttagatagtgagagctactcttgcaaaaaatcataaaatatactgtgtaagattaaccaactgcgt

SEQ ID NO: 16281 - DNA, 948 bp, Muscodor strobelii
  misc_feature: SGI cDNA ID NO. 565410
  misc_feature: Encodes the peptide sequence at SEQ ID NO 16282
atgtccaagaatatcgtcctcgctggtcctggtgctcttggcaaacatgtccttgatgccttactagacaggaaattattcaccgtcacagtcctatcgcgaactcccaagccagatctcgaggccaaaggtgcagtggtcaaggtaatcgactacaacgacatcgcctctctcacactcgctctcaaggaagcagaagcagacacgctcctatcctacatagtagatctacacaactcctctgcagccgccatcagtcatcggaacctactcaacgcagctataacccaaggcaaaatccggcgtttcatacccgccgagtatgcaaacgacatcgctcgattcccagactctttaacttctgagatcgataaaccacggtttcggggatacttacgtagtatttgtcgtgtgaatgatatagagtacacgctggtgtgtaatggaataatcatggatttcttcctgccgaatggaacgaagaagtacttccctgatttaccgcatcggatggcgaatcttttacctatcgatgttcgggccgatccactgcatgctaaagttcttgggaatgtgaagtatagaattagctttacgcttgcggacgatattgcacggggtgtggtggagttgcttcgtttgccgagggggagttgggacgaggtgtcgtatttttctggtgatagacttacgtgggaggaggtcactgatgtatttgagagggtactggaagataagattgagagggagtatgttggggtggacaagcttaggagtgacgttgagcaggagaggaagaagggtgatccgatgggtattgagtttgcggagttacgtgaggctttcgggaatgcgagcgaggtctttcctgaggatgcaaggtgctttgagtaccttgagacgatgaagtttgaggagcttatgaggatgtattatgggaaggagtag

SEQ ID NO: 16282 - protein, 315 aa, Muscodor strobelii
  misc_feature: SGI Peptide ID NO. 565410
  misc_feature (5)..(265): Pfam Id: PF05368 Pfam Desc: NmrA-like family
  misc_feature (5)..(307): NCBI GI: 238838444 Blast Desc: conserved [Microsporum canis CBS 113480]
  misc_feature (6)..(258): NCBI GI: 116204097 Blast Desc: CHGG_09932 [Chaetomium globosum CBS 148.51] gi|88176060|gb|EAQ83528.1| CHGG_09932 [Chaetomium globosum CBS 148.51]
  misc_feature (6)..(254): NCBI GI: 256725502 Blast Desc: NECHADRAFT_70763 [Nectria haematococca mpVI 77-13-4]
  misc_feature (5)..(242): NCBI GI: 154311638 Blast Desc: BC1G_06278 [Botryotinia fuckeliana B05.10] gi|150850789|gb|EDN25982.1| BC1G_06278 [Botryotinia fuckeliana B05.10]
  misc_feature (6)..(259): NCBI GI: 256723448 Blast Desc: NECHADRAFT_42269 [Nectria haematococca mpVI 77-13-4]
  misc_feature (6)..(259): NCBI GI: 256725155 Blast Desc: NECHADRAFT_73228 [Nectria haematococca mpVI 77-13-4]
  misc_feature (4)..(272): NCBI GI: 239613028 Blast Desc: conserved [Ajellomyces dermatitidis ER-3]
  misc_feature (4)..(272): NCBI GI: 261189589 Blast Desc: conserved [Ajellomyces dermatitidis SLH14081] gi|239591441|gb|EEQ74022.1| conserved [Ajellomyces dermatitidis SLH14081]
  misc_feature (1)..(257): NCBI GI: 145609730 Blast Desc: MGG_03036 [Magnaporthe grisea 70-15] gi|145017123|gb|EDK01486.1| MGG_03036 [Magnaporthe grisea 70-15]
  misc_feature (4)..(312): NCBI GI: 258572626 Blast Desc: [Uncinocarpus reesii 1704] gi|237905345|gb|EEP79746.1| [Uncinocarpus reesii 1704]
MSKNIVLAGPGALGKHVLDALLDRKLFTVTVLSRTPKPDLEAKGAVVKVIDYNDIASLTLALKEAEADTLLSYIVDLHNSSAAAISHRNLLNAAITQGKIRRFIPAEYANDIARFPDSLTSEIDKPRFRGYLRSICRVNDIEYTLVCNGIIMDFFLPNGTKKYFPDLPHRMANLLPIDVRADPLHAKVLGNVKYRISFTLADDIARGVVELLRLPRGSWDEVSYFSGDRLTWEEVTDVFERVLEDKIEREYVGVDKLRSDVEQERKKGDPMGIEFAELREAFGNASEVFPEDARCFEYLETMKFEELMRMYYGKE

SEQ ID NO: 16283 - DNA, 1173 bp, Muscodor strobelii
  misc_feature: SGI cDNA ID NO. 565411
  misc_feature: Reduced expression when VOC is produced
  misc_feature: Encodes the peptide sequence at SEQ ID NO 16284
atgtcgttctgcatcgcggtccagtcggcaatcttctactatgtttcgtgtgcaccgtgttaccaagccaagcacatgcataatgtgaggaagaaggccaagttggatgccgccgagaaagagcgataccatgccgcgaaccccgagatctaccgccagccagaccccttcaataccaacccctattggtctgaggagatcatggcagggccccacgtcgagctgaagaaatcgtcgcgagaagcaagccggcattgcagtcggcagacattgaccagctccggcaaagactcgtcccctacggccgggagcagtataggcgttagtgttgtcaacccgccaagcgtcacacatacggagaatgcttcgatagcatcagaagttggaaaccataaacttccagcaactctggcccctggcttgaggcatctggcaggtcctgaaaagggcccatcgagtgttgggggcagcagcgttgacgttagtctaaccaatatacctagtgcaggaggcagtaccgtgggtgtcaactctgcaaccctagactcgtccagcgtttatggaagcagtcccggtatcacactcacacgctcagacactacttttacgaccccggagaaaagaacgatgagcttttcgaccatatcatctgcatatctgtccgaggactggaaccataaacgctaccaaagggaggacgaagaactatggggacatgagctggcacagacgggacataaactgatgaacgcgattaagcacgcaggagcctctgccggtcgcctcgtacaagagacttgggccaagaacgcaagacctattgacgaagacgaagacgaggatagtttctactttgcccagaggaatccacctgtcaacgactatcatccacccattgtgcggcagcgaccggttcacaaggatgcctatttgtggatgttacaaccaccaccaccggccaaggtcatggaaggaaaagtaccgccaataagtaggagcagcagtttcatgagcaccgccagtcggacgaccgtaaggagcgagagactagaacatggatcaccgacagcattgggctcggatccttccggccgcggctacagagctgccgtcaagccgaagttgtcaacaatatcaggcgtgcaggatgttgagaatcaagcaaacaattag

SEQ ID NO: 16284 - protein, 390 aa, Muscodor strobelii
  misc_feature: SGI Peptide ID NO. 565411
  misc_feature (1)..(345): NCBI GI: 116180394 Blast Desc: CHGG_00825 [Chaetomium globosum CBS 148.51] gi|88185122|gb|EAQ92590.1| CHGG_00825 [Chaetomium globosum CBS 148.51]
  misc_feature (1)..(385): NCBI GI: 85111934 Blast Desc: NCU03082 [Neurospora crassa OR74A] gi|28925945|gb|EAA34939.1| [Neurospora crassa OR74A]
  misc_feature (1)..(345): NCBI GI: 171687851 Blast Desc: protein product [Podospora anserina] gi|170943887|emb|CAP69539.1| protein product [Podospora anserina]
  misc_feature (217)..(387): NCBI GI: 145614580 Blast Desc: MGG_04567 [Magnaporthe grisea 70-15] gi|145021481|gb|EDK05610.1| MGG_04567 [Magnaporthe grisea 70-15]
  misc_feature (220)..(353): NCBI GI: 256734554 Blast Desc: NECHADRAFT_74933 [Nectria haematococca mpVI 77-13-4]
  misc_feature (171)..(342): NCBI GI: 156053305 Blast Desc: SS1G_06820 [Sclerotinia sclerotiorum 1980] gi|154704598|gb|EDO04337.1| SS1G_06820 [Sclerotinia sclerotiorum 1980]
  misc_feature (172)..(326): NCBI GI: 154314702 Blast Desc: BC1G_04060 [Botryotinia fuckeliana B05.10] gi|150848682|gb|EDN23875.1| BC1G_04060 [Botryotinia fuckeliana B05.10]
  misc_feature (220)..(328): NCBI GI: 46107160 Blast Desc: FG00463.1 [Gibberella zeae PH-1]
  misc_feature (1)..(119): NCBI GI: 145614580 Blast Desc: MGG_04567 [Magnaporthe grisea 70-15] gi|145021481|gb|EDK05610.1| MGG_04567 [Magnaporthe grisea 70-15]
  misc_feature (1)..(132): NCBI GI: 156053305 Blast Desc: SS1G_06820 [Sclerotinia sclerotiorum 1980] gi|154704598|gb|EDO04337.1| SS1G_06820 [Sclerotinia sclerotiorum 1980]
  misc_feature: Useful for introducing or modulating the production of volatile compounds
MSFCIAVQSAIFYYVSCAPCYQAKHMHNVRKKAKLDAAEKERYHAANPEIYRQPDPFNTNPYWSEEIMAGPHVELKKSSREASRHCSRQTLTSSGKDSSPTAGSSIGVSVVNPPSVTHTENASIASEVGNHKLPATLAPGLRHLAGPEKGPSSVGGSSVDVSLTNIPSAGGSTVGVNSATLDSSSVYGSSPGITLTRSDTTFTTPEKRTMSFSTISSAYLSEDWNHKRYQREDEELWGHELAQTGHKLMNAIKHAGASAGRLVQETWAKNARPIDEDEDEDSFYFAQRNPPVNDYHPPIVRQRPVHKDAYLWMLQPPPPAKVMEGKVPPISRSSSFMSTASRTTVRSERLEHGSPTALGSDPSGRGYRAAVKPKLSTISGVQDVENQANN

SEQ ID NO: 16285 - DNA, 1978 bp, Muscodor strobelii
  misc_feature: SGI EST ID NO. CUFF.38437.0
  misc_feature: Variant of the nucleotide sequence at SEQ ID NO 16283
tccgtctcctgtttcctggaatcccatgcattgtctcccgatcctcacaacaaccaacatcgtccccctcgcccccttccgggaatcctccattcattgacacacattaccgcaattgcggcgtcgctccctccttcttgtgtccccgtcccttgtgtttcaatttatactcctaccctcatactcctcgcattgcttttctgctctacgcagcccccaattgagcattggtgattcaatcttgcagtctttagcgtctggctacgtctaatctacaagtatctcgaaatccctctccgccgcccgtcttcctagactcccgacctcgactgcacgacctcaaagcccctcacgatacgatagtccatccgatccaaacacccgcattgtccaatacgcacaacattcgcctcccttgtctactgtagtcgactcctttatttgctcagcagtatatctgttccatcaattgcgttttacagtgcatcgctcctcgacatagtcattcaacagtctcgaaccttcgccgtgacttgaagtcgatacccatataaaatccatatccaagtctgtagtatatcgagggtgtcattgtcagagttcgacgcaccgcgcttgggccgcgcctttcgcgcttcacctgtcatcgctcaggtgaagcagcctcttttcgcccaaaatgtcgttctgcatcgcggtccagtcggcaatcttctactatgtttcgtgtgcaccgtgttaccaagccaagcacatgcataatgtgaggaagaaggccaagttggatgccgccgagaaagagcgataccatgccgcgaaccccgagatctaccgccagccagaccccttcaataccaacccctattggtctgaggagatcatggcagggccccacgtcgagctgaagaaatcgtcgcgagaagcaagccggcattgcagtcggcagacattgaccagctccggcaaagactcgtcccctacggccgggagcagtataggcgttagtgttgtcaacccgccaagcgtcacacatacggagaatgcttcgatagcatcagaagttggaaaccataaacttccagcaactctggcccctggcttgaggcatctggcaggtcctgaaaagggcccatcgagtgttgggggcagcagcgttgacgttagtctaaccaatatacctagtgcaggaggcagtaccgtgggtgtcaactctgcaaccctagactcgtccagcgtttatggaagcagtcccggtatcacactcacacgctcagacactacttttacgaccccggagaaaagaacgatgagcttttcgaccatatcatctgcatatctgtccgaggactggaaccataaacgctaccaaagggaggacgaagaactatggggacatgagctggcacagacgggacataaactgatgaacgcgattaagcacgcaggagcctctgccggtcgcctcgtacaagagacttgggccaagaacgcaagacctattgacgaagacgaagacgaggatagtttctactttgcccagaggaatccacctgtcaacgactatcatccacccattgtgcggcagcgaccggttcacaaggatgcctatttgtggatgttacaaccaccaccaccggccaaggtcatggaaggaaaagtaccgccaataagtaggagcagcagtttcatgagcaccgccagtcggacgaccgtaaggagcgagagactagaacatggatcaccgacagcattgggctcggatccttccggccgcggctacagagctgccgtcaagccgaagttgtcaacaatatcaggcgtgcaggatgttgagaatcaagcaaacaattagagcatcatttctggcgttcatgggagcaaaattggcttgggctagcatgggttgcgagggtcattttgatagcatcacttagcgggagttcttcaaaatttcaatgggaaaatcattttgccaaca

SEQ ID NO: 16286 - DNA, 801 bp, Muscodor strobelii
  misc_feature: SGI cDNA ID NO. 565412
  misc_feature: Encodes the peptide sequence at SEQ ID NO 16287
atgccgggtcaatacgccacataccccagcctgcgtgaccaggcggtcctcatcacaggcggcgccgaaggcatcggagcagcctgcgtcgagatgttctggctgcaagggtccaaagtaacctttctcgacatctcagagtcatcggccgagaaactattaaagaagctaccatcgtcaaatccagagtacacaggcccactgcccaagttcatgaagtgcgatgtgacggatctggaccgactcaaggcctgtgccgacgctgtgatcgctgaacacggggctgtggatattctgttgaacaacgctgcgagtgcgggggctaagacccgcgtgccgacggaggaggtcacggtgcagtcttgggatttcgatgtcaatgtcaatttgagacatcagtttttcttgacgcaggctgtgatccccggtatgaggaagaaggggaagggggctattgttaatatggggagtattacttggcgtatcccagctaccgggctacctgtatacacgctttgcaaagccgccatcatgggtatgacgaagacgcatagcaaagagtttggtaaatggggtatcagagtcaacagcgtcatgccgggctccatcgcaacacagaggcaactcgacgaggttctcacagatgagtacagagcggaggtttttgctgcgcagactctgcagagagatctgggacccgatgaagttgcacgtttgatcctgttcctagcttcggccgactcgagtggtatcacggggagcagctatgtcgttgatggtggttgggtcagtgatccttaa

SEQ ID NO: 16287 - protein, 266 aa, Muscodor strobelii
  misc_feature: SGI Peptide ID NO. 565412
  misc_feature (14)..(189): Pfam Id: PF00106 Pfam Desc: short chain dehydrogenase
  misc_feature (71)..(189): Pfam Id: PF00106 Pfam Desc: short chain dehydrogenase
  misc_feature (1)..(266): NCBI GI: 46115168 Blast Desc: FG03426.1 [Gibberella zeae PH-1]
  misc_feature (1)..(266): NCBI GI: 256723598 Blast Desc: NECHADRAFT_97267 [Nectria haematococca mpVI 77-13-4]
  misc_feature (6)..(266): NCBI GI: 67541929 Blast Desc: AN7128.2 [Aspergillus nidulans FGSC A4] gi|40742143|gb|EAA61333.1| AN7128.2 [Aspergillus nidulans FGSC A4] gi|259483544|tpe|CBF79020.1| TPA: conserved [Aspergillus FGSC
  misc_feature (4)..(262): NCBI GI: 170703532 Blast Desc: short-chain dehydrogenase/reductase SDR [Burkholderia ambifaria IOP40-10] gi|170131555|gb|EDT00127.1| short-chain dehydrogenase/reductase SDR [Burkholderia ambifaria IOP40-10]
  misc_feature (4)..(262): NCBI GI: 171322000 Blast Desc: short-chain dehydrogenase/reductase SDR [Burkholderia ambifaria MEX-5] gi|171092692|gb|EDT37981.1| short-chain dehydrogenase/reductase SDR [Burkholderia ambifaria MEX-5]
  misc_feature (4)..(262): NCBI GI: 115350579 Blast Desc: short-chain dehydrogenase/reductase SDR [Burkholderia ambifaria AMMD] gi|115280567|gb|ABI86084.1| short-chain dehydrogenase/reductase SDR [Burkholderia ambifaria AMMD]
  misc_feature (4)..(262): NCBI GI: 134294711 Blast Desc: short-chain dehydrogenase/reductase SDR [Burkholderia vietnamiensis G4] gi|134137868|gb|ABO53611.1| short-chain dehydrogenase/reductase SDR [Burkholderia vietnamiensis G4]
  misc_feature (4)..(262): NCBI GI: 78065182 Blast Desc: Short-chain dehydrogenase/reductase SDR [Burkholderia sp. 383] gi|77965927|gb|ABB07307.1| Short-chain dehydrogenase/reductase SDR [Burkholderia sp. 383]
  misc_feature (4)..(262): NCBI GI: 172059610 Blast Desc: short-chain dehydrogenase/reductase SDR [Burkholderia ambifaria MC40-6] gi|171992127|gb|ACB63046.1| short-chain dehydrogenase/reductase SDR [Burkholderia ambifaria MC40-6]
  misc_feature (6)..(263): NCBI GI: 163792953 Blast Desc: 3-oxoacyl-(acyl carrier protein) reductase [alpha proteobacterium BAL199] gi|159181599|gb|EDP66111.1| 3-oxoacyl-(acyl carrier protein) reductase [alpha proteobacterium
  misc_feature (11)..(263): SWISSPROT Homolog: EC 1.1.1.100 3-oxoacyl-[acyl-carrier-protein] reductase
MPGQYATYPSLRDQAVLITGGAEGIGAACVEMFWLQGSKVTFLDISESSAEKLLKKLPSSNPEYTGPLPKFMKCDVTDLDRLKACADAVIAEHGAVDILLNNAASAGAKTRVPTEEVTVQSWDFDVNVNLRHQFFLTQAVIPGMRKKGKGAIVNMGSITWRIPATGLPVYTLCKAAIMGMTKTHSKEFGKWGIRVNSVMPGSIATQRQLDEVLTDEYRAEVFAAQTLQRDLGPDEVARLILFLASADSSGITGSSYVVDGGWVSDP

SEQ ID NO: 16288 - DNA, 1367 bp, Muscodor strobelii
  misc_feature: SGI EST ID NO. CUFF.38452.0
  misc_feature: Variant of the nucleotide sequence at SEQ ID NO 16286
atcacgctcaaaataaacaggaaacgaccaggcaaattgatcgaatatgcacgagatgtaaaaagaaaggcgcatgcatgcatataagacatgtcctcgccctcatgatgccgtcgcgacctgatgtcatgctgcacatacggaccgaatatgatcgccctttcctacctaccatgtcggactttcgagattgggcatgacacaatatcctccctcttgttctatctcaagtcgtacataaattgatcacaaaactcgtactacatatattacattccttggtatctcatccatattgcagtacgcagactcaaaactcacgagccagacaataattcccattgttatcatctcgccaacatcatgccgggtcaatacgccacataccccagcctgcgtgaccaggcggtcctcatcacaggcggcgccgaaggcatcggagcagcctgcgtcgagatgttctggctgcaagggtccaaagtaacctttctcgacatctcagagtcatcggccgagaaactattaaagaagctaccatcgtcaaatccagagtacacaggcccactgcccaagttcatgaagtgcgatgtgacggatctggaccgactcaaggcctgtgccgacgctgtgatcgctgaacacggggctgtggatattctgttgaacaacgctgcgagtgcgggggctaagacccgcgtgccgacggaggaggtcacggtgcagtcttgggatttcgatgtcaatgtcaatttgagacatcagtttttcttgacgcaggctgtgatccccggtatgaggaagaaggggaagggggctattgttaatatggggagtattacttggcgtatcccagctaccgggctacctgtatacacgctttgcaaagccgccatcatgggtatgacgaagacgcatagcaaagagtttggtaaatggggtatcagagtcaacagcgtcatgccgggctccatcgcaacacagaggcaactcgacgaggttctcacagatgagtacagagcggaggtttttgctgcgcagactctgcagagagatctgggacccgatgaagttgcacgtttgatcctgttcctagcttcggccgactcgagtggtatcacggggagcagctatgtcgttgatggtggttgggtcagtgatccttaagttgggcggaggattatatgggagattgcgagtgattgtctgttgtgcgtgctattcaacctataaattgttttgggtcatcaggcgggattggtaatttcgtgacaaggggagattcgattggtttttcggtcctcatcctactgattattctatgcttagtttgtagtcttatcctgaaggcaaacaagaattgaaacgag

SEQ ID NO: 16289 - DNA, 840 bp, Muscodor strobelii
  misc_feature: SGI cDNA ID NO. 565413
  misc_feature: Encodes the peptide sequence at SEQ ID NO 16290
atgtcgtcagccgcgttttccgagaccgtggctaccacattccctcaatttggcatgctccctcctgagttgcgcctgatgatctgggaagaagccgcgagggtcccacgcgttgtccacctcgtggagccagctatggaaagcactccatcccggactctcaccgtcaagtccacgcgcagcgaggacaataaggtcaagaccgagacctactcgcaggtcccagacctcttcttcgtcaatcacgaggcaagatatgtcgctctcaaggagtacacgccagtcagtttcaaatgccgagtgaggaccatgtgccggaagagtttctgcaaatttgtagacatggcttgtatcaacctctacatgaaagtcaccgacaccttggcaatctacaagaactgcgccaaacttgaagagggctccgtcagcaggacacatccgtacttctccgaggtctctacttacgtcccgatcaaaaactacctctacgtcgtctcgcccgaagaactcagaatcaactacaacgacattcacgcctggatcaccaaggacacagcccacaaattgccaagaggtgtcgatggactcaaattctcgcttgaaacggtgggtatgcaggctgcctgggcccgtccacgcaaagggtacccggtccccgactacgacagctgttcagtcgcacttgatacccaggctactttcacctctaccccccgatacttcgacgtcgaggacttgaagccggttcctcagccacttcaacagggggaaatggagccgtcagatgtcttccactggaaggacttctcttacgtcgccaacatgttcacgctggagtga

SEQ ID NO: 16290 - protein, 279 aa, Muscodor strobelii
  misc_feature: SGI Peptide ID NO. 565413
  misc_feature (1)..(104): NCBI GI: 46107912 Blast Desc: FG00839.1 [Gibberella zeae PH-1]
  misc_feature (7)..(104): NCBI GI: 256734646 Blast Desc: NECHADRAFT_31225 [Nectria haematococca mpVI 77-13-4]
MSSAAFSETVATTFPQFGMLPPELRLMIWEEAARVPRVVHLVEPAMESTPSRTLTVKSTRSEDNKVKTETYSQVPDLFFVNHEARYVALKEYTPVSFKCRVRTMCRKSFCKFVDMACINLYMKVTDTLAIYKNCAKLEEGSVSRTHPYFSEVSTYVPIKNYLYVVSPEELRINYNDIHAWITKDTAHKLPRGVDGLKFSLETVGMQAAWARPRKGYPVPDYDSCSVALDTQATFTSTPRYFDVEDLKPVPQPLQQGEMEPSDVFHWKDFSYVANMFTLE

SEQ ID NO: 16291 - DNA, 558 bp, Muscodor strobelii
  misc_feature: SGI cDNA ID NO. 565414
  misc_feature: Reduced expression when VOC is produced
  misc_feature: Encodes the peptide sequence at SEQ ID NO 16292
atgtcttcagagacacagcctatatcacccgctcgcttcgctgaagctctgcaagagctacccgcaagtagtctcgccctgaaagtcctggagctgcggaactcaatcgcacatctcgactattcaaacgcagagctcaagccttttgcagaaggtacaacgcctacactagatcagccagcaggccagccagatcaagattgcatagatgccatcgctgagaacgaaggtgtcatcgcgcgcatgcaggagcgtatcgagttaatacgcaacgaagtcgagaatagaggtctgagttggcgagagtttcagggaaaggaggatacgcctgccccagagataacagagaacgagaccaacggtgtaaatgcacctccaagtacgaatggaatcaacggatacgggccaggtgcggaatctcagcacgaagcgtggcgagatggaacatttcagacgggtacagtgcgtggtttgagtgatgaggagcttctccggcaactacaggatcgaacgccgcctgatgatgatgaagatccagacggtggtatgcacttgtaa

SEQ ID NO: 16292 - protein, 185 aa, Muscodor strobelii
  misc_feature: SGI Peptide ID NO. 565414
  misc_feature (2)..(185): NCBI GI: 256735267 Blast Desc: NECHADRAFT_74934 [Nectria haematococca mpVI 77-13-4]
  misc_feature (2)..(185): NCBI GI: 46107158 Blast Desc: FG00462.1 [Gibberella zeae PH-1]
  misc_feature (1)..(185): NCBI GI: 39945096 Blast Desc: MGG_04530 [Magnaporthe grisea 70-15] gi|145021493|gb|EDK05622.1| MGG_04530 [Magnaporthe grisea 70-15]
  misc_feature (1)..(156): NCBI GI: 85111932 Blast Desc: NCU03081 [Neurospora crassa OR74A] gi|28925944|gb|EAA34938.1| conserved [Neurospora crassa OR74A]
  misc_feature (1)..(157): NCBI GI: 156053311 Blast Desc: SS1G_06823 [Sclerotinia sclerotiorum 1980] gi|154704601|gb|EDO04340.1| SS1G_06823 [Sclerotinia sclerotiorum 1980]
  misc_feature (1)..(157): NCBI GI: 154314712 Blast Desc: BC1G_04065 [Botryotinia fuckeliana B05.10] gi|150848687|gb|EDN23880.1| BC1G_04065 [Botryotinia fuckeliana B05.10]
  misc_feature (1)..(103): NCBI GI: 116180392 Blast Desc: CHGG_00824 [Chaetomium globosum CBS 148.51] gi|88185121|gb|EAQ92589.1| CHGG_00824 [Chaetomium globosum CBS 148.51]
  misc_feature (13)..(155): NCBI GI: 171687853 Blast Desc: protein product [Podospora anserina] gi|170943888|emb|CAP69540.1| protein product [Podospora anserina]
  misc_feature (1)..(102): NCBI GI: 240274126 Blast Desc: conserved [Ajellomyces capsulatus H143]
  misc_feature (1)..(100): NCBI GI: 225557759 Blast Desc: conserved [Ajellomyces capsulatus G186AR]
  misc_feature: Useful for introducing or modulating the production of volatile compounds
MSSETQPISPARFAEALQELPASSLALKVLELRNSIAHLDYSNAELKPFAEGTTPTLDQPAGQPDQDCIDAIAENEGVIARMQERIELIRNEVENRGLSWREFQGKEDTPAPEITENETNGVNAPPSTNGINGYGPGAESQHEAWRDGTFQTGTVRGLSDEELLRQLQDRTPPDDDEDPDGGMHL

SEQ ID NO: 16293 - DNA, 1562 bp, Muscodor strobelii
  misc_feature: SGI EST ID NO. CUFF.38494.1
  misc_feature: Variant of the nucleotide sequence at SEQ ID NO 16291
caactatgagctccgttgagacctcaatgcatccgatagtatatgtagggaaagaattcttgaagctcttaaattctacctatctctaacctctacaaatatcccatcatggatctgcgaaagcggggattatagtagttacctccatgaccggcggtatgcttcagatggggaaagttaccatcgcgtcatcaagcatccatccttggtactcaaatctgcatggggtttgatgcgctgatatacaccatggccttagactcattttctgttcattgcttaggtaggttttccgtaattgaaataaagacgagatggaccacacaaatgtccggcgatcagcattatttcccattgccgattacaagtcagatcgcacctacttcactttgagaaccaaaggaaatagacggccttaggtaagctcccgttagtctccacactacaccagctagaagcttcggggtacgtaccttttcggcaggcaccccaccattgcgacaacctcaagcaatcctcactcactattcagttcttagagcaaacaggccatctagaagctacctcgactcatcgtcctcaaatcacaattaggaacacaaaattaagttgactactgtaacgtgcgtcttctcagatccaccaccacatctatcatgtcttcagagacacagcctatatcacccgctcgcttcgctgaagctctgcaagagctacccgcaagtagtctcgccctgaaagtcctggagctgcggaactcaatcgcacatctcgactattcaaacgcagagctcaagccttttgcagaaggtacaacgcctacactagatcagccagcaggccagccagatcaagattgcatagatgccatcgctgagaacgaaggtgtcatcgcgcgcatgcaggagcgtatcgagttaatacgcaacgaagtcgagaatagaggtctgagttggcgagagtttcagggaaaggaggatacgcctgccccagagataacagagaacgagaccaacggtgtaaatgcacctccaagtacgaatggaatcaacggatacgggccaggtgcggaatctcagcacgaagcgtggcgagatggaacatttcagacgggtacagtgcgtggtttgagtgatgaggagcttctccggcaactacaggatcgaacgccgcctgatgatgatgaagatccagacggtggtatgcacttgtaagggatgttacttgctcaagaagaggcgcgatgtacggcaataggagttcaggatggaaaactaggaatcacgaaccaccaggtcatggaaaactgcttataggactgcattgtcaggcgttttgcaggggtatggattacatcgggagtgcaatgggctcgataacaagatgtattctaactcacaccgtctgaagcatctgcccgattctaccgaaagacaaacctggattctgtattttgatggcctgaaccggtatactgcatactagcagtagcaacttacatagtaaggtttctcagtcagttttggtttcactctaaatgcaagatcattgactcatgcgcc

SEQ ID NO: 16294 - DNA, 1608 bp, Muscodor strobelii
  misc_feature: SGI cDNA ID NO. 565415
  misc_feature: Encodes the peptide sequence at SEQ ID NO 16295
atgctgccgcaggtgactctagtcgcgggtgttctatcgccgttcgcggttgcgcatgctcttcgagctctggaacaagagatcattgcaaaacccgatatctcaaagttcaaatgtgacctaccctcgtctttgagcccgtccaaagatgggttgccgtctgcaagagacatattttcgggcgaagaagctcttcagcttcaggttcaaagacattcctcgatcgtaaagatacccagcatttcatacgacgacaacggcgaaccattagaggatccaagatggaatgtgttttacactttacatgacgagtttgtttcactgtatccgagcgtccaccgtcgaatgaccagggactttgtcaacacttttggcctcgtctatacaatcaagggctcacatccaaccctcaaaccaataatgcttgccgcgcatcaagatgttgttccagttgctgattcctctacgtggaaatatccccccttctctgcccattatgacggccaatggctgtggggtagaggattcgatgaagagtgttcaggacgccgtggagctggcacaattggaccgtatctggaaaacctttatggtcctaactctatggcacttctcttggacgaaggcggcatgggccttgaacttgttggaaatgacactctatatgcactcccagcggtgatggagaaagggcacgttgacatctggcttgaactccaagttaatggggggcattcatccgctcctttcccgcatactggtatcggaatcatgtccgagatagtaatgcagctagagtcacacccgtgggagccaaagcttatcgaaggttcacccattcataatcactatgtctgtcagtcgagatactcaccgaaagctgcgccgaacattacgaaactcatcgagaagggcgatttgaagacattggcagatacactggccacgctggaccgcgcgacgcactaccgacttcaaacttcccaggctgtcgactatttcattggaggagtcaagatcaatgcgatgcccgagaacattagaatcggagtcaatcatcgcattgcgccgcaggactcgactgctaaagtgaaagccaatatcctgaaacagatcaagcccgttgtaaagaaattcggattgacggtcaaagactttgagggtaaagtgcttgcgccagatatggagctcgatgtgagctttggcgatggagacatgagaccaatgtacgatgtcgactataatggaacacttatactcacatcttcgcaagataccccggtcgcacctatctctccaaccagcggcgaggtgtgggatgtgtttgcgggaactatccgccattcctttgattttgatggcggcaaggttgtcccagtgggcgagctcatgacaggaaacacagacactagacattacttgaagttgacggagaacgtgtatcgatgggtgccgaaccggcaaggccacgctctgaatgggcacacagtggatgagagagttgacatggaaactcatatggaggttgtgcgattttactatgatttgatcaggaactttgatgcttctactgctgcttcaaagtcgttggaagttggtgagctctag

SEQ ID NO: 16295 - protein, 535 aa, Muscodor strobelii
  misc_feature: SGI Peptide ID NO. 565415
  misc_feature (141)..(519): Pfam Id: PF01546 Pfam Desc: Peptidase family M20/M25/M40
  misc_feature (141)..(175): Pfam Id: PF01546 Pfam Desc: Peptidase family M20/M25/M40
  misc_feature (7)..(521): NCBI GI: 256726781 Blast Desc: NECHADRAFT_103332 [Nectria haematococca mpVI 77-13-4]
  misc_feature (11)..(523): NCBI GI: 46121343 Blast Desc: FG05050.1 [Gibberella zeae PH-1]
  misc_feature (35)..(523): NCBI GI: 259484048 Blast Desc: TPA: conserved [Aspergillus nidulans FGSC A4]
  misc_feature (39)..(520): NCBI GI: 256719802 Blast Desc: NECHADRAFT_56807 [Nectria haematococca mpVI 77-13-4] gi|256725053|gb|EEU38420.1| NECHADRAFT_55460 [Nectria haematococca mpVI 77-13-4]
  misc_feature (35)..(500): NCBI GI: 67901432 Blast Desc: AN7703.2 [Aspergillus nidulans FGSC A4] gi|40742699|gb|EAA61889.1| AN7703.2 [Aspergillus nidulans FGSC A4]
  misc_feature (1)..(523): NCBI GI: 46116250 Blast Desc: FG03967.1 [Gibberella zeae PH-1]
  misc_feature (45)..(531): NCBI GI: 256730062 Blast Desc: NECHADRAFT_94988 [Nectria haematococca mpVI 77-13-4]
  misc_feature (26)..(522): NCBI GI: 159127915 Blast Desc: vacuolar carboxypeptidase Cps1, [Aspergillus fumigatus A1163]
  misc_feature (26)..(522): NCBI GI: 146323321 Blast Desc: vacuolar carboxypeptidase Cps1 [Aspergillus fumigatus Af293] gi|129558348|gb|EAL92863.2| vacuolar carboxypeptidase Cps1, [Aspergillus fumigatus Af293]
  misc_feature (7)..(524): NCBI GI: 145234268 Blast Desc: An02g13740 [Aspergillus niger] gi|134057450|emb|CAK37958.1| protein product [Aspergillus niger]
  misc_feature (38)..(521): SWISSPROT Homolog: EC 3.4.17.4 Gly-Xaa carboxypeptidase
MLPQVTLVAGVLSPFAVAHALRALEQEIIAKPDISKFKCDLPSSLSPSKDGLPSARDIFSGEEALQLQVQRHSSIVKIPSISYDDNGEPLEDPRWNVFYTLHDEFVSLYPSVHRRMTRDFVNTFGLVYTIKGSHPTLKPIMLAAHQDVVPVADSSTWKYPPFSAHYDGQWLWGRGFDEECSGRRGAGTIGPYLENLYGPNSMALLLDEGGMGLELVGNDTLYALPAVMEKGHVDIWLELQVNGGHSSAPFPHTGIGIMSEIVMQLESHPWEPKLIEGSPIHNHYVCQSRYSPKAAPNITKLIEKGDLKTLADTLATLDRATHYRLQTSQAVDYFIGGVKINAMPENIRIGVNHRIAPQDSTAKVKANILKQIKPVVKKFGLTVKDFEGKVLAPDMELDVSFGDGDMRPMYDVDYNGTLILTSSQDTPVAPISPTSGEVWDVFAGTIRHSFDFDGGKVVPVGELMTGNTDTRHYLKLTENVYRWVPNRQGHALNGHTVDERVDMETHMEVVRFYYDLIRNFDASTAASKSLEVGEL

SEQ ID NO: 16296 - DNA, 1727 bp, Muscodor strobelii
  misc_feature: SGI EST ID NO. CUFF.38443.0
  misc_feature: Variant of the nucleotide sequence at SEQ ID NO 16294
gtttcactgtatccgagcgtccaccgtcgaatgaccagggactttgtcaacacttttggcctcgtctatacaatcaagggctcacatccaaccctcaaaccaataatgcttgccgcgcatcaagatgttgttccagttgctgattcctctacgtggaaatatccccccttctctgcccattatgacggccaatggctgtggggtagaggtgcgtcggatgacaaaaatagtttgaccgcattgatgtccgctcttgaagctttactatcaaatccaacttggtatcctaaaagaacaatcatattcgctttaggattcgatgaagagtgttcaggacgccgtggagctggcacaattggaccgtatctggaaaacctttatggtcctaactctatggcacttctcttggacgaaggcggcatgggccttgaacttgttggaaatgacactctatatgcactcccagcggtgatggagaaagggcacgttgacatctggcttgaactccaagttaatggggggcattcatccgctcctttcccgcatactggtatcggaatcatgtccgagatagtaatgcagctagagtcacacccgtgggagccaaagcttatcgaaggttcacccattcataatcactatgtctgtcagtcgagatactcaccgaaagctgcgccgaacattacgaaactcatcgagaagggcgatttgaagacattggcagatacactggccacgctggaccgcgcgacgcactaccgacttcaaacttcccaggctgtcgactatttcattggaggagtcaagatcaatgcgatgcccgagaacattagaatcggagtcaatcatcgcattgcgccgcaggactcgactgctaaagtgaaagccaatatcctgaaacagatcaagcccgttgtaaagaaattcggattgacggtcaaagactttgagggtaaagtgcttgcgccagatatggagctcgatgtgagctttggcgatggagacatgagaccaatgtacgatgtcgactataatggaacacttatactcacatcttcgcaagataccccggtcgcacctatctctccaaccagcggcgaggtgtgggatgtgtttgcgggaactatccgccattcctttgattttgatggcggcaaggttgtcccagtgggcgagctcatgacaggaaacacagacactagacattacttgaagttgacggagaacgtgtatcgatgggtgccgaaccggcaaggccacgctctgaatgggcacacagtggatgagagagttgacatggaaactcatatggaggttgtgcgattttactatgatttgatcaggaactttgatgcttctactgctgcttcaaagtcgttggaagttggtgagctctaggatgtgttcgcgatgaaatatatattggactggatttggaccggccaacatgtcgtccctacactaatcatgataatttggaaatgagcaaagtagcaggttacatgcgatctttatcaagctcaaaggacatcaaactcctttcatattcattgactatatttttgtacagtgaatcttgagtcggatagaattctagctgcaagatcaatgctgtggtgagacggtggcagtagtagtggcacaggcacactgttgcagccaggacgcttggacagtaacgcaagaacctcccacaggcgcaactttgaataaattcaaggtatcta

SEQ ID NO: 16297 - DNA, 1770 bp, Muscodor strobelii
  misc_feature: SGI cDNA ID NO. 565416
  misc_feature: Encodes the peptide sequence at SEQ ID NO 16298
atgctgatccttcctgctcttttcccggccacaagctctcggatcgggctgcgagccgtcgcccgcgcctcagagcgatgtgcagacttcgctgtcgccacggtggcacgacggttttcgacatgtcgaccctcagtgccgcagatatatctccagtacagtgcccgtgatctggtcggcccgtccgcaagctgctataatctacgatcccgaagtctgcttccccacacaacggttcgcaccatcttcaagttccgcacggtcacgagatacatcgacttgcccaattcatacgaagatgctgaaggtctgccctttcgaagagaggatctcaaccagagggaggttaatcagatcttttcaaccaacttgcaagcaacacaagccaatcgtcttctgaaaatcattcatgggaggcgtgttgcgggcacactggacgatcccgagctcgcacggaacacgaggcagttcaagtcgactgatgtcaacagtgcgctgcgatatttgcgcgtacatatcccagtagacgaggtattaaatgctgggctccgagctgaagacgaacttcaagcgatcgaagagaaagctgcggagcaaatcccggttgaaccgatcaaagcgaaccccccgcctcgtccacagagcactgctgaagagaacgtcaagctacccacgggaaggctaccaaagaagcctagtagtgattcaccttacggagaaagcaattttgatcgcatccgtgcacagaacattgccaagcgcaaggtcgaagaagccaagcaagaagagcagcggaggctgcgcgaggaagaaaaggcaaaagggaatatcggcacgcttcagactcagcaacagaagcctagagaaatcagcgcatacaggaaacattacatggagaaagccacctcggatttggaagaaccacccgagatgaaagcctgggaacgcctgatccctagctttgctatgacggtgcttgtgatattggcttctttggccttcgcaaccatgtacactccgcctccgttatcacgaaggctttggcctgatattcctcctgctgcggccacctgccttggcttgatgggcatcaactttgcgggattcctgctctggaagatccctcaagcgtgggctacgttcaataagtacatgttagttgttccggctacacctcgagcattccaagtcgtgggtgctatgttctcgcatcaatccttcagtcatcttgccgctaatatgacgttcctatggttcttcggaacgcgcttacatgacgagattgggcgcggcaactttcttgccctttacatgtcgtgtggtgcagtcggcttcgcggccagtcttgctcgcttagtactgtggcatggactacatctcaccacgctcggcgcatctggcgctatctacggcattgtctttgccttcttctggatgcacaagtatgacgagtttaagatactgggcttcccgccggacccagtatcagcgccccaaggtttggcatttatagggttgattttgggtttacatcttctgccattgttctcgaaatctggtcgggcacagaaaatcgacctggcctcgcatttaggaggcatggctgctggcgtcactggtgctgagctggttcaaagacacatggaccgcaaagcacgaataagggctgaacggatgaaagccatggccgattttcgccagaccgatgataagaccgagaccaaaccagtcgtggttgaagtgaagcggatcacatcatcaaaccgctga

SEQ ID NO: 16298 - protein, 589 aa, Muscodor strobelii
  misc_feature: SGI Peptide ID NO. 565416
  misc_feature (388)..(549): Pfam Id: PF01694 Pfam Desc: Rhomboid family
  misc_feature (24)..(556): NCBI GI: 85111930 Blast Desc: NCU03080 [Neurospora crassa OR74A] gi|28925943|gb|EAA34937.1| [Neurospora crassa OR74A]
  misc_feature (70)..(546): NCBI GI: 116180390 Blast Desc: CHGG_00823 [Chaetomium globosum CBS 148.51] gi|88185120|gb|EAQ92588.1| CHGG_00823 [Chaetomium globosum CBS 148.51]
  misc_feature (10)..(553): NCBI GI: 256734555 Blast Desc: NECHADRAFT_74935 [Nectria haematococca mpVI 77-13-4]
  misc_feature (76)..(546): NCBI GI: 46107156 Blast Desc: FG00461.1 [Gibberella zeae PH-1]
  misc_feature (79)..(559): NCBI GI: 171687855 Blast Desc: protein product [Podospora anserina] gi|170943889|emb|CAP69541.1| protein product [Podospora anserina]
  misc_feature (94)..(574): NCBI GI: 145614588 Blast Desc: MGG_04531 [Magnaporthe grisea 70-15] gi|145021492|gb|EDK05621.1| MGG_04531 [Magnaporthe grisea 70-15]
  misc_feature (35)..(562): NCBI GI: 156053313 Blast Desc: SS1G_06824 [Sclerotinia sclerotiorum 1980] gi|154704602|gb|EDO04341.1| SS1G_06824 [Sclerotinia sclerotiorum 1980]
  misc_feature (102)..(541): NCBI GI: 70995032 Blast Desc: rhomboid family protein [Aspergillus fumigatus Af293] gi|66849917|gb|EAL90244.1| rhomboid family protein, [Aspergillus fumigatus Af293] gi|159131038|gb|EDP56151.1| rhomboid family
  misc_feature (103)..(560): NCBI GI: 154314714 Blast Desc: BC1G_04066 [Botryotinia fuckeliana B05.10] gi|150848688|gb|EDN23881.1| BC1G_04066 [Botryotinia fuckeliana B05.10]
  misc_feature (102)..(541): NCBI GI: 119496153 Blast Desc: rhomboid family protein, [Neosartorya fischeri NRRL 181] gi|119413012|gb|EAW22953.1| rhomboid family protein, [Neosartorya fischeri NRRL 181]
MLILPALFPATSSRIGLRAVARASERCADFAVATVARRFSTCRPSVPQIYLQYSARDLVGPSASCYNLRSRSLLPHTTVRTIFKFRTVTRYIDLPNSYEDAEGLPFRREDLNQREVNQIFSTNLQATQANRLLKIIHGRRVAGTLDDPELARNTRQFKSTDVNSALRYLRVHIPVDEVLNAGLRAEDELQAIEEKAAEQIPVEPIKANPPPRPQSTAEENVKLPTGRLPKKPSSDSPYGESNFDRIRAQNIAKRKVEEAKQEEQRRLREEEKAKGNIGTLQTQQQKPREISAYRKHYMEKATSDLEEPPEMKAWERLIPSFAMTVLVILASLAFATMYTPPPLSRRLWPDIPPAAATCLGLMGINFAGFLLWKIPQAWATFNKYMLVVPATPRAFQVVGAMFSHQSFSHLAANMTFLWFFGTRLHDEIGRGNFLALYMSCGAVGFAASLARLVLWHGLHLTTLGASGAIYGIVFAFFWMHKYDEFKILGFPPDPVSAPQGLAFIGLILGLHLLPLFSKSGRAQKIDLASHLGGMAAGVTGAELVQRHMDRKARIRAERMKAMADFRQTDDKTETKPVVVEVKRITSSNR

SEQ ID NO: 16299 - DNA, 2789 bp, Muscodor strobelii
  misc_feature: SGI EST ID NO. CUFF.38446.0
  misc_feature: Variant of the nucleotide sequence at SEQ ID NO 16297
caactgcatactagaatacggtagatgtagttttgcacactacgtcgatcatccgcctcgtcgtttgtcaagtctgttatgcgccaacgcatacggcctcgatcatcaagagtacggccgtgggcgcaacacgatggtatagcaagcgtaccatgctgatccttcctgctcttttcccggccacaagctctcggatcgggctgcgagccgtcgcccgcgcctcagagcgatgtgcagacttcgctgtcgccacggtggcacgacggttttcgacatgtcgaccctcagtgccgcagatatatctccagtacagtgcccgtgatctggtcggcccgtccgcaagctgctataatctacgatcccgaagtctgcttccccacacaacggttcgcaccatcttcaagttccgcacggtcacgagatacatcgacttgcccaattcatacgaagatgctgaaggtctgccctttcgaagagaggatctcaaccagagggaggttaatcagatcttttcaaccaacttgcaagcaacacaagccaatcgtcttctgaaaatcattcatgggaggcgtgttgcgggcacactggacgatcccgagctcgcacggaacacgaggcagttcaagtcgactgatgtcaacagtgcgctgcgatatttgcgcgtacatatcccagtagacgaggtattaaatgctgggctccgagctgaagacgaacttcaagcgatcgaagagaaagctgcggagcaaatcccggttgaaccgatcaaagcgaaccccccgcctcgtccacagagcactgctgaagagaacgtcaagctacccacgggaaggctaccaaagaagcctagtagtgattcaccttacggagaaagcaattttgatcgcatccgtgcacagaacattgccaagcgcaaggtcgaagaagccaagcaagaagagcagcggaggctgcgcgaggaagaaaaggcaaaagggaatatcggcacgcttcagactcagcaacagaagcctagagaaatcagcgcatacaggaaacattacatggagaaagccacctcggatttggaagaaccacccgagatgaaagcctgggaacgcctgatccctagctttgctatgacggtgcttgtgatattggcttctttggccttcgcaaccatgtacactccgcctccgttatcacgaaggctttggcctgatattcctcctgctgcggccacctgccttggcttgatgggcatcaactttgcgggattcctgctctggaagatccctcaagcgtgggctacgttcaataagtacatgttagttgttccggctacacctcgagcattccaagtcgtgggtgctatgttctcgcatcaatccttcagtcatcttgccgctaatatgacgttcctatggttcttcggaacgcgcttacatgacgagattgggcgcggcaactttcttgccctttacatgtcgtgtggtgcagtcggcttcgcggccagtcttgctcgcttagtactgtggcatggactacatctcaccacgctcggcgcatctggcgctatctacggcattgtctttgccttcttctggatgcacaagtatgacgagtttaagatactgggcttcccgccggacccagtatcagcgccccaaggtttggcatttatagggttgattttgggtttacatcttctgccattgttctcgaaatctggtcgggcacagaaaatcgacctggcctcgcatttaggaggcatggctgctggcgtcactggtgctgagctggttcaaagacacatggaccgcaaagcacgaataagggctgaacggatgaaagccatggccgattttcgccagaccgatgataagaccgagaccaaaccagtcgtggttgaagtgaagcggatcacatcatcaaaccgctgagacgcacaccatctctcaaatgtattgtatatttactgtatcagagccttgtttataccacttgcgacttagacggacggcgactgtatggcaatctaaccaatagaccgcatgccagcagatattcataaatctcatgatttaattctggaacgagcctgccttagtcttctgaacctcacttgtcactgcttttgcgacgaagttacgaggcgagagcatacgatgtaacaccgctattttaatacacgaccgtagaatttccccatggatgaggacgtatggggatgtgttatttggccttggcgattcttggcgcagcgaggtccccacgataagatgccgtctgttccagagctggtcatcaaatgcaacgtcataacatgcggcatggccgctttctaagcattggcttgcatgtaaaagccattggcgggatgtgtttgatccagctactttgatcacttagacaactcgggcagcgacatgatgactcgtagattctgctcgtttcaagccgttggaagacagccttcagcctgattcgaagggtgcgtggcagtgtgcgaaacaccaaaacgaggcctccctattgatctgcagattacctctccctgcagctgatcccactattttgtttgtgcgtactgcacagatgctaaaaaaaatccgcgagagatgactcgttagaattggagacatgccacttctccaatttatttctgacgagggaacgtcgagtacagtaccttgccaatagccatattacctcgacctcgtcccgtttttcgacactggtcttgaatttaagtgatcatcgaaatcgtattcagattgtcataattcaggtggcccttgatattgcga

SEQ ID NO: 16300 - DNA, 2493 bp, Muscodor strobelii
  misc_feature: SGI cDNA ID NO. 565417
  misc_feature: Encodes the peptide sequence at SEQ ID NO 16301
atggcacatctggatcctgaccacttactggacgacgacttcgaagagcgaaacccccatgcctcggcgaacagatggcgacaccaggagtcgtcggcttttgcgcgtgccgccgcgcctcgagatgcgcaaagctctggcaattctaaggacctatccgacttcctgaactcgtcgagggttcaccaccatggacctgccagcaacggtgctgggcagtataaacccattgtcattggaggtacggacggcgctgctgctgaagatgcgactgcgggagacggaaagcaagtcatctgcggcccgttgctgaactaccgtcgcatggaaggccatacctggcacggaagtgttctcctcgtcgtcgaaggcggcggcactacgcaacccttccagcccacactaaatatcgggcgtgtcgagactgcacacgatcaagcaggtcttacacacgaaacaccgccctccaccagctctcctgaagtccacgtccagttagaggtgcccgcgatcaagagcagccacggaacggacgtgaccggttactgtctatactccgacccccgctgtaccttctggagctttccaatcacctgtgatatgggacctaccgagcagaaatgggcctactctatttctgaggtccgataccagagcaagaccaagccctcgaccaactacttcttcgtccccgccatcaacgagtcgatgcgcatcatgttccactcttgtaatgggttcagtgtgggtacagacgaagatgcatggagcggtgcggctttgtggaacgatgtgctgcgacatcatgaaatggcgcctttccatgtcatgattggtggaggcgaccagatctacaacgatggcattcgagtaaatgggccccttcgcgaatggaccaacatcggcaaccctaagaagcgccgcgacttccctttccctgaatcattgagagttgcgtgtgacgaatactatttgaataactacatccgatggtactccaccgagccgttcgcctctgcaaatggccagattccgcagttgaatatctgggacgaccatgatataatcgacggctttggttcctacgtagacgagttcatgaagtgcgatgtcttccgtggtattggaggtgccgcgcacaaatactatgcgcttttccagcatcatcttgcgccgccagccacaacatatacatccgacccacctcagaagatgggagacggaagcttggtccaccaagcacagcttgagaacacttttgtcgcgaaacaggagataccagaatcgtgttacatcaagggaagcaagcccgggccgtatgtcgcggagcactcgatgaatatgtatgccaaactcggtgccaggatcgccttcatgggtatcgatgcgcgaaccgaacgcactcggcatcaggtcaattaccctgaaacctatgatcttatcttcaacagagtgcgatcggaattaggagccgctgcgagcgctggtcagcctttcagacatctcattttgttgttgggtatacccattgcttatcctcggctcacttggcttgaaaacatcttttcgagtcctgtgatcgccccgatcaaattcatgaatcggcgcttcggatttggcggcagcgtattcaatagcttcgatggaagtgtcgatttgctggatgacttagatgaccactacacggctaggacccacaagaaggaacgcaatatgctagtcgagcgtctccagactctatgttcggaattctctgtccgtcttacgatcctaggaggcgatgttcaccttgctgctcttgggcgattctactcaaacccgaagctccacataccggccgaggaagaccctcgctacatggtcaacgttgtctcttcggccatcgttaacaagccaccgccaactgcgatcgcgaacctacttgccagccgaaataagatccatcacctcaatgcagatacagacgagactctgatgagtctcttcgacaaagatcctggtaattcaaacaaaacgagaaactccaaccacgtcactatgcccagtcgcaactatgcagttttaacagagaactcaccaaacaaccccgtcgctcccatgaatggtacaaatggtctcgcggatcaagagacacatgagcaaaataggtgggatggaaaggatggacattctttcctgcacgcaggtgaagaaggtgcaggcactcagcacaaggcatcccagtacgaagcgcacgggaaaggaaacgacggttccttggactgctgcattcgtattgaggttgaccagcacgacaaggaaggcaaaacagaaccttacggcctcacgataccggttctgaattatgatgctacgaagcacaagagcaacatgcaccatagactacaccttcggcatcgcagtcgcccaggaacgggtgtaagtaccgcgccaagcacagctccatccttaccaggctctgtccctccaatgccgagcaacagaagccactag

SEQ ID NO: 16301 - protein, 830 aa, Muscodor strobelii
  misc_feature: SGI Peptide ID NO. 565417
  misc_feature (16)..(782): NCBI GI: 46108520 Blast Desc: FG01142.1 [Gibberella zeae PH-1]
  misc_feature (7)..(786): NCBI GI: 171687857 Blast Desc: protein product [Podospora anserina] gi|170943890|emb|CAP69542.1| protein product [Podospora anserina]
  misc_feature (11)..(782): NCBI GI: 164427316 Blast Desc: NCU03079 [Neurospora crassa OR74A] gi|157071692|gb|EAA34936.2| conserved [Neurospora crassa OR74A]
  misc_feature (15)..(786): NCBI GI: 154314710 Blast Desc: BC1G_04064 [Botryotinia fuckeliana B05.10] gi|150848686|gb|EDN23879.1| BC1G_04064 [Botryotinia fuckeliana B05.10]
  misc_feature (8)..(782): NCBI GI: 156053309 Blast Desc: SS1G_06822 [Sclerotinia sclerotiorum 1980] gi|154704600|gb|EDO04339.1| SS1G_06822 [Sclerotinia sclerotiorum 1980]
  misc_feature (18)..(786): NCBI GI: 116180388 Blast Desc: CHGG_00822 [Chaetomium globosum CBS 148.51] gi|88185119|gb|EAQ92587.1| CHGG_00822 [Chaetomium globosum CBS 148.51]
  misc_feature (2)..(786): NCBI GI: 145614586 Blast Desc: MGG_04536 [Magnaporthe grisea 70-15] gi|145021487|gb|EDK05616.1| MGG_04536 [Magnaporthe grisea 70-15]
  misc_feature (239)..(782): NCBI GI: 261357522 Blast Desc: conserved [Verticillium albo-atrum VaMs.102]
  misc_feature (97)..(814): NCBI GI: 119496157 Blast Desc: NFIA_016510 [Neosartorya fischeri NRRL 181] gi|119413014|gb|EAW22955.1| conserved [Neosartorya fischeri NRRL 181]
  misc_feature (78)..(814): NCBI GI: 169768078 Blast Desc: [Aspergillus oryzae RIB40] gi|83766365|dbj|BAE56508.1| protein product [Aspergillus oryzae]
MAHLDPDHLLDDDFEERNPHASANRWRHQESSAFARAAAPRDAQSSGNSKDLSDFLNSSRVHHHGPASNGAGQYKPIVIGGTDGAAAEDATAGDGKQVICGPLLNYRRMEGHTWHGSVLLVVEGGGTTQPFQPTLNIGRVETAHDQAGLTHETPPSTSSPEVHVQLEVPAIKSSHGTDVTGYCLYSDPRCTFWSFPITCDMGPTEQKWAYSISEVRYQSKTKPSTNYFFVPAINESMRIMFHSCNGFSVGTDEDAWSGAALWNDVLRHHEMAPFHVMIGGGDQIYNDGIRVNGPLREWTNIGNPKKRRDFPFPESLRVACDEYYLNNYIRWYSTEPFASANGQIPQLNIWDDHDIIDGFGSYVDEFMKCDVFRGIGGAAHKYYALFQHHLAPPATTYTSDPPQKMGDGSLVHQAQLENTFVAKQEIPESCYIKGSKPGPYVAEHSMNMYAKLGARIAFMGIDARTERTRHQVNYPETYDLIFNRVRSELGAAASAGQPFRHLILLLGIPIAYPRLTWLENIFSSPVIAPIKFMNRRFGFGGSVFNSFDGSVDLLDDLDDHYTARTHKKERNMLVERLQTLCSEFSVRLTILGGDVHLAALGRFYSNPKLHIPAEEDPRYMVNVVSSAIVNKPPPTAIANLLASRNKIHHLNADTDETLMSLFDKDPGNSNKTRNSNHVTMPSRNYAVLTENSPNNPVAPMNGTNGLADQETHEQNRWDGKDGHSFLHAGEEGAGTQHKASQYEAHGKGNDGSLDCCIRIEVDQHDKEGKTEPYGLTIPVLNYDATKHKSNMHHRLHLRHRSRPGTGVSTAPSTAPSLPGSVPPMPSNRSH

SEQ ID NO: 16302 - DNA, 3478 bp, Muscodor strobelii
  misc_feature: SGI EST ID NO. CUFF.38449.0
  misc_feature: Variant of the nucleotide sequence at SEQ ID NO 16300
cgggctagggtcaagctaagcccatttcgcgtcgtcctaccaacagccagcgcaacgcaacggtgtaattagtagccagccagaaacatcgatgctcgaatctggtgaccaagcccagcacgccgtggcctcctctgctcctcgagccttgattttgtacagtactgtacttgtacgaccctcgcctcctgtggtccattgccgttgcttttaccattgaccgttttgtgatcgcattgcacggcgcctaatgagcattgctcttcgctgaagtagtgctagtaacaccattgccttctcctgcgtggcctcctacattcccatgatatacgtcccggccgctgctgtgaccacatagcaattatcgctgatactacttcttgattgtgcctccccatcctgtcccagtactgactatatatcatctgttttgctgtattaccgacgcctgatttgtgcaagaaccgcatcttttcgcaatcatggcacatctggatcctgaccacttactggacgacgacttcgaagagcgaaacccccatgcctcggcgaacagatggcgacaccaggagtcgtcggcttttgcgcgtgccgccgcgcctcgagatgcgcaaagctctggcaattctaaggacctatccgacttcctgaactcgtcgagggttcaccaccatggacctgccagcaacggtgctgggcagtataaacccattgtcattggaggtacggacggcgctgctgctgaagatgcgactgcgggagacggaaagcaagtcatctgcggcccgttgctgaactaccgtcgcatggaaggccatacctggcacggaagtgttctcctcgtcgtcgaaggcggcggcactacgcaacccttccagcccacactaaatatcgggcgtgtcgagactgcacacgatcaagcaggtcttacacacgaaacaccgccctccaccagctctcctgaagtccacgtccagttagaggtgcccgcgatcaagagcagccacggaacggacgtgaccggttactgtctatactccgacccccgctgtaccttctggagctttccaatcacctgtgatatgggacctaccgagcagaaatgggcctactctatttctgaggtccgataccagagcaagaccaagccctcgaccaactacttcttcgtccccgccatcaacgagtcgatgcgcatcatgttccactcttgtaatgggttcagtgtgggtacagacgaagatgcatggagcggtgcggctttgtggaacgatgtgctgcgacatcatgaaatggcgcctttccatgtcatgattggtggaggcgaccagatctacaacgatggcattcgagtaaatgggccccttcgcgaatggaccaacatcggcaaccctaagaagcgccgcgacttccctttccctgaatcattgagagttgcgtgtgacgaatactatttgaataactacatccgatggtactccaccgagccgttcgcctctgcaaatggccagattccgcagttgaatatctgggacgaccatgatataatcgacggctttggttcctacgtagacgagttcatgaagtgcgatgtcttccgtggtattggaggtgccgcgcacaaatactatgcgcttttccagcatcatcttgcgccgccagccacaacatatacatccgacccacctcagaagatgggagacggaagcttggtccaccaagcacagcttgagaacacttttgtcgcgaaacaggagataccagaatcgtgttacatcaagggaagcaagcccgggccgtatgtcgcggagcactcgatgaatatgtatgccaaactcggtgccaggatcgccttcatgggtatcgatgcgcgaaccgaacgcactcggcatcaggtcaattaccctgaaacctatgatcttatcttcaacagagtgcgatcggaattaggagccgctgcgagcgctggtcagcctttcagacatctcattttgttgttgggtatacccattgcttatcctcggctcacttggcttgaaaacatcttttcgagtcctgtgatcgccccgatcaaattcatgaatcggcgcttcggatttggcggcagcgtattcaatagcttcgatggaagtgtcgatttgctggatgacttagatgaccactacacggctaggacccacaagaaggaacgcaatatgctagtcgagcgtctccagactctatgttcggaattctctgtccgtcttacgatcctaggaggcgatgttcaccttgctgctcttgggcgattctactcaaacccgaagctccacataccggccgaggaagaccctcgctacatggtcaacgttgtctcttcggccatcgttaacaagccaccgccaactgcgatcgcgaacctacttgccagccgaaataagatccatcacctcaatgcagatacagacgagactctgatgagtctcttcgacaaagatcctggtaattcaaacaaaacgagaaactccaaccacgtcactatgcccagtcgcaactatgcagttttaacagagaactcaccaaacaaccccgtcgctcccatgaatggtacaaatggtctcgcggatcaagagacacatgagcaaaataggtgggatggaaaggatggacattctttcctgcacgcaggtgaagaaggtgcaggcactcagcacaaggcatcccagtacgaagcgcacgggaaaggaaacgacggttccttggactgctgcattcgtattgaggttgaccagcacgacaaggaaggcaaaacagaaccttacggcctcacgataccggttctgaattatgatgctacgaagcacaagagcaacatgcaccatagactacaccttcggcatcgcagtcgcccaggaacgggtgtaagtaccgcgccaagcacagctccatccttaccaggctctgtccctccaatgccgagcaacagaagccactagaaaaaggctatgtgtggtagttgtttgaaatggtgcagtctatgccgcgagaaaaaaataactcgatcatcatccccagttgcttcagaaaagtagagagggagccttgcattggtttggagaacgccgtggctaacgccatagctaataatgggatcaagaggaacgaaagactagtcagaacagatgtgtaagaactatatgataatacccaaggagacgaaatcatggaggagagtcagtgcgtctagtattgttttcttgactactgtagaatacctattaattgtctgggccgttctgtctcgttctctagtgagataggctaggagttatggaatgaaggcttgaagagaacgtcgaagccgttgccgtttgtggacaagttcaactgggtcttgcatattctatgtgatacgaaattcgtaacttggaacgatgaagctcatttcaatgttgatggcaccgtcacgataccatcacggcggctggcggtacaccaa

SEQ ID NO: 16303 - DNA, 1806 bp, Muscodor strobelii
  misc_feature: SGI cDNA ID NO. 565418
  misc_feature: Encodes the peptide sequence at SEQ ID NO 16304
atggcagcggcacggaggagcagcggtctcgcaagggtattacagtcgccctccaccggcgtgctatcggcgaccaggagcacctcaaatcaactatctcaagctcgtctgctaaagaacacaagagcattgagctcgactagcaccagaaagtcacatcttgcgtcgttcaagattcctaaagtattgaacgagcctaatcaccattatacgaagaactcagcgcagcgcgaaggattactttctacagttgatacagtccgaagcagaggcgcagtagaagtccctatagtagtgggaggcgaggagatcaggacatcacagacagcaacgcaaaagaacccctctgatcacgccacggccgtggccaactattctctcgcatcgccttccgatgtatcgaaagccattgacgcagcgcttgctgccaaaccagcgtgggaggcgctgccctttgccgatagagcatccgtgtttctcaaggcagctgacctcatctccaacaagtaccgatacgaggtgatggcgaccaccatggtaggccagggaaagaatgcctggcaagcagagatcgattctgctgcagaattgtgcgacttcttacgttttaatgttcaatatgccgaggagatgtatgcacaacagcctgcgcataacgctcctggcgtatggaaccgggtagagtacagacccctcgaaggcttcgtctacgccgtgagcccttttaacttcactgccattgcaggcaacttgcccggcgctcctgcgctactgggcaatgtggtcgtttggaagccctctgactcagcaattgcctctaactggttgttgtatcaaatcttgctcgaagctggtctacccccaaatgtgattcaattcgtccctggaaatccagaggaggtcacgaagactgttcttgcacacaagcaattcgccgcactccattatactggaagcactgctgtcttccgcaaactttacggccagattggccagggaaccgctgagggccgataccaaagttaccctcgtatcgtcggcgagacaggcggaaagaacttccatttaatacactcttcggccgatgttgacaatgccgtcattcaaaccatccgcggcgcctttgagtaccagggtcagaagtgcagtgcgacgagtcgtctctatgtgtcaaagtcaatttggcccgaattcaaggagaaactcatcaaggaaactagtgccttgaatattggagctccctcggatcctaagaacttcattggacctgttatccatgaacccagcttcaagaagctatcgggagttattgacgatgctaagaatgattcggagctcaagctcgtagttggtggcaaatacgatggctcaaaaggctatttcatccacccgaccgtttatgaaaccaccaatccttctcacaaacttctcagcactgagctcttcggacctattctgactgcctacgtatatgacgacgcggcaggctcagaggcatttcttgacgtctgcaagctcgtcgatagcacgaccgagtatgggttgaccggcgctgtcttcgcaagcgatcgagctgttgtccgtgtggcggaggaagcgcttcgcaatgccgcaggcaatttctatatcaactgcaagagcactggtgctgttgttggtcagcagcccttcggaggagctcgggccagtggtacgaatgataaggctggtagtatgaatttactcggccgcttcgtcagtgtcaggagcatcaaagaagaatttagcccgacgacgaaagtagagtatccaagcaacgaggtctaa

SEQ ID NO: 16304 - protein, 601 aa, Muscodor strobelii
  misc_feature: SGI Peptide ID NO. 565418
  misc_feature (104)..(581): Pfam Id: PF00171 Pfam Desc: Aldehyde dehydrogenase family
  misc_feature (104)..(570): Pfam Id: PF00171 Pfam Desc: Aldehyde dehydrogenase family
  misc_feature (12)..(601): NCBI GI: 116180384 Blast Desc: CHGG_00820 [Chaetomium globosum CBS 148.51] gi|88185117|gb|EAQ92585.1| CHGG_00820 [Chaetomium globosum CBS 148.51]
  misc_feature (39)..(601): NCBI GI: 218511624 Blast Desc: delta 1-pyrroline-5-carboxylate dehydrogenase [Epichloe festucae]
  misc_feature (54)..(601): NCBI GI: 46108518 Blast Desc: FG01141.1 [Gibberella zeae PH-1]
  misc_feature (42)..(601): NCBI GI: 171687823 Blast Desc: protein product [Podospora anserina] gi|170943873|emb|CAP69525.1| protein product [Podospora anserina]
  misc_feature (54)..(601): NCBI GI: 256734397 Blast Desc: [Nectria haematococca mpVI 77-13-4]
  misc_feature (3)..(601): NCBI GI: 85111922 Blast Desc: delta-1-pyrroline-5-carboxylate dehydrogenase [Neurospora crassa OR74A] gi|28925939|gb|EAA34933.1| delta-1-pyrroline-5-carboxylate dehydrogenase [Neurospora crassa
  misc_feature (22)..(601): NCBI GI: 189189794 Blast Desc: delta-1-pyrroline-5-carboxylate dehydrogenase, mitochondrial precursor [Pyrenophora tritici-repentis Pt-1C-BFP] gi|187972842|gb|EDU40341.1| delta-1-pyrroline-5-carboxylate
  misc_feature (34)..(599): NCBI GI: 119469907 Blast Desc: delta-1-pyrroline-5-carboxylate dehydrogenase PrnC [Neosartorya fischeri NRRL 181] gi|119406143|gb|EAW16094.1| delta-1-pyrroline-5-carboxylate dehydrogenase PrnC [Neosartorya
  misc_feature (52)..(600): NCBI GI: 238839099 Blast Desc: delta-1-pyrroline-5-carboxylate dehydrogenase PrnC [Microsporum canis CBS 113480]
  misc_feature (34)..(599): NCBI GI: 70991831 Blast Desc: delta-1-pyrroline-5-carboxylate dehydrogenase PrnC [Aspergillus fumigatus Af293] gi|66848397|gb|EAL88726.1| delta-1-pyrroline-5-carboxylate dehydrogenase PrnC [Aspergillus
  misc_feature (34)..(600): SWISSPROT Homolog: EC 1.5.1.12 1-pyrroline-5-carboxylate dehydrogenase
  misc_feature: Useful for introducing or modulating the production of volatile compounds
  misc_feature: Useful for fungicidal and/or biocontrol applications
MAAARRSSGLARVLQSPSTGVLSATRSTSNQLSQARLLKNTRALSSTSTRKSHLASFKIPKVLNEPNHHYTKNSAQREGLLSTVDTVRSRGAVEVPIVVGGEEIRTSQTATQKNPSDHATAVANYSLASPSDVSKAIDAALAAKPAWEALPFADRASVFLKAADLISNKYRYEVMATTMVGQGKNAWQAEIDSAAELCDFLRFNVQYAEEMYAQQPAHNAPGVWNRVEYRPLEGFVYAVSPFNFTAIAGNLPGAPALLGNVVVWKPSDSAIASNWLLYQILLEAGLPPNVIQFVPGNPEEVTKTVLAHKQFAALHYTGSTAVFRKLYGQIGQGTAEGRYQSYPRIVGETGGKNFHLIHSSADVDNAVIQTIRGAFEYQGQKCSATSRLYVSKSIWPEFKEKLIKETSALNIGAPSDPKNFIGPVIHEPSFKKLSGVIDDAKNDSELKLVVGGKYDGSKGYFIHPTVYETTNPSHKLLSTELFGPILTAYVYDDAAGSEAFLDVCKLVDSTTEYGLTGAVFASDRAVVRVAEEALRNAAGNFYINCKSTGAVVGQQPFGGARASGTNDKAGSMNLLGRFVSVRSIKEEFSPTTKVEYPSNEV

SEQ ID NO: 16305 - DNA, 2405 bp, Muscodor strobelii
  misc_feature: SGI EST ID NO. CUFF.38455.0
  misc_feature: Variant of the nucleotide sequence at SEQ ID NO 16303
agccggagagcttcctttgttcggacattgaagtagctgcagtttccttctcattctgaacttgcatgaatcctttgaaccagtgaatcaactctattgaacctatcagcttcagcttcaagaaggcgagctgcatatttgaccctgtcgccggaaaacaatcctccatctccccctcctctcttgacatattgtaaactctactagggaagtgcgtcactgagttgatcaatcttttttctatacactcaattctacgcctcagatatttgtctactagtattgctctctaatatccacaatggcagcggcacggaggagcagcggtctcgcaagggtattacagtcgccctccaccggcgtgctatcggcgaccaggagcacctcaaatcaactatctcaagctcgtctgctaaagaacacaagagcattgagctcgactagcaccagaaagtcacatcttgcgtcgttcaagattcctaaagtattgaacgagcctaatcaccattatacgaagaactcagcgcagcgcgaaggattactttctacagttgatacagtccgaagcagaggcgcagtagaagtccctatagtagtgggaggcgaggagatcaggacatcacagacagcaacgcaaaagaacccctctgatcacgccacggccgtggccaactattctctcgcatcgccttccgatgtatcgaaagccattgacgcagcgcttgctgccaaaccagcgtgggaggcgctgccctttgccgatagagcatccgtgtttctcaaggcagctgacctcatctccaacaagtaccgatacgaggtgatggcgaccaccatggtaggccagggaaagaatgcctggcaagcagagatcgattctgctgcagaattgtgcgacttcttacgttttaatgttcaatatgccgaggagatgtatgcacaacagcctgcgcataacgctcctggcgtatggaaccgggtagagtacagacccctcgaaggcttcgtctacgccgtgagcccttttaacttcactgccattgcaggcaacttgcccggcgctcctgcgctactgggcaatgtggtcgtttggaagccctctgactcagcaattgcctctaactggttgttgtatcaaatcttgctcgaagctggtctacccccaaatgtgattcaattcgtccctggaaatccagaggaggtcacgaagactgttcttgcacacaagcaattcgccgcactccattatactggaagcactgctgtcttccgcaaactttacggccagattggccagggaaccgctgagggccgataccaaagttaccctcgtatcgtcggcgagacaggcggaaagaacttccatttaatacactcttcggccgatgttgacaatgccgtcattcaaaccatccgcggcgcctttgagtaccagggtcagaagtgcagtgcgacgagtcgtctctatgtgtcaaagtcaatttggcccgaattcaaggagaaactcatcaaggaaactagtgccttgaatattggagctccctcggatcctaagaacttcattggacctgttatccatgaacccagcttcaagaagctatcgggagttattgacgatgctaagaatgattcggagctcaagctcgtagttggtggcaaatacgatggctcaaaaggctatttcatccacccgaccgtttatgaaaccaccaatccttctcacaaacttctcagcactgagctcttcggacctattctgactgcctacgtatatgacgacgcggcaggctcagaggcatttcttgacgtctgcaagctcgtcgatagcacgaccgagtatgggttgaccggcgctgtcttcgcaagcgatcgagctgttgtccgtgtggcggaggaagcgcttcgcaatgccgcaggcaatttctatatcaactgcaagagcactggtgctgttgttggtcagcagcccttcggaggagctcgggccagtggtacgaatgataaggctggtagtatgaatttactcggccgcttcgtcagtgtcaggagcatcaaagaagaatttagcccgacgacgaaagtagagtatccaagcaacgaggtctaaaaatgaggatcccacgatgcatgacttccaataatgacttatggtttggcgtttatcaagagtaggggagtcacgaatttaattagtactggtggcatctattacagaatctgcatttgcaggatataagataaataaatctggatacgctcgaatctcaaattatgagtgtgatacgcagtggttcggtgaggtcaattgacgctcgtcttcggttgtgagactcaccgagtccacgttaatattcttggcgccaacctttatccattcgatcccattgcataaatctcgaaccata

SEQ ID NO: 16306 - DNA, 1266 bp, Muscodor strobelii
  misc_feature: SGI cDNA ID NO. 565419
  misc_feature: Encodes the peptide sequence at SEQ ID NO 16307
atggcagacgaaatacaaccgtacactatctcaatcccagacgcagatctcgacgatctacgcgagcgtctccgccgcacgcggttcccaagcgagttggacgacgtaggaacaacgatgggcgcaccgctctcggacgtgaagcgcatcgcgacatactgggcagagaagtacgactggagagcggccgaggctgctttcaacgctttgccgcagttccatacttcgatccaagcagatggttttgaaccgctcgatattcacttcctgcacgtgcggagcaagagggaagatgccgtgccacttatcttcgtgcacggatggccggggagttttttggaggggacgaagattctgaagccgcttgctgagccggaggataagtcgctgccggcgtttcatgttgttgttccttcgctccctggatatgggttctcgcaggcgagctctaaggcggggtttgctcttgatcaacatgcggagactatgcataaacttatgttgaagttgggatatgcggagtacgtgacccagggtggggattgggggtatatgattacgagagcgatgggacgaagatatgcgcctgagtttgtgaaggggcagcatttgaatatgagctggtacccgaggccgagtctgttgaagaatccgattcttgcgctcagaactatgttccaggcttttgttactgggttttcggaggcggataagaaggggttcgcgaggtcgacggagttccaaaagagtgggaatgggtattccaggattcaaggtaccaggcctcagacactgggttatggcctcactgattctccagccgccctactgggctggatctatgagaagctcgtcgactggactgatcactatccctggaccgaagatgaggtttgcacatggattagcatctactggttttcgaccgcaaccccacgagcagcgcaccagctatactatgagacagagatgaaccaagatgaggctaggtgcaaggaaaaagtggcgaatgggattcctacatcatccttgaaccaactactcgagtaccaaaacgtgaagatggggttttccaagtttccccgcgacgtcattgtattgccgagctcttggggccaggcgatgggaaatgtcgtcttttcgaaggagcacgagggaggaggacattttgcggcgtgggagcggccggatgagattgtcaaggatctgcaaacgatgttcggtcccaagggggggagcccatggggttgtgaagacggctgctaa

SEQ ID NO: 16307 - protein, 421 aa, Muscodor strobelii
  misc_feature: SGI Peptide ID NO. 565419
  misc_feature (133)..(405): Pfam Id: PF00561 Pfam Desc: alpha/beta hydrolase fold
  misc_feature (6)..(119): Pfam Id: PF06441 Pfam Desc: Epoxide hydrolase N terminus
  misc_feature (133)..(194): Pfam Id: PF00561 Pfam Desc: alpha/beta hydrolase fold
  misc_feature (6)..(411): NCBI GI: 169608071 Blast Desc: SNOG_07102 [Phaeosphaeria nodorum SN15] gi|111064633|gb|EAT85753.1| SNOG_07102 [Phaeosphaeria nodorum SN15]
  misc_feature (4)..(411): NCBI GI: 189188968 Blast Desc: epoxide hydrolase 1 [Pyrenophora tritici-repentis Pt-1C-BFP] gi|187972429|gb|EDU39928.1| epoxide hydrolase 1 [Pyrenophora tritici-repentis Pt-1C-BFP]
  misc_feature (1)..(411): NCBI GI: 255950628 Blast Desc: Pc22g21860 [Penicillium chrysogenum Wisconsin 54-1255] gi|211593098|emb|CAP99474.1| Pc22g21860 [Penicillium chrysogenum Wisconsin 54-1255]
  misc_feature (1)..(411): NCBI GI: 46109710 Blast Desc: FG01737.1 [Gibberella zeae PH-1]
  misc_feature (1)..(413): NCBI GI: 256730470 Blast Desc: NECHADRAFT_30008 [Nectria haematococca mpVI 77-13-4]
  misc_feature (4)..(413): NCBI GI: 116203331 Blast Desc: CHGG_09550 [Chaetomium globosum CBS 148.51] gi|88178068|gb|EAQ85536.1| CHGG_09550 [Chaetomium globosum CBS 148.51]
  misc_feature (5)..(411): NCBI GI: 238841134 Blast Desc: epoxide hydrolase [Microsporum canis CBS 113480]
  misc_feature (7)..(420): NCBI GI: 156048390 Blast Desc: SS1G_08926 [Sclerotinia sclerotiorum 1980] gi|154693323|gb|EDN93061.1| SS1G_08926 [Sclerotinia sclerotiorum 1980]
  misc_feature (1)..(413): NCBI GI: 261354772 Blast Desc: epoxide hydrolase [Verticillium albo-atrum VaMs.102]
  misc_feature (5)..(420): NCBI GI: 149210895 Blast Desc: MGCH7_ch7g920 [Magnaporthe grisea 70-15] gi|86196875|gb|EAQ71513.1| MGCH7_ch7g920 [Magnaporthe grisea 70-15]
  misc_feature (3)..(408): SWISSPROT Homolog: EC 3.3.2.9 Microsomal epoxide hydrolase
MADEIQPYTISIPDADLDDLRERLRRTRFPSELDDVGTTMGAPLSDVKRIATYWAEKYDWRAAEAAFNALPQFHTSIQADGFEPLDIHFLHVRSKREDAVPLIFVHGWPGSFLEGTKILKPLAEPEDKSLPAFHVVVPSLPGYGFSQASSKAGFALDQHAETMHKLMLKLGYAEYVTQGGDWGYMITRAMGRRYAPEFVKGQHLNMSWYPRPSLLKNPILALRTMFQAFVTGFSEADKKGFARSTEFQKSGNGYSRIQGTRPQTLGYGLTDSPAALLGWIYEKLVDWTDHYPWTEDEVCTWISIYWFSTATPRAAHQLYYETEMNQDEARCKEKVANGIPTSSLNQLLEYQNVKMGFSKFPRDVIVLPSSWGQAMGNVVFSKEHEGGGHFAAWERPDEIVKDLQTMFGPKGGSPWGCEDGC

SEQ ID NO: 16308 - DNA, 1656 bp, Muscodor strobelii
  misc_feature: SGI EST ID NO. CUFF.38519.0
  misc_feature: Variant of the nucleotide sequence at SEQ ID NO 16306
catttgtacgggttgaatattaatgctgtcggcacttttgttagtcaagacaaggcccttggtacataaacagtcacaataagagacagacaaaatggcagacgaaatacaaccgtacactatctcaatcccagacgcagatctcgacgatctacgcgagcgtctccgccgcacgcggttcccaagcgagttggacgacgtaggaacaacgatgggcgcaccgctctcggacgtgaagcgcatcgcgacatactgggcagagaagtacgactggagagcggccgaggctgctttcaacgctttgccgcagttccatacttcgatccaagcagatggttttgaaccgctcgatattcacttcctgcacgtgcggagcaagagggaagatgccgtgccacttatcttcgtgcacggatggccggggagttttttggaggggacgaagattctgaagccgcttgctgagccggaggataagtcgctgccggcgtttcatgttgttgttccttcgctccctggatatgggttctcgcaggcgagctctaaggcggggtttgctcttgatcaacatgcggagactatgcataaacttatgttgaagttgggatatgcggagtacgtgacccagggtggggattgggggtatatgattacgagagcgatgggacgaagatatgcgcctgagtttgtgaaggggcagcatttgaatatgagctggtacccgaggccgagtctgttgaagaatccgattcttgcgctcagaactatgttccaggcttttgttactgggttttcggaggcggataagaaggggttcgcgaggtcgacggagttccaaaagagtgggaatgggtattccaggattcaaggtaccaggcctcagacactgggttatggcctcactgattctccagccgccctactgggctggatctatgagaagctcgtcgactggactgatcactatccctggaccgaagatgaggtttgcacatggattagcatctactggttttcgaccgcaaccccacgagcagcgcaccagctatactatgagacagagatgaaccaagatgaggctaggtgcaaggaaaaagtggcgaatgggattcctacatcatccttgaaccaactactcgagtaccaaaacgtgaagatggggttttccaagtttccccgcgacgtcattgtattgccgagctcttggggccaggcgatgggaaatgtcgtcttttcgaaggagcacgagggaggaggacattttgcggcgtgggagcggccggatgagattgtcaaggatctgcaaacgatgttcggtcccaagggggggagcccatggggttgtgaagacggctgctaagctgtgaaagtgggttgatgcgactgagagaagacaggcaggcgacccgtcatggcttgcgtcaagttcaaggttgaaacacacggcataatgatatgaagagaaaaagaaaattaatcttaacagtaataactgtactggagtgaaatagggcaaaataaaagtcgtcaccgttacggggattcgaaccccggcctctggggtgaaaacccagtatcctaaacctctagacgataacggttgttgttagaaaatagctgcactattgttgattataaggcacaatcagatgtcga

SEQ ID NO: 16309 - DNA, 1584 bp, Muscodor strobelii
  misc_feature: SGI cDNA ID NO. 565420
  misc_feature: Encodes the peptide sequence at SEQ ID NO 16310
atgttccgattactcagatatttgcaacttgggaggatcgacaacttcgcaaattactacctactcaaagacgaacccgaattactagaaaaaggagatgaaacagatcggtcgagctctgacgccgagagcttcgatattccatcaagtgctttgagaagacacgcctttagaaggaacccagctctccggtcgctgaggaaactcaaggtcttgttaccaagctttctccaggaaatagattatcaatcggagccaaaaccgttgcggcctaccgcttggctagatggactacgtggcgttgccgccttcttcgtggtgctgcatcacacgaccttgatatacttctcatgggctatctacaatggctggaaagactcgaacgatcatctcgttcaactccccatcatccgattgatcatttcaggccgacctaacgtcatgacgttttttgttatatccggctatgcactcagccttaagcccctgagtctcatccgaaagaaccaatacgcaaagacgtacgcggcgctagcttcgtcaacctttcgccgccatccgcgactttatataccagcactaataatatgctcgccagcacccttcattacgttctggggtggatttacgcctgcagatggcatgcctggagcagcagttagcgggacgaatcctcctcgattcgatactctttgggaacaactttccgactacaaaaacgctatcttaaccgtgtcagatttctataatccgaacggtcatatctggcgctacagcgactctttgtggaccctcccaatcgagtttaggagttccttggtgatttttgcaatgctgttagctctctcgcgggtaacaaatcgctctcgaatttttatcactttatctgtcgcggcgtattccttgtggtatctccactggggcgaacttctgttcatcggcggtatgcttgtagcagataggagtatcctcgcccaaagatcgccagaatcgtgcggatcgcttgacaaagattgttgcgaccctccacgccgctttctatacttctcagcctcaaaaagtggtgcagcacgtcgaattttctcagttatggctttactcatcgttttattcatcctcggcatgccagagcagggtcaaggtgcagctgaaagctacggctatggatatctcagctccctaataccagaacactaccacaagcttggagacccggaccgcttttggcagcctctaggggcaatctttttgattttcgtactggattgctctccattcctgcaacgaccattcactacgcggttggctcaatacttggggagaatttcctattcgctctacttggtacacatgcaattggtccatagtctgggactcatctccgccaggtactttctgcaatacaccggatcggactcttattggcaatacggaacaggcaccattcttgcgactctggtcacatgggttgtcactttctggcttgctgatcttggttcacgatttgtggatgtcaaagccgtcaaactcacaggatgggtgtacgacaagctgtgcaaaagatcaactgagaactatggataa

SEQ ID NO: 16310 - protein, 527 aa, Muscodor strobelii
  misc_feature: SGI Peptide ID NO. 565420
  misc_feature (92)..(502): Pfam Id: PF01757 Pfam Desc: Acyltransferase family
  misc_feature (229)..(502): Pfam Id: PF01757 Pfam Desc: Acyltransferase family
  misc_feature (92)..(118): Pfam Id: PF01757 Pfam Desc: Acyltransferase family
  misc_feature (66)..(521): NCBI GI: 39949827 Blast Desc: MGG_08813 [Magnaporthe grisea 70-15] gi|145009369|gb|EDJ94080.1| MGG_08813 [Magnaporthe grisea 70-15]
  misc_feature (69)..(522): NCBI GI: 6002529 Blast Desc: AF089807_1 hard surface induced protein 3 [Colletotrichum gloeosporioides]
  misc_feature (71)..(522): NCBI GI: 67522479 Blast Desc: AN1696.2 [Aspergillus nidulans FGSC A4] gi|40745660|gb|EAA64816.1| AN1696.2 [Aspergillus nidulans FGSC A4] gi|259487037|tpe|CBF85387.1| TPA: acyltransferase, nidulans
  misc_feature (64)..(523): NCBI GI: 70994264 Blast Desc: acyltransferase [Aspergillus fumigatus Af293] gi|66849608|gb|EAL89936.1| acyltransferase, [Aspergillus fumigatus Af293] gi|159125113|gb|EDP50230.1| acyltransferase,
  misc_feature (64)..(523): NCBI GI: 119500826 Blast Desc: acyltransferase, [Neosartorya fischeri NRRL 181] gi|119415335|gb|EAW25273.1| acyltransferase, [Neosartorya fischeri NRRL 181]
  misc_feature (72)..(524): NCBI GI: 145241818 Blast Desc: An09g02410 [Aspergillus niger] gi|134078096|emb|CAK40178.1| protein product [Aspergillus niger]
  misc_feature (64)..(521): NCBI GI: 121707144 Blast Desc: acyltransferase, [Aspergillus clavatus NRRL 1] gi|119399893|gb|EAW10319.1| acyltransferase, [Aspergillus clavatus NRRL 1]
  misc_feature (72)..(522): NCBI GI: 46137131 Blast Desc: FG10081.1 [Gibberella zeae PH-1]
  misc_feature (23)..(523): NCBI GI: 169773507 Blast Desc: [Aspergillus oryzae RIB40] gi|83769083|dbj|BAE59220.1| protein product [Aspergillus oryzae]
  misc_feature (23)..(523): NCBI GI: 238491494 Blast Desc: acyltransferase, [Aspergillus flavus NRRL3357] gi|220697397|gb|EED53738.1| acyltransferase, [Aspergillus flavus NRRL3357]
MFRLLRYLQLGRIDNFANYYLLKDEPELLEKGDETDRSSSDAESFDIPSSALRRHAFRRNPALRSLRKLKVLLPSFLQEIDYQSEPKPLRPTAWLDGLRGVAAFFVVLHHTTLIYFSWAIYNGWKDSNDHLVQLPIIRLIISGRPNVMTFFVISGYALSLKPLSLIRKNQYAKTYAALASSTFRRHPRLYIPALIICSPAPFITFWGGFTPADGMPGAAVSGTNPPRFDTLWEQLSDYKNAILTVSDFYNPNGHIWRYSDSLWTLPIEFRSSLVIFAMLLALSRVTNRSRIFITLSVAAYSLWYLHWGELLFIGGMLVADRSILAQRSPESCGSLDKDCCDPPRRFLYFSASKSGAARRIFSVMALLIVLFILGMPEQGQGAAESYGYGYLSSLIPEHYHKLGDPDRFWQPLGAIFLIFVLDCSPFLQRPFTTRLAQYLGRISYSLYLVHMQLVHSLGLISARYFLQYTGSDSYWQYGTGTILATLVTWVVTFWLADLGSRFVDVKAVKLTGWVYDKLCKRSTENYG

SEQ ID NO: 16311 - DNA, 759 bp, Muscodor strobelii
  misc_feature: SGI cDNA ID NO. 565421
  misc_feature: Encodes the peptide sequence at SEQ ID NO 16312
atggattccactccctatacttctacccggcgaacaaacttctacaagagacgagcctgcttcccatatggcacatactctgttgttccagaaatcgagagcatccaaggtgtacttgacgcggccgtgtgggttggttatgcgtgggctgatgagccaaggaatcgagctgtggttgtagtcacgggttgggacgaagatgctacaacgagatccgcagagagacttggtcgcattttctgggatgcccatcgcgacttcaagttcgttgctccaaccggaacgttcgaagcctgtctcaactcagcgttagcgtctaaccagcggccgtacttcatttctgactctggtgacaacccgaccgccggtggttctggcgacatgacatgggggttgacacagctactagcaaggcccgaatttaaagatgagtctgggccggctgttatatacgcgtctgtacctggagcagaggccgtggaaactgcagttcaggcgggaatcggagcaatcataactgtcacaaccggggcggaagttgacgccctacacgccgggccaatcacgatgaccggaaaagtgcattcaattaagcgtggcgatatacatgcgatcaccgaggtggtattacaagtaggaagtgttttcgcgatattgacgaagcttcgaaagccgtatcatctcgaaaaagacttcgttgacttgcgattgaaaccgcgagaagcagatgtaagtattcatggatcaggatcagaataa

SEQ ID NO: 16312 - protein, 252 aa, Muscodor strobelii
  misc_feature: SGI Peptide ID NO. 565421
  misc_feature (112)..(251): Pfam Id: PF07171 Pfam Desc: MlrC C-terminus
  misc_feature (112)..(244): Pfam Id: PF07171 Pfam Desc: MlrC C-terminus
  misc_feature (26)..(246): NCBI GI: 242791893 Blast Desc: conserved [Talaromyces stipitatus ATCC 10500] gi|218718435|gb|EED17855.1| conserved [Talaromyces stipitatus ATCC 10500]
  misc_feature (26)..(246): NCBI GI: 238492219 Blast Desc: conserved [Aspergillus flavus NRRL3357] gi|220695840|gb|EED52182.1| conserved [Aspergillus flavus NRRL3357]
  misc_feature (26)..(246): NCBI GI: 169782590 Blast Desc: [Aspergillus oryzae RIB40] gi|83774501|dbj|BAE64624.1| protein product [Aspergillus oryzae]
  misc_feature (26)..(246): NCBI GI: 145241492 Blast Desc: An09g00680 [Aspergillus niger] gi|134077930|emb|CAL00328.1| protein product [Aspergillus niger]
  misc_feature (26)..(246): NCBI GI: 256675322 Blast Desc: SSPB78_03150 [Streptomyces sp. SPB78]
  misc_feature (26)..(246): NCBI GI: 212535044 Blast Desc: conserved [Penicillium marneffei ATCC 18224] gi|210070077|gb|EEA24167.1| conserved [Penicillium marneffei ATCC 18224]
  misc_feature (26)..(246): NCBI GI: 115400994 Blast Desc: conserved [Aspergillus terreus NIH2624] gi|114190026|gb|EAU31726.1| conserved [Aspergillus terreus NIH2624]
  misc_feature (26)..(246): NCBI GI: 255943959 Blast Desc: Pc20g01880 [Penicillium chrysogenum Wisconsin 54-1255] gi|211587482|emb|CAP85517.1| Pc20g01880 [Penicillium chrysogenum Wisconsin 54-1255]
  misc_feature (26)..(246): NCBI GI: 21224443 Blast Desc: SCO6116 [Streptomyces coelicolor A3(2)] gi|4160312|emb|CAA22783.1| conserved SC9B2.03 [Streptomyces coelicolor A3(2)]
  misc_feature (26)..(246): NCBI GI: 256784363 Blast Desc: SlivT_07743 [Streptomyces lividans TK24]
MDSTPYTSTRRTNFYKRRACFPYGTYSVVPEIESIQGVLDAAVWVGYAWADEPRNRAVVVVTGWDEDATTRSAERLGRIFWDAHRDFKFVAPTGTFEACLNSALASNQRPYFISDSGDNPTAGGSGDMTWGLTQLLARPEFKDESGPAVIYASVPGAEAVETAVQAGIGAIITVTTGAEVDALHAGPITMTGKVHSIKRGDIHAITEVVLQVGSVFAILTKLRKPYHLEKDFVDLRLKPREADVSIHGSGSE

SEQ ID NO: 16313 - DNA, 537 bp, Muscodor strobelii
  misc_feature: SGI cDNA ID NO. 565422
  misc_feature: Encodes the peptide sequence at SEQ ID NO 16314
atgcagattctacgatcaatcgtcatcagcatttcgagtatcgcggtttgcctggcttatccagccacaaatcttccagtctcaggcctcagtcgccgcagcggagataatcacaagagggagaatctgtgcaatctaaacgcgcctcctgctctctgtcagccaaatgccactgtgaccgttgcagagaccgcgcaaagagcatatcaattctatcgcgcctttgtggttgatggcgatccaaggacaatgttctcgttgatcgactctgcatacatccaacaccatcctggctatgcaagcggtcctaataccatatggccccttttttgcaatgggaacaagattgggaccgagcagaacactgcttggtgcttcgatgcctcaacaaatatgtcctacgcgagatactcgactactgacaggtggcgatgggtcgatgggtgtgtccatgagcactgggaccagggagagacaataccggctcagtcaaaatgttatagccttacaaatggcaccatggctgctttgagatga

SEQ ID NO: 16314 - protein, 178 aa, Muscodor strobelii
  misc_feature: SGI Peptide ID NO. 565422
  misc_feature (4)..(175): NCBI GI: 171682858 Blast Desc: protein product [Podospora anserina] gi|170941388|emb|CAP67038.1| protein product [Podospora anserina]
  misc_feature (26)..(173): NCBI GI: 116199995 Blast Desc: [Chaetomium globosum CBS 148.51] gi|88179432|gb|EAQ86900.1| [Chaetomium globosum CBS 148.51]
  misc_feature (6)..(161): NCBI GI: 189209311 Blast Desc: conserved [Pyrenophora tritici-repentis Pt-1C-BFP] gi|187977081|gb|EDU43707.1| conserved [Pyrenophora tritici-repentis Pt-1C-BFP]
  misc_feature (50)..(161): NCBI GI: 169598872 Blast Desc: SNOG_02244 [Phaeosphaeria nodorum SN15] gi|111069336|gb|EAT90456.1| SNOG_02244 [Phaeosphaeria nodorum SN15]
  misc_feature (40)..(161): NCBI GI: 39977953 Blast Desc: [Magnaporthe grisea 70-15] gi|145013579|gb|EDJ98220.1| [Magnaporthe grisea 70-15]
  misc_feature (50)..(161): NCBI GI: 169850830 Blast Desc: CC1G_07478 [Coprinopsis cinerea okayama7#130] gi|116506858|gb|EAU89753.1| CC1G_07478 [Coprinopsis cinerea okayama7#130]
MQILRSIVISISSIAVCLAYPATNLPVSGLSRRSGDNHKRENLCNLNAPPALCQPNATVTVAETAQRAYQFYRAFVVDGDPRTMFSLIDSAYIQHHPGYASGPNTIWPLFCNGNKIGTEQNTAWCFDASTNMSYARYSTTDRWRWVDGCVHEHWDQGETIPAQSKCYSLTNGTMAALR

SEQ ID NO: 16315 - DNA, 2531 bp, Muscodor strobelii
  misc_feature: SGI EST ID NO. CUFF.38483.0
  misc_feature: Variant of the nucleotide sequence at SEQ ID NO 16313
caatgggcttgtcggatggttctgtgagcaatacttagtgcttgtgatacctttgtcgagctttcttggtcttgcatttagctattaaatgattaggtatcttgcgtatcgaaatatctgtctcgaaggtcaaggtttttgtcatgtctactgggttgtttcatcaaagttacctacagctgggcgagcaagttccatgagtttaccataacaaagtcgcaattgcgaataatgtgccccaaccccccaagcatgttaaaagatccaacgaatacaaatggtgtgccgtggttatgctttggctcatcaccaggttgcagtacaccggagattgagtgatgagtctgcgcgccatatgtcatgccactagatttcttttttcaatcaacgaaggagaatgccaatgatcgttacagatcacgaggtattgattccacgaggactgaagcttttcattcgttgagaagcttacaactcattagaaaaactaacagtttttctaacttgattctttgatacgaagaacactagctaattgcgaacgagacatgccgcaagaggctgttccattcatcaattctttatctcttccttatgaaacaatcctgtggtcgttaacgcaattacgagagatggatcttctattgcgcacctgagatctcaggcatccagggatctcgtaggcgacaaaagaactcgccttttggttcgacttgccttcgggcatgatcatccatcgtgccatagaatacaaactgcatcacaaggtcttgaaactatgctctgcaagaacagaagctatcgacccttaccccaaactctagtaggcttccaccacacttatcacagaattctcggtgcagcatgacgccgctaccgttatcagcttcgtgaactcggacctggtcgctgccattcactatcgaaaatgccgaccgtggaattttagttgtaatgccaaaattacagcctgtaaagcgtttacaggttccacaatgacaaatgctggtccgtgcctgtgattcggggtcgggaagcgtgatgcgataatgaatggcgccgcagtagcagccgccgggtaaggatgtcattctgagctcgctgggatagctgtattgattcggattatgaaagcggttcggcgactgttttgtttagttcgaatgctagatattaagttgcatggccttgaaacaagggaattatgttagtggtcacagacaccatcatctatgacggtaggccgacgtcacaatccgtccagacacacaagttctgagacttacgcactggctacgaaataatttttatcatcgctgtagagatgtgcgtgtctggtagctcgctcttggtggcgaatggttaaggcttgggatagctaagcagcacttatgctgaatgatataacttggtttcaatacttgtgtgtatttagccaggccattcaagtaggtttaacattacattcttggggttccattcggggatttcgatagattgtcctggtcaatccaagctggctaaataagcggatattacaaactgcccttcaaagttgacttggccaagtgcccctctcgtcataatagcaggtctgagttatggcatgacagatataaacgagttgcgatgccagatgggcgaacccgtttgttggccatccgtatatttttgattcatcacagtcaagatgcagattctacgatcaatcgtcatcagcatttcgagtatcgcggtttgcctggcttatccagccacaaatcttccagtctcaggcctcagtcgccgcagcggagataatcacaagagggagaatctgtgcaatctaaacgcgcctcctgctctctgtcagccaaatgccactgtgaccgttgcagagaccgcgcaaagagcatatcaattctatcgcgcctttgtggttgatggcgatccaaggacaatgttctcgttgatcgactctgcatacatccaacaccatcctggctatgcaagcggtcctaataccatatggccccttttttgcaatgggaacaagattgggaccgagcagaacactgcttggtgcttcgatgcctcaacaaatatgtcctacgcgagatactcgactactgacaggtggcgatgggtcgatgggtgtgtccatgagcactgggaccagggagagacaataccggctcagtcaaaatgttatagccttacaaatggcaccatggctgctttgagatgattaacgaataagagctctattttggcttggttggagatttggacgataattagtcgtatattgtcacaaataaaaatcaatttcacttctctaccaagttgctttgggcatagctgtgggaattttgcagaatcacttgaaagaaacagatcgcgtgagcgaagcgcaaatgacgtattccaaatcgcaacggaggacgtgtacgttaaacatgagtttgcgagactttattcgaagggagaatcataacagacgatggtaacctggtgtctgtcagtttctcctagataacagaagatgggat

SEQ ID NO: 16316 - DNA, 1068 bp, Muscodor strobelii
  misc_feature: SGI cDNA ID NO. 565423
  misc_feature: Encodes the peptide sequence at SEQ ID NO 16317
atgtccgatatacgatatgataatccggttggcattgctatagggtcagtggtgatgcaaattgtttcgtccacatgtgttggcatcagattttatacgagacgcatgagaaagcagagcatacttgttagcgactggttaatcttgacgacgctcgttttggccactatcttgacgatcagtgaactcgtcggtatcgggctcaaagcactagcatatcccatcggcgggacactcgcagattcatcgattgtgtcgcaacgcctcaaccaaacgaaatatgccgaatttatctatctcgctgtgggcacactcaccttcggctttctaaaactctcagcctgtttcttatattgggacctgttcgcaaaattcatattccgccgcttcttgatcttttggatgtgcataataggtctgtggactgtggcatttttcatcggaatctttacagaatgcggcgcacatttcggcgcactttttgctcaacctgaggattatcgaaagtggtgcggaagtgctctagctctgggttgggctctggtgggcagcgatgtcggcaccgatcttgtcaccctcttgatacccattcctgtggtcctgaaactacaaatgggtcgacgtaacaagttacttgtcgtatcaatcctctttatcggtgctctctcgtttgctgcgtcgtcggtcaaggcctatatttacattgcagcctcactgagcaagtatgacgatgatgccgttttgattgtgacggccgtttcaatttggaatttagcagaagctcatgtcggaattgttgctgcctgtggacctgcgttacgaatgttcgctatcgatatctccgggaacaataatatgttatcagtcttggggtcgaagagatggcaacatgactcgagcccgcgaacggtgtccgaatacaataaaatgccacacggcagcgaggagcgattacaaagactctatacgaagggcaactcgacagaagaaggcagggtagtggatctggagctgcagtcgatacatgaagggaatccgggcccgtctcgctatgatagacgttcgtag

SEQ ID NO: 16317 - protein, 355 aa, Muscodor strobelii
  misc_feature: SGI Peptide ID NO. 565423
  misc_feature (1)..(345): NCBI GI: 85092407 Blast Desc: NCU04931 [Neurospora crassa OR74A] gi|28920784|gb|EAA30143.1| [Neurospora crassa OR74A]
  misc_feature (1)..(222): NCBI GI: 171680149 Blast Desc: protein product [Podospora anserina] gi|170939701|emb|CAP64927.1| protein product [Podospora anserina]
  misc_feature (16)..(315): NCBI GI: 242816288 Blast Desc: conserved [Talaromyces stipitatus ATCC 10500] gi|218715084|gb|EED14507.1| conserved [Talaromyces stipitatus ATCC 10500]
  misc_feature (22)..(272): NCBI GI: 156057509 Blast Desc: [Sclerotinia sclerotiorum 1980] gi|154702271|gb|EDO02010.1| [Sclerotinia sclerotiorum 1980]
  misc_feature (26)..(327): NCBI GI: 242784989 Blast Desc: conserved [Talaromyces stipitatus ATCC 10500] gi|218720648|gb|EED20067.1| conserved [Talaromyces stipitatus ATCC 10500]
  misc_feature (102)..(315): NCBI GI: 242816292 Blast Desc: conserved [Talaromyces stipitatus ATCC 10500] gi|218715085|gb|EED14508.1| conserved [Talaromyces stipitatus ATCC 10500]
  misc_feature (1)..(271): NCBI GI: 242809618 Blast Desc: conserved [Talaromyces stipitatus ATCC 10500] gi|218716033|gb|EED15455.1| conserved [Talaromyces stipitatus ATCC 10500]
  misc_feature (43)..(283): NCBI GI: 242818742 Blast Desc: conserved [Talaromyces stipitatus ATCC 10500] gi|218713643|gb|EED13067.1| conserved [Talaromyces stipitatus ATCC 10500]
  misc_feature (8)..(292): NCBI GI: 169611618 Blast Desc: SNOG_08924 [Phaeosphaeria nodorum SN15] gi|111062972|gb|EAT84092.1| SNOG_08924 [Phaeosphaeria nodorum SN15]
  misc_feature (26)..(274): NCBI GI: 156056697 Blast Desc: [Sclerotinia sclerotiorum 1980] gi|154701865|gb|EDO01604.1| [Sclerotinia sclerotiorum 1980]
MSDIRYDNPVGIAIGSVVMQIVSSTCVGIRFYTRRMRKQSILVSDWLILTTLVLATILTISELVGIGLKALAYPIGGTLADSSIVSQRLNQTKYAEFIYLAVGTLTFGFLKLSACFLYWDLFAKFIFRRFLIFWMCIIGLWTVAFFIGIFTECGAHFGALFAQPEDYRKWCGSALALGWALVGSDVGTDLVTLLIPIPVVLKLQMGRRNKLLVVSILFIGALSFAASSVKAYIYIAASLSKYDDDAVLIVTAVSIWNLAEAHVGIVAACGPALRMFAIDISGNNNMLSVLGSKRWQHDSSPRTVSEYNKMPHGSEERLQRLYTKGNSTEEGRVVDLELQSIHEGNPGPSRYDRRS

SEQ ID NO: 16318 - DNA, 2057 bp, Muscodor strobelii
  misc_feature: SGI EST ID NO. CUFF.38696.0
  misc_feature: Variant of the nucleotide sequence at SEQ ID NO 16316
cgactgggcgccaagactactttcttgaagtcgacctcctatgcggaagctaaggagtctgacagccacaagaggccagctgcaggacacgtaatggtgcactgcacaaaagcatgacatggatatagtggtgcggcgtgatctccacgttacgtacatgagcgcattgccgttgaaggtaattcgagcacagcatggtgatagggtccaaagatctgcagctccttccgcgcggggcaagacaacaggacattgaccagccccccaaggctctgcttttcaatatccgccgtccatttgatgagcaattgttatcgccgattacttgtacttaggtccaggatcaatatgctcatcggagcgccccttgttctatccctgcttgctgttagattttgatgatgggttggcatgggcctacgttatgaatcgtgataccaagcgttcgggttgcaaggagctagattgctctacatgggcatatgatactactgtcccgttgtaaatgccagagactatccattgaaggatctttagcacctggctaaaccatcgcgacaacgtgcaacttgccgcaatagcctagcgttatcttcaaacggccgttggaaaaggcaaggaggttctcgtcagatcaacttgtgccgctagtccttggagcaggtggagtttctgtcatactccaaagacttcagctgtcgttattgtcgcaagacctgagacctctctaggtctcctcctctttacatattccccgtcctggcgacgatgactggcggccactcggcagtcgatactacgcttttcatgggagtaggcaagactcgtgctcaccatgtccgatatacgatatgataatccggttggcattgctatagggtcagtggtgatgcaaattgtttcgtccacatgtgttggcatcagattttatacgagacgcatgagaaagcagagcatacttgttagcgactggttaatcttgacgacgctcgttttggccactatcttgacgatcagtgaactcgtcggtatcgggctcaaagcactagcatatcccatcggcgggacactcgcagattcatcgattgtgtcgcaacgcctcaaccaaacgaaatatgccgaatttatctatctcgctgtgggcacactcaccttcggctttctaaaactctcagcctgtttcttatattgggacctgttcgcaaaattcatattccgccgcttcttgatcttttggatgtgcataataggtctgtggactgtggcatttttcatcggaatctttacagaatgcggcgcacatttcggcgcactttttgctcaacctgaggattatcgaaagtggtgcggaagtgctctagctctgggttgggctctggtgggcagcgatgtcggcaccgatcttgtcaccctcttgatacccattcctgtggtcctgaaactacaaatgggtcgacgtaacaagttacttgtcgtatcaatcctctttatcggtgctctgtaagtgtacttgcctccatgcgagaacatagaactaacaccaacgaagctcgtttgctgcgtcgtcggtcaaggcctatatttacattgcagcctcactgagcaagtatgacgatgatgccgttttgattgtgacggccgtttcaatttggaatttagcagaagctcatgtcggaattgttgctgcctgtggacctgcgttacgaatgttcgctatcgatatctccgggaacaataatatgttatcagtcttggggtcgaagagatggcaacatgactcgagcccgcgaacggtgtccgaatacaataaaatgccacacggcagcgaggagcgattacaaagactctatacgaagggcaactcgacagaagaaggcagggtagtggatctggagctgcagtcgatacatgaagggaatccgggcccgtctcgctatgatagacgttcgtaggaaatctaatcctccatttgcatgcttgatttatgctcgcgcactcgattgaccagtgcggaataccctgtcgccattcgcctccaaatgacgcccaatcttcgt

SEQ ID NO: 16319 - DNA, 1083 bp, Muscodor strobelii
  misc_feature: SGI cDNA ID NO. 565424
  misc_feature: Encodes the peptide sequence at SEQ ID NO 16320
atgactggcggccactcggcagtcgatactacgcttttcatgggagtaggcaagactcggtcagtggtgatgcaaattgtttcgtccacatgtgttggcatcagattttatacgagacgcatgagaaagcagagcatacttgttagcgactggttaatcttgacgacgctcgttttggccactatcttgacgatcagtgaactcgtcggtatcgggctcaaagcactagcatatcccatcggcgggacactcgcagattcatcgattgtgtcgcaacgcctcaaccaaacgaaatatgccgaatttatctatctcgctgtgggcacactcaccttcggctttctaaaactctcagcctgtttcttatattgggacctgttcgcaaaattcatattccgccgcttcttgatcttttggatgtgcataataggtctgtggactgtggcatttttcatcggaatctttacagaatgcggcgcacatttcggcgcactttttgctcaacctgaggattatcgaaagtggtgcggaagtgctctagctctgggttgggctctggtgggcagcgatgtcggcaccgatcttgtcaccctcttgatacccattcctgtggtcctgaaactacaaatgggtcgacgtaacaagttacttgtcgtatcaatcctctttatcggtgctctctcgtttgctgcgtcgtcggtcaaggcctatatttacattgcagcctcactgagcaagtatgacgatgatgccgttttgattgtgacggccgtttcaatttggaatttagcagaagctcatgtcggaattgttgctgcctgtggacctgcgttacgaatgttcgctatcgatatctccgggaacaataatatgttatcagtcttggggtcgaagagatggcaacatgactcgagcccgcgaacggtgtccgaatacaataaaatgccacacggcagcgaggagcgattacaaagactctatacgaagggcaactcgacagaagaaggcagggtagtggatctggagctgcagtcgatacatgaagggaatccgggcccgtctcgctatgatagacgttcgtag

SEQ ID NO: 16320 - protein, 360 aa, Muscodor strobelii
  misc_feature: SGI Peptide ID NO. 565424
  misc_feature (21)..(350): NCBI GI: 85092407 Blast Desc: NCU04931 [Neurospora crassa OR74A] gi|28920784|gb|EAA30143.1| [Neurospora crassa OR74A]
  misc_feature (21)..(227): NCBI GI: 171680149 Blast Desc: protein product [Podospora anserina] gi|170939701|emb|CAP64927.1| protein product [Podospora anserina]
  misc_feature (21)..(320): NCBI GI: 242816288 Blast Desc: conserved [Talaromyces stipitatus ATCC 10500] gi|218715084|gb|EED14507.1| conserved [Talaromyces stipitatus ATCC 10500]
  misc_feature (27)..(277): NCBI GI: 156057509 Blast Desc: [Sclerotinia sclerotiorum 1980] gi|154702271|gb|EDO02010.1| [Sclerotinia sclerotiorum 1980]
  misc_feature (31)..(332): NCBI GI: 242784989 Blast Desc: conserved [Talaromyces stipitatus ATCC 10500] gi|218720648|gb|EED20067.1| conserved [Talaromyces stipitatus ATCC 10500]
  misc_feature (107)..(320): NCBI GI: 242816292 Blast Desc: conserved [Talaromyces stipitatus ATCC 10500] gi|218715085|gb|EED14508.1| conserved [Talaromyces stipitatus ATCC 10500]
  misc_feature (48)..(288): NCBI GI: 242818742 Blast Desc: conserved [Talaromyces stipitatus ATCC 10500] gi|218713643|gb|EED13067.1| conserved [Talaromyces stipitatus ATCC 10500]
  misc_feature (21)..(297): NCBI GI: 169611618 Blast Desc: SNOG_08924 [Phaeosphaeria nodorum SN15] gi|111062972|gb|EAT84092.1| SNOG_08924 [Phaeosphaeria nodorum SN15]
  misc_feature (20)..(276): NCBI GI: 242809618 Blast Desc: conserved [Talaromyces stipitatus ATCC 10500] gi|218716033|gb|EED15455.1| conserved [Talaromyces stipitatus ATCC 10500]
  misc_feature (31)..(279): NCBI GI: 156056697 Blast Desc: [Sclerotinia sclerotiorum 1980] gi|154701865|gb|EDO01604.1| [Sclerotinia sclerotiorum 1980]
MTGGHSAVDTTLFMGVGKTRSVVMQIVSSTCVGIRFYTRRMRKQSILVSDWLILTTLVLATILTISELVGIGLKALAYPIGGTLADSSIVSQRLNQTKYAEFIYLAVGTLTFGFLKLSACFLYWDLFAKFIFRRFLIFWMCIIGLWTVAFFIGIFTECGAHFGALFAQPEDYRKWCGSALALGWALVGSDVGTDLVTLLIPIPVVLKLQMGRRNKLLVVSILFIGALSFAASSVKAYIYIAASLSKYDDDAVLIVTAVSIWNLAEAHVGIVAACGPALRMFAIDISGNNNMLSVLGSKRWQHDSSPRTVSEYNKMPHGSEERLQRLYTKGNSTEEGRVVDLELQSIHEGNPGPSRYDRRS

SEQ ID NO: 16321 - DNA, 2057 bp, Muscodor strobelii; identical to SEQ ID NO: 16318
  misc_feature: SGI EST ID NO. CUFF.38696.0
  misc_feature: Variant of the nucleotide sequence at SEQ ID NO 16319

SEQ ID NO: 16322 - DNA, 300 bp, Muscodor strobelii
  misc_feature: SGI cDNA ID NO. 565425
  misc_feature: Encodes the peptide sequence at SEQ ID NO 16323
atgcctaaggagactagcaagcgcggtaaggccggcaaggtcgagaagggcaagcgaagcaagaaggaccccaatgcccccaagcgcggtctctccgcatacatgttcttcgccaacgagcagcgtgagaatgtccgcgacgagaaccctggtatctccttcggccaggttggcaagatcctcggtgagcgctggaaggctctcaatgacaagcagcgtgccccctatgaggccaaggctgctgccgacaagaagcgatacgaggacgagaagcaagcctaccaggccgagtccgactaa

SEQ ID NO: 16323 - protein, 99 aa, Muscodor strobelii
  misc_feature: SGI Peptide ID NO. 565425
  misc_feature (27)..(95): Pfam Id: PF00505 Pfam Desc: HMG (high mobility group) box
  misc_feature (1)..(96): NCBI GI: 164422576 Blast Desc: NCU09995 [Neurospora crassa OR74A] gi|157069727|gb|EAA28670.2| conserved [Neurospora crassa OR74A]
  misc_feature (1)..(99): NCBI GI: 261357636 Blast Desc: nucleosome binding protein [Verticillium albo-atrum VaMs.102]
  misc_feature (1)..(99): NCBI GI: 256735313 Blast Desc: HMG box-containing protein [Nectria haematococca mpVI 77-13-4]
  misc_feature (1)..(94): NCBI GI: 116206850 Blast Desc: conserved [Chaetomium globosum CBS 148.51] gi|88183315|gb|EAQ90783.1| conserved [Chaetomium globosum CBS 148.51]
  misc_feature (1)..(94): NCBI GI: 171680363 Blast Desc: protein product [Podospora anserina] gi|170939808|emb|CAP65034.1| protein product [Podospora anserina]
  misc_feature (1)..(99): NCBI GI: 154284354 Blast Desc: nucleosome binding protein [Ajellomyces capsulatus NAm1] gi|150406613|gb|EDN02154.1| nucleosome binding protein [Ajellomyces capsulatus NAm1] gi|240273630|gb|EER37150.1| binding
  misc_feature (18)..(99): NCBI GI: 46105649 Blast Desc: FG00385.1 [Gibberella zeae PH-1] gi|110287687|sp|Q4IQX3.1|NHP6_GIBZE RecName: Full=Non-histone chromosomal protein 6
  misc_feature (1)..(99): NCBI GI: 261194046 Blast Desc: nucleosome binding protein [Ajellomyces dermatitidis SLH14081] gi|239588442|gb|EEQ71085.1| nucleosome binding protein [Ajellomyces dermatitidis SLH14081]
  misc_feature (1)..(99): NCBI GI: 225681708 Blast Desc: nucleosome binding protein [Paracoccidioides brasiliensis Pb03]
  misc_feature (1)..(99): NCBI GI: 226284231 Blast Desc: nucleosome binding protein [Paracoccidioides brasiliensis Pb01]
MPKETSKRGKAGKVEKGKRSKKDPNAPKRGLSAYMFFANEQRENVRDENPGISFGQVGKILGERWKALNDKQRAPYEAKAAADKKRYEDEKQAYQAESD

SEQ ID NO: 16324 - DNA, 1014 bp, Muscodor strobelii
  misc_feature: SGI EST ID NO. CUFF.38688.0
  misc_feature: Variant of the nucleotide sequence at SEQ ID NO 16322
cgctcgtcttgcacgtctctcacacaatcacccgcccgccctgaaaagagcagtagcccaggcagccccccatacaaatttccctctcttctctgctctctcatacaaatctcccacccaaatcgtctcccatacaaacaccgcgcacacacaacctcaccacattactctacgccttactctgcgcctgcgcacatacaaatccatctcagtcaccatgcctaaggagactagcaagcgcggtaaggccggcaaggtcgagaagggcaagcgaagcaagaaggaccccaatgcccccaagcgcggtctctccgcatacatgttcttcgccaacgagcagcgtgagaatgtccgcgacgagaaccctggtatctccttcggccaggttggcaagatcctcggtgagcgctggaaggctctcaatgacaagcagcgtgccccctatgaggccaaggctgctgccgacaagaagcgatacgaggacgagaagcaagcctaccaggccgagtccgactaaagtcgttatgtgatgagcgttgtctttcgttgcgaccatcatgcctccattatcacatcattcagccgcagacactcgatgaagatactggccggaatggtacacaatttccttttaattcattcacgtatgggatcggacggacggtgttgagaagcacaggaatgggttatgatgcttctatttgcttatgaatcaccgagtcaaacgcgagagagctggtgatgctctggatcccgttgtccagcctgcccacttctcatctagcatgaagagggatagagccaaggtcctggcgacaacactttgtaacaatacatagtctcgcaacattgacgatacaaacactattaattctccgactcattcagccctctgtgcacaatatgtaaccagatttcgaatagaccgaccgtccagggctgggccagtcaaacctaggcagagttctgttgcatatcattgaaaatggtaacaaaccctctattttcgacatc

SEQ ID NO: 16325 - DNA, 681 bp, Muscodor strobelii
  misc_feature: SGI cDNA ID NO. 565426
  misc_feature: Encodes the peptide sequence at SEQ ID NO 16326
atggccgacggaaataccgaggcatccgcgcctcttcttctatccaacaccgagaggcgagtgctcgagttatacgacaacctcgaacagttgcaacgccagattgccctcttgaaggcccagaagaactatgtgcccagcacagcttcagagcgaaccactgaagttgcgcagaaggaacttgttgattcaagggcaagatacatgctgcgcaatgaggtagcgacgaatgtattatgcgcgaatcctatcatgcaagctgtccataacgggacgaaagcatctcctattgagagagatctcctccccttgctcactgctcgagacgcgacatcaacggcattagcaaaccggagcaaagaaaaccattctttactatcagagttgacagacatcgagagtcgatccttacgcatgaaccgggagaatgtcactcttgcagcacggttactagatctagcgaatgaagctcaaaggcggaagatcgaagtaactaccggagactcggaatatggagctgagatcgcagggctagaggcagaaatgaaggctagcagacagagatggcgcgtactcaaatccacggccagcgcaattgtggcgggcagtggtgttgactgggcaagggatgatgagctgagggatatagtgcttgatcctccggacgacgacgaggtgtga

SEQ ID NO: 16326 - protein, 226 aa, Muscodor strobelii
  misc_feature: SGI Peptide ID NO. 565426
  misc_feature (1)..(224): NCBI GI: 46105614 Blast Desc: FG00383.1 [Gibberella zeae PH-1]
  misc_feature (7)..(219): NCBI GI: 145603077 Blast Desc: MGG_04487 [Magnaporthe grisea 70-15] gi|145011404|gb|EDJ96060.1| MGG_04487 [Magnaporthe grisea 70-15]
  misc_feature (14)..(223): NCBI GI: 156062156 Blast Desc: SS1G_01193 [Sclerotinia sclerotiorum 1980] gi|154696530|gb|EDN96268.1| SS1G_01193 [Sclerotinia sclerotiorum 1980]
  misc_feature (1)..(202): NCBI GI: 256735314 Blast Desc: NECHADRAFT_75007 [Nectria haematococca mpVI 77-13-4]
  misc_feature (14)..(223): NCBI GI: 154318151 Blast Desc: BC1G_03243 [Botryotinia fuckeliana B05.10] gi|150842766|gb|EDN17959.1| BC1G_03243 [Botryotinia fuckeliana B05.10]
  misc_feature (1)..(222): NCBI GI: 171680361 Blast Desc: protein product [Podospora anserina] gi|170939807|emb|CAP65033.1| protein product [Podospora anserina]
  misc_feature (14)..(223): NCBI GI: 121705794 Blast Desc: conserved [Aspergillus clavatus NRRL 1] gi|119399306|gb|EAW09734.1| conserved [Aspergillus clavatus NRRL 1]
  misc_feature (14)..(223): NCBI GI: 119491566 Blast Desc: NFIA_065710 [Neosartorya fischeri NRRL 181] gi|119411464|gb|EAW21407.1| conserved [Neosartorya fischeri NRRL 181]
  misc_feature (12)..(222): NCBI GI: 255936603 Blast Desc: Pc13g09030 [Penicillium chrysogenum Wisconsin 54-1255] gi|211583948|emb|CAP91972.1| Pc13g09030 [Penicillium chrysogenum Wisconsin 54-1255]
  misc_feature (14)..(223): NCBI GI: 70999480 Blast Desc: conserved [Aspergillus fumigatus Af293] gi|66852096|gb|EAL92421.1| conserved [Aspergillus fumigatus Af293]
MADGNTEASAPLLLSNTERRVLELYDNLEQLQRQIALLKAQKNYVPSTASERTTEVAQKELVDSRARYMLRNEVATNVLCANPIMQAVHNGTKASPIERDLLPLLTARDATSTALANRSKENHSLLSELTDIESRSLRMNRENVTLAARLLDLANEAQRRKIEVTTGDSEYGAEIAGLEAEMKASRQRWRVLKSTASAIVAGSGVDWARDDELRDIVLDPPDDDEV

SEQ ID NO: 16327 - DNA, 1945 bp, Muscodor strobelii
  misc_feature: SGI EST ID NO. CUFF.38609.0
  misc_feature: Variant of the nucleotide sequence at SEQ ID NO 16325
attgaaacctggtcaaaagtactagagcaaatccttgggacacgtacaagtattgagacaaatcggcgtcgtgcaattcttctttaagtctctcaaatatattggccttactgaaagcatggccgacggaaataccgaggcatccgcgcctcttcttctatccaacaccgagaggcgagtgctcgagttatacgacaacctcgaacagttgcaacgccagattgccctcttgaaggcccagaagaactatgtgcccagcacagcttcagagcgaaccactgaagttgcgcagaaggaacttgttgattcaagggcaagatacatgctgcgcaatgaggtagcgacgaatgtattatgcgcgaatcctatcatgcaagctgtccataacgggacgaaagcatctcctattgagagagatctcctccccttgctcactgctcgagacgcgacatcaacggcattagcaaaccggagcaaagaaaaccattctttactatcagagttgacagacatcgagagtcgatccttacgcatgaaccgggagaatgtcactcttgcagcacggttactagatctagcgaatgaagctcaaaggcggaagatcgaagtaactaccggagactcggaatatggagctgagatcgcagggctagaggcagaaatgaaggctagcagacagagatggcgcgtactcaaatccacggccagcgcaattgtggcgggcagtggtgttgactgggcaagggatgatgagctgagggatatagtgcttgatcctccggacgacgacgaggtgtgagtcgagccgggacgaggcaaggtcgcactatgcgtctctgttaatatgcaaagcctttatttaggcctgtcgttacatgtagatttgtcgccgagactgcttgtgatattgtctattgatgtgtgaaagtctcccgccatgatgaggagcggggatgtatctgtgtaacgccccatgcatcttagaacgctataattgcacagcatacaaatgacttattcatgggagagtagcttttgcaatcagtcttcttcttggtcgttgttgtcgtctaagtattgcaagagaaggtcgtcattttaaaatgaaatagtcattctccaggaataagatgttcctattaccaacaccggcaatggttcatgttgctgcgagaaatcaaatattggcagggcttagcgcaacctgtgaacggacctgctgccgagcagaacatgccacgtgaatcacgctagatcggcagtcaatcctaagatttcgtctacagttcaaacaagcattttatgtatattagagaaagacatggtctggtgaagcaagattgaatacctatttatagaagcgaggtctatcgtcgttcatggttgcaagtcaagctgtgaggcaataggtggttgcttgtcgaattaggttggggggtaatagtgcttttcggcaggtagagtatctgagtgcaggtgcccggtcgtcctacacgtgatgaaaacaaatagcgcgtcgtatgtaatcacttttattgctcttgtcaatgatcaggcttcgcatctctccactcgtgttttcggcacaggtggaggcgtaaagtcccgcaagctccaaataggcgtcctgcgtatgtgattttggcttcgccggatccaaatctggtgtggttcactatgctgtggtgtcgtcgatggtggggtcgaaatccaagtgtacagtgttgcacgttcggtgcatggtcttctccaaagtctctgctggtgtagccagtgcgatatagtgcgcattacaactagcctgcctttgcaaccaggacttatgacagcccttgtctggcttcgggcttgaccactcgcacgatcacatttggtgaaagtgggcgacgccagcttcaagaagcccagcatcagacttgaacttggagcaatagcatgatccagc

SEQ ID NO: 16328 - DNA, 4299 bp, Muscodor strobelii
  misc_feature: SGI cDNA ID NO. 565427
  misc_feature: Encodes the peptide sequence at SEQ ID NO 16329
atggcctcgcagacgcaggtgttgattgcccacacgggtcagcgcctgcaagttgaaagttctcagttcacaacactcgacagcttcaaggcctgggtcgcccgagagagcgccatcccgtcgcagaatgttgtcgcactcacctcccaaggcaagacagtcaaaatccagactctacaatcagagaaagagatttatgtctatgatatacggataacacaggcttcgtcgcccggtacaccgacctccctcgtctccgaatcctccgtaccagcgccatatcaacccacagctgctccaaattccatcgacgatacacactctcttcgatcatggcaggacctcttcaagaagcgccgcgactgggctttgaagatagtggaggactgtgccggcatggtcacagaggccgagactcgatatgccgagatggatgtgatgctgaggtgtctggatgctgctgttgcgaatctcgagactgccctcaagccgatcgaaccgaaatacgccgacttgaagaggtgggcaactagcacgcaagaagaatacaccaatctagccgccagctgggagagctatctggagttggcgcgcagtgtcaatatttcgcctgtcatggtgagattcatgacggggcaagacattcggaagcctcgccaggctactttggaggacctgatcgatccagagcccacacgtaaagcgggaaagctggcaacaacgtccctccgcaaattcagcgtcaggatcgcggatcttgataaggccgctgacaagatgttccgcggaggggaagagctgttccaggacttcgataagctcgtaggacgctcggctatgcaacacgctgcagactgcaaggagctgctgagcgatattgaagccgtcgcggaaagaatcgacagagattatcaagctacccttcagtataccaatcagacgaaagatgtgccacaggtctccaagacggcggccaatcacacgaagcagcttttgcctagtatgcgagatcgagcgacggaaatgagtggcatgcttcaatatgctacacaggctagaaacgaagtagctgccgattcgctcatttttatgcgcaacattgcagagatcaccagtcttcatcacaatgtcaagacccagatgaacctcatcagcaaaggggaagaggacatggctacgtttgactacctacgcctcatccagaacctcccgttcatgtatgcttccttcactgcagaggctatcaggcgtcgcgactgggctgagaaactcaaaaccgactcctcgacccttgttaatgaagtggctctttttcaagatgaggaattgaagaggaggcgcaaatggcagaagatggttggcagtacatacggtccagataaagacgaaaaaaacgtgctcgggcttgaggtgaacctgctaggtgaagatgagccctggcctgcaatgacgaaacaggatctggaggattttatggttctatttcggcaacaaaatggtgatccggtaattatcgcagacgttgccaagctgattgcagacctcaatagccccacgaaacagcagtccaaacgtctcaaagctttcaagaatgggagcgtgcacgaggcgaacctgggccgcagtggtctcttgatccgcggtgatgacgagttattgcggaagttacaagaagaaaagtcgagattagagaacaaattgagaaccgcagaaagtcgcgttcgtcggttggaggatatcttccatcgccagacgcaagcatctaggccttcgatatttcctcagcagaatgatcagaacgactcttcgaattcgatccgatcccctcgtctcgaggatcggcgccgctcatccgtgtcagaaaatagcgacattctcatccagcgcataacaaggctagaagcagacctaaaggcggaaaaagaacgagcttccgcgttacagaaggtggcggatgcacatgtcgagtatatgaatgaggcgaattcgactaaacaggacctgatgggcaatatggaagctctcaagagagaattcatggacgaacgtaagtcccttgaagatgaaattaaacatttgaaaacaagactggaagaaaccgaagatgcaatggaacattttggggattcaagagagaacgagaaattttcatacgacgaaaaaatgcgatcgatgcagaatgaaatcgatcgtcttacccgggataaacaagatgatgtcttgaaagtacaaggacaagtagatttcctgaggaatgaagctcgggtgcagcgggagcgcaatgtatcgcttgagagagagctacgtgaagcacgagacgcgatcaagagcttgacaaaagagtcagaagcattcgacgaaagtaacgagacacatgctcggtcgcttagagagctacatagccagctgtctccgactgaggccgcaccgcaagacttcacagatcttttggatgcagttgcgacaaaatcgaccgacatactttccaagttccagtcgcttgaacaagacttgtcgctcatgaaagcggacctggaaatggctcgaggcacagtcagagatgtcagatccgagctctcgagcgcgaaagagaagctatctaatgaagagatggccaatgtccaccttcgcgagacgttagatcgcgaaaaggccagatgttcaactttagaagcagaggtgactgacggacgtgagcaattaaaccgactacgagtcgagatgaccgaaggcgagaccgggtctgaggctttgaggaacaagctcgaaggcgaagaaaaaagagttgcagaattgactgagcaactcgcctccaaacaatcccaagtgggtagccttgaagaggaggtccgcatgttccaggagaaactacagtcaaccgaatcgcgtctggatgggttgaatggcagattcgaagatcgcaacagccgtaccaaagatctgactcaacgtctctacacccacaacgaaaggctctgcaggcttcttgagcgactcagcttctccgttacgcggcaagatggctccatggtcatccagaagattcctcggtcagaacgaccttcccaaaatccaaatgattcatcagaccctggtacatcaattcgacgctctgtctcaaatggaagtaatttacttgccgatagtacagatttgaaactactttactggatgaatgcagaggactcgagtgcagaggatgagcaatatcaagccttcgttgcgggcccgggaaattttgatatcgacgcatttgctgaggcaatctatcgtcgtgtgaaagagattgagcatacggcacgcaaaatgacaagagatgctcgtggctatcgtgagcgtgcacatacggcggccaaggaagctcatgaaaagattgcatttaagcacttcaaagaaggagatctggctctgtttcttcccactaggaatcaaacgaccggggcctgggctgcgttcaatgttggatgtccgcatttctttctccgagaacaagaaaatcatcgcctacgcagtcgagagtggctcgtcgcgcggattactcgcatacaggaacgtgttgtcgatttgtctaaaagcctacagtccacgaatgctcccccttcggaaggtgaatcggactcagtcaacacaggtgacgataacgacaaccccttcgacctgtccgatggacttcgttggtggctcatcgatgctcacgaggacaagccgggcgcgccctcgacacctgggctcggtaaatcgactgttgcgtccaataaggtggaagctgtcgcggatatgcatgcgcatggacgatctggaaagcacaaatccaaactcggctcaagcatagagggtgtcagtcgtacgcttagcaagaacctcgagagcaggcgaagtagcacaggctctaggaaagccttgccttttgcacctggaaccgtcgcagcaaaggggagcgcgctggccagcgagactaatagtctgcgagctgcacctgctgagagtccagttgttggtgccagtccgactatgggacagggcgtagccgggcccagcaatgcccaagatgatcagcaagcaacaaacgagcccgacaagggcaccggggcggcggccacggccgaaaatcctgatgagggccgccctcgtccagccgacggtacgcattcgcatcagaagcaaggtccacagggtcagcctcgagcacaacgacagcccgcaccacaactccagcgagacgtgagcgacacgcccagcaataagagtatcatctggaactccctgtggaacgtcgacgttagctatcacgggaggtga

SEQ ID NO: 16329 - protein, 1432 aa, Muscodor strobelii
  misc_feature: SGI Peptide ID NO. 565427
  misc_feature (6)..(1429): NCBI GI: 46105599 Blast Desc: FG00382.1 [Gibberella zeae PH-1]
  misc_feature (5)..(1371): NCBI GI: 171680359 Blast Desc: protein product [Podospora anserina] gi|170939806|emb|CAP65032.1| protein product [Podospora anserina]
  misc_feature (62)..(1353): NCBI GI: 145603079 Blast Desc: MGG_04486 [Magnaporthe grisea 70-15] gi|148887338|sp|Q51UJ9.2|ATG11_MAGGR RecName: Full=Autophagy-related protein 11 gi|145011405|gb|EDJ96061.1|
  misc_feature (140)..(1370): NCBI GI: 85089337 Blast Desc: NCU09998 [Neurospora crassa OR74A] gi|73622228|sp|Q7S055.1|ATG11_NEUCR RecName: Full=Autophagy-related protein 11 gi|28919194|gb|EAA28680.1|
  misc_feature (4)..(1363): NCBI GI: 156062154 Blast Desc: SS1G_01192 [Sclerotinia sclerotiorum 1980] gi|154696529|gb|EDN96267.1| SS1G_01192 [Sclerotinia sclerotiorum 1980]
  misc_feature (4)..(1428): NCBI GI: 154318149 Blast Desc: BC1G_03242 [Botryotinia fuckeliana B05.10] gi|150842765|gb|EDN17958.1| BC1G_03242 [Botryotinia fuckeliana B05.10]
  misc_feature (5)..(956): NCBI GI: 261357638 Blast Desc: conserved [Verticillium albo-atrum VaMs.102]
  misc_feature (87)..(1020): NCBI GI: 116206854 Blast Desc: CHGG_02720 [Chaetomium globosum CBS 148.51] gi|88183317|gb|EAQ90785.1| CHGG_02720 [Chaetomium globosum CBS 148.51]
  misc_feature (6)..(1314): NCBI GI: 261194040 Blast Desc: Atg11p [Ajellomyces dermatitidis SLH14081] gi|239588439|gb|EEQ71082.1| Atg11p [Ajellomyces dermatitidis SLH14081]
  misc_feature (6)..(1303): NCBI GI: 239606995 Blast Desc: Atg11p [Ajellomyces dermatitidis ER-3]
MASQTQVLIAHTGQRLQVESSQFTTLDSFKAWVARESAIPSQNVVALTSQGKTVKIQTLQSEKEIYVYDIRITQASSPGTPTSLVSESSVPAPYQPTAAPNSIDDTHSLRSWQDLFKKRRDWALKIVEDCAGMVTEAETRYAEMDVMLRCLDAAVANLETALKPIEPKYADLKRWATSTQEEYTNLAASWESYLELARSVNISPVMVRFMTGQDIRKPRQATLEDLIDPEPTRKAGKLATTSLRKFSVRIADLDKAADKMFRGGEELFQDFDKLVGRSAMQHAADCKELLSDIEAVAERIDRDYQATLQYTNQTKDVPQVSKTAANHTKQLLPSMRDRATEMSGMLQYATQARNEVAADSLIFMRNIAEITSLHHNVKTQMNLISKGEEDMATFDYLRLIQNLPFMYASFTAEAIRRRDWAEKLKTDSSTLVNEVALFQDEELKRRRKWQKMVGSTYGPDKDEKNVLGLEVNLLGEDEPWPAMTKQDLEDFMVLFRQQNGDPVIIADVAKLIADLNSPTKQQSKRLKAFKNGSVHEANLGRSGLLIRGDDELLRKLQEEKSRLENKLRTAESRVRRLEDIFHRQTQASRPSIFPQQNDQNDSSNSIRSPRLEDRRRSSVSENSDILIQRITRLEADLKAEKERASALQKVADAHVEYMNEANSTKQDLMGNMEALKREFMDERKSLEDEIKHLKTRLEETEDAMEHFGDSRENEKFSYDEKMRSMQNEIDRLTRDKQDDVLKVQGQVDFLRNEARVQRERNVSLERELREARDAIKSLTKESEAFDESNETHARSLRELHSQLSPTEAAPQDFTDLLDAVATKSTDILSKFQSLEQDLSLMKADLEMARGTVRDVRSELSSAKEKLSNEEMANVHLRETLDREKARCSTLEAEVTDGREQLNRLRVEMTEGETGSEALRNKLEGEEKRVAELTEQLASKQSQVGSLEEEVRMFQEKLQSTESRLDGLNGRFEDRNSRTKDLTQRLYTHNERLCRLLERLSFSVTRQDGSMVIQKIPRSERPSQNPNDSSDPGTSIRRSVSNGSNLLADSTDLKLLYWMNAEDSSAEDEQYQAFVAGPGNFDIDAFAEAIYRRVKEIEHTARKMTRDARGYRERAHTAAKEAHEKIAFKHFKEGDLALFLPTRNQTTGAWAAFNVGCPHFFLREQENHRLRSREWLVARITRIQERVVDLSKSLQSTNAPPSEGESDSVNTGDDNDNPFDLSDGLRWWLIDAHEDKPGAPSTPGLGKSTVASNKVEAVADMHAHGRSGKHKSKLGSSIEGVSRTLSKNLESRRSSTGSRKALPFAPGTVAAKGSALASETNSLRAAPAESPVVGASPTMGQGVAGPSNAQDDQQATNEPDKGTGAAATAENPDEGRPRPADGTHSHQKQGPQGQPRAQRQPAPQLQRDVSDTPSNKSIIWNSLWNVDVSYHGR

SEQ ID NO: 16330 - DNA, 5579 bp, Muscodor strobelii
  misc_feature: SGI EST ID NO. CUFF.38568.0
  misc_feature: Variant of the nucleotide sequence at SEQ ID NO 16328
gaacggcaggtcttgcgtatcaaggttgtctttgtccactgctagctttgaaccttgcttgatactagtagaatcagatgtctgtctaattcggtgttcaatgtcagcaacaattgtctcaaagcaaaagacgtggcagatatcttaacgttgagacgaagtatttcctagttgcggtagttgcactcttacttagccctccctaaaccctgtgcatcacgcgggacaccatcgccatcacgttgaccgtttctttgtctgaatatgagcacaatacccacgcagtgcatcgattgttgtcaactaaaacaggtgaagtacctgtactttgtatactttataccatccatctgcgtcttattcatcctgctagctctatcgctgtgacagccattgttggcaaattgtagataagtcgaacctggtcaatggtcttcatctcaaggctgcatctccagcactattgtgggtcggcccgaacgcttggcatcaggacgcccagggtgcttgatcctctgactgtcgacggcctgtctgcctgtctgacctctccagctgatcgggggacgaatcgcatgctgcccagagctcccggaacggcagcagtcatcggagtcgggctctctgtttctgttgaccgaccatacctgcctgcaacgctgctgcgctgatcccacaaacacccaagctccgtctctgtctccccgtcctcgctcggctgtgcaacgaatgctttcgcaagcaagcctccctcgtgcttctacgtctctgttgccgagcaacgctggtctcgcatcttggtggatggggcatggacggcatgcatcatggcctcgcagacgcaggtgttgattgcccacacgggtcagcgcctgcaagttgaaagttctcagttcacaacactcgacagcttcaaggcctgggtcgcccgagagagcgccatcccgtcgcagaatgttgtcgcactcacctcccaaggcaagacagtcaaaatccagactctacaatcagagaaagagatttatgtctatgatatacggataacacaggcttcgtcgcccggtacaccgacctccctcgtctccgaatcctccgtaccagcgccatatcaacccacagctgctccaaattccatcgacgatacacactctcttcgatcatggcaggacctcttcaagaagcgccgcgactgggctttgaagatagtggaggactgtgccggcatggtcacagaggccgagactcgatatgccgagatggatgtgatgctgaggtgtctggatgctgctgttgcgaatctcgagactgccctcaagccgatcgaaccgaaatacgccgacttgaagaggtgggcaactagcacgcaagaagaatacaccaatctagccgccagctgggagagctatctggagttggcgcgcagtgtcaatatttcgcctgtcatggtgagattcatgacggggcaagacattcggaagcctcgccaggctactttggaggacctgatcgatccagagcccacacgtaaagcgggaaagctggcaacaacgtccctccgcaaattcagcgtcaggatcgcggatcttgataaggccgctgacaagatgttccgcggaggggaagagctgttccaggacttcgataagctcgtaggacgctcggctatgcaacacgctgcagactgcaaggagctgctgagcgatattgaagccgtcgcggaaagaatcgacagagattatcaagctacccttcagtataccaatcagacgaaagatgtgccacaggtctccaagacggcggccaatcacacgaagcagcttttgcctagtatgcgagatcgagcgacggaaatgagtggcatgcttcaatatgctacacaggctagaaacgaagtagctgccgattcgctcatttttatgcgcaacattgcagagatcaccagtcttcatcacaatgtcaagacccagatgaacctcatcagcaaaggggaagaggacatggctacgtttgactacctacgcctcatccagaacctcccgttcatgtatgcttccttcactgcagaggctatcaggcgtcgcgactgggctgagaaactcaaaaccgactcctcgacccttgttaatgaagtggctctttttcaagatgaggaattgaagaggaggcgcaaatggcagaagatggttggcagtacatacggtccagataaagacgaaaaaaacgtgctcgggcttgaggtgaacctgctaggtgaagatgagccctggcctgcaatgacgaaacaggatctggaggattttatggttctatttcggcaacaaaatggtgatccggtaattatcgcagacgttgccaagctgattgcagacctcaatagccccacgaaacagcagtccaaacgtctcaaagctttcaagaatgggagcgtgcacgaggcgaacctgggccgcagtggtctcttgatccgcggtgatgacgagttattgcggaagttacaagaagaaaagtcgagattagagaacaaattgagaaccgcagaaagtcgcgttcgtcggttggaggatatcttccatcgccagacgcaagcatctaggccttcgatatttcctcagcagaatgatcagaacgactcttcgaattcgatccgatcccctcgtctcgaggatcggcgccgctcatccgtgtcagaaaatagcgacattctcatccagcgcataacaaggctagaagcagacctaaaggcggaaaaagaacgagcttccgcgttacagaaggtggcggatgcacatgtcgagtatatgaatgaggcgaattcgactaaacaggacctgatgggcaatatggaagctctcaagagagaattcatggacgaacgtaagtcccttgaagatgaaattaaacatttgaaaacaagactggaagaaaccgaagatgcaatggaacattttggggattcaagagagaacgagaaattttcatacgacgaaaaaatgcgatcgatgcagaatgaaatcgatcgtcttacccgggataaacaagatgatgtcttgaaagtacaaggacaagtagatttcctgaggaatgaagctcgggtgcagcgggagcgcaatgtatcgcttgagagagagctacgtgaagcacgagacgcgatcaagagcttgacaaaagagtcagaagcattcgacgaaagtaacgagacacatgctcggtcgcttagagagctacatagccagctgtctccgactgaggccgcaccgcaagacttcacagatcttttggatgcagttgcgacaaaatcgaccgacatactttccaagttccagtcgcttgaacaagacttgtcgctcatgaaagcggacctggaaatggctcgaggcacagtcagagatgtcagatccgagctctcgagcgcgaaagagaagctatctaatgaagagatggccaatgtccaccttcgcgagacgttagatcgcgaaaaggccagatgttcaactttagaagcagaggtgactgacggacgtgagcaattaaaccgactacgagtcgagatgaccgaaggcgagaccgggtctgaggctttgaggaacaagctcgaaggcgaagaaaaaagagttgcagaattgactgagcaactcgcctccaaacaatcccaagtgggtagccttgaagaggaggtccgcatgttccaggagaaactacagtcaaccgaatcgcgtctggatgggttgaatggcagattcgaagatcgcaacagccgtaccaaagatctgactcaacgtctctacacccacaacgaaaggctctgcaggcttcttgagcgactcagcttctccgttacgcggcaagatggctccatggtcatccagaagattcctcggtcagaacgaccttcccaaaatccaaatgattcatcagaccctggtacatcaattcgacgctctgtctcaaatggaagtaatttacttgccgatagtacagatttgaaactactttactggatgaatgcagaggactcgagtgcagaggatgagcaatatcaagccttcgttgcgggcccgggaaattttgatatcgacgcatttgctgaggcaatctatcgtcgtgtgaaagagattgagcatacggcacgcaaaatgacaagagatgctcgtggctatcgtgagcgtgcacatacggcggccaaggaagctcatgaaaagattgcatttaagcacttcaaagaaggagatctggctctgtttcttcccactaggaatcaaacgaccggggcctgggctgcgttcaatgttggatgtccgcatttctttctccgagaacaagaaaatcatcgcctacgcagtcgagagtggctcgtcgcgcggattactcgcatacaggaacgtgttgtcgatttgtctaaaagcctacagtccacgaatgctcccccttcggaaggtgaatcggactcagtcaacacaggtgacgataacgacaaccccttcgacctgtccgatggacttcgttggtggctcatcgatgctcacgaggacaagccgggcgcgccctcgacacctgggctcggtaaatcgactgttgcgtccaataaggtggaagctgtcgcggatatgcatgcgcatggacgatctggaaagcacaaatccaaactcggctcaagcatagagggtgtcagtcgtacgcttagcaagaacctcgagagcaggcgaagtagcacaggctctaggaaagccttgccttttgcacctggaaccgtcgcagcaaaggggagcgcgctggccagcgagactaatagtctgcgagctgcacctgctgagagtccagttgttggtgccagtccgactatgggacagggcgtagccgggcccagcaatgcccaagatgatcagcaagcaacaaacgagcccgacaagggcaccggggcggcggccacggccgaaaatcctgatgaggtgcggaatatcaccgactccctcctcggcccttgagagtaaaacgggtcagactgataggatttagggccgccctcgtccagccgacggtacgcattcgcatcagaagcaaggtccacagggtcagcctcgagcacaacgacagcccgcaccacaactccagcgagacgtgagcgacacgcccagcaataagagtatcatctggaactccctgtggaacgtcgacgttagctatcacgggaggtgagagctttggcgggaaagcattttactcttagacggttgaaacgaaactgtcgtcttgtacctatccacttcttgacgttttacctaaggtacctacttgacttacttacataccccagcccatagccaatcgacatatttattccaaccaagacttaatgtaagcacggtgttttcgggagaattttggcgtgcactacacatagagttgatttaagggttttgactacgggttcgtgatgcttcgctgttttggtagcttttgcttttgaggtaaagggagaaagtgaagttgggtcaggcgtatggattgtatcttagactgcgtggtgagtaggggtagtaatagtacatatcacaagtcggaacgcataccggatccttatg

SEQ ID NO: 16331 - DNA, 309 bp, Muscodor strobelii
  misc_feature: SGI cDNA ID NO. 565428
  misc_feature: Reduced expression when VOC is produced
  misc_feature: Encodes the peptide sequence at SEQ ID NO 16332
accgtacccgagcccgccgaggagaacaaaccagaacccatcatccccatcttcggctctgtctccaaatccgacatcctatcccgcatcaagggagctcctggcagtagacgagcaaggcggtcgcgccgccttggaagagcactcccatatcccatctccggccttgacccggcgcacgacgccctcgaccgcatcaagcgcctcggtcgcttcgagatcctcatctacccgggcgtcggcaccaacaaactgcctctaaagcctgtcaagcgggtcgttgaaattgtcgcacctgctaagctctag

SEQ ID NO: 16332 - protein, 102 aa, Muscodor strobelii
  misc_feature: SGI Peptide ID NO. 565428
  misc_feature: Useful for introducing or modulating the production of volatile compounds
TVPEPAEENKPEPIIPIFGSVSKSDILSRIKGAPGSRRARRSRRLGRALPYPISGLDPAHDALDRIKRLGRFEILIYPGVGTNKLPLKPVKRVVEIVAPAKL

SEQ ID NO: 16333 - DNA, 573 bp, Muscodor strobelii
  misc_feature: SGI EST ID NO. CUFF.38526.0
  misc_feature: Variant of the nucleotide sequence at SEQ ID NO 16331
ctccggccttgacccggcgcacgacgccctcgaccgcatcaagcgcctcggtcgcttcgagatcctcatctacccgggcgtcggcaccaacaaactgcctctaaagcctgtcaagcgggtcgttgaaattgtcgcacctgctaagctctagactgcgccaaacgcagtatccattaaggtagactaagatctatgacctgtgtatgtcttacagccactcgactgtcaccagcgtctggccgttcgaccttggtacacggcccctacggccgcctacacctcagggcatcgtttctggcacacgcggaatgtgtcgagctcatagtaatctcaaagagcgagactgtccttcgctgagtagagcttgtaaaactgcccccgaagcgtacctgtactgtatttaagacgagatgagtcttgtaccatattataccttgtatcatcctgtaaataaatagccagagattttcatacaaaagaggcgtcccaatgcaccaattggcgattgcttgatgacttgagttatctatgaaattgcggaagtagttgacggctccatatgttcaaagactg

SEQ ID NO: 16334 - DNA, 777 bp, Muscodor strobelii
  misc_feature: SGI cDNA ID NO. 565429
  misc_feature: Encodes the peptide sequence at SEQ ID NO 16335
atgagcaagtcgccagaagtcacagaccagttttcttggctacaaggagcggcaacgggtgcagcaccgatggatgataaactccaaaagtctactaaccgaaaattgggcaaaggcaaagagcagatattgggtcaaacgtggggcctgagtgaaacgacgggagccgtgacaacagttcccaagggcgagaacgatgatactggttccattggttccatcctgccgagcgtcgagctccgcatcgtcgatgaggactttcaagatgtcgaaccaggtcaagaaggagagtttgttctgcgatctcctgtagtaactaacggttattacaacaaccctgaggcgactaaagatgcgttccgcgatgactggttttgtacaggcgacattggtgttatgagaaacgggaaattatatgtggtcgatcgaaagaaggaactcctgaaatacaaaggtcttcaagtcgcaccgacggaaatagaggctcttctaatcacgcatcctctgatcaaggaagccgccgtagtgggaatccccgatccctccgctggtgacttacctagagcgtatatagttcccgaggatgggaaaacaagaattacaaaggaagaagtggcgcatttcgtggaagacaagctcgccgcgcataaaagactacggggaggtatagcgttcgttaatgagctgcccaagaatgccgtggggaagatcctcagacggacactgcgagatcttgccaaagaggagttgtcggggcggtgccaagcgaagttgtag

SEQ ID NO: 16335 - protein, 258 aa, Muscodor strobelii
  misc_feature: SGI Peptide ID NO. 565429
  misc_feature (19)..(175): Pfam Id: PF00501 Pfam Desc: AMP-binding enzyme
  misc_feature (1)..(250): NCBI GI: 226294509 Blast Desc: 4-coumarate-CoA ligase [Paracoccidioides brasiliensis Pb18]
  misc_feature (1)..(250): NCBI GI: 225685183 Blast Desc: 4-coumarate-CoA ligase [Paracoccidioides brasiliensis Pb03]
  misc_feature (1)..(250): NCBI GI: 261193831 Blast Desc: 4-coumarate-CoA ligase 2a [Ajellomyces dermatitidis SLH14081] gi|239588926|gb|EEQ71569.1| 4-coumarate-CoA ligase 2a [Ajellomyces dermatitidis SLH14081] gi|239613755|gb|EEQ90742.1|
  misc_feature (1)..(250): NCBI GI: 226279376 Blast Desc: 4-coumarate-CoA ligase [Paracoccidioides brasiliensis Pb01]
  misc_feature (1)..(250): NCBI GI: 240273939 Blast Desc: 4-coumarate-CoA ligase [Ajellomyces capsulatus H143]
  misc_feature (1)..(250): NCBI GI: 154286842 Blast Desc: conserved [Ajellomyces capsulatus NAm1] gi|150407857|gb|EDN03398.1| conserved [Ajellomyces capsulatus NAm1]
  misc_feature (1)..(250): NCBI GI: 225555318 Blast Desc: 4-coumarate-CoA ligase [Ajellomyces capsulatus G186AR]
  misc_feature (1)..(249): NCBI GI: 115399346 Blast Desc: ATEG_06084 [Aspergillus terreus NIH2624] gi|114192145|gb|EAU33845.1| ATEG_06084 [Aspergillus terreus NIH2624]
  misc_feature (1)..(247): NCBI GI: 85094239 Blast Desc: NCU05851 [Neurospora crassa OR74A] gi|28921298|gb|EAA30606.1| conserved [Neurospora crassa OR74A]
  misc_feature (1)..(252): NCBI GI: 67904188 Blast Desc: AN9081.2 [Aspergillus nidulans FGSC A4] gi|40742724|gb|EAA61914.1| AN9081.2 [Aspergillus nidulans FGSC A4] gi|259485508|tpe|CBF82589.1| TPA: conserved [Aspergillus FGSC
  misc_feature (11)..(251): SWISSPROT Homolog: EC 1.13.12.7 Photinus-luciferin 4-monooxygenase (ATP-hydrolyzing)
MSKSPEVTDQFSWLQGAATGAAPMDDKLQKSTNRKLGKGKEQILGQTWGLSETTGAVTTVPKGENDDTGSIGSILPSVELRIVDEDFQDVEPGQEGEFVLRSPVVTNGYYNNPEATKDAFRDDWFCTGDIGVMRNGKLYVVDRKKELLKYKGLQVAPTEIEALLITHPLIKEAAVVGIPDPSAGDLPRAYIVPEDGKTRITKEEVAHFVEDKLAAHKRLRGGIAFVNELPKNAVGKILRRTLRDLAKEELSGRCQAKL

SEQ ID NO: 16336 - DNA, 870 bp, Muscodor strobelii
  misc_feature: SGI cDNA ID NO. 565430
  misc_feature: Encodes the peptide sequence at SEQ ID NO 16337
atgtcgcgaatctacactcacccaacgcaagccaaagtcgatctaccatccgtggatttattaaccttactattcgactctgagctctcttttgcccaagatgatacagtgcttcatgcagaggctgcgaatccaaataacaagattacgaagagccaactgagagagctcactgaacggattgcgcatggcttgaggacgcattatggaattggaagtgttccaaacagagacgttgtgaccgtgattagctatgggcagattcttgtgcctgccgccttttacggagtaattgccgccggtggtgtttattctgctgctagtccttcttctacagtgtccgagttcgtaagacagatcaaagttggaaaatcacgactagtcatatgcggtaacgagcatatcgatgttgcgaagaaagcagcagcagagtgcaatctgccgctaagcaatgtgctggtgctggactctgaggcttccaaatggagcttgaagagcttagacggctgcatcgacgcattgtcaacgaagcgcttagcttggcggaagataacggatcctaaagctcttaaggacagtctggtagtcattttatggtcttctggtaccactggattgcctaaaggcgtgatgctttcccatcagaatctcgtggcagaaacattcatcgtctctatgagtggacggaagtgggcagagcaggaacttgagaaggggaccttcgagcctgttgagtacaaaaccctcgctcatttaccaataagccatattgcaggactttggggttatcttattgggccgacatacgcggcaggaacagtggcacgtaaacatctctcaagatcgaaccacgaatcagagttatgctaa

SEQ ID NO: 16337 - protein, 289 aa, Muscodor strobelii
  misc_feature: SGI Peptide ID NO. 565430
  misc_feature (50)..(219): Pfam Id: PF00501 Pfam Desc: AMP-binding enzyme
  misc_feature (2)..(274): NCBI GI: 226294509 Blast Desc: 4-coumarate-CoA ligase [Paracoccidioides brasiliensis Pb18]
  misc_feature (2)..(274): NCBI GI: 226279376 Blast Desc: 4-coumarate-CoA ligase [Paracoccidioides brasiliensis Pb01]
  misc_feature (3)..(274): NCBI GI: 261193831 Blast Desc: 4-coumarate-CoA ligase 2a [Ajellomyces dermatitidis SLH14081] gi|239588926|gb|EEQ71569.1| 4-coumarate-CoA ligase 2a [Ajellomyces dermatitidis SLH14081] gi|239613755|gb|EEQ90742.1|
  misc_feature (1)..(274): NCBI GI: 240273939 Blast Desc: 4-coumarate-CoA ligase [Ajellomyces capsulatus H143]
  misc_feature (2)..(274): NCBI GI: 225685183 Blast Desc: 4-coumarate-CoA ligase [Paracoccidioides brasiliensis Pb03]
  misc_feature (1)..(274): NCBI GI: 154286842 Blast Desc: conserved [Ajellomyces capsulatus NAm1] gi|150407857|gb|EDN03398.1| conserved [Ajellomyces capsulatus NAm1]
  misc_feature (23)..(274): NCBI GI: 225555318 Blast Desc: 4-coumarate-CoA ligase [Ajellomyces capsulatus G186AR]
  misc_feature (14)..(274): NCBI GI: 115399346 Blast Desc: ATEG_06084 [Aspergillus terreus NIH2624] gi|114192145|gb|EAU33845.1| ATEG_06084 [Aspergillus terreus NIH2624]
  misc_feature (14)..(274): NCBI GI: 238483667 Blast Desc: AMP dependent ligase/synthetase, [Aspergillus flavus NRRL3357] gi|220701122|gb|EED57460.1| AMP dependent ligase/synthetase, [Aspergillus flavus NRRL3357]
  misc_feature (14)..(274): NCBI GI: 169766884 Blast Desc: [Aspergillus oryzae RIB40] gi|83765768|dbj|BAE55911.1| protein product [Aspergillus oryzae]
  misc_feature (49)..(218): SWISSPROT Homolog: EC 6.2.1.12 4-coumarate--CoA ligase
MSRIYTHPTQAKVDLPSVDLLTLLFDSELSFAQDDTVLHAEAANPNNKITKSQLRELTERIAHGLRTHYGIGSVPNRDVVTVISYGQILVPAAFYGVIAAGGVYSAASPSSTVSEFVRQIKVGKSRLVICGNEHIDVAKKAAAECNLPLSNVLVLDSEASKWSLKSLDGCIDALSTKRLAWRKITDPKALKDSLVVILWSSGTTGLPKGVMLSHQNLVAETFIVSMSGRKWAEQELEKGTFEPVEYKTLAHLPISHIAGLWGYLIGPTYAAGTVARKHLSRSNHESELC

SEQ ID NO: 16338 - DNA, 828 bp, Muscodor strobelii
  misc_feature: SGI cDNA ID NO. 565431
  misc_feature: Reduced expression when VOC is produced
  misc_feature: Encodes the peptide sequence at SEQ ID NO 16339
atgacgtggcaatacaagactgtgctcatgatcgggtgcactgcaggccttggggtcgcgatggccgagcgcatgattgaacatgggagttttgttgtcgctgtgggcaggcgaaagggtagacttgaggagtttcagaaggagcatggggatgagaaagttgcgatttcgcagtttgatatcacgaggttggatgagattaaagagtgggctgaggggatcattgccactcacccaacactagactgtgtggtcctgaacgcgggtatccaacgaaccctcaacttcacacagcccgcacagatcgatcttgagcgagtgcaattggaaatcacaacaaactacacatcatacatctcgctcctcgctgcattcctcccgcatcttcaatcactttctccaaccccagcgtctatcataggcatcacctcaggtctcgctctcgtcccccttccccgctgcgcaggctacggtgcaataaaggcagcactacactccttgctatggagtttgagaagtcaacttgggaatgacgaagatagtaagcatataaaagtgacggagatcgtccctcctgccgtgcagacagaactacatctcttgcagccggatttggtagcggagggtttgggacatattggaatcacgattgaggagttcattgaaagtgcctgggctggactagagagtggccaggaggagattcttgttgggccgctgaaggaggggatgggacatcttgaggatgggagacgggaggcgtttaggaggtttgaggaagctactaggcagaagacgaagaggtttttgggagacgatgggaagtaa

SEQ ID NO: 16339 - protein, 275 aa, Muscodor strobelii
  misc_feature: SGI Peptide ID NO. 565431
  misc_feature (6)..(176): Pfam Id: PF00106 Pfam Desc: short chain dehydrogenase
  misc_feature (1)..(269): NCBI GI: 85076252 Blast Desc: NCU07242 [Neurospora crassa OR74A] gi|28916931|gb|EAA26666.1| [Neurospora crassa OR74A]
  misc_feature (1)..(257): NCBI GI: 189192729 Blast Desc: PTRG_02370 [Pyrenophora tritici-repentis Pt-1C-BFP] gi|187978267|gb|EDU44893.1| PTRG_02370 [Pyrenophora tritici-repentis Pt-1C-BFP]
  misc_feature (1)..(270): NCBI GI: 238507337 Blast Desc: short-chain dehydrogenase/oxidoreductase, [Aspergillus flavus NRRL3357] gi|220689583|gb|EED45934.1| short-chain dehydrogenase/oxidoreductase, [Aspergillus flavus NRRL3357]
  misc_feature (1)..(270): NCBI GI: 169786337 Blast Desc: [Aspergillus oryzae RIB40] gi|83776377|dbj|BAE66496.1| protein product [Aspergillus oryzae]
  misc_feature (1)..(270): NCBI GI: 145248241 Blast Desc: An13g02310 [Aspergillus niger] gi|134081119|emb|CAK41630.1| protein product [Aspergillus niger]
  misc_feature (1)..(255): NCBI GI: 169607098 Blast Desc: SNOG_06603 [Phaeosphaeria nodorum SN15] gi|111065314|gb|EAT86434.1| SNOG_06603 [Phaeosphaeria nodorum SN15]
  misc_feature (1)..(267): NCBI GI: 39969245 Blast Desc: MGG_10233 [Magnaporthe grisea 70-15] gi|149211077|ref|XP_001522913.1| MGCH7_ch7g1001 [Magnaporthe grisea 70-15] gi|86196956|gb|EAQ71594.1| MGCH7_ch7g1001 grisea
  misc_feature (1)..(270): NCBI GI: 255947372 Blast Desc: Pc22g04140 [Penicillium chrysogenum Wisconsin 54-1255] gi|211591470|emb|CAP97702.1| Pc22g04140 [Penicillium chrysogenum Wisconsin 54-1255]
  misc_feature (8)..(263): NCBI GI: 156065981 Blast Desc: SS1G_01001 [Sclerotinia sclerotiorum 1980] gi|154691860|gb|EDN91598.1| SS1G_01001 [Sclerotinia sclerotiorum 1980]
  misc_feature (1)..(270): NCBI GI: 159128528 Blast Desc: short-chain dehydrogenase/oxidoreductase, [Aspergillus fumigatus A1163]
  misc_feature (7)..(202): SWISSPROT Homolog: EC 1.1.1.276 Serine 3-dehydrogenase
  misc_feature: Useful for introducing or modulating the production of volatile compounds
MTWQYKTVLMIGCTAGLGVAMAERMIEHGSFVVAVGRRKGRLEEFQKEHGDEKVAISQFDITRLDEIKEWAEGIIATHPTLDCVVLNAGIQRTLNFTQPAQIDLERVQLEITTNYTSYISLLAAFLPHLQSLSPTPASIIGITSGLALVPLPRCAGYGAIKAALHSLLWSLRSQLGNDEDSKHIKVTEIVPPAVQTELHLLQPDLVAEGLGHIGITIEEFIESAWAGLESGQEEILVGPLKEGMGHLEDGRREAFRRFEEATRQKTKRFLGDDGK

SEQ ID NO: 16340 - DNA, 1254 bp, Muscodor strobelii
  misc_feature: SGI EST ID NO. CUFF.38839.1
  misc_feature: Variant of the nucleotide sequence at SEQ ID NO 16338
attgttggcccactgtcatactccaattgagtgccctcgggtgagggtcggtatcgaaagtggttaaagtccgatacatatacgaggtacgggttgcgccttctcccagtgccttatctttattgcttcggtttgttgatatattccacctgtgtgatctagttattgacgattgatcactagacaattactgcgaaccttctgtccttttgttccctgctgtaccattcgcacgaggtagcaagagtgaccagcaaaatgacgtggcaatacaagactgtgctcatgatcgggtgcactgcaggccttggggtcgcgatggccgagcgcatgattgaacatgggagttttgttgtcgctgtgggcaggcgaaagggtagacttgaggagtttcagaaggagcatggggatgagaaagttgcgatttcgcagtttgatatcacgaggttggatgagattaaagagtgggctgaggggatcattgccactcacccaacactagactgtgtggtcctgaacgcgggtatccaacgaaccctcaacttcacacagcccgcacagatcgatcttgagcgagtgcaattggaaatcacaacaaactacacatcatacatctcgctcctcgctgcattcctcccgcatcttcaatcactttctccaaccccagcgtctatcataggcatcacctcaggtctcgctctcgtcccccttccccgctgcgcaggctacggtgcaataaaggcagcactacactccttgctatggagtttgagaagtcaacttgggaatgacgaagatagtaagcatataaaagtgacggagatcgtccctcctgccgtgcagacagaactacatctcttgcagccggatttggtagcggagggtttgggacatattggaatcacgattgaggagttcattgaaagtgcctgggctggactagagagtggccaggaggagattcttgttgggccgctgaaggaggggatgggacatcttgaggatgggagacgggaggcgtttaggaggtttgaggaagctactaggcagaagacgaagaggtttttgggagacgatgggaagtaaagttgtttgttggatgaggggagaggtgttggatgatgagatcatgagaagagtaggatttcaaggaaacttgggttgggttagagtgtagtgtactagggtttgttgtattgaagcgttagttttatttactttcaatctagtcttgtacagaatcgtttccccagc

SEQ ID NO: 16341 - DNA, 1683 bp, Muscodor strobelii
  misc_feature: SGI cDNA ID NO. 565432
  misc_feature: Encodes the peptide sequence at SEQ ID NO 16342
atgcacaccggtggtctcgctcaaatgtctctcaacggttacaactctcccacgggcctggctatgccttcaggaggtttggcctctcgccgaggcggccagaacatcaagccactttccttcgactcgaagaccccgattgatacccaggataatggagcccccactcccagaacgagccgtggtcatctacttgctggtcttaggacggccccgaagtcggccacagccacgacgttcgccaactcttcggcaatgccgtcccagatgtctggtaggaacagcgggcggggcgagagcatgtacggtggttccaaccacatgtacaatggaccgaaaacatcgcttccgcgcatggcaacccagcagccacagcagcagcagggagcatacaatatgtccggtgtcaatcagcagcactacaccgcagatcagattcttgcgcctcccgaattccatctcgacgagcaggtccaagaccaaatggatcccaacctctatgctcagttggttaccgcgaacatgtatttggctcaacagaaacaacgccttcaacagcagctgctcaacgttcaagccgctgcccaacagttccaaagcctcaacctgaacggtcagcacaccttgcaacagcaactcgctctgcagcagctgtatcagcaacagcaacaactccaggccatgcaacaatcgatgaccatgcccgtccagcagaacctggttcccatgtatgaccctaatactcagcttacttatttggttgatcctaccacgggtcaggtgcagcccaacttctatgacaaccagcctagcacacctcaggcggcatacttccagcagcctactgctgccacgccccgagttcaggtgtctccgcctcctatggacaatcaggcgcctactcagcgaactgtctccccgcccaagagatcggaaatgactgctgagccgaccccgttgcctcctccatctgctaatgcgtttagacgtggacacaagaagtcgtcgtctctggccaatgtgattaagggtcttactgcttccgaagagccaccaaagtctgctgggccgaagaccgcatcattcccgctgtcgcctatgcctaacggtggttatggacctggtcaagctcgtgccggcgaacatcccgttcgtcaaccccgtggccctcccgctcttgatgagctcagagccaagcccaccgcgaagcatgaaggcagcaagaacttcgcggcacgcacgcgacgttctgctgtttccaacttggtgaaagctggtctcgtacgccgcaagggcactggcagtagctgtggcagtatgagcccggtatctgagacagccgaagagattgggacacccatcaccgacaacgagtcagactctgggcgtagtggctccggcagtctctcgggtgacgcagagccaagtttggctagctcccgaacttcggccagcggcagctggggtgctatcggttcagaacggccaaactcgcgtcagaagtcgcgtaggagtgtcgatagccaagcaagcatcagtgagagtgacgacagctttgccagtgtattcaaaaatgggtctcaccgtcaagccaagaacgagggcccggatggccaacggagagcacctagacttgtcctaaccagcgcagaaaagcgcaagggatccggcatgtccgcttag

SEQ ID NO: 16342 - protein, 560 aa, Muscodor strobelii
  misc_feature: SGI Peptide ID NO. 565432
  misc_feature (9)..(548): NCBI GI: 256720714 Blast Desc: NECHADRAFT_72241 [Nectria haematococca mpVI 77-13-4]
  misc_feature (1)..(554): NCBI GI: 261353567 Blast Desc: conserved [Verticillium albo-atrum VaMs.102]
  misc_feature (9)..(548): NCBI GI: 46137733 Blast Desc: FG10382.1 [Gibberella zeae PH-1]
  misc_feature (1)..(554): NCBI GI: 171676573 Blast Desc: protein product [Podospora anserina] gi|170936353|emb|CAP61011.1| protein product [Podospora anserina]
  misc_feature (1)..(554): NCBI GI: 116197501 Blast Desc: CHGG_06906 [Chaetomium globosum CBS 148.51] gi|88178185|gb|EAQ85653.1| CHGG_06906 [Chaetomium globosum CBS 148.51]
  misc_feature (1)..(556): NCBI GI: 156044046 Blast Desc: SS1G_10126 [Sclerotinia sclerotiorum 1980] gi|154694515|gb|EDN94253.1| SS1G_10126 [Sclerotinia sclerotiorum 1980]
  misc_feature (1)..(556): NCBI GI: 154291116 Blast Desc: BC1G_15330 [Botryotinia fuckeliana B05.10] gi|150847093|gb|EDN22286.1| BC1G_15330 [Botryotinia fuckeliana B05.10]
  misc_feature (141)..(550): NCBI GI: 39947057 Blast Desc: MGG_08457 [Magnaporthe grisea 70-15] gi|145012283|gb|EDJ96939.1| MGG_08457 [Magnaporthe grisea 70-15]
  misc_feature (237)..(556): NCBI GI: 85076236 Blast Desc: NCU07238 [Neurospora crassa OR74A] gi|28916927|gb|EAA26662.1| [Neurospora crassa OR74A]
  misc_feature (1)..(554): NCBI GI: 169614584 Blast Desc: SNOG_10438 [Phaeosphaeria nodorum SN15] gi|111060712|gb|EAT81832.1| SNOG_10438 [Phaeosphaeria nodorum SN15]
MHTGGLAQMSLNGYNSPTGLAMPSGGLASRRGGQNIKPLSFDSKTPIDTQDNGAPTPRTSRGHLLAGLRTAPKSATATTFANSSAMPSQMSGRNSGRGESMYGGSNHMYNGPKTSLPRMATQQPQQQQGAYNMSGVNQQHYTADQILAPPEFHLDEQVQDQMDPNLYAQLVTANMYLAQQKQRLQQQLLNVQAAAQQFQSLNLNGQHTLQQQLALQQLYQQQQQLQAMQQSMTMPVQQNLVPMYDPNTQLTYLVDPTTGQVQPNFYDNQPSTPQAAYFQQPTAATPRVQVSPPPMDNQAPTQRTVSPPKRSEMTAEPTPLPPPSANAFRRGHKKSSSLANVIKGLTASEEPPKSAGPKTASFPLSPMPNGGYGPGQARAGEHPVRQPRGPPALDELRAKPTAKHEGSKNFAARTRRSAVSNLVKAGLVRRKGTGSSCGSMSPVSETAEEIGTPITDNESDSGRSGSGSLSGDAEPSLASSRTSASGSWGAIGSERPNSRQKSRRSVDSQASISESDDSFASVFKNGSHRQAKNEGPDGQRRAPRLVLTSAEKRKGSGMSA

SEQ ID NO: 16343 - DNA, 3763 bp, Muscodor strobelii
  misc_feature: SGI EST ID NO. CUFF.38689.0
  misc_feature: Variant of the nucleotide sequence at SEQ ID NO 16341
cttcctctcctcttgtgcctctcgctgctgctttcttccctctctctccatcccctccttcggtctacctcatctcgcaacctcccttcctttatcctcctctccctctttcttccgccttccaaccctttgggtgctatccttcctgaggcttattctttcactgtgtgtttgttgtgtgtgcgcgcgtgcttgtacgccccctcgtcaaatcatcgtcattgttggcctgcaaaaaccattgaacctgcctctcgacaggagctcatcgcccggccaatattgctcacttcaacactcccccagcatttggtactgcctcgagctgcctagagtaatattgtttcactcttgataccccgacacaaaaaaaggactgcagagagattcggaaaagaagaaaaacagaattgcaccacccgtttaccaggagtttctggacgactcaacaccatatatttcgacccttaatccttgtatagcttttttaaactttcgacttcgcttttttgatacgcttcgagacacctcgatctggtctgcattgttgcactgatcagtgtcatcgccttaattatcacccgtgaatctgtgtctggagaggctattcttcgagttgattgacactagctggacaaagaagtcatcgcgattgcctgctccacgccagcgacaaagagaactcaatcgattcggtttcatcgttctcgccatccgcgcacttcagctctttgactgctccagctttcattcgcgctgctcgcggacgactctgactaacaaggaaacctggacctgatccttcgagaccttggccactgcagctgacttgggacctgcatcgccttccctcggctacttccatctcctaggtcctacgacaagctatcttctggtcataacctgtctcaatctcttccttcgaggcttccgcgcttcagtgtcggtagcaatagcaacacagatcaccactgtcgctcattcagacatcaccacccttggcccatagccaccatttaatattgtcgttagacaacatccgccttgcaacatacgcatccatccatccatttttctgtttcttgtccacagctttccacgactggcagacgcctggtttcttggattcgtcgagctcttcattccaggacgactgcgtttgatacgaacatcactactctaacggattcctatcatcggttccgcagagcaccaactgcttggccagtccattgcatcagctgtgccgtcgctaataacgttatcctcggtctctgcgtacactgttttcctctagcatatactcgattgtaatatctgtcgatttcttatcgtcaagaggcgatcatccattcattaattagacttcacttctaattcatcccttggctgctacgacttgacttcgtgcagttccttatcatcttattttcggtattttgagcatgcacaccggtggtctcgctcaaatgtctctcaacggttacaactctcccacgggcctggctatgccttcaggaggtttggcctctcgccgaggcggccagaacatcaagccactttccttcgactcgaagaccccgattgatacccaggataatggagcccccactcccagaacgagccgtggtcatctacttgctggtcttaggacggccccgaagtcggccacagccacgacgttcgccaactcttcggcaatgccgtcccagatgtctggtaggaacagcgggcggggcgagagcatgtacggtggttccaaccacatgtacaatggaccgaaaacatcgcttccgcgcatggcaacccagcagccacagcagcagcagggagcatacaatatgtccggtgtcaatcagcagcactacaccgcagatcagattcttgcgcctcccgaattccatctcgacgagcaggtccaagaccaaatggatcccaacctctatgctcagttggttaccgcgaacatgtatttggctcaacagaaacaacgccttcaacagcagctgctcaacgttcaagccgctgcccaacagttccaaagcctcaacctgaacggtcagcacaccttgcaacagcaactcgctctgcagcagctgtatcagcaacagcaacaactccaggccatgcaacaatcgatgaccatgcccgtccagcagaacctggttcccatgtatgaccctaatactcagcttacttatttggttgatcctaccacgggtcaggtgcagcccaacttctatgacaaccagcctagcacacctcaggcggcatacttccagcagcctactgctgccacgccccgagttcaggtgtctccgcctcctatggacaatcaggcgcctactcagcgaactgtctccccgcccaagagatcggaaatgactgctgagccgaccccgttgcctcctccatctgctaatgcgtttagacgtggacacaagaagtcgtcgtctctggccaatgtgattaagggtcttactgcttccgaagagccaccaaagtctgctgggccgaagaccgcatcattcccgctgtcgcctatgcctaacggtggttatggacctggtcaagctcgtgccggcgaacatcccgttcgtcaaccccgtggccctcccgctcttgatgagctcagagccaagcccaccgcgaagcatgaaggcagcaagaacttcgcggcacgcacgcgacgttctgctgtttccaacttggtgaaagctggtctcgtacgccgcaagggcactggcagtagctgtggcagtatgagcccggtatctgagacagccgaagagattgggacacccatcaccgacaacgagtcagactctgggcgtagtggctccggcagtctctcgggtgacgcagagccaagtttggctagctcccgaacttcggccagcggcagctggggtgctatcggttcagaacggccaaactcgcgtcagaagtcgcgtaggagtgtcgatagccaagcaagcatcagtgagagtgacgacagctttgccagtgtattcaaaaatgggtctcaccgtcaagccaagaacgagggcccggatggccaacggagagcacctagacttgtcctaaccagcgcagaaaagcgcaagggatccggcatgtccgcttaggctacccgactgagcttgtagtatttctccttacacccttacgattgcacgcatcggcttcattgttttttttcacgacctttttatatctcggactggtggaacctcttcgggtgttaatccccaaacgcatgatcagactaggctggacggaatggtttggagaacagaatggtccattttcattgttgatttggctttgggttgacccagaaattgcgaaggactggatcataggcccggccggaacctcgaattcgagtattctcatcttcgctgtctcgccgcttagtggaataggcttccatatcggccgagcaacttcagggggcgtcaaggcttggagataaagagtcattcgggagtggttttacacgtccgcattatttttcacgtcactcttttcagctgggccgtcttggtttctcggttacacatgcgtttgattttaggaggatagacgggcgagggtgattccacttacgattccggtggatccaacctaggggtgtggatgaagatctgctcaccaccctctgtgcctccagttgaggagaaagtagtaaaaggaattaggtagttcaatggcacagcacaaattgcacgccacagttgcatacgagcgtcacatgtga

SEQ ID NO: 16344 - DNA, 345 bp, Muscodor strobelii
  misc_feature: SGI cDNA ID NO. 565433
  misc_feature: Encodes the peptide sequence at SEQ ID NO 16345
atgttcaagttcttccagaacaagcgtcgaccatgctttcactatttcgtcaaattgtccgagtgccacgaccatagcctcgacaccgacgacaacaccaactaccggcccaacaacttctataggtccaccaacctctacgggccctactacctctataaggcctttaacgactacaggttcgacaagtactacaagctagacgactactacaaacattgcaaatacgacgacttcttcgactatggtaagcaccacaagcttttcgagttcttcgagtacaacatcttctacaatgacttcgagtaccacctttacggctctagtttcctaccaaacaaatag

SEQ ID NO: 16345 - protein, 114 aa, Muscodor strobelii
  misc_feature: SGI Peptide ID NO. 565433
MFKFFQNKRRPCFHYFVKLSECHDHSLDTDDNTNYRPNNFYRSTNLYGPYYLYKAFNDYRFDKYYKLDDYYKHCKYDDFFDYGKHHKLFEFFEYNIFYNDFEYHLYGSSFLPNK

SEQ ID NO: 16346 - DNA, 2454 bp, Muscodor strobelii
  misc_feature: SGI cDNA ID NO. 565434
  misc_feature: Encodes the peptide sequence at SEQ ID NO 16347
atggttcaacccgccgctgcggcggccaagccggccccgggcccaggcatatatagcgcaacctacagtggtattccagtctacgagtatcaatttggccccgagctgaaggagcatgtcatgcgcaggcgagtggacaactggatcaatgccacgcacatcctcaagtgtgccggcttcgataagccggcccgtacccgaatcctcgagcgagaagtccagaaggacacccacgagaagatccaaggtggctatggaaagtaccagggcacctggatccccctcgaggccggcgaacagctggccagacgcaacaatgtctacgaccgcatccgacccatcttcgagttccagcctgggggcgagagcccaccgcctgcccctcgccacaccagcaaacccaaggccccgcgcaagccagccgtgcccaagtggaacaatcctcctcctcccaagccggatgtcatcgagaccctgagccagccacttctagacgacgacttgcccgacaacgacaccgtcgcctccgtgtcctacatggccgaggacgaccgccccgacatgtctcagttctccactggccacaccggccaccgcaagaggaagcgcgaggagaccatccaggacctgacggagcagcagcactccatctacggcgacgccctgctggactacttccttctgtctagaaaccagaccacccccagcttccgacccgagccccccaccgacttccagcccgactggttcatcgacgccgagaaacacagtgctctccactgggcaagcgccatgggcgatgtcgacgtcatcaagcagatgaagcgctttggcgccagcgtcgggatccagaacatacgcggggagacgcctttgatgcgctccgtcaatttcactaactgttacgagaagcagacgtttccctcagtcctaaaggagcttatcggaacagtcgagatgcgtgacgacatcggatataccgtcatacaccatgccactgttattagaagtggtcgcgtgcagagtcaatcatgctctcgttactacttagattccatcttgaacaagctccaggaaacccatgacaacaattacatcctccagctcctcaacttacaagacgtcgacggcaacactgccttgcacttggctgccaaagtaagagctagcaaatgcatccgggcgcttctgggtcgtggggcagacccccatatcctcaacgctcagggaatctcagcggatgaactcatccaagagatcaatgcgacaagacatagcaagagagagctagttccaaggcaacgatcgtcgtccccttttggtccccattcgcaacacaactccctccccgacttcagacccgattcggttggcaagctggtgtcatacaattcagaagccgcaaacaccatccagggcaagatcggccccatgcttatggacaagatccagaatttagctctcaattatgaaaaccagtggaagcagaaggtcgatgcggcaaatgaggcgcgcagactgctgggcaacaaccagaatgagctggacgccgtccagcagcagatcgcacaactggaagcagcgctcgagtcgccagaagttgccgccgctgcagaacaagaggccactgcgtcacaacaagaactcttgtcgcttcttgagcagcagagccgatactacattcacggatccgtcgagcagagtctggctttcatgaacggcgatcaaggtgaagattctttcgaggaccgcctgaaacttgctcatgagctgcgtgacactgtcgccaagcagagacaagcagagcaagagtatgccaatgctctagggcactccggcacgggcgaaaagattgacaagtatcgacgtctgttgaagcaatgtcttgatcgacaagacgctgacaacctggacgcgcatatcgacgacctcatcgatatgatggaggaagagcgcagcgaaggagccccatcgggcgctgttatcggagatgcagcaccacatgtcgagggcgatcccatgatgttaggcgacggaaataaatctacagccaaccacgtcgcaggcaatgaaaataaccctaaggctaaggacgcttttggccgcgaagacaacactgtagccaagaatgtcgttagcggcagaagtatccctgcggaccgcaacgcctttggcagtggaggcgttcccctgatcaacaatccactgcgagcacaggcacaagagttggtcaacgacacggctgcagctagaatcgaccctgtgctgatacaagtggatgagaatagggttaattccatgccttacatgcccatcgatcaagccagcagaggctctcggcatcctacggagccgacatccagtgaggatatccggaacaagctgaatgctgtaaagccagctatgtacggtaaattctttggcgagaagatgccctacattcccatcgagtga

SEQ ID NO: 16347 - protein, 817 aa, Muscodor strobelii
  misc_feature: SGI Peptide ID NO. 565434
  misc_feature (376)..(408): Pfam Id: PF00023 Pfam Desc: Ankyrin repeat
  misc_feature (254)..(286): Pfam Id: PF00023 Pfam Desc: Ankyrin repeat
  misc_feature (39)..(122): Pfam Id: PF02292 Pfam Desc: APSES domain
  misc_feature (39)..(118): Pfam Id: PF02292 Pfam Desc: APSES domain
  misc_feature (13)..(651): NCBI GI: 116197493 Blast Desc: CHGG_06902 [Chaetomium globosum CBS 148.51] gi|88178181|gb|EAQ85649.1| CHGG_06902 [Chaetomium globosum CBS 148.51]
  misc_feature (9)..(651): NCBI GI: 261353569 Blast Desc: transcription factor MBP1 [Verticillium albo-atrum VaMs.102]
  misc_feature (14)..(679): NCBI GI: 256720712 Blast Desc: [Nectria haematococca mpVI 77-13-4]
  misc_feature (1)..(661): NCBI GI: 46137737 Blast Desc: FG10384.1 [Gibberella zeae PH-1]
  misc_feature (1)..(655): NCBI GI: 145604260 Blast Desc: MGG_08463 [Magnaporthe grisea 70-15] gi|74274846|gb|ABA02073.1| Swi4 [Magnaporthe grisea] gi|145012291|gb|EDJ96947.1| MGG_08463 [Magnaporthe grisea 70-15]
  misc_feature (1)..(655): NCBI GI: 83283002 Blast Desc: ANK-repeat protein MBP1 [Magnaporthe grisea]
  misc_feature (9)..(651): NCBI GI: 171676579 Blast Desc: protein product [Podospora anserina] gi|170936356|emb|CAP61014.1| protein product [Podospora anserina]
  misc_feature (13)..(573): NCBI GI: 85075775 Blast Desc: NCU07246 [Neurospora crassa OR74A] gi|28916840|gb|EAA26585.1| NCU07246 [Neurospora crassa OR74A]
  misc_feature (14)..(652): NCBI GI: 154294244 Blast Desc: BC1G_13808 [Botryotinia fuckeliana B05.10] gi|150844818|gb|EDN20011.1| BC1G_13808 [Botryotinia fuckeliana B05.10]
  misc_feature (11)..(655): NCBI GI: 189207689 Blast Desc: PTRG_09846 [Pyrenophora tritici-repentis Pt-1C-BFP] gi|187976271|gb|EDU42897.1| PTRG_09846 [Pyrenophora tritici-repentis Pt-1C-BFP]
MVQPAAAAAKPAPGPGIYSATYSGIPVYEYQFGPELKEHVMRRRVDNWINATHILKCAGFDKPARTRILEREVQKDTHEKIQGGYGKYQGTWIPLEAGEQLARRNNVYDRIRPIFEFQPGGESPPPAPRHTSKPKAPRKPAVPKWNNPPPPKPDVIETLSQPLLDDDLPDNDTVASVSYMAEDDRPDMSQFSTGHTGHRKRKREETIQDLTEQQHSIYGDALLDYFLLSRNQTTPSFRPEPPTDFQPDWFIDAEKHSALHWASAMGDVDVIKQMKRFGASVGIQNIRGETPLMRSVNFTNCYEKQTFPSVLKELIGTVEMRDDIGYTVIHHATVIRSGRVQSQSCSRYYLDSILNKLQETHDNNYILQLLNLQDVDGNTALHLAAKVRASKCIRALLGRGADPHILNAQGISADELIQEINATRHSKRELVPRQRSSSPFGPHSQHNSLPDFRPDSVGKLVSYNSEAANTIQGKIGPMLMDKIQNLALNYENQWKQKVDAANEARRLLGNNQNELDAVQQQIAQLEAALESPEVAAAAEQEATASQQELLSLLEQQSRYYIHGSVEQSLAFMNGDQGEDSFEDRLKLAHELRDTVAKQRQAEQEYANALGHSGTGEKIDKYRRLLKQCLDRQDADNLDAHIDDLIDMMEEERSEGAPSGAVIGDAAPHVEGDPMMLGDGNKSTANHVAGNENNPKAKDAFGREDNTVAKNVVSGRSIPADRNAFGSGGVPLINNPLRAQAQELVNDTAAARIDPVLIQVDENRVNSMPYMPIDQASRGSRHPTEPTSSEDIRNKLNAVKPAMYGKFFGEKMPYIPIE

SEQ ID NO: 16348 - DNA, 3496 bp, Muscodor strobelii
  misc_feature: SGI EST ID NO. CUFF.38646.0
  misc_feature: Variant of the nucleotide sequence at SEQ ID NO 16346
ggaaggggagctccacgtgctgcctgaggcatcaaagccatggcagctgcacctcatttacgcgtgatgcgcgtcttcggctcattccacggcttctcacgtcaggaaagcgcgtcgaaaggcggctaaccctgccatttgtgatccattttgtgacccgtatctgctctatctgttcccgccgatcgcttgtccatcaagaaacattgctcgcaagaatatcgtcgccaattgagttctgtattgtagtttgcacccaatagtgcgaacttgagtctgcatttccacccactgtctctctacccaccacatcggcgaccctctgccctatcagccactgcaccacatcctgcacaacatcactgtacattggcaactattggacatatttccccgatccctgcatttgtcgccgccttgggttcaagttcttgtcgactgtcttctgtcttgataacaccaacccgccgactctgcagcatcaccagtccgccgctgtgatggttcaacccgccgctgcggcggccaagccggccccgggcccaggcatatatagcgcaacctacagtggtattccagtctacgagtatcaatttggccccgagctgaaggagcatgtcatgcgcaggcgagtggacaactggatcaatgccacgcacatcctcaagtgtgccggcttcgataagccggcccgtacccgaatcctcgagcgagaagtccagaaggacacccacgagaagatccaaggtggctatggaaagtaccagggcacctggatccccctcgaggccggcgaacagctggccagacgcaacaatgtctacgaccgcatccgacccatcttcgagttccagcctgggggcgagagcccaccgcctgcccctcgccacaccagcaaacccaaggccccgcgcaagccagccgtgcccaagtggaacaatcctcctcctcccaagccggatgtcatcgagaccctgagccagccacttctagacgacgacttgcccgacaacgacaccgtcgcctccgtgtcctacatggccgaggacgaccgccccgacatgtctcagttctccactggccacaccggccaccgcaagaggaagcgcgaggagaccatccaggacctgacggagcagcagcactccatctacggcgacgccctgctggactacttccttctgtctagaaaccagaccacccccagcttccgacccgagccccccaccgacttccagcccgactggttcatcgacgccgagaaacacagtgctctccactgggcaagcgccatgggcgatgtcgacgtcatcaagcagatgaagcgctttggcgccagcgtcgggatccagaacatacgcggggagacgcctttgatgcgctccgtcaatttcactaactgttacgagaagcagacgtttccctcagtcctaaaggagcttatcggaacagtcgagatgcgtgacgacatcggatataccgtcatacaccatgccactgttattagaagtggtcgcgtgcagagtcaatcatgctctcgttactacttagattccatcttgaacaagctccaggaaacccatgacaacaattacatcctccagctcctcaacttacaagacgtcgacggcaacactgccttgcacttggctgccaaagtaagagctagcaaatgcatccgggcgcttctgggtcgtggggcagacccccatatcctcaacgctcagggaatctcagcggatgaactcatccaagagatcaatgcgacaagacatagcaagagagagctagttccaaggcaacgatcgtcgtccccttttggtccccattcgcaacacaactccctccccgacttcagacccgattcggttggcaagctggtgtcatacaattcagaagccgcaaacaccatccagggcaagatcggccccatgcttatggacaagatccagaatttagctctcaattatgaaaaccagtggaagcagaaggtcgatgcggcaaatgaggcgcgcagactgctgggcaacaaccagaatgagctggacgccgtccagcagcagatcgcacaactggaagcagcgctcgagtcgccagaagttgccgccgctgcagaacaagaggccactgcgtcacaacaagaactcttgtcgcttcttgagcagcagagccgatactacattcacggatccgtcgagcagagtctggctttcatgaacggcgatcaaggtgaagattctttcgaggaccgcctgaaacttgctcatgagctgcgtgacactgtcgccaagcagagacaagcagagcaagagtatgccaatgctctagggcactccggcacgggcgaaaagattgacaagtatcgacgtctgttgaagcaatgtcttgatcgacaagacgctgacaacctggacgcgcatatcgacgacctcatcgatatgatggaggaagagcgcagcgaaggagccccatcgggcgctgttatcggagatgcagcaccacatgtcgagggcgatcccatgatgttaggttagagcaacaacatttttggtggcagtatccctatgaccaacaacgcctttggtaacaaaaatacccctacaacgaacaagtccaataacgcccttggtaatggaaacatctctacgacaaatcatgcccatggcagtggagaaatcgctaaggctaataatacctcaggcgacggaaataaatctacagccaaccacgtcgcaggcaatgaaaataaccctaaggctaaggacgcttttggccgcgaagacaacactgtagccaagaatgtcgttagcggcagaagtatccctgcggaccgcaacgcctttggcagtggaggcgttcccctgatcaacaatccactgcgagcacaggcacaagagttggtcaacgacacggctgcagctagaatcgaccctgtgctgatacaagtggatgagaatagggttaattccatgccttacatgcccatcgatcaagccagcagaggctctcggcatcctacggagccgacatccagtgaggatatccggaacaagctgaatgctgtaaagccagctatgtacggtaaattctttggcgagaagatgccctacattcccatcgagtgagaaaaggacggttcggggcaacgcagttttgtacgaggagagtatggcaacgaatgagtggtgttggaaagacaacacacactggatctgggtcaggaaatggaattgcacttggtatggtgcgctgtgatacccatattgctattgctattgcctagtaagggaggatttggcgattgagacttgtataagtaaagacacgactgatgatggagagagcagaggagagaataaatcatggttgagaaggagggactctaaacgatgaacaagcttgagttcaataggcatgaattacgactgtatgtactatagcagcagcatcaagacccgatgatgagaatctacttgctgtgcgatttggtgtgcaa

SEQ ID NO: 16349 - DNA, 1404 bp, Muscodor strobelii
  misc_feature: SGI cDNA ID NO. 565435
  misc_feature: Encodes the peptide sequence at SEQ ID NO 16350
atggcgaagttaaatacgatggagggctttgtgcctctgaatccccataatcagatggcacctcgcacttataaccgcttagttatgtgcttcgtgatcgacaaccacaaaaagaacgacgcgatagctcacctcaagaaatgcgcttcgggacttagtcagacgtaccctttcctcggatcactactcaaaacggacgaacccgtcgctctaattagtccagccgcccatgatgagatccctgtggaagtctacgacatcgagaacaactttagatataactacgccgacctaaaaactcggggatttcctgcgtccgccttcgtcaacgatgcgttcggcttcgattcgcgtagcattacccatgccctcattattcgtgtataccttcttgatgaaggccttattctagggctacatcttcatcactcactaggcgatggccacgccatcaacaccgttgctcgctggttctcggcacagactcgcggtgacatacttgagagcgaaccagtccacatcacgagaccagtctgcgacatagactacgaggtggacattccaaaaaacgaactggtaaaatcagacgaactgagaaagcgaatcccagagaagaaactcataactccatcacatactgctcctccgacagagaaatgcacaggatacatattcaaattcagcacaaggttgctcagcgccttccaggacaaaattgctatgatccacggaatagaaagaccgagttcaacggttgtcttggccgctctcgtatgggctcacgcaaccaaggcgaggctcggcacgtgtaaggaggaatcgaaatctccagataagcaaccacgactcttcatcaccgtcgacatcagaaaacgagcgtttagcgaagtagatcagaacgcgtatttcgggaacgcaaccgaaatgcctttcgccaagatagattacagcagcctgctcaaaatatgcggtgacgatgacgaaggacctgttgctgcattggcggagaatctcaatccgatcgtacaaagtattcaggagagcatcaatcaagtcgacgtgagatacgcggccgaacgtcaggacttatatgctgctctttcagacccaacgaagctaatatacggcctcgactcttctgacccatacgactttgtctttaattcttggcgctacattggtacagctgctgaccagaaatggtctatacctggtgttagttcgagctatcctgatagttttcggcgagcgggcgatgactggaactgtccggcggctgtgattatgcctattcctgttggctcgcaggatatagagctgatgattacgttggaagagagggccatggagttgcttttggatgatgacgattttatgaaatacaccagggtggttcgcgattga

SEQ ID NO: 16350 - protein, 467 aa, Muscodor strobelii
  misc_feature: SGI Peptide ID NO. 565435
  misc_feature (2)..(459): Pfam Id: PF02458 Pfam Desc: Transferase family
  misc_feature (17)..(466): NCBI GI: 261360017 Blast Desc: conserved [Verticillium albo-atrum VaMs.102]
  misc_feature (20)..(461): NCBI GI: 145604020 Blast Desc: [Magnaporthe grisea 70-15] gi|145012122|gb|EDJ96778.1| [Magnaporthe grisea 70-15]
  misc_feature (13)..(430): NCBI GI: 40882282 Blast Desc: [Neurospora crassa]
  misc_feature (13)..(430): NCBI GI: 164429173 Blast Desc: NCU05183 [Neurospora crassa OR74A] gi|157072968|gb|EDO65425.1| [Neurospora crassa OR74A]
  misc_feature (13)..(390): NCBI GI: 269979934 Blast Desc: trichothecene 8-O-isovaleryltransferase [Fusarium incarnatum]
  misc_feature (123)..(461): NCBI GI: 121712064 Blast Desc: transferase family protein [Aspergillus clavatus NRRL 1] gi|119401799|gb|EAW12221.1| transferase family protein [Aspergillus clavatus NRRL 1]
  misc_feature (94)..(411): NCBI GI: 164429173 Blast Desc: NCU05183 [Neurospora crassa OR74A] gi|157072968|gb|EDO65425.1| [Neurospora crassa OR74A]
  misc_feature (94)..(411): NCBI GI: 40882283 Blast Desc: [Neurospora crassa]
  misc_feature (94)..(465): NCBI GI: 171694642 Blast Desc: protein product [Podospora anserina] gi|170947563|emb|CAP59724.1| protein product [Podospora anserina]
  misc_feature (27)..(463): NCBI GI: 269979936 Blast Desc: trichothecene 8-O-isovaleryltransferase [Fusarium sp. FRC R-06979]
MAKLNTMEGFVPLNPHNQMAPRTYNRLVMCFVIDNHKKNDAIAHLKKCASGLSQTYPFLGSLLKTDEPVALISPAAHDEIPVEVYDIENNFRYNYADLKTRGFPASAFVNDAFGFDSRSITHALIIRVYLLDEGLILGLHLHHSLGDGHAINTVARWFSAQTRGDILESEPVHITRPVCDIDYEVDIPKNELVKSDELRKRIPEKKLITPSHTAPPTEKCTGYIFKFSTRLLSAFQDKIAMIHGIERPSSTVVLAALVWAHATKARLGTCKEESKSPDKQPRLFITVDIRKRAFSEVDQNAYFGNATEMPFAKIDYSSLLKICGDDDEGPVAALAENLNPIVQSIQESINQVDVRYAAERQDLYAALSDPTKLIYGLDSSDPYDFVFNSWRYIGTAADQKWSIPGVSSSYPDSFRRAGDDWNCPAAVIMPIPVGSQDIELMITLEERAMELLLDDDDFMKYTRVVRD

SEQ ID NO: 16351 - DNA, 320 bp, Muscodor strobelii
  misc_feature: SGI EST ID NO. CUFF.38636.0
  misc_feature: Variant of the nucleotide sequence at SEQ ID NO 16349
gtgacatacttgagagcgaaccagtccacatcacgagaccagtctgcgacatagactacgaggtggacattccaaaaaacgaactggtaaaatcagacgaactgagaaagcgaatcccagagaagaaactcataactccatcacatactgctcctccgacagagaaatgcacaggatacatattcaaattcagcacaaggttgctcagcgccttccaggacaaaattgctatgatccacggaatagaaagaccgagttcaacggttgtcttggccgctctcgtatgggctcacgcaaccaaggcgaggctcggcacgtgt

SEQ ID NO: 16352 - DNA, 834 bp, Muscodor strobelii
  misc_feature: SGI cDNA ID NO. 565436
  misc_feature: Encodes the peptide sequence at SEQ ID NO 16353
atgctatcgctggtgctccaagagatgacagcgcctccggcacctccaacgggcccggccagcactgcaccggttcctccaccgcgattcccaacgtatctgctacctagctttccaaggccattccgccgacgacgacaaagttcgtcagtcggtaatccagtatcaccagatggcgaggtcgatgtcccatcccttagtaattcaccgacctcctcccccgtctcaagtccggtcgagagtccaccggcaacttcattcttccactctctattctctagcacggcaccaaaactcacacaaacccaacccgacacaatccgctgttcaacatgcggaacagatttcgccttcacctcacaaatagtaagcaaagggtttaccggtcgccacggacgtgcctacttggtatcgccaccagatgcaactccaaaggcagatctggtaaatatcagagtcggcaaggaagaaaaccgtatgttagtcacggggtcacacaccgtcgctgatattcattgtattacatgccgtgcgaaagtcggctggaaatatgtacatgcgaaagaagagtcgcagaagtataagatggggaagtttatccttgagacgcagaggactgttgattatcggagctgggaagatgtgccgccggaagatgtagaggggatcgaggtgaatatggcaaaggacgatgttgcgagggatagtgatggcgagccgatcatgttcgactcgagtgatgacgatgagtgcgaggaattatttgcggggatttgggatgcgcagattgcggctaagaggcggacgagaaaggttaataagcgtcgaaagtga

SEQ ID NO: 16353 - protein, 277 aa, Muscodor strobelii
  misc_feature: SGI Peptide ID NO. 565436
  misc_feature (97)..(209): Pfam Id: PF03226 Pfam Desc: Yippee zinc-binding protein
  misc_feature (109)..(209): Pfam Id: PF03226 Pfam Desc: Yippee zinc-binding protein
  misc_feature (17)..(263): NCBI GI: 46136757 Blast Desc: FG09894.1 [Gibberella zeae PH-1]
  misc_feature (19)..(276): NCBI GI: 85084820 Blast Desc: NCU07154 [Neurospora crassa OR74A] gi|28918470|gb|EAA28143.1| conserved [Neurospora crassa OR74A] gi|28950251|emb|CAD71117.1| conserved [Neurospora crassa]
  misc_feature (20)..(273): NCBI GI: 261351878 Blast Desc: yippee family protein [Verticillium albo-atrum VaMs.102]
  misc_feature (17)..(274): NCBI GI: 256731695 Blast Desc: NECHADRAFT_41896 [Nectria haematococca mpVI 77-13-4]
  misc_feature (30)..(275): NCBI GI: 169769518 Blast Desc: [Aspergillus oryzae RIB40] gi|83767087|dbj|BAE57227.1| protein product [Aspergillus oryzae]
  misc_feature (30)..(275): NCBI GI: 238501990 Blast Desc: yippee family protein [Aspergillus flavus NRRL3357] gi|220692466|gb|EED48813.1| yippee family protein [Aspergillus flavus NRRL3357]
  misc_feature (25)..(275): NCBI GI: 212528782 Blast Desc: yippee family protein [Penicillium marneffei ATCC 18224] gi|210073946|gb|EEA28033.1| yippee family protein [Penicillium marneffei ATCC 18224]
  misc_feature (30)..(276): NCBI GI: 225563087 Blast Desc: yippee family protein [Ajellomyces capsulatus G186AR]
  misc_feature (30)..(275): NCBI GI: 240279913 Blast Desc: yippee family protein [Ajellomyces capsulatus H143]
  misc_feature (30)..(275): NCBI GI: 154281427 Blast Desc: conserved [Ajellomyces capsulatus NAm1] gi|150411705|gb|EDN07093.1| conserved [Ajellomyces capsulatus NAm1]
MLSLVLQEMTAPPAPPTGPASTAPVPPPRFPTYLLPSFPRPFRRRRQSSSVGNPVSPDGEVDVPSLSNSPTSSPVSSPVESPPATSFFHSLFSSTAPKLTQTQPDTIRCSTCGTDFAFTSQIVSKGFTGRHGRAYLVSPPDATPKADLVNIRVGKEENRMLVTGSHTVADIHCITCRAKVGWKYVHAKEESQKYKMGKFILETQRTVDYRSWEDVPPEDVEGIEVNMAKDDVARDSDGEPIMFDSSDDDECEELFAGIWDAQIAAKRRTRKVNKRRK

SEQ ID NO: 16354 - DNA, 498 bp, Muscodor strobelii
  misc_feature: SGI cDNA ID NO. 565437
  misc_feature: Encodes the peptide sequence at SEQ ID NO 16355
atgaaagctattctgcagcgcgtcttatccgcgtctgtgacggtggacaaagaagttgtctcgtctatcggcaaaggggttttagtgtttgccgctgtcgcccccggagacacgcagaaagaagcagattcattggcggccaaggtgctgaagatgaaactgtgggatgatgaggccggcgggagatggaagcacaacgtccaggagataggcggtgaagtcctctgtgtatctcaatttactctcctcgcatcaacaaagaaaggaaacaagcccgactttcacggagcagctggaggagaggaagccaaaaccttatacgaatatttcttccaaaaggttcagcagggttatgttgcggaaaaagtgcagaatggtgtattccaggctatgatggaagtagcattggtcaatgacggccctgtcacgttagagatctcggccggtcgcaaagtcgagccaaccccatcacccgcgtctggtccgccatcggggtag

SEQ ID NO: 16355 - protein, 165 aa, Muscodor strobelii
  misc_feature: SGI Peptide ID NO. 565437
  misc_feature (2)..(148): Pfam Id: PF02580 Pfam Desc: D-Tyr-tRNA(Tyr) deacylase
  misc_feature (1)..(148): NCBI GI: 171678009 Blast Desc: protein product [Podospora anserina] gi|170937073|emb|CAP61732.1| protein product [Podospora anserina]
  misc_feature (1)..(147): NCBI GI: 154294782 Blast Desc: deacylase [Botryotinia fuckeliana B05.10] gi|150844564|gb|EDN19757.1| deacylase [Botryotinia fuckeliana B05.10]
  misc_feature (3)..(147): NCBI GI: 156055272 Blast Desc: SS1G_04987 [Sclerotinia sclerotiorum 1980] gi|154702772|gb|EDO02511.1| SS1G_04987 [Sclerotinia sclerotiorum 1980]
  misc_feature (1)..(160): NCBI GI: 261351953 Blast Desc: D-tyrosyl-tRNA(Tyr) deacylase [Verticillium albo-atrum VaMs.102]
  misc_feature (1)..(153): NCBI GI: 46137671 Blast Desc: FG10351.1 [Gibberella zeae PH-1]
  misc_feature (1)..(149): NCBI GI: 238845836 Blast Desc: D-tyrosyl-tRNA(Tyr) deacylase [Microsporum canis CBS 113480]
  misc_feature (1)..(154): NCBI GI: 154270632 Blast Desc: D-tyrosyl-tRNA(Tyr) deacylase [Ajellomyces capsulatus NAm1] gi|150409744|gb|EDN05184.1| D-tyrosyl-tRNA(Tyr) deacylase [Ajellomyces capsulatus NAm1]
  misc_feature (1)..(154): NCBI GI: 225554898 Blast Desc: peptidyl-prolyl cis-trans isomerase D [Ajellomyces capsulatus G186AR]
  misc_feature (1)..(154): NCBI GI: 240274276 Blast Desc: peptidyl-prolyl cis-trans isomerase [Ajellomyces capsulatus H143]
  misc_feature (1)..(151): NCBI GI: 119191065 Blast Desc: CIMG_05580 [Coccidioides immitis RS]
MKAILQRVLSASVTVDKEVVSSIGKGVLVFAAVAPGDTQKEADSLAAKVLKMKLWDDEAGGRWKHNVQEIGGEVLCVSQFTLLASTKKGNKPDFHGAAGGEEAKTLYEYFFQKVQQGYVAEKVQNGVFQAMMEVALVNDGPVTLEISAGRKVEPTPSPASGPPSG

SEQ ID NO: 16356 - DNA, 2319 bp, Muscodor strobelii
  misc_feature: SGI EST ID NO. CUFF.38655.0
  misc_feature: Variant of the nucleotide sequence at SEQ ID NO 16354
tagtcaaccagtgatgtcgaatgagaaccggccgaatacacaacgagtaactttttccgtaactaaagctcacttacacagccgggtgaggctctttttgagaccgcgatactaaatcttagttggtctacctccagcacaactcaggcaactcgtgacttctccatcaaaccggattcctcgcgagatgaaagctattctgcagcgcgtcttatccgcgtctgtgacggtggacaaagaagttgtctcgtctatcggcaaaggggttttagtgtttgccgctgtcgcccccggagacacgcagaaagaagcagattcattggcggccaaggtgctgaagatgaaactgtgggatgatgaggccggcgggagatggaagcacaacgtccaggagataggcggtgaagtcctctgtgtatctcaatttactctcctcgcatcaacaaagaaaggaaacaagcccgactttcacggagcagctggaggagaggaagccaaaaccttatacgaatatttcttccaaaaggttcagcagggttatgttgcggaaaaagtgcagaatggtgtattccaggctatgatggaagtagcattggtcaatgacggccctgtcacgttagagatctcggccggtcgcaaagtcgagccaaccccatcacccgcgtctggtccgccatcggggtaggatattggactatactagtatcctgcttattttcggcgttgtatatagcatgatcgcattgcatacgaacatcgcaattcagcatatttaatgataaaggagcatcgggtaggtatatagatgagattgtctatagatgcaatgtacatcgtcatatgatatgtccgtagggctatcaaaacgccattctgtgcccatgatcgaagatcccataccatatttcaaactccaataagtcaaatggtatatcctcgtaaacgccctcgaggactcgctgcccgagcccgtatcccttattcccaatactcaaagtcagattccatcatcatcgataccattatttccctgtcttcactttcgacgcttattaacctttctcgtccgcctcttagccgcaatctgcgcatcccaaatccccgcaaataattcctcgcactcatcgtcatcactcgagtcgaacatgatcggctcgccatcactatccctcgcaacatcgtcctttgccatattcacctcgatcccctctacatcttccggcggcacatcttcccagctccgataatcaacagtcctctgcgtctcaaggataaacttccccatcttatacttctgcgactcttctttcgcatgtacatatttccagccgactttcgcacggcatgtaatacaatgaatatcagcgacggtgtgtgaccccgtgactaacatacggttttcttccttgccgactctgatatttaccagatctgcctttggagttgcatctggtggcgataccaagtaggcacgtccgtggcgaccggtaaaccctttgcttactatttgtgaggtgaaggcgaaatctgttccgcatgttgaacagcggattgtgtcgggttgggtttgtgtgagttttggtgccgtgctagagaatagagagtggaagaatgaagttgccggtggactctcgaccggacttgagacgggggaggaggtcggtgaattactaagggatgggacatcgacctcgccatctggtgatactggattaccgactgacgaactttgtcgtcgtcggcggaatggccttggaaagctaggtagcagatacgttgggaatcgcggtggaggaaccggtgcagtgctggccgggcccgttggaggtgccggaggcgctgtcatctcttggagcaccagcgatagcatcttggtataatactgacgaggtgctcaggttgtgctgtgtgaatgctctacgtccacgaatattctgactgtccaaagaccgaaacctcgtttaaaggctgcgcagtcgaagttcgagcttagatcaatcgaaagaggtcaaatggtttaagatccaagacatgcaggcaaaggaaggacgaaacatcggaatcataagaatgataggtgagagccccgcatcggatgtgctgtcacgcgacgatcaggtcgtgtcttatctcccctccagcacctaactcaccttcggggacagcgtgaaacaaaatttcagcgcttgatccaaaagatttataggtgtgtagattccataatcttgaatggctacctatcgggtcacctggcgagtcatagtggtggtcacgcctgacacgaacatggaccatttaaggttgacgccttcaaacggc

SEQ ID NO: 16357 - DNA, 1917 bp, Muscodor strobelii
  misc_feature: SGI cDNA ID NO. 565438
  misc_feature: Encodes the peptide sequence at SEQ ID NO 16358
atggcggcccgcaaactacagcaagagatggacaagacgttcaaaaaggtggcagaggggtctgccgaattcgatgcgatctacgagaagattgagcaatctaacaacccggctcagaaggagaaacttgaagatcaactcaagcgtgaaatcaagaagctgcagcgactgagagatcaaatcaagacgtgggcggccgggaacgaggtcaaggacaaggctccgctgctggaacaccggaggctgatcgagacccaaatggagcgcttcaaggccgtcgagaaggccatgaagacgaaggcctactccaaggagggcctctccgccgccgccaagctcgaccccagagagcaagccaaggccgaggccagcgagttcctgagcaacaccgtcgacacgctcgagcagcagatcgagtccatggagaccgagtgcgagtcgatacaggccaccatgaagaagggcaagagcgcctcggcgaaggctgagaagatcgccaagatcgaggccgtcatcgagacacacaagtggcatcagggcaagattgagttgatacgccgggcgctcgaaaacgactccctcgatgtagaccagatcaaggatgtccgtgacggtatttcatactacgtagcagagggtatgaacgacgagtacatcgacgacgacgccctctacgacgaactcgacctgcaagaagaggaggatgctttcggcatgaatcaagagaacgacaagggctcgtcccaagatacacagtcggtacaggaagagaaggaacccatcgagccagagtcgcggcctggcagcctgccaggcaagacaagaagcgctatggacccggctgccagacggccttcaggacaactcaagtcgccgctgccaaccttggctacattacatacacctctctccaacgttactaacaatacctctgcggccgccagctctagtatgaagccagcatcattaccccaacggcccccaggtgaaggcctcaagtacgcttctgccgcagctgcagcagcgaacaatgtgggcattggcccattaccgccgcctccaggtgtatctccagtcgttgcttccgtcggtatctcgcccttgccgcccgcagcagctccgttgcgagccagtgctgccaattcccctagtacggcatctgtccaaccagctcgctcagactcgcgaaccgggagcatacccgtttccgaacccagatcagcagatccagctactagtgtacccagctccacgaggaaatcggccaaagcggacaaaggagcgactaaagcgccttctgctgctgctacggagccgtcggaatcgtccagagtaccatattccaatggcgcctctaatggagccagcgccatggaagaagggaaagaagaagaagagtctatctttcatctccccgcggcattacaagatttggtcgactcatatgaagcagcgaagaaacgaccattggcagtcaattcaggcccatatctgcgaatgctggcagcttcgcaaagtaacattaccaaccacatggatccaggcgatgcagagcccacgcgaacgcatcgcccggagatgcggtaccattcggaagctgggtacccccaagaatcgttgccaattcttgaagaccctcgcctgtattcgcgtatagagccagacacgctgttttacgtattctactacaaacaaggatcttatcagcagtatgtggctgccaaagccctgaaggatcagagctggcgctttcacaagcagtaccagacgtggtttcagcgacacgaagaacctaaaaacatcaccgaagaattcgagcaaggaacctatcgattcttcgattacgagtctacctggatgaaccgcagaaaggcagactttaggttcgcttacagatatcttgaggatgaggtttga

SEQ ID NO: 16358 - protein, 638 aa, Muscodor strobelii
  misc_feature: SGI Peptide ID NO. 565438
  misc_feature (501)..(635): Pfam Id: PF04153 Pfam Desc: NOT2 / NOT3 / NOT5 family
  misc_feature (1)..(244): Pfam Id: PF04065 Pfam Desc: Not1 N-terminal domain, CCR4-Not complex component
  misc_feature (541)..(635): Pfam Id: PF04153 Pfam Desc: NOT2 / NOT3 / NOT5 family
  misc_feature (1)..(638): NCBI GI: 85075997 Blast Desc: NCU03855 [Neurospora crassa OR74A] gi|28916889|gb|EAA26629.1| NCU03855 [Neurospora crassa OR74A]
  misc_feature (1)..(638): NCBI GI: 39945962 Blast Desc: MGG_08101 [Magnaporthe grisea 70-15] gi|145019345|gb|EDK03573.1| MGG_08101 [Magnaporthe grisea 70-15]
  misc_feature (1)..(638): NCBI GI: 256732254 Blast Desc: NECHADRAFT_93799 [Nectria haematococca mpVI 77-13-4]
  misc_feature (1)..(638): NCBI GI: 261351954 Blast Desc: CCR4-NOT transcription complex subunit 3 [Verticillium albo-atrum VaMs.102]
  misc_feature (1)..(638): NCBI GI: 156055270 Blast Desc: SS1G_04986 [Sclerotinia sclerotiorum 1980] gi|154702771|gb|EDO02510.1| SS1G_04986 [Sclerotinia sclerotiorum 1980]
  misc_feature (31)..(638): NCBI GI: 171678011 Blast Desc: protein product [Podospora anserina] gi|170937074|emb|CAP61733.1| protein product [Podospora anserina]
  misc_feature (1)..(638): NCBI GI: 261195903 Blast Desc: CCR4-NOT transcription complex [Ajellomyces dermatitidis SLH14081] gi|239587488|gb|EEQ70131.1| CCR4-NOT transcription complex [Ajellomyces dermatitidis SLH14081] complex
  misc_feature (1)..(638): NCBI GI: 189193047 Blast Desc: CCR4-NOT transcription complex [Pyrenophora tritici-repentis Pt-1C-BFP] gi|187978426|gb|EDU45052.1| CCR4-NOT transcription complex [Pyrenophora tritici-repentis Pt-1C-BFP]
  misc_feature (1)..(638): NCBI GI: 169783294 Blast Desc: [Aspergillus oryzae RIB40] gi|238493063|ref|XP_002377768.1| CCR4-NOT transcription complex, subunit 3 [Aspergillus flavus NRRL3357] protein product oryzae] 3
  misc_feature (1)..(638): NCBI GI: 70988984 Blast Desc: CCR4-NOT transcription complex, subunit 3 [Aspergillus fumigatus Af293] gi|66846973|gb|EAL87304.1| CCR4-NOT transcription complex, subunit 3 [Aspergillus fumigatus Af293]
MAARKLQQEMDKTFKKVAEGSAEFDAIYEKIEQSNNPAQKEKLEDQLKREIKKLQRLRDQIKTWAAGNEVKDKAPLLEHRRLIETQMERFKAVEKAMKTKAYSKEGLSAAAKLDPREQAKAEASEFLSNTVDTLEQQIESMETECESIQATMKKGKSASAKAEKIAKIEAVIETHKWHQGKIELIRRALENDSLDVDQIKDVRDGISYYVAEGMNDEYIDDDALYDELDLQEEEDAFGMNQENDKGSSQDTQSVQEEKEPIEPESRPGSLPGKTRSAMDPAARRPSGQLKSPLPTLATLHTPLSNVTNNTSAAASSSMKPASLPQRPPGEGLKYASAAAAAANNVGIGPLPPPPGVSPVVASVGISPLPPAAAPLRASAANSPSTASVQPARSDSRTGSIPVSEPRSADPATSVPSSTRKSAKADKGATKAPSAAATEPSESSRVPYSNGASNGASAMEEGKEEEESIFHLPAALQDLVDSYEAAKKRPLAVNSGPYLRMLAASQSNITNHMDPGDAEPTRTHRPEMRYHSEAGYPQESLPILEDPRLYSRIEPDTLFYVFYYKQGSYQQYVAAKALKDQSWRFHKQYQTWFQRHEEPKNITEEFEQGTYRFFDYESTWMNRRKADFRFAYRYLEDEV

SEQ ID NO: 16359 - DNA, 2709 bp, Muscodor strobelii
  misc_feature: SGI EST ID NO. CUFF.38959.1
  misc_feature: Variant of the nucleotide sequence at SEQ ID NO 16357
gagccgacagcccacccaaaacacaaaacacaccacggctgtctggcgttgagactctaatccataccaacaaacattaccatcatcatcatctgctgcaatattctctattgcagcatcctaccagtcaacgggcgtgcatgcacacgcgcctttgctttgtaccacccttcccacatccgatccgatcatctgacctcgagagtctcttccatctcgacacctggcttgggtccaaacccacacccaataaccactgccctctaaccgcagctttgcgcaacacacctctccccgatacccattggcctgtggccacccaccgtcaccatggcggcccgcaaactacagcaagagatggacaagacgttcaaaaaggtggcagaggggtctgccgaattcgatgcgatctacgagaagattgagcaatctaacaacccggctcagaaggagaaacttgaagatcaactcaagcgtgaaatcaagaagctgcagcgactgagagatcaaatcaagacgtgggcggccgggaacgaggtcaaggacaaggctccgctgctggaacaccggaggctgatcgagacccaaatggagcgcttcaaggccgtcgagaaggccatgaagacgaaggcctactccaaggagggcctctccgccgccgccaagctcgaccccagagagcaagccaaggccgaggccagcgagttcctgagcaacaccgtcgacacgctcgagcagcagatcgagtccatggagaccgagtgcgagtcgatacaggccaccatgaagaagggcaagagcgcctcggcgaaggctgagaagatcgccaagatcgaggccgtcatcgagacacacaagtggcatcagggcaagattgagttgatacgccgggcgctcgaaaacgactccctcgatgtagaccagatcaaggatgtccgtgacggtatttcatactacgtagcagagggtatgaacgacgagtacatcgacgacgacgccctctacgacgaactcgacctgcaagaagaggaggatgctttcggcatgaatcaagagaacgacaagggctcgtcccaagatacacagtcggtacaggaagagaaggaacccatcgagccagagtcgcggcctggcagcctgccaggcaagacaagaagcgctatggacccggctgccagacggccttcaggacaactcaagtcgccgctgccaaccttggctacattacatacacctctctccaacgttactaacaatacctctgcggccgccagctctagtatgaagccagcatcattaccccaacggcccccaggtgaaggcctcaagtacgcttctgccgcagctgcagcagcgaacaatgtgggcattggcccattaccgccgcctccaggtgtatctccagtcgttgcttccgtcggtatctcgcccttgccgcccgcagcagctccgttgcgagccagtgctgccaattcccctagtacggcatctgtccaaccagctcgctcagactcgcgaaccgggagcatacccgtttccgaacccagatcagcagatccagctactagtgtacccagctccacgaggaaatcggccaaagcggacaaaggagcgactaaagcgccttctgctgctgctacggagccgtcggaatcgtccagagtaccatattccaatggcgcctctaatggagccagcgccatggaagaagggaaagaagaagaagagtctatctttcatctccccgcggcattacaagatttggtcgactcatatgaagcagcgaagaaacgaccattggcagtcaattcaggcccatatctgcgaatgctggcagcttcgcaaagtaacattaccaaccacatggatccaggcgatgcagagcccacgcgaacgcatcgcccggagatgcggtaccattcggaagctgggtacccccaagaatcgttgccaattcttgaagaccctcgcctgtattcgcgtatagagccagacacgctgttttacgtattctactacaaacaaggatcttatcagcagtatgtggctgccaaagccctgaaggatcagagctggcgctttcacaagcagtaccagacgtggtttcagcgacacgaagaacctaaaaacatcaccgaagaattcgagcaaggaacctatcgattcttcgattacgagtctacctggatgaaccgcagaaaggcagactttaggttcgcttacagatatcttgaggatgaggtttgatttgcttccacttgctcgcttgtgccgcaataattaggtgcgaatttgctctgctcgaagaatggttcggcgtacacgtgaatgatcactaatttcggagatatgcaatcgctttaacttgtaggagtaaaatttggcccaaaaaggagacggtaccgatggttttatgagatgttacgataatgtcggtacaaagctgccactcgatgctggcatgatatcccttgcttgacccgagtcctaggactcaggtcgtcatgtatgtatgcagaggtatccacgaggaagaacttacccgccagtatctgttcgcccgtctatccaggtagcgaggtagcaatggacagaaattatgaagaagatcacattgcttaatttgagctttgtgcgaaacctccggtctattatgtgctcaccgcatttccagctgaatatgcatgcgtaacactgcatttggatctg

SEQ ID NO: 16360 - DNA, 750 bp, Muscodor strobelii
  misc_feature: SGI cDNA ID NO. 565439
  misc_feature: Encodes the peptide sequence at SEQ ID NO 16361
atgtccttcccacaaaccctctggggccaaacttccttcggcccctccctcctgcaaacccgtcgcgaaacaatccaaaccacgacaatacgcacccaacttgccaaactccgcgagacaggccaatacgagtgcttcaacctgaaatggcagccgatctacgacgataaatccagatggccgagcccgccgacggtgtactgggatagtgacgtggcgaagtggatcgagggcgcttgttattgtttgggagaaagttatgataaggagattgatgatgcggtgaaagagcttgtggagatgattagaggagcgcaggaggagggcgggtatttggatgtttattttcaggtcattgaacctgataatcggtggacgaatttgagggatcagcatgagttgtacaatgccgggcatatgattgaggctgcgctcgctcatagacagtattataagaatgatctgcttatggaggtcatggagaagtacgttaagcttattagatctgtgtttggaccaggcgaggaccaacgacatggctatccggggcacccagagattgaacttgcgctcgcgcgtatgtcctccgcgacgggaaaccaggatgcgtatgatttagcgcagtatttcattgaggagcgcggaaaccctacgggtcaggacggcatacattattatgattgggagcgtcgccaaagaggtgacgatccatggaagcgcccagactgctatccaacccatatcaagtga

SEQ ID NO: 16361 - protein, 249 aa, Muscodor strobelii
  misc_feature: SGI Peptide ID NO. 565439
  misc_feature (68)..(237): Pfam Id: PF07944 Pfam Desc: glycosyl hydrolase of function (DUF1680)
  misc_feature (1)..(247): NCBI GI: 256734997 Blast Desc: NECHADRAFT_89872 [Nectria haematococca mpVI 77-13-4]
  misc_feature (1)..(247): NCBI GI: 256722952 Blast Desc: NECHADRAFT_86976 [Nectria haematococca mpVI 77-13-4]
  misc_feature (1)..(247): NCBI GI: 46111909 Blast Desc: FG02836.1 [Gibberella zeae PH-1]
  misc_feature (1)..(246): NCBI GI: 146322539 Blast Desc: DUF1680 domain protein [Aspergillus fumigatus Af293] gi|129557718|gb|EAL90220.2| DUF1680 domain protein [Aspergillus fumigatus Af293] gi|159131014|gb|EDP56127.1| conserved fumigatus
  misc_feature (1)..(246): NCBI GI: 119496201 Blast Desc: NFIA_016730 [Neosartorya fischeri NRRL 181] gi|119413036|gb|EAW22977.1| conserved [Neosartorya fischeri NRRL 181]
  misc_feature (1)..(246): NCBI GI: 121702201 Blast Desc: DUF1680 domain protein [Aspergillus clavatus NRRL 1] gi|119397508|gb|EAW07939.1| DUF1680 domain protein [Aspergillus clavatus NRRL 1]
  misc_feature (1)..(194): NCBI GI: 154316241 Blast Desc: BC1G_03706 [Botryotinia fuckeliana B05.10] gi|150846492|gb|EDN21685.1| BC1G_03706 [Botryotinia fuckeliana B05.10]
  misc_feature (21)..(237): NCBI GI: 89067251 Blast Desc: OG2516_10441 [Oceanicola granulosus HTCC2516] gi|89046820|gb|EAR52874.1| OG2516_10441 [Oceanicola granulosus HTCC2516]
  misc_feature (13)..(237): NCBI GI: 16119312 Blast Desc: Atu5082 [Agrobacterium tumefaciens str. C58] gi|15161824|gb|AAK90459.1| conserved [Agrobacterium tumefaciens str. C58]
  misc_feature (21)..(234): NCBI GI: 229822407 Blast Desc: protein of function DUF1680 [Beutenbergia cavernae DSM 12333] gi|229568320|gb|ACQ82171.1| protein of function DUF1680 [Beutenbergia cavernae DSM 12333]
MSFPQTLWGQTSFGPSLLQTRRETIQTTTIRTQLAKLRETGQYECFNLKWQPIYDDKSRWPSPPTVYWDSDVAKWIEGACYCLGESYDKEIDDAVKELVEMIRGAQEEGGYLDVYFQVIEPDNRWTNLRDQHELYNAGHMIEAALAHRQYYKNDLLMEVMEKYVKLIRSVFGPGEDQRHGYPGHPEIELALARMSSATGNQDAYDLAQYFIEERGNPTGQDGIHYYDWERRQRGDDPWKRPDCYPTHIK

SEQ ID NO: 16362 - DNA, 1815 bp, Muscodor strobelii
  misc_feature: SGI EST ID NO. CUFF.38663.0
  misc_feature: Variant of the nucleotide sequence at SEQ ID NO 16360
gaggtcatggagaagtacgttaagcttattagatctgtgtttggaccaggcgaggaccaacgacatggctatccggggcacccagagattgaacttgcgctcgcgcgtatgtcctccgcgacgggaaaccaggatgcgtatgatttagcgcagtatttcattgaggagcgcggaaaccctacgggtcaggacggcagtaagtgtcaacgcggaatgaaagaattatgggcgcaacatattgacgaaaattttgtagtacattattatgattgggagcgtcgccaaagaggtgacgatccatggaagcgcccagactgctatccaacccatatcaagtgagatgttcgtttttctcagctgcgtgtcgctaacatgtgatagcgactggtacaatcaagcacatttgcccattctccaacagcagtccatcgaaggccacgcggtcagagcgttgtatctatataccggagtggcaaatatattgagcctaggcgagctaggcagtcgatcatatgcaggaagagacaaatatttcgacgccattcgtgcgctttgggacaacatggtcgataagaagatgtcgttgaccggtggcattggggcgatgatgcagtgggagggattcggcatcgattatttcctgccccagggctcggatgacggcggatgctacaatgagacatgcgcctcgattggagttatccttctcgctgaaagactcttacatctggacttgaactcgagatatgcagacataatggaactgtgtctgtacaatgctgttatgactggagtgagccttaacggaaaagggtttacgtacgtgaatcagcttgcaagctctgaaaaggataagagtattcgtgcagagtggtttgacacgtcttgctgtccaccgaatgtggcccggttattcggtagtctgggtggttacttgtgggattacggtggcaagggtgaagatatctttgtcaatgtgcacttatacaccaccgccgaagtatcattccaagtcgaggatcagaatgtggttttcgagcaaaagtctaattggccttgggaaggcaacattctcttccaactggaggcaccatcatcagcaaagaccaccatcagactccgaataccatcgtgggccaagaaaggctttacactcactccgacattgaaatcagcgaggatcgagaatggttacttagttcttcccccagcatacatatcaaagaacaagtctttcaccatagatattcacgggtttacaccgagatttattgcgcctcacccctacacgaatcagcataccataaccctagcgcgcgggcccttgatctactgcgtagaagacgtcgataacccttgggagcggaatcattttagagacgttggcatttcccttggcgctgacgtggccgaggaagagagtacaatgggagagaaggaagaatactacgtcggactacatactgtcggctgggtccgctcgatggaacagtgggcgcaggccgactccgggctacaacccggttcgagtgtcacggaagcggtggagactacgaagacggaaagggaactgtcattcattccttactatatacgcgccaatcgtggcggaaatggtcacatgagagtagggttactacgggactaatacatgtaaatggtcggcctgccggtagtcatttcatcatctgtgcaaaacaactgaatggtagctgccacacctgcagattgaccatcgacgccaatataggtggtccagaccatcacagcgaggaagactgtgccgatcccgaaccattgatttggcttctctcg

SEQ ID NO: 16363 - DNA, 1086 bp, Muscodor strobelii
  misc_feature: SGI cDNA ID NO. 565440
  misc_feature: Encodes the peptide sequence at SEQ ID NO 16364
atggtcgataagaagatgtcgttgaccggtggcattggggcgatgatgcagtgggagggattcggcatcgattatttcctgccccagggctcggatgacggcggatgctacaatgagacatgcgcctcgattggagttatccttctcgctgaaagactcttacatctggacttgaactcgagatatgcagacataatggaactgtgtctgtacaatgctgttatgactggagtgagccttaacggaaaagggtttacgtacgtgaatcagcttgcaagctctgaaaaggataagagtattcgtgcagagtggtttgacacgtcttgctgtccaccgaatgtggcccggttattcggtagtctgggtggttacttgtgggattacggtggcaagggtgaagatatctttgtcaatgtgcacttatacaccaccgccgaagtatcattccaagtcgaggatcagaatgtggttttcgagcaaaagtctaattggccttgggaaggcaacattctcttccaactggaggcaccatcatcagcaaagaccaccatcagactccgaataccatcgtgggccaagaaaggctttacactcactccgacattgaaatcagcgaggatcgagaatggttacttagttcttcccccagcatacatatcaaagaacaagtctttcaccatagatattcacgggtttacaccgagatttattgcgcctcacccctacacgaatcagcataccataaccctagcgcgcgggcccttgatctactgcgtagaagacgtcgataacccttgggagcggaatcattttagagacgttggcatttcccttggcgctgacgtggccgaggaagagagtacaatgggagagaaggaagaatactacgtcggactacatactgtcggctgggtccgctcgatggaacagtgggcgcaggccgactccgggctacaacccggttcgagtgtcacggaagcggtggagactacgaagacggaaagggaactgtcattcattccttactatatacgcgccaatcgtggcggaaatggtcacatgagagtagggttactacgggactaa

SEQ ID NO: 16364 - protein, 361 aa, Muscodor strobelii
  misc_feature: SGI Peptide ID NO. 565440
  misc_feature (1)..(199): Pfam Id: PF07944 Pfam Desc: glycosyl hydrolase of function (DUF1680)
  misc_feature (1)..(360): NCBI GI: 256722952 Blast Desc: NECHADRAFT_86976 [Nectria haematococca mpVI 77-13-4]
  misc_feature (1)..(359): NCBI GI: 256734997 Blast Desc: NECHADRAFT_89872 [Nectria haematococca mpVI 77-13-4]
  misc_feature (1)..(360): NCBI GI: 46111909 Blast Desc: FG02836.1 [Gibberella zeae PH-1]
  misc_feature (1)..(358): NCBI GI: 119496201 Blast Desc: NFIA_016730 [Neosartorya fischeri NRRL 181] gi|119413036|gb|EAW22977.1| conserved [Neosartorya fischeri NRRL 181]
  misc_feature (1)..(358): NCBI GI: 146322539 Blast Desc: DUF1680 domain protein [Aspergillus fumigatus Af293] gi|129557718|gb|EAL90220.2| DUF1680 domain protein [Aspergillus fumigatus Af293] gi|159131014|gb|EDP56127.1| conserved fumigatus
  misc_feature (1)..(358): NCBI GI: 121702201 Blast Desc: DUF1680 domain protein [Aspergillus clavatus NRRL 1] gi|119397508|gb|EAW07939.1| DUF1680 domain protein [Aspergillus clavatus NRRL 1]
  misc_feature (2)..(356): NCBI GI: 115400067 Blast Desc: conserved [Aspergillus terreus NIH2624] gi|114191288|gb|EAU32988.1| conserved [Aspergillus terreus NIH2624]
  misc_feature (1)..(356): NCBI GI: 67538270 Blast Desc: AN5305.2 [Aspergillus nidulans FGSC A4] gi|40743275|gb|EAA62465.1| AN5305.2 [Aspergillus nidulans FGSC A4] gi|259485256|tpe|CBF82133.1| TPA: DUF1680 domain protein FGSC
  misc_feature (2)..(360): NCBI GI: 242768659 Blast Desc: DUF1680 domain protein [Talaromyces stipitatus ATCC 10500] gi|218724810|gb|EED24227.1| DUF1680 domain protein [Talaromyces stipitatus ATCC 10500]
  misc_feature (1)..(356): NCBI GI: 256721360 Blast Desc: NECHADRAFT_44741 [Nectria haematococca mpVI 77-13-4]
MVDKKMSLTGGIGAMMQWEGFGIDYFLPQGSDDGGCYNETCASIGVILLAERLLHLDLNSRYADIMELCLYNAVMTGVSLNGKGFTYVNQLASSEKDKSIRAEWFDTSCCPPNVARLFGSLGGYLWDYGGKGEDIFVNVHLYTTAEVSFQVEDQNVVFEQKSNWPWEGNILFQLEAPSSAKTTIRLRIPSWAKKGFTLTPTLKSARIENGYLVLPPAYISKNKSFTIDIHGFTPRFIAPHPYTNQHTITLARGPLIYCVEDVDNPWERNHFRDVGISLGADVAEEESTMGEKEEYYVGLHTVGWVRSMEQWAQADSGLQPGSSVTEAVETTKTERELSFIPYYIRANRGGNGHMRVGLLRD

SEQ ID NO: 16365 - DNA, 1815 bp, Muscodor strobelii; identical to SEQ ID NO: 16362
  misc_feature: SGI EST ID NO. CUFF.38663.0
  misc_feature: Variant of the nucleotide sequence at SEQ ID NO 16363

SEQ ID NO: 16366 - DNA, 870 bp, Muscodor strobelii
  misc_feature: SGI cDNA ID NO. 565441
  misc_feature: Encodes the peptide sequence at SEQ ID NO 16367
atgagctactacaaccatggttacgatgcctcgggctatagacgtcgagactcgtcgaacagatcgtatggcgagcccatgacacggggtctgtccgaagccagcagtgcatacagtgatctatcggtttcaactcctgcttcaaccttgaattatgacccatacaataatgtcgtgtcaccgatatcgcctctgactgactacaactgccaatatgatcccacggttccgtacgatccctcgatgtcagattacagcacataccacacggttcaagatttttcaagcgtctcaagtgatgaattggcctggcttaaatactataactatatcgccgatgtggaacagggacagtctccatattataaactgaagcaagaatacagcaacaatgaccagctgccccagatcagaccactcgaggacatgactccgcgatcccaaaaagccccaaacttgttctactgcctgtttgaaggctgtggttcccagttcaagcgccacgccgacttggaacgtcattgcgaacacaagcataagccagtggaagaaaaggccaagttcccctgtgataggaagaagtgcacgcgcagcaaagatcctttccaccgccgagaccactgccgggatcactaccgcgactaccacaaggaggacttaatgcggcgcagttcagtcgcgagggaaagccccagctggtggaatgagcgcgatattaacctgaagtggtggcgttctcaaaccaacgacagcaaagtctactcaggacatcgattctctccaggacttctccacgtttcaattttggtcttgcaatcattactcggcattctcgaaaatgtcggctccctgcgttgcggctgggcttag

SEQ ID NO: 16367 - protein, 289 aa, Muscodor strobelii
  misc_feature: SGI Peptide ID NO. 565441
  misc_feature (81)..(254): NCBI GI: 156055266 Blast Desc: SS1G_04984 [Sclerotinia sclerotiorum 1980] gi|154702769|gb|EDO02508.1| SS1G_04984 [Sclerotinia sclerotiorum 1980]
  misc_feature (99)..(254): NCBI GI: 154294776 Blast Desc: BC1G_13603 [Botryotinia fuckeliana B05.10] gi|150844561|gb|EDN19754.1| BC1G_13603 [Botryotinia fuckeliana B05.10]
  misc_feature (118)..(254): NCBI GI: 46137669 Blast Desc: FG10350.1 [Gibberella zeae PH-1]
  misc_feature (155)..(256): NCBI GI: 256735665 Blast Desc: NECHADRAFT_75747 [Nectria haematococca mpVI 77-13-4]
  misc_feature (79)..(245): NCBI GI: 171691208 Blast Desc: protein product [Podospora anserina] gi|170945552|emb|CAP71664.1| protein product [Podospora anserina]
  misc_feature (156)..(255): NCBI GI: 256732253 Blast Desc: NECHADRAFT_80671 [Nectria haematococca mpVI 77-13-4]
  misc_feature (154)..(255): NCBI GI: 116201619 Blast Desc: CHGG_08694 [Chaetomium globosum CBS 148.51] gi|88177212|gb|EAQ84680.1| CHGG_08694 [Chaetomium globosum CBS 148.51]
  misc_feature (104)..(245): NCBI GI: 261351955 Blast Desc: conserved [Verticillium albo-atrum VaMs.102]
  misc_feature (156)..(245): NCBI GI: 171678015 Blast Desc: protein product [Podospora anserina] gi|170937076|emb|CAP61735.1| protein product [Podospora anserina]
  misc_feature (135)..(244): NCBI GI: 145612639 Blast Desc: MGG_07269 [Magnaporthe grisea 70-15] gi|145019773|gb|EDK04001.1| MGG_07269 [Magnaporthe grisea 70-15]
MSYYNHGYDASGYRRRDSSNRSYGEPMTRGLSEASSAYSDLSVSTPASTLNYDPYNNVVSPISPLTDYNCQYDPTVPYDPSMSDYSTYHTVQDFSSVSSDELAWLKYYNYIADVEQGQSPYYKLKQEYSNNDQLPQIRPLEDMTPRSQKAPNLFYCLFEGCGSQFKRHADLERHCEHKHKPVEEKAKFPCDRKKCTRSKDPFHRRDHCRDHYRDYHKEDLMRRSSVARESPSWWNERDINLKWWRSQTNDSKVYSGHRFSPGLLHVSILVLQSLLGILENVGSLRCGWA

SEQ ID NO: 16368 - DNA, 6014 bp, Muscodor strobelii
  misc_feature: SGI EST ID NO. CUFF.38699.0
  misc_feature: Variant of the nucleotide sequence at SEQ ID NO 16366
atttcgcaccgatcttgtcccgacgacgttgattcgagaaacgtggcaagcttgttgcgagttcaacctcgtttaatctatgcagcgctgcccaattgctccgacataggaaatgcatgaggccttacgcgaagtatatgaatgcctcagatacggtattattatgcacatgtgtggcgatgataactgcgtacctcaccgaagcttttgctcgacccttagctcgatgtaaaacggttcagagttgtacaaacgtatttgtctttggaaagcgcggcaaactccccgagatatattgagcttacggactcactaaaactgttgcccgaggcggacaggcgcatttttgcgatgctgcagggtaacaagcaaggcgcgaatgcgtcacgagccaagcccggacaaaatcaattggcctgccgacctcaaaaagaaatgatgagaaagacctgaatcccaaggaaaaagattattcggcaagatttccggacctggtccattcactagacgcccgaggttccagacaagcgactctggcttacaagcttggggttcgtcggtatcgggatgtgagctcggtgaaggtatggagctgctgccattcgccatacgctacggttagaattaggcgctccaaaaatatttctggaaattcgatctgagtctctctaattgaggccctttctgagacgctccgcggctagattggctatatacaaaggcagggctttctcagcgtgccaagatcgtcactgatcgtcattgtgtcgcctcactttcaggggtttctcgttatcaatatgattgtcgctgccaaatgccatcccaattcaccaagacttacgcgttggagtaaatcagacacggcatttttcaattttgagatgctgcaaattgtacgacatgataggaacggcttcctgagtgccacacaccaagtgcgcgctgcaggaccacgacatataccagatgtttgactctgcttcgctgcgcccatgaaagcccgttcacacttgaaggcaaccgcagcggttcgcgatccaggcgaggcgattgattaggcgtaatatgagcaaacgacaagcttatcgagcagccaccacaagcctcgctgtttttctccaacaaagcgatgtcctattacgtcgggtggccacgggctgtgccgtatgatcacatgcagcttggtaagcttgagaggccagttgtggaaacgaaatggccgcaagttcatgggcatgagccgagcctgttcgttttagacaacgaatcgtgcatcgactcacgttcgtgagtctgcataagctactcattgttatcatgtcgaagtaacgaatgcttgttaccgttcctgagcgcttggcacccagtacaacgcgctggcgcccctcggaaacatgctttgggccgattcgacgtcgagatgatttctagaccttgcggtctgacgattcacgtcgttattgctccaagaaaaaaagactagaacttgccatacgtagcaaagtagtccaatgaccacaaatctcctcacacctagaattgcctaccttgctcgcgcatcacacatactcgcacattggaaccctatcgattatcgtcagccccatcaaccgatcaaatggcaaattgctcccaatgaagggctttgcggacttgacttcatgtcagcgtggctccgtatcacgttgtttcggattgggccttgatcttccaacctgaaattgagattttagtcctgcaaataaaggctcacctttctcctcaccgagtaaatcagccggcaggcatctgaggtaaagcgtggcttctggaacagatcgaagtttctacgaactaagccttattttgacataccaaatgaatctcagcccacccgcgtatgtcctctcatatgcaggcttagtgtggctcggcggctgcctaggtatcatgcacgccattaaacaaggtacgtatttaaaaggcaatgtaccccagctcattgaataatttgatagatatcaaacgtagattggctatctgtacgtttcatgatgcgcactttctagtcgtgtgtatgtagtcccggaagcgacccggccaatgtgcaaaattggtgaggccttattagtcacgacagatgattgcaagcctcacatctggactctcgatttgagcctcagtcctcaagtggaccgaggggctatgtgacaagaacacagagctattggatagtcgagccatgcttgaaatggttgcgtatgacttaattgacgacaatctcccacaaacatatagttatcctcttgtgtcactcacacctttccctttctctagtttggaccttcagaacacacacacaacgttcaaatcccgcttcgctccagatgctacgagtttgcctttgctcgctcaacctatgtacccatttcccacactgcgattgctaacctattgctcggaaatcggcgactaggagggcacgacaaacctgtataacttggggtggatgtcccctactattttgcggaaactccggatccaagaccggtagtttctctcgttgtgtatctggtctactacgggctgaactctggatttcacgattcgtctgactatgagctactacaaccatggttacgatgcctcgggctatagacgtcgagactcgtcgaacagatcgtatggcgagcccatgacacggggtctgtccgaagccagcagtgcatacagtgatctatcggtttcaactcctgcttcaaccttgaattatgacccatacaataatgtcgtgtcaccgatatcgcctctgactgactacaactgccaatatgatcccacggttccgtacgatccctcgatgtcagattacagcacataccacacggttcaagatttttcaagcgtctcaagtgatgaattggcctggcttaaatactataactatatcgccgatgtggaacagggacagtctccatattataaactgaagcaagaatacagcaacaatgaccagctgccccagatcagaccactcgaggacatgactccgcgatcccaaaaagccccaaacttgttctactgcctgtttgaaggctgtggttcccagttcaagcgccacgccgacttggaacgtcattgcgaacacaagcataagccagtggaagaaaaggccaagttcccctgtgataggaagaagtgcacgcgcagcaaagatcctttccaccgccgagaccactgccgggatcactaccgcgactaccacaaggaggacttaatgcggcgcagttcagtcgcgagggaaagccccagctggtggaatgagcgcgatattaacctgaagtggtggcggtgcgcacgctgtctccaacgcgttgatgttgacacccatggttacaactgcaacaaatgcaatacccactgcgagcaggagaggcagcattggaggaatcaattttacagatgatgggttgctcagctctatcttatgaggcttactcgagagagctgtcctcctcagcttaagacttacgatccgcgttttacaactgagtggcaaacaactagactcgaagtctaatacactcacgattattctcaccgtcttttgttctcctttttgtgtctttccagttctcaaaccaacgacagcaaagtctactcaggacatcgattctctccaggacttctccacgtttcaattttggtcttgcaatcattactcggcattctcgaaaatgtcggctccctgcgttgcggctgggcttagctgcatgcatattcatgtcgcataggtgccctcttgaacgtcaggaagcgcccctgcgccgccaccatacgtcaaaccatcgattggtagccttcactaatgttcgctttgagttcgagacgggtggcttagatcctgcacgtttttgcactttgggcttggcgtccctggttcctctattcccttcaatatcggcatacaatcagcagagatcttatctgaaggatcgacgaggcctcattagcacccttttccatacctgagttaggctcacacgaacaagaagccaatgggtagcggcaccccgagtccttgggcagcattgcatcgtctcaagaccgtgttcttgtcatccaatgtcgtcctacacacaccctgctgatcaccctatgctcgcacatggcgccaagctacacttcatgattttattttcccttcaattctgacttgtagttacttattccccggttcattttcatcgaagcttatcacaatttgtccaagatagaggtctattcctccaagtgcagtagagaataagctctcggacagttgttctccgcacgagtgcgcttctaatctgtgccaccgaacgaggcgcagacttgagacgcagctgaatgacgtgtaagagagcaagtggaaaaaataccaccagacgcgctatagacggataaacggagataaaatgccactggactgggatagacctctgtttccttttggctttactactaccccgcaacgttatgattattcgacttctgtcatgtttcttgatgcgcggagttggattaaattggggggcgttgatttgacacaaggcgttgctgtctgaattgcacctcattgatattcccaccttgcactttcattccttgcggtaggctggggacggttgatcggcgttcattgggttggttatttcctttacgttgactaatctgcatgtctgccgatgtagagatacctgcatgcatagacacatcaggcagacatatgcgcatgcatgtgcaggaaattctgagagcaaacctgcagcatacaggttgaggctcaatgtggagttatctcggcgaggccacctcatcatttgtcagactctaggactatgtaagagttcggacgaaagtctacggatgtaggctatggaagaatggcaagaggatggcgatgatgctcaggtacccatgacggccaccaatagcttctgacattgtaacgttagtattatgcttaattgaactttggtgcccaacgtagccatagtctggttctctaccaagttgcaccctcgtgactcacacatgatatctcggtgccgacaagcgaaatagcggtaaggctactcatcacttagacatttgaaggactactaattgtactttcactacatgttctgggtgattgtgtgctgtattgtccgtctctatctagatgatcgacgccggtgagaattggccttagagatctgcctgcaaactgattctgagagactgagtttattgattgtatttacacctttgaagtacagaaactatgggcaactgaaaggcaatatttgatgttatagttttgggacccatgtatatgaacctctgcatagagtgacacgccctacacgccctacacccaaatctggttgacaattatccacagggaaggtcaatgttcaatacaacgtcgtaaaccgcatcagagggcttgccaccattgccttgcactgcgccgacttcgcttttggcgttaccgaagtatttctcaaggcatgcgtcattcaaaggtccaagttgatcaatgatcttcccgtcctttcgcagaaaagcaagatcgattatgaacgtcaacttcccagctatctcagctaatcgacgaactgctgcttgatcagacttcgaaacttcggtaatcctccaaaattcctcccagaagacttcgatgaagttctcgtgctcctcgtagaatacagaaccatctgccgtgagcgatgcaagtgagtgcaagacttggaggtccgccccgaatggacgaaccgaggcagcagaccaattctgtatacccgtgatggcgaaggtactttcattgagtaggatattgtcccaggatagatcattatgtgccaaggcttttggccatatcccgtacaattctggaagactggcttctgcttctgtaaaaaagtcgttcagatatggatacttgccgcattccttcaagatggctagtctatttgtcgtttcttcctgatcattaacaatttgtg

SEQ ID NO: 16369 - DNA, 1203 bp, Muscodor strobelii
  misc_feature: SGI cDNA ID NO. 565442
  misc_feature: Encodes the peptide sequence at SEQ ID NO 16370
atgggtcaagacatgagccaacacagcgaagacgagatcgaacgcgtcgaggaacctccgcagacggaatcgctagagcagtgtgcttcagcacaggaactttcagagcgagagctctcagagcaggacttctcaagtcaggaaccgtcagaggaaaattcgccagaaatcctaagacgcgaatgcgaatggctcgcatgtgacatcgtcggcggtggcacaatcatagacggaatcgagcagcaggaatcactaagctacaccgtccgacagtatacagacacgactgtcttgtttcgccgtgacgaagattatctctctttcctcaaaatcataagactagctaaacactaccacggtgaactcgtaccggattatgcccattccggctatgttagagaagacgaagatgcgatctccatctacaagatgccacgccttcccggaatatcttggtcagatatccgccctttgacggcgagtttcggttttgacgagtgggttaaatgtaggatcatgtatttagatctggctgcgtacttcgctagggtttacgaatatcctattgggtgggggcaaggatgggattcacaaattgttaatgatcaggaagaaacgacaaatagactagccatcttgaaggaatgcggcaagtatccatatctgaacgacttttttacagaagcagaagccagtcttccagaattgtacgggatatggccaaaagccttggcacataatgatctatcctgggacaatatcctactcaatgaaagtaccttcgccatcacgggtatacagaattggtctgctgcctcggttcgtccattcggggcggacctccaagtcttgcactcacttgcatcgctcacggcagatggttctgtattctacgaggagcacgagaacttcatcgaagtcttctgggaggaattttggaggattaccgaagtttcgaagtctgatcaagcagcagttcgtcgattagctgagatagctgggaagttgacgttcataatcgatcttgcttttctgcgaaaggacgggaagatcattgatcaacttggacctttgaatgacgcatgccttgagaaatacttcggtaacgccaaaagcgaagtcggcgcagtgcaaggcaatggtggcaagccctctgatgcggtttacgacgttgtattgaacattgaccttccctgtggataa

SEQ ID NO: 16370 - protein, 400 aa, Muscodor strobelii
  misc_feature: SGI Peptide ID NO. 565442
  misc_feature (59)..(348): NCBI GI: 46117388 Blast Desc: FG04536.1 [Gibberella zeae PH-1]
  misc_feature (61)..(346): NCBI GI: 256734193 Blast Desc: NECHADRAFT_35375 [Nectria haematococca mpVI 77-13-4]
  misc_feature (59)..(347): NCBI GI: 261188586 Blast Desc: conserved [Ajellomyces dermatitidis SLH14081] gi|239593065|gb|EEQ75646.1| conserved [Ajellomyces dermatitidis SLH14081]
  misc_feature (59)..(336): NCBI GI: 238841929 Blast Desc: conserved [Microsporum canis CBS 113480]
  misc_feature (59)..(336): NCBI GI: 121714519 Blast Desc: conserved [Aspergillus clavatus NRRL 1] gi|119403024|gb|EAW13444.1| conserved [Aspergillus clavatus NRRL 1]
  misc_feature (144)..(347): NCBI GI: 225554416 Blast Desc: conserved [Ajellomyces capsulatus G186AR]
  misc_feature (59)..(336): NCBI GI: 239610103 Blast Desc: conserved [Ajellomyces dermatitidis ER-3]
  misc_feature (144)..(347): NCBI GI: 240273453 Blast Desc: conserved [Ajellomyces capsulatus H143]
  misc_feature (57)..(336): NCBI GI: 225555069 Blast Desc: conserved [Ajellomyces capsulatus G186AR]
  misc_feature (52)..(349): NCBI GI: 238845106 Blast Desc: conserved [Microsporum canis CBS 113480]
MGQDMSQHSEDEIERVEEPPQTESLEQCASAQELSERELSEQDFSSQEPSEENSPEILRRECEWLACDIVGGGTIIDGIEQQESLSYTVRQYTDTTVLFRRDEDYLSFLKIIRLAKHYHGELVPDYAHSGYVREDEDAISIYKMPRLPGISWSDIRPLTASFGFDEWVKCRIMYLDLAAYFARVYEYPIGWGQGWDSQIVNDQEETTNRLAILKECGKYPYLNDFFTEAEASLPELYGIWPKALAHNDLSWDNILLNESTFAITGIQNWSAASVRPFGADLQVLHSLASLTADGSVFYEEHENFIEVFWEEFWRITEVSKSDQAAVRRLAEIAGKLTFIIDLAFLRKDGKIIDQLGPLNDACLEKYFGNAKSEVGAVQGNGGKPSDAVYDVVLNIDLPCG

SEQ ID NO: 16371 - DNA, 738 bp, Muscodor strobelii
  misc_feature: SGI cDNA ID NO. 565443
  misc_feature: Encodes the peptide sequence at SEQ ID NO 16372
atgcctgtagagctccgcaagcgcaaagcgccgtcacctcctccgccacccgctaagaaaaggcaatccaaggtcgcaaaggccgcctcagctgtcaaagctgccgtcagtaagccagtcgagaagctcgctgaaaagcctgctactaccaatgggccgtccgcgtctaagaaacccgccgttggcgacatcatttccctagaaggctttggtggagaaattgagacgcacgacggcgccaagaccacgcttaaggcgcttgtcgacgaatccaaggctggtgtggtactcttcacgtatcccaaggctagcacccctggctgcactaagcaagtgtgcttcttccgagattcttatgatgatctcacaaaggatggattggctatctatgggctttccaaggacgcgggtaaggccaacaccacgttcaagaccaagcagaacctgcaatatcctctgctttgtgataccgctggtaccctaattgatgccattggactcaagaaggcgcccagtggtaccacccgtggtgtgttcgtagttgataaggccggtaaagttttgcttgctgaacctggatcacccgctggaactgtggaagcagtcaagaagctcgtagcagccggcaacacgtctgcagcgaaagatgagccggttgctgataagccggccgaggagttgaagccaacaaatggagaagcagccgaggagaagaaggcggatgaaaaggaagtttaa

SEQ ID NO: 16372 - protein, 245 aa, Muscodor strobelii
  misc_feature: SGI Peptide ID NO. 565443
  misc_feature (77)..(205): Pfam Id: PF08534 Pfam Desc: Redoxin
  misc_feature (61)..(190): Pfam Id: PF00578 Pfam Desc: AhpC/TSA family
  misc_feature (95)..(205): Pfam Id: PF08534 Pfam Desc: Redoxin
  misc_feature (1)..(225): NCBI GI: 242765699 Blast Desc: disrupter of telomere silencing protein Dot5, [Talaromyces stipitatus ATCC 10500] gi|218724223|gb|EED23640.1| disrupter of telomere silencing protein Dot5, [Talaromyces ATCC
  misc_feature (1)..(230): NCBI GI: 169604064 Blast Desc: SNOG_05041 [Phaeosphaeria nodorum SN15] gi|111066312|gb|EAT87432.1| SNOG_05041 [Phaeosphaeria nodorum SN15]
  misc_feature (1)..(242): NCBI GI: 212528712 Blast Desc: disrupter of telomere silencing protein Dot5, [Penicillium marneffei ATCC 18224] gi|210073911|gb|EEA27998.1| disrupter of telomere silencing protein Dot5, [Penicillium ATCC
  misc_feature (3)..(207): NCBI GI: 121706436 Blast Desc: disrupter of telomere silencing protein Dot5, [Aspergillus clavatus NRRL 1] gi|119399628|gb|EAW10054.1| disrupter of telomere silencing protein Dot5, [Aspergillus NRRL
  misc_feature (1)..(206): NCBI GI: 189196270 Blast Desc: merozoite capping protein-1 [Pyrenophora tritici-repentis Pt-1C-BFP] gi|187980352|gb|EDU46978.1| merozoite capping protein-1 [Pyrenophora tritici-repentis Pt-1C-BFP]
  misc_feature (3)..(210): NCBI GI: 119501340 Blast Desc: disrupter of telomere silencing protein Dot5, [Neosartorya fischeri NRRL 181] gi|119415592|gb|EAW25530.1| disrupter of telomere silencing protein Dot5, [Neosartorya NRRL
  misc_feature (3)..(210): NCBI GI: 146323683 Blast Desc: disrupter of telomere silencing protein Dot5 [Aspergillus fumigatus Af293] gi|129557588|gb|EBA27397.1| disrupter of telomere silencing protein Dot5, [Aspergillus Af293]
  misc_feature (61)..(206): NCBI GI: 256731839 Blast Desc: NECHADRAFT_8856 [Nectria haematococca mpVI 77-13-4]
  misc_feature (3)..(217): NCBI GI: 145256409 Blast Desc: An04g00120 [Aspergillus niger] gi|134058276|emb|CAK38467.1| protein product [Aspergillus niger]
  misc_feature (3)..(208): NCBI GI: 259482896 Blast Desc: TPA: disrupter of telomere silencing protein Dot5, (AFU_orthologue; AFUA_4G05915) [Aspergillus nidulans FGSC A4]
MPVELRKRKAPSPPPPPAKKRQSKVAKAASAVKAAVSKPVEKLAEKPATTNGPSASKKPAVGDIISLEGFGGEIETHDGAKTTLKALVDESKAGVVLFTYPKASTPGCTKQVCFFRDSYDDLTKDGLAIYGLSKDAGKANTTFKTKQNLQYPLLCDTAGTLIDAIGLKKAPSGTTRGVFVVDKAGKVLLAEPGSPAGTVEAVKKLVAAGNTSAAKDEPVADKPAEELKPTNGEAAEEKKADEKEV

SEQ ID NO: 16373 - DNA, 1487 bp, Muscodor strobelii
  misc_feature: SGI EST ID NO. CUFF.38730.0
  misc_feature: Variant of the nucleotide sequence at SEQ ID NO 16371
cgcacctcgacatgcacggaattgcgtatgattaacctcattagtccgctccttcagcgctggcagccgtggtctagccgccctttgtttgtcctgtacaccctagccatctgcggccatgtatcgaacccgcccaactttgcctgcgaggacttgcaacaccagtcggctggctggcgtgaatgcctataatgactatcatgttatttttggctggacgtgagatgagatagcgttgctcctgtgctacaatgcctaacaatttcgtgatcgagctaacctaaagcttcctactcctgctccaagtccattgccatccccttcctcgctcgcttgtgaaatagagtcccctgtagtcctaacaatattatgcttgtttactgcttcgcctgacatccgcgacgtgtggtcgacgtcctccctcccccatttctcatctattttttcatcgcatccaactctcatcactttcatctttcgcctcctcagtaatctgatatctgcggtcgcaattgacatatacaattcttcgatttctgctttgcactctctcgttccctcaccatgcctgtagagctccgcaagcgcaaagcgccgtcacctcctccgccacccgctaagaaaaggcaatccaaggtcgcaaaggccgcctcagctgtcaaagctgccgtcagtaagccagtcgagaagctcgctgaaaagcctgctactaccaatgggccgtccgcgtctaagaaacccgccgttggcgacatcatttccctagaaggctttggtggagaaattgagacgcacgacggcgccaagaccacgcttaaggcgcttgtcgacgaatccaaggctggtgtggtactcttcacgtatcccaaggctagcacccctggctgcactaagcaagtgtgcttcttccgagattcttatgatgatctcacaaaggatggattggctatctatgggctttccaaggacgcgggtaaggccaacaccacgttcaagaccaagcagaacctgcaatatcctctgctttgtgataccgctggtaccctaattgatgccattggactcaagaaggcgcccagtggtaccacccgtggtgtgttcgtagttgataaggccggtaaagttttgcttgctgaacctggatcacccgctggaactgtggaagcagtcaagaagctcgtagcagccggcaacacgtctgcagcgaaagatgagccggttgctgataagccggccgaggagttgaagccaacaaatggagaagcagccgaggagaagaaggcggatgaaaaggaagtttaagggaaaacaaacaggcttttgattattagcaacttcagagcgtgcggcggctcatcgtgtcttgtactatcatgtatgtatgcctcaaaatactgcgagtgtcttccccgccttctagattatgcaggctgctgtgtcccgtatgatgccttctcgacgaatgagccgtcatcatgatattatga

SEQ ID NO: 16374 - DNA, 2985 bp, Muscodor strobelii
  misc_feature: SGI cDNA ID NO. 565444
  misc_feature: Reduced expression when VOC is produced
  misc_feature: Encodes the peptide sequence at SEQ ID NO 16375
atggactggcagccggtacccgagtccttgagccagctggctgcttgtctcaaggactcgctcagcggcttcgacaagactgctcagaagcaagccgagcttgtaagatgcctctggtttctcccgtcccgtcccgccactgtgtctccatgcgccagcgcatctcccatgcgatcagacgaccatgccgctacccagttctgttccgcctctttcccctcgagtccagcactgacattcccacctgctatctctagatgctccacccaggctaaatcgtcgcccgacatcaacaactacctcgtctacctcttctcgagtccagatcccccagccggtctgcactactctcaggaggagtaccacatggtgcgctccgctgccgccctcatgttgaagaacaacgttagatctggctccaagtccattccctcggccagcctggacctgatcaagctgtctgtgcccatggtcctgcaggacaagaactctcagatgcgcaactttgctggcaacattgctaccgagctgatacgacatggcgggttgatgagctggccccagctgctccctgagctgctcaagatgctgagcaacgagactggccagatatcagacgagggccaggagggcgcaatggctgccatggccaagatctgcgaagacaacaccaaaatgctggagcgcgagctcaacggccagcgacccctcaacttcatccttcccaagcttatccaggcgaccaagagcccattgcccaaggtccgcgtcaacgccttgaccgccatcaatgtctacacgccccggaagtcgcaggccatgctcaattcaatcgacgatctactcgcaaatctcttctccctggccaacgatgccaactcagatgtgcgaagacaggtgtgcagggcgtttgtccagctcgtcgagacccgacccgacaagcttctgcctcacctgtctggcctcgtcgattacatcatcacacaacaacagtcgaatgacgaagaactggcctgcgacgccgccgagttctggcttgcggttggtgagcacgcaaacctgtgggaatcattaacaccatatatcggcaaaatcatccccgtgctcctcgagtgcatggtgtatagcgctgaagacatcgctcttctggaaaacgcgtccgatgacgaagacgaggaagatctcgcacaggatataaaaccccagttcgccaagaaagcctcggcaaggactgcaaacggagctgaggcctcagccgatcacgcagagaatggaaacgcctatcagaaactggcaagcatggatgatgacctagaagagggtgaaattgatgagctcgaggatggagacgatgctaacccagatgagcgctggacccttcgaaaatgctctgccgccgcactcgatgtctttgctagagacttccgcgatcccgtgttcgagaccatcctcccatatctgaccaagaatctcaaacacgacgagtggcccaaccgagaggcagctgtgctcgctcttggtgctgttgctgaaggctgcattgacgttgtcactcctcatttacccgaattagtctcatacctattctccctcttgaacgacacagaaccagtcgtaaggcaaattacgtgctggacgctcggtcggtattcctcctgggctgcccatctgtcggatcctggccaaaaacggcagtattttgagccgatgatggaaggcattcttacgaagatgttggatcgaaataagaaggtccaggaggcaggagcatctgcattcgctaacctcgaagaaaaggcaggaaaaggactcgaaccatacagtttacccatcatccagcaattcgtgagctgtttcggcaaatacaaagatcgaaacatggtcattctctatgactgtgtacagactctggccgagaacataggaccagtcttggcacgacctgatctagccaacgcgttgatgcctgctctgatagagcgatggcacaaagtcacggacgactcgcgtgagctattcccgttgttggaatgcctttcgtacgtgtccatggccatgaacgatgccttcacgccttatgctgaaccaatatttgttcgatgcgtccacatcatccacaagaatctcgaggcatctatgaacttcgccagcaatccggctctcgacgctccggacaaggacttcctggtcacaagcttagatctccttagttcggtcattcaagctctagacatggcgaaatcggcaaagctagtagaaaaccagcagccaaatttctttgagctaatgatcttgtgtatggaggacccaacagatgaagtccgtcaatcagcttatgcgcttctcggagattgcgcaaaatacgtctatgggcaactccgatcatcgttaccaagcgtcttccccgtcctcataaagcagctggatttggacagtattttggacgaagatattgacagtggcttcagtgttgtgaacaatgcctgttggtctgcgggcgaaatagccattcaacacaagtcggagatgaactcgtacgttccagacctatcccagcgctttgttgatatcatcacgaaccctgggattcccaaaggcgtgactgaaaatgcagccattgcgcttgggcgccttggacttggtagcgccgatctcttggcaccacatcttgcgggatttgcagaagacttccttacgtccatggatgaggtagacccctcagatgaaaaagctactgcgttccgagggtttacactcattgtcgagaagaaccccatggctatggaaaagtctcttttgcacttcttcacggccattgctcgatacagagacatgaggcttcgaagtcagaataagaacgatctccaggaagacttcctcaagaccattggcatatatcgccaaatcataccacaattcgaccaattccttggtcagttgcaaccccaggatcaagaagcgttgcgaaacaattattctttttga

SEQ ID NO: 16375 - protein, 994 aa, Muscodor strobelii
  misc_feature: SGI Peptide ID NO. 565444
  misc_feature (518)..(554): Pfam Id: PF02985 Pfam Desc: HEAT repeat
  misc_feature (477)..(513): Pfam Id: PF02985 Pfam Desc: HEAT repeat
  misc_feature (276)..(311): Pfam Id: PF02985 Pfam Desc: HEAT repeat
  misc_feature (1)..(994): NCBI GI: 116198323 Blast Desc: CHGG_07317 [Chaetomium globosum CBS 148.51] gi|88178596|gb|EAQ86064.1| CHGG_07317 [Chaetomium globosum CBS 148.51]
  misc_feature (1)..(994): NCBI GI: 256728506 Blast Desc: [Nectria haematococca mpVI 77-13-4]
  misc_feature (90)..(994): NCBI GI: 46109944 Blast Desc: FG01854.1 [Gibberella zeae PH-1]
  misc_feature (1)..(987): NCBI GI: 145605535 Blast Desc: MGG_09208 [Magnaporthe grisea 70-15] gi|145013355|gb|EDJ97996.1| MGG_09208 [Magnaporthe grisea 70-15]
  misc_feature (1)..(994): NCBI GI: 171692373 Blast Desc: protein product [Podospora anserina] gi|170946135|emb|CAP72936.1| protein product [Podospora anserina]
  misc_feature (1)..(994): NCBI GI: 85103198 Blast Desc: NCU03690 [Neurospora crassa OR74A] gi|16944560|emb|CAC18173.2| related to IMPORTIN BETA-2 SUBUNIT (TRANSPORTIN) [Neurospora crassa] gi|28923012|gb|EAA32230.1|
  misc_feature (89)..(994): NCBI GI: 261360887 Blast Desc: transportin-2 [Verticillium albo-atrum VaMs.102]
  misc_feature (1)..(993): NCBI GI: 224492468 Blast Desc: importin [Colletotrichum higginsianum]
  misc_feature (159)..(994): NCBI GI: 154299220 Blast Desc: BC1G_11788 [Botryotinia fuckeliana B05.10] gi|150857491|gb|EDN32683.1| BC1G_11788 [Botryotinia fuckeliana B05.10]
  misc_feature (1)..(992): NCBI GI: 169767212 Blast Desc: [Aspergillus oryzae RIB40] gi|83765932|dbj|BAE56075.1| protein product [Aspergillus oryzae]
  misc_feature: Useful for introducing or modulating the production of volatile compounds
MDWQPVPESLSQLAACLKDSLSGFDKTAQKQAELVRCLWFLPSRPATVSPCASASPMRSDDHAATQFCSASFPSSPALTFPPAISRCSTQAKSSPDINNYLVYLFSSPDPPAGLHYSQEEYHMVRSAAALMLKNNVRSGSKSIPSASLDLIKLSVPMVLQDKNSQMRNFAGNIATELIRHGGLMSWPQLLPELLKMLSNETGQISDEGQEGAMAAMAKICEDNTKMLERELNGQRPLNFILPKLIQATKSPLPKVRVNALTAINVYTPRKSQAMLNSIDDLLANLFSLANDANSDVRRQVCRAFVQLVETRPDKLLPHLSGLVDYIITQQQSNDEELACDAAEFWLAVGEHANLWESLTPYIGKIIPVLLECMVYSAEDIALLENASDDEDEEDLAQDIKPQFAKKASARTANGAEASADHAENGNAYQKLASMDDDLEEGEIDELEDGDDANPDERWTLRKCSAAALDVFARDFRDPVFETILPYLTKNLKHDEWPNREAAVLALGAVAEGCIDVVTPHLPELVSYLFSLLNDTEPVVRQITCWTLGRYSSWAAHLSDPGQKRQYFEPMMEGILTKMLDRNKKVQEAGASAFANLEEKAGKGLEPYSLPIIQQFVSCFGKYKDRNMVILYDCVQTLAENIGPVLARPDLANALMPALIERWHKVTDDSRELFPLLECLSYVSMAMNDAFTPYAEPIFVRCVHIIHKNLEASMNFASNPALDAPDKDFLVTSLDLLSSVIQALDMAKSAKLVENQQPNFFELMILCMEDPTDEVRQSAYALLGDCAKYVYGQLRSSLPSVFPVLIKQLDLDSILDEDIDSGFSVVNNACWSAGEIAIQHKSEMNSYVPDLSQRFVDIITNPGIPKGVTENAAIALGRLGLGSADLLAPHLAGFAEDFLTSMDEVDPSDEKATAFRGFTLIVEKNPMAMEKSLLHFFTAIARYRDMRLRSQNKNDLQEDFLKTIGIYRQIIPQFDQFLGQLQPQDQEALRNNYSF

SEQ ID NO: 16376 - DNA, 3897 bp, Muscodor strobelii
  misc_feature: SGI EST ID NO. CUFF.38826.0
  misc_feature: Variant of the nucleotide sequence at SEQ ID NO 16374
ggcgtgtgagacgcttgccgtcgctcggaacactaacgtacctatcattgaaggtccccataagtccgtcccattattagctggggccttaagtgaaggtcccctgctagcagccagaacccctccataccggttttactagcacccaccaagcccaccacagcaacacacaccagttattccgactcgcattgtgcctctgcggccactactaccaccaccttccgccgctcactccttcaagtcgtcgatgcagcctcctttcgcgacgtccccagcctgacttcgtcccttttctcgctgccctctgccgtatcgccagcaacacatcgtcgatacggcatcgcgagaactgacccttcaagcgctgtccctcgcccccccgctacccctcccatccgcatcctcgtccgcctcgaatccagatcccacccgtccacccgtccaccatggactggcagccggtacccgagtccttgagccagctggctgcttgtctcaaggactcgctcagcggcttcgacaagactgctcagaagcaagccgagcttatgctccacccaggctaaatcgtcgcccgacatcaacaactacctcgtctacctcttctcgagtccagatcccccagccggtctgcactactctcaggaggagtaccacatggtgcgctccgctgccgccctcatgttgaagaacaacgttagatctggctccaagtccattccctcggccagcctggacctgatcaagctgtctgtgcccatggtcctgcaggacaagaactctcagatgcgcaactttgctggcaacattgctaccgagctgatacgacatggcgggttgatgagctggccccagctgctccctgagctgctcaagatgctgagcaacgagactggccagatatcagacgagggccaggagggcgcaatggctgccatggccaagatctgcgaagacaacaccaaaatgctggagcgcgagctcaacggccagcgacccctcaacttcatccttcccaagcttatccaggcgaccaagagcccattgcccaaggtccgcgtcaacgccttgaccgccatcaatgtctacacgccccggaagtcgcaggccatgctcaattcaatcgacgatctactcgcaaatctcttctccctggccaacgatgccaactcagatgtgcgaagacaggtgtgcagggcgtttgtccagctcgtcgagacccgacccgacaagcttctgcctcacctgtctggcctcgtcgattacatcatcacacaacaacagtcgaatgacgaagaactggcctgcgacgccgccgagttctggcttgcggttggtgagcacgcaaacctgtgggaatcattaacaccatatatcggcaaaatcatccccgtgctcctcgagtgcatggtgtatagcgctgaagacatcgctcttctggaaaacgcgtccgatgacgaagacgaggaagatctcgcacaggatataaaaccccagttcgccaagaaagcctcggcaaggactgcaaacggagctgaggcctcagccgatcacgcagagaatggaaacgcctatcagaaactggcaagcatggatgatgacctagaagagggtgaaattgatgagctcgaggatggagacgatgctaacccagatgagcgctggacccttcgaaaatgctctgccgccgcactcgatgtctttgctagagacttccgcgatcccgtgttcgagaccatcctcccatatctgaccaagaatctcaaacacgacgagtggcccaaccgagaggcagctgtgctcgctcttggtgctgttgctgaaggctgcattgacgttgtcactcctcatttacccgaattagtctcatacctattctccctcttgaacgacacagaaccagtcgtaaggcaaattacgtgctggacgctcggtcggtattcctcctgggctgcccatctgtcggatcctggccaaaaacggcagtattttgagccgatgatggaaggcattcttacgaagatgttggatcgaaataagaaggtccaggaggcaggagcatctgcattcgctaacctcgaagaaaaggcaggaaaaggactcgaaccatacagtttacccatcatccagcaattcgtgagctgtttcggcaaatacaaagatcgaaacatggtcattctctatgactgtgtacagactctggccgagaacataggaccagtcttggcacgacctgatctagccaacgcgttgatgcctgctctgatagagcgatggcacaaagtcacggacgactcgcgtgagctattcccgttgttggaatgcctttcgtacgtgtccatggccatgaacgatgccttcacgccttatgctgaaccaatatttgttcgatgcgtccacatcatccacaagaatctcgaggcatctatgaacttcgccagcaatccggctctcgacgctccggacaaggacttcctggtcacaagcttagatctccttagttcggtcattcaagctctagacatggcgaaatcggcaaagctagtagaaaaccagcagccaaatttctttgagctaatgatcttgtgtatggaggacccaacagatgaagtccgtcaatcagcttatgcgcttctcggagattgcgcaaaatacgtctatgggcaactccgatcatcgttaccaagcgtcttccccgtcctcataaagcagctggatttggacagtattttggacgaagatattgacagtggcttcagtgttgtgaacaatgcctgttggtctgcgggcgaaatagccattcaacacaagtcggagatgaactcgtacgttccagacctatcccagcgctttgttgatatcatcacgaaccctgggattcccaaaggcgtgactgaaaatgcagccattgcgcttgggcgccttggacttggtagcgccgatctcttggcaccacatcttgcgggatttgcagaagacttccttacgtccatggatgaggtagacccctcagatgaaaaagctactgcgttccgagggtttacactcattgtcgagaagaaccccatggctatggaaaagtctcttttgcacttcttcacggccattgctcgatacagagacatgaggcttcgaagtcagaataagaacgatctccaggaagacttcctcaagaccattggcatatatcgccaaatcataccacaattcgaccaattccttggtcagttgcaaccccaggatcaagaagcgttgcgaaacaattattctttttgagcgaagcaagaccacaattcagatgagcagctagcttatgcatcagatacctatgtcgtaaggacgactagacctactgcgtttgcggagcacattcagttttccaagagctcgtgggaacacaccgtcggtaatcagccaacactcgttcattgtactaggtggacattcttcaaccagaccatacaatctatgcttgatggtgggatgtcaatcaagatggatttgcgcttatcgggctgccgttagagggctctttggggaagtacgttaggcgttggggtgatgagaggttaggaaggatatggtatggatcaactaataaccataatggtatgtccagggaaagatggatggcaaatgaagcaatgagtgaatgaatgggaagtcgttgacgttattgatatcacaaaagggattgcaacatggggaggaaaacaaaagaactcgcaatcaattacatcgcatttttagtagatagatcactttgatacctaggtagttagggaggaattcccgcttgcattcacagcggtctggggcttggtgataagcatgagcaatcagatgccatggaaatatgcagaatacccttttaaatgagtgaaagtatacaat

SEQ ID NO: 16377 - DNA, 795 bp, Muscodor strobelii
  misc_feature: SGI cDNA ID NO. 565445
  misc_feature: Encodes the peptide sequence at SEQ ID NO 16378
atggccacccagggcagggacacctcccgtcacgacgatcagccagcgaaattcaggcgtcacgttttttttagcctgacttaccttggaagattgataattcttatacccatccttacactgctcatcctcgtcttatactactcgcaaactagtggtgatactaaatttgagaattccatcgatggtaattctttcggcttgcgattcttaactaccggcgctggtgtcttagtgagctgggtgtggtcctctcttcacgacagtgtagcgattttgagcccttaccagcaactggtcagcaagccgcggcgtgcggaccaatccattctgctcgcgccaccaacaaatgctttctcaggcttcttctacgcaattcgtactcgtaatttgttctatacagtagtgtcttttactacaattctcacggaatccctcggcatattccttggcaacgtgccatttcagaatacagagacatggatagtagcacaagtgagcatctgggcttctgtaggaatactatcactgatggttgccgtcttactcgcgtcatttttcgtcacatggccacatatgccagtcaaaccggacactattgcgggtgccatgtactacatatgcgattcgtctatgcttgaacaattcaagggcctaagcacattgcggaggaaggaaagagatagcaaagtcattcaggctggttcgctgtacacattccgcgaagtcaaagacacttctgccagtcttcaaatgagcgtcgatatccatcatactgaggaccattattcttga

SEQ ID NO: 16378 - protein, 264 aa, Muscodor strobelii
  misc_feature: SGI Peptide ID NO. 565445
  misc_feature (16)..(255): NCBI GI: 171691236 Blast Desc: protein product [Podospora anserina] gi|170945566|emb|CAP71679.1| protein product [Podospora anserina]
  misc_feature (17)..(243): NCBI GI: 116195274 Blast Desc: CHGG_04235 [Chaetomium globosum CBS 148.51] gi|88180148|gb|EAQ87616.1| CHGG_04235 [Chaetomium globosum CBS 148.51]
  misc_feature (23)..(259): NCBI GI: 39945810 Blast Desc: MGG_08025 [Magnaporthe grisea 70-15] gi|145019260|gb|EDK03488.1| MGG_08025 [Magnaporthe grisea 70-15]
  misc_feature (19)..(255): NCBI GI: 46116628 Blast Desc: FG04156.1 [Gibberella zeae PH-1]
  misc_feature (28)..(244): NCBI GI: 171679900 Blast Desc: protein product [Podospora anserina] gi|170939576|emb|CAP64803.1| protein product [Podospora anserina]
  misc_feature (13)..(255): NCBI GI: 171678505 Blast Desc: protein product [Podospora anserina] gi|170937322|emb|CAP61980.1| protein product [Podospora anserina]
  misc_feature (17)..(255): NCBI GI: 256725755 Blast Desc: NECHADRAFT_43287 [Nectria haematococca mpVI 77-13-4]
  misc_feature (21)..(240): NCBI GI: 46123099 Blast Desc: FG05927.1 [Gibberella zeae PH-1]
  misc_feature (25)..(256): NCBI GI: 116181404 Blast Desc: CHGG_01330 [Chaetomium globosum CBS 148.51] gi|88185627|gb|EAQ93095.1| CHGG_01330 [Chaetomium globosum CBS 148.51]
  misc_feature (54)..(263): NCBI GI: 171695872 Blast Desc: protein product [Podospora anserina] gi|170948178|emb|CAP60342.1| protein product [Podospora anserina]
MATQGRDTSRHDDQPAKFRRHVFFSLTYLGRLIILIPILTLLILVLYYSQTSGDTKFENSIDGNSFGLRFLTTGAGVLVSWVWSSLHDSVAILSPYQQLVSKPRRADQSILLAPPTNAFSGFFYAIRTRNLFYTVVSFTTILTESLGIFLGNVPFQNTETWIVAQVSIWASVGILSLMVAVLLASFFVTWPHMPVKPDTIAGAMYYICDSSMLEQFKGLSTLRRKERDSKVIQAGSLYTFREVKDTSASLQMSVDIHHTEDHYS

SEQ ID NO: 16379 - DNA, 1440 bp, Muscodor strobelii
  misc_feature: SGI cDNA ID NO. 565446
  misc_feature: Encodes the peptide sequence at SEQ ID NO 16380
atgcgcgccatttacacgtcaagcactcggtgtttggcgtggcttggagatctcgacccagacatcagtctcacagacgctcagaatgccgtgttaatcgtaaaacacatggccgaattttggagacgggatgatctggaagacatcgctttggatagcgcactcacagaagatattgcatgggagcgtgcattctatgcgatcaggtgcatgagctatccgcgtaatctttggtggacgcgactttggacagtgcaagaggcagtcctccctccggctcttctctatcactggggaccactaaccatcacatgggcagacttactagatgtcacgaaaacctggacacaaaagggtatgccattacaattcaggaagagactaaacgctcagaagtacaatatcctccaagaaatgatatgccacacgatctggttgaatgtagcaaaactccggatggatagtccctgggaagtggtcaataagtggcgagatcggcgtgcaatagatccccgtgataagatatatggtcttttgggactgtttgatgctggaagtttacctactgtcgaggaatgcagctatcacctcccggtcgcgaaggtcctccagtcattatcacttgatctgattgtaagcgagaaaagtctcaggccgttgatggcaaacccgcgactcgaaccagagatagctaccgctggaatacctcgctgggctctcgaccttgtcgggcaaccaatctatgctgtggattggtactatcatctttatggaacatcgacatacagtgccaatcaaggaatgcagccacttgatttagagcttttgcaggcttcttattcaggagaagcattgatactaaacggagtccatgttgacagtattgtcagcgctcacgaaggcctacggacgaagtgcgcggcagataaatcacaaccaggtacgaaagtcgtccagcgctggcatggaatcattgagaacacaaagagcaatctagcatcaaaggtccccgacccatacgtggatggaacctctagatcagaggcattttccagattgatgcttggcgatcgctttagagatcaggagatgatggtcaagggcaaacccaatgacgtatgcttacaacatgtttggaagatcatgcgaggagaaagtggcgtttctgaagaagtgcatgtgacggtgcttggtatgattgcaaatcgaacgctgataatcaccaagtctgggttgataggctcgggacatctcgatacgcaggctggcgatgaagtctggatcctcagaggtggctctactcctttcgtactgcgccctcgggagggacgcaataacttcgactttgttggtgcgtgttacgttcacggaatcatgcaaggagaggcggtcgcaaagcaaggcgatgatctagctgaacaaaggatatatctattctga

SEQ ID NO: 16380 - protein, 479 aa, Muscodor strobelii
  misc_feature: SGI Peptide ID NO. 565446
  misc_feature (1)..(252): NCBI GI: 261352782 Blast Desc: heterokaryon incompatibility protein [Verticillium albo-atrum VaMs.102]
  misc_feature (1)..(197): NCBI GI: 154293145 Blast Desc: BC1G_14558 [Botryotinia fuckeliana B05.10] gi|150845598|gb|EDN20791.1| BC1G_14558 [Botryotinia fuckeliana B05.10]
  misc_feature (1)..(466): NCBI GI: 256733819 Blast Desc: NECHADRAFT_77355 [Nectria haematococca mpVI 77-13-4]
  misc_feature (1)..(477): NCBI GI: 256731981 Blast Desc: NECHADRAFT_80908 [Nectria haematococca mpVI 77-13-4]
  misc_feature (1)..(466): NCBI GI: 256724019 Blast Desc: NECHADRAFT_86353 [Nectria haematococca mpVI 77-13-4]
  misc_feature (187)..(464): NCBI GI: 169619511 Blast Desc: SNOG_12954 [Phaeosphaeria nodorum SN15] gi|160703844|gb|EAT79754.2| SNOG_12954 [Phaeosphaeria nodorum SN15]
  misc_feature (1)..(477): NCBI GI: 164423694 Blast Desc: NCU07897 [Neurospora crassa OR74A] gi|157070201|gb|EAA32550.2| [Neurospora crassa OR74A]
  misc_feature (1)..(442): NCBI GI: 256724252 Blast Desc: NECHADRAFT_87550 [Nectria haematococca mpVI 77-13-4]
  misc_feature (1)..(471): NCBI GI: 256733343 Blast Desc: NECHADRAFT_77319 [Nectria haematococca mpVI 77-13-4]
  misc_feature (78)..(467): NCBI GI: 169619541 Blast Desc: SNOG_12969 [Phaeosphaeria nodorum SN15] gi|111058649|gb|EAT79769.1| SNOG_12969 [Phaeosphaeria nodorum SN15]
MRAIYTSSTRCLAWLGDLDPDISLTDAQNAVLIVKHMAEFWRRDDLEDIALDSALTEDIAWERAFYAIRCMSYPRNLWWTRLWTVQEAVLPPALLYHWGPLTITWADLLDVTKTWTQKGMPLQFRKRLNAQKYNILQEMICHTIWLNVAKLRMDSPWEVVNKWRDRRAIDPRDKIYGLLGLFDAGSLPTVEECSYHLPVAKVLQSLSLDLIVSEKSLRPLMANPRLEPEIATAGIPRWALDLVGQPIYAVDWYYHLYGTSTYSANQGMQPLDLELLQASYSGEALILNGVHVDSIVSAHEGLRTKCAADKSQPGTKVVQRWHGIIENTKSNLASKVPDPYVDGTSRSEAFSRLMLGDRFRDQEMMVKGKPNDVCLQHVWKIMRGESGVSEEVHVTVLGMIANRTLIITKSGLIGSGHLDTQAGDEVWILRGGSTPFVLRPREGRNNFDFVGACYVHGIMQGEAVAKQGDDLAEQRIYLF

SEQ ID NO: 16381 - DNA, 453 bp, Muscodor strobelii
  misc_feature: SGI cDNA ID NO. 565447
  misc_feature: Encodes the peptide sequence at SEQ ID NO 16382
atgatggagcacacttcgacgcactccgtttttgccactgccatatcattgaccgcggtaattacggttgccgtcgccctgagagtgtgggttcgcattggcatggtgagggtttggggagttgatgatattctcattaccaccagtttcgttgcctcggtcatccactttgccttgatcgctacagcatcgacatacggtctgggtacaccgaaaggcagggtctcggacgatgccttcgagatgatagctttgcttgaactgcctatttcgattttctacagcaccggcgtcctttcagccaaggcatcattcgcagtcctctacctgaggctattccctcagtcgaaactcgagattttgaacaagggtataattctctttttatgcggtcaactgatcgaggagatttttgtcgtcattttcagatgcatacctgttcagaagcagtaa

SEQ ID NO: 16382 - protein, 150 aa, Muscodor strobelii
  misc_feature: SGI Peptide ID NO. 565447
  misc_feature (9)..(149): NCBI GI: 149211229 Blast Desc: MGCH7_ch7g1075 [Magnaporthe grisea 70-15] gi|86197030|gb|EAQ71668.1| MGCH7_ch7g1075 [Magnaporthe grisea 70-15]
  misc_feature (23)..(149): NCBI GI: 242771566 Blast Desc: integral membrane protein, [Talaromyces stipitatus ATCC 10500] gi|218721487|gb|EED20905.1| integral membrane protein, [Talaromyces stipitatus ATCC 10500]
  misc_feature (16)..(149): NCBI GI: 169781322 Blast Desc: [Aspergillus oryzae RIB40] gi|83773866|dbj|BAE63991.1| protein product [Aspergillus oryzae]
  misc_feature (22)..(148): NCBI GI: 46103686 Blast Desc: FG00101.1 [Gibberella zeae PH-1]
  misc_feature (62)..(149): NCBI GI: 145601406 Blast Desc: [Magnaporthe grisea 70-15] gi|145009488|gb|EDJ94155.1| [Magnaporthe grisea 70-15]
  misc_feature (4)..(148): NCBI GI: 238505565 Blast Desc: integral membrane protein [Aspergillus flavus NRRL3357] gi|220690116|gb|EED46466.1| integral membrane protein [Aspergillus flavus NRRL3357]
  misc_feature (10)..(148): NCBI GI: 238484629 Blast Desc: conserved [Aspergillus flavus NRRL3357] gi|220701603|gb|EED57941.1| conserved [Aspergillus flavus NRRL3357]
  misc_feature (2)..(148): NCBI GI: 39940052 Blast Desc: MGG_05214 [Magnaporthe grisea 70-15] gi|145010515|gb|EDJ95171.1| MGG_05214 [Magnaporthe grisea 70-15]
  misc_feature (17)..(149): NCBI GI: 119479083 Blast Desc: NFIA_076030 [Neosartorya fischeri NRRL 181] gi|119407724|gb|EAW17673.1| conserved [Neosartorya fischeri NRRL 181]
  misc_feature (2)..(149): NCBI GI: 145236457 Blast Desc: An06g00490 [Aspergillus niger] gi|134075330|emb|CAK44964.1| protein product [Aspergillus niger]
MMEHTSTHSVFATAISLTAVITVAVALRVWVRIGMVRVWGVDDILITTSFVASVIHFALIATASTYGLGTPKGRVSDDAFEMIALLELPISIFYSTGVLSAKASFAVLYLRLFPQSKLEILNKGIILFLCGQLIEEIFVVIFRCIPVQKQ

SEQ ID NO: 16383 - DNA, 1400 bp, Muscodor strobelii
  misc_feature: SGI EST ID NO. CUFF.38712.0
  misc_feature: Variant of the nucleotide sequence at SEQ ID NO 16381
gaaaaaaaaagggatctggggtagtcctcatgttttaaagccagatctcccatttttaccaccgcttcctagttcaaattactcaactatgcgcgagcaagatacattcgcggtgaagcgcctcgactctggctagttgagggttacgggtctttggccatgtgaacattcacgatatgatggagcacacttcgacgcactccgtttttgccactgccatatcattgaccgcggtaattacggttgccgtcgccctgagagtgtgggttcgcattggcatggtgagggtttggggagttgatgatattctcattaccaccagtttcgttgcctcggtcatccactttgccttgatcgctacagcatcgacatacggtctgggtacaccgaaaggcagggtctcggacgatgccttcgagatgatagctttgcttgaactgcctatttcgattttctacagcaccggcgtcctttcagccaaggcatcattcgcagtcctctacctgaggctattccctcagtcgaaactcgagattttgaacaagggtataattctctttttatgcggtcaactgatcgaggagatttttgtcgtcattttcagatgcatacctgttcagaagcaatggtaggttttgtggcggcgcgcttccgtccacttgcggttgaatcatgattaaccgccatttcaacaggaattcagacctagaaggtcattgtattaatattcatccattttggattctaacatttgtcttcaatgttacaacggatctcatacttttcctcgaaccgattccatttacatggcaacttcagatggcgctgacgaaacggattgggattctctgtatgatgtccctgggtctactcgtgactgctatatctgcccttcggctttactacgtaattagatcgttctctgaacctgagacacaatctgcaattccgatattatggtctgcaactgaggtcgccgcattgatcttgtgctcctgcatcccatcacttcgagtagtttgctcccaaattcccggattgaattcctttctcggtctatcttcagatcgatcaacaacagcgggaaacgcctactatggagatcattccaatcccatcccatacagcattccattggggagatggcgacgtaaagactatatccaatcgcaagcgtcgaaaagccagcgtgcgaacccctttggcccgacagttcgtgctacagccatgtgtgcaggtgatggtaatggcagccaggaggagatatttcctcatagtctagattataacggcgctatcatggtgacgcgggaggtaatccataagatagagagctgaaaagatttgcgtcgctgtgctgtgctctaagactctatcatattgatcatcatggataaaat

SEQ ID NO: 16384 - DNA, 1341 bp, Muscodor strobelii
  misc_feature: SGI cDNA ID NO. 565448
  misc_feature: Encodes the peptide sequence at SEQ ID NO 16385
atgatctctgggggtcaagccgtcaatgactctcgctggagctatgatggacaacttcccttcatgaaaaagtctgagaaattttggagtgaaactatcaataatgaccatcatggcctcgatggacctgctctcatccaatccgaaacatccacaaatcgtaaatttcctctacgcaaccatgttcatcagtcgtggaaggaattgggcattcatgatttgccagggctagatgctaatgcaggaaaccccgtgggcatcggagaactccaagagaacaagacacaaggtcgaaggcagatcgccgcggcaatatattcgctcaataatgtcactgttctcactgaaagcgtcgtcgagaaaatcttgactgataaaacagctcatggtcttaccgcggtcggtatcagactagacggtggcatagagatacgtagtcaggaggtactgctttcagctggcgcagttcgctccccgcagattctaatgctctctggcatcggtccggctgaggagctaaagaagttcgatattcctattttgttagaccaaccgaatatcggcgcaaacttgatggatcatggtctttttggacattgttggaaagttaaggaccccgctgccggctggtgtcttggatcagcaaatagtttatttgaacaaccccagtacggttggggaggaccaatagactttcttgtctcaaccgatgtaccaaaagatggcctactagcagctatcgccgccgacgaaggcactgctcctgatcccgctacacatccgcttcttcgtaaacgaacttttgctgagcacgtatttctgtatgctggctctgctgatggctcactcgttacctttgtgctcatcaatctgttgaccacatcacgcggatccgttaagctagcatcggcgagtatcaaagatcagccgataatcgatccgaatttcttgggcactgccgtcgatcgctacgtggcgcgcgaagctctaaagcttcagattaggttcgttgggagtgaagagactgtcatagggagagatatcatcgagggcgaactcggcgcaccaggtttcgaccaagtcttgtcacccgcatccacggacgaacagatcgatgcccgcctcaaggcagggctagagacaagttaccatccgatgggttccttagctatgggtacagttgttgacacggacctcaagttgcgaggcgtcaacaacttgcgtgtcgttgatacgtcggtatttccggtttgtctcactgggcacttgcaagtagcaacttatgcaatggccgaacaagctgctgtgatcatttacaagggccgtttagcctcggaatag

SEQ ID NO: 16385 - protein, 446 aa, Muscodor strobelii
  misc_feature: SGI Peptide ID NO. 565448
  misc_feature (286)..(434): Pfam Id: PF05199 Pfam Desc: GMC oxidoreductase
  misc_feature (2)..(209): Pfam Id: PF00732 Pfam Desc: GMC oxidoreductase
  misc_feature (368)..(434): Pfam Id: PF05199 Pfam Desc: GMC oxidoreductase
  misc_feature (109)..(194): Pfam Id: PF00732 Pfam Desc: GMC oxidoreductase
  misc_feature (6)..(438): NCBI GI: 256724344 Blast Desc: NECHADRAFT_87530 [Nectria haematococca mpVI 77-13-4]
  misc_feature (8)..(438): NCBI GI: 46115062 Blast Desc: FG03373.1 [Gibberella zeae PH-1]
  misc_feature (8)..(426): NCBI GI: 145259027 Blast Desc: An04g08890 [Aspergillus niger] gi|134074864|emb|CAK38976.1| protein product [Aspergillus niger]
  misc_feature (8)..(438): NCBI GI: 67526147 Blast Desc: AN3531.2 [Aspergillus nidulans FGSC A4] gi|40739666|gb|EAA58856.1| AN3531.2 [Aspergillus nidulans FGSC A4] gi|259481951|tpe|CBF75954.1| TPA: GMC oxidoreductase nidulans
  misc_feature (8)..(440): NCBI GI: 242779381 Blast Desc: glucose dehydrogenase, [Talaromyces stipitatus ATCC 10500] gi|218723050|gb|EED22468.1| glucose dehydrogenase, [Talaromyces stipitatus ATCC 10500]
  misc_feature (8)..(438): NCBI GI: 145244078 Blast Desc: An11g05600 [Aspergillus niger] gi|134079234|emb|CAK40717.1| protein product [Aspergillus niger]
  misc_feature (8)..(438): NCBI GI: 169769302 Blast Desc: [Aspergillus oryzae RIB40] gi|83766979|dbj|BAE57119.1| protein product [Aspergillus oryzae]
  misc_feature (8)..(438): NCBI GI: 238501768 Blast Desc: glucose dehydrogenase, [Aspergillus flavus NRRL3357] gi|220692355|gb|EED48702.1| glucose dehydrogenase, [Aspergillus flavus NRRL3357]
  misc_feature (8)..(440): NCBI GI: 212535270 Blast Desc: glucose-methanol-choline (gmc) oxidoreductase, [Penicillium marneffei ATCC 18224] gi|210070190|gb|EEA24280.1| glucose-methanol-choline (gmc) oxidoreductase, [Penicillium ATCC
  misc_feature (6)..(446): NCBI GI: 154308157 Blast Desc: BC1G_07824 [Botryotinia fuckeliana B05.10] gi|150852909|gb|EDN28101.1| BC1G_07824 [Botryotinia fuckeliana B05.10]
  misc_feature (13)..(446): SWISSPROT Homolog: EC 1.1.99.1 Choline dehydrogenase
MISGGQAVNDSRWSYDGQLPFMKKSEKFWSETINNDHHGLDGPALIQSETSTNRKFPLRNHVHQSWKELGIHDLPGLDANAGNPVGIGELQENKTQGRRQIAAAIYSLNNVTVLTESVVEKILTDKTAHGLTAVGIRLDGGIEIRSQEVLLSAGAVRSPQILMLSGIGPAEELKKFDIPILLDQPNIGANLMDHGLFGHCWKVKDPAAGWCLGSANSLFEQPQYGWGGPIDFLVSTDVPKDGLLAAIAADEGTAPDPATHPLLRKRTFAEHVFLYAGSADGSLVTFVLINLLTTSRGSVKLASASIKDQPIIDPNFLGTAVDRYVAREALKLQIRFVGSEETVIGRDIIEGELGAPGFDQVLSPASTDEQIDARLKAGLETSYHPMGSLAMGTVVDTDLKLRGVNNLRVVDTSVFPVCLTGHLQVATYAMAEQAAVIIYKGRLASE

SEQ ID NO: 16386 - DNA, 645 bp, Muscodor strobelii
  misc_feature: SGI EST ID NO. CUFF.38717.0
  misc_feature: Variant of the nucleotide sequence at SEQ ID NO 16384
ctttcttgtctcaaccgatgtaccaaaagatggcctactagcagctatcgccgccgacgaaggcactgctcctgatcccgctacacatccgcttcttcgtaaacgaacttttgctgagcacgtatttctgtatgctggctctgctgatggctcactcgttacctttgtgctcatcaatctgttgaccacatcacgcggatccgttaagctagcatcggcgagtatcaaagatcagccgataatcgatccgaatttcttgggcactgccgtcgatcgctacgtggcgcgcgaagctctaaagcttcagattaggttcgttgggagtgaagagactgtcatagggagagatatcatcgagggcgaactcggcgcaccaggtttcgaccaagtcttgtcacccgcatccacggacgaacagatcgatgcccgcctcaaggcagggctagagacaagttaccatccgatgggttccttagctatgggtacagttgttgacacggacctcaagttgcgaggcgtcaacaacttgcgtgtcgttgatacgtcggtatttccggtttgtctcactgggcacttgcaagtagcaacttatgcaatggccgaacaagctgctgtgatcatttacaagggccgtttagcctcgga

SEQ ID NO: 16387 - DNA, 1008 bp, Muscodor strobelii
  misc_feature: SGI cDNA ID NO. 565449
  misc_feature: Encodes the peptide sequence at SEQ ID NO 16388
atggcttcaagtgccttaccaatgccgatttcgcattcacgatttcctcctgagatctatatacgtatcatcgagctaatcaccgattcacgctacctgcaacacgtttggctaaactttcgccgcgtttcgcgtacatttaaatcaatcaccgagtctattttcgtccagaaacatctacgttatgcatacatagattttcctgatgtcgtagattatgtctatggtatagatgatcaaaagtatcaaaccagtttgcgtctccaattccaaggactcgataaggacgatcatgaacgcgcaatctttggtgaggacccgaaggagtacaaagattctaaagaaattctccttagcgaggataatccggaaaacacacttttcaaatctgtcacggatttatggaatcatactttcttggactattctatgccgcctccttacacatcattttcaacgccgcctcacgttttggtgatacgacgggttgtaaatgacaccgcgctcccgggactagttgtcaattgggatgcgcatactgtctctgttctctggaaagagatgcttactgcgcttttcggcgaagaggagcacctcagacgtctcgaattgcaatccaaaatggatttagatgacgagaatcaacttagaaccctggttgatcgtgcaaaggttggagatgccgaggcgctcgaagagatgatgcaacatcttatttcacatgtaggaaacgccgatctgaaacgacgcaggatggtacgagaaacgcgttttcaaagatggtacggaaagcacactgatctaaaacatgaaaatcaatcggatgatccagacaaaatcaggacgttgcgagagtttcagcacatcttaggcatcgaggagtacgaagatgagtggaggtgcatcacgccggaaattttcgatgacgatgaggacgatgctaagcattcgggagacgccctagagcatgatgacaatgacggggagtccaatattgtcaaggattaa

SEQ ID NO: 16388 - protein, 335 aa, Muscodor strobelii
  misc_feature: SGI Peptide ID NO. 565449
  misc_feature (1)..(262): NCBI GI: 169605777 Blast Desc: SNOG_05915 [Phaeosphaeria nodorum SN15] gi|111065859|gb|EAT86979.1| SNOG_05915 [Phaeosphaeria nodorum SN15]
MASSALPMPISHSRFPPEIYIRIIELITDSRYLQHVWLNFRRVSRTFKSITESIFVQKHLRYAYIDFPDVVDYVYGIDDQKYQTSLRLQFQGLDKDDHERAIFGEDPKEYKDSKEILLSEDNPENTLFKSVTDLWNHTFLDYSMPPPYTSFSTPPHVLVIRRVVNDTALPGLVVNWDAHTVSVLWKEMLTALFGEEEHLRRLELQSKMDLDDENQLRTLVDRAKVGDAEALEEMMQHLISHVGNADLKRRRMVRETRFQRWYGKHTDLKHENQSDDPDKIRTLREFQHILGIEEYEDEWRCITPEIFDDDEDDAKHSGDALEHDDNDGESNIVKD

SEQ ID NO: 16389 - DNA, 1492 bp, Muscodor strobelii
  misc_feature: SGI EST ID NO. CUFF.38723.0
  misc_feature: Variant of the nucleotide sequence at SEQ ID NO 16387
gcaggaatctctatcggcgtctcagaccgctcctccatcctcaaataatcatcgatataaaattgtatagcccggacaaggaggcataaatccagacgtcatggcttcaagtgccttaccaatgccgatttcgcattcacgatttcctcctgagatctatatacgtatcatcgagctaatcaccgattcacgctacctgcaacacgtttggctaaactttcgccgcgtttcgcgtacatttaaatcaatcaccgagtctattttcgtccagaaacatctacgttatgcatacatagattttcctgatgtcgtagattatgtctatggtatagatgatcaaaagtatcaaaccagtttgcgtctccaattccaaggactcgataaggacgatcatgaacgcgcaatctttggtgaggacccgaaggagtacaaagattctaaagaaattctccttagcgaggataatccggaaaacacacttttcaaatctgtcacggatttatggaatcatactttcttggactattctatgccgcctccttacacatcattttcaacgccgcctcacgttttggtgatacgacgggttgtaaatgacaccgcgctcccgggactagttgtcaattgggatgcgcatactgtctctgttctctggaaagagatgcttactgcgcttttcggcgaagaggagcacctcagacgtctcgaattgcaatccaaaatggatttagatgacgagaatcaacttagaaccctggttgatcgtgcaaaggttggagatgccgaggcgctcgaagagatgatgcaacatcttatttcacatgtaggaaacgccgatctgaaacgacgcaggatggtacgagaaacgcgttttcaaagatggtacggaaagcacactgatctaaaacatgaaaatcaatcggatgatccagacaaaatcaggacgttgcgagagtttcagcacatcttaggcatcgaggagtacgaagatgagtggaggtgcatcacgccggaaattttcgatgacgatgaggacgatgctaagcattcgggagacgccctagagcatgatgacaatgacggggagtccaatattgtcaaggattaaatgcatagaaaatgacatatcagaagtcgggcacacatcggcaaattcaaagcaaaagctgtgacgctaccgatatcacattatctgaattggtagaaggacacgagcggcatgaacggcatgaggatgaagctttttggtatttaagcgaaagcttccccgatggcgagatggaaagtggttgtggcaatcttcacctgaatagaggtaagtcgcccaaaagggagttccttgccttgttggagttcgattttttcagagagaatgggtcacttaacacagacaagagattaccatgaaaaaacgcaattcctataaacactaggtaaatgacacaaatccgtttctatagaagtaaatgtgcacaatatatttaagaatttg

SEQ ID NO: 16390 - DNA, 1764 bp, Muscodor strobelii
  misc_feature: SGI cDNA ID NO. 565450
  misc_feature: Encodes the peptide sequence at SEQ ID NO 16391
atgaaatctcttgtgacagctgccgtactggcggccgctgtgtctgcgctacccgccgtcactcgaaacgataattcaaaaccttcatactcgattcctctccacgacaaaaatcctaagtcaagagcatctgccctcgccacaaaacgtgcgggttggacatataaagagtatcctttaggtggcgctccgcttcctgacggtccacttgccaaccagacactcgccgaacaagacaaatcttggctaccgtttctcggtgttattcaaaaccaaatcgttcaagacacgaacaaagcaacagaagatcttcatgcttcaggtccattcacgtcgctagatgactatgctaggttgtatgacaacgaatggcagaccatagttcccggtgagctgttagttcctggcatgatgacaaactataccgatgatcgtttgttttccatgtcgcggctttctgcgaatccctacaggacgcgccgtgtccagcgtaaggagaagctgctcttccctgtcgacaatgccgcctcgattactggcctgtctctggaacagctgcgggatcaaggccgcctattctccgtcgattacagcgatatggccgagctcccacgatcgaagaactacggcgccatctgccaggcatttttctacatcgacacaaagtctggcgactttctccctcttgcagtgaacgcaatgtacagcaactcatcgcttatttacacgccagaagactccgcagatgactggttgctaggcaagcttctcttcaatcagaacgacaattggtacattacatacgcccacatctctttctcgcattcagcctcggatttcgcctacttgactgctatgcgatcactgagtgagagccatcctctcatggccctcattgaacgatttgagagcacgcccttgaacattcgtcctgttctctacaatggaatcatcacgagtggtgccattgacaaatattacccctggactggcgacggagcaaggctgtatgcgaaccaagtttttgagtctggcgaggcaagcaatttccagagcaattacatcgagacaaggctggagaatgccggtctgatcaacagtcgattcggacctgagctgaagagcttccccttctgggaagatacatccgttattgtcagcgtgatgaataaattcttcaaggaggtcatcgactcgtactatagcactgatcttgctgtgctactagacaaagaggtccagggctgggcgcatgaggctcaagttgccggtctccctgacttcccgaaagtcatctctagccgcaagcaacttgctgacatacttacccatatcgactacttgggcgccgttgtacacggtgtgattagctccaatggtgtgatcggttacatggcagcgctgcccttcgccccgactgcattctacaagcctctaccgacgaccaagggagccacgaacctcattcagtacatgccaaacatctaccaaggtgtggcacaagtgtcgacactgctcgctgcgtcccgctcagcttgggttaacagcaatcagactataacgcatatgtgggatgacgaggccatgttggcgcgcatgaacagtaaaacacgtgctgccaataaccacttcaaggacgcaatgaacgatttcagtgccgaggtccgagcccgtacattcgatagtgagggcctgaaccgcggaatgccagttatgtggcggcctctcgatcccaacgcggccccctattggagtgttgtataa

SEQ ID NO: 16391 - protein, 587 aa, Muscodor strobelii
  misc_feature: SGI Peptide ID NO. 565450
  misc_feature (40)..(579): Pfam Id: PF00305 Pfam Desc: Lipoxygenase
  misc_feature (389)..(445): Pfam Id: PF00305 Pfam Desc: Lipoxygenase
  misc_feature (1)..(587): NCBI GI: 17861374 Blast Desc: manganese lipoxygenase [Gaeumannomyces graminis var. avenae]
  misc_feature (18)..(587): NCBI GI: 159122314 Blast Desc: arachidonate 5-lipoxygenase, [Aspergillus fumigatus A1163]
  misc_feature (18)..(587): NCBI GI: 70981869 Blast Desc: arachidonate 5-lipoxygenase [Aspergillus fumigatus Af293] gi|66844086|gb|EAL84425.1| arachidonate 5-lipoxygenase, [Aspergillus fumigatus Af293]
  misc_feature (18)..(587): NCBI GI: 119487626 Blast Desc: lipoxygenase, [Neosartorya fischeri NRRL 181] gi|119410702|gb|EAW20648.1| lipoxygenase, [Neosartorya fischeri NRRL 181]
  misc_feature (1)..(564): NCBI GI: 17861376 Blast Desc: manganese lipoxygenase [Gaeumannomyces graminis var. tritici]
  misc_feature (30)..(584): NCBI GI: 145604322 Blast Desc: MGG_08499 [Magnaporthe grisea 70-15] gi|145012339|gb|EDJ96995.1| MGG_08499 [Magnaporthe grisea 70-15]
  misc_feature (282)..(584): NCBI GI: 154300392 Blast Desc: BC1G_11385 [Botryotinia fuckeliana B05.10] gi|150856708|gb|EDN31900.1| BC1G_11385 [Botryotinia fuckeliana B05.10]
  misc_feature (16)..(419): NCBI GI: 238495959 Blast Desc: conserved [Aspergillus flavus NRRL3357] gi|220694095|gb|EED50439.1| conserved [Aspergillus flavus NRRL3357]
  misc_feature (16)..(295): NCBI GI: 186966745 Blast Desc: lipoxygenase [Aspergillus flavus]
  misc_feature (149)..(415): NCBI GI: 256719967 Blast Desc: NECHADRAFT_89463 [Nectria haematococca mpVI 77-13-4]
  misc_feature (112)..(558): SWISSPROT Homolog: EC 1.13.11.40 Arachidonate 8-lipoxygenase
  misc_feature (112)..(558): SWISSPROT Homolog: EC 4.2.1.92 Hydroperoxide dehydratase
MKSLVTAAVLAAAVSALPAVTRNDNSKPSYSIPLHDKNPKSRASALATKRAGWTYKEYPLGGAPLPDGPLANQTLAEQDKSWLPFLGVIQNQIVQDTNKATEDLHASGPFTSLDDYARLYDNEWQTIVPGELLVPGMMTNYTDDRLFSMSRLSANPYRTRRVQRKEKLLFPVDNAASITGLSLEQLRDQGRLFSVDYSDMAELPRSKNYGAICQAFFYIDTKSGDFLPLAVNAMYSNSSLIYTPEDSADDWLLGKLLFNQNDNWYITYAHISFSHSASDFAYLTAMRSLSESHPLMALIERFESTPLNIRPVLYNGIITSGAIDKYYPWTGDGARLYANQVFESGEASNFQSNYIETRLENAGLINSRFGPELKSFPFWEDTSVIVSVMNKFFKEVIDSYYSTDLAVLLDKEVQGWAHEAQVAGLPDFPKVISSRKQLADILTHIDYLGAVVHGVISSNGVIGYMAALPFAPTAFYKPLPTTKGATNLIQYMPNIYQGVAQVSTLLAASRSAWVNSNQTITHMWDDEAMLARMNSKTRAANNHFKDAMNDFSAEVRARTFDSEGLNRGMPVMWRPLDPNAAPYWSVV

SEQ ID NO: 16392 - DNA, 2307 bp, Muscodor strobelii
  misc_feature: SGI EST ID NO. CUFF.38739.0
  misc_feature: Variant of the nucleotide sequence at SEQ ID NO 16390
tggcaaatgacaaatgcccggcaatttagacctgggttttgagcaattaccatttcacatgcccgctgttgaatacttcgtatatcgcagcacagctagattatgtcaaatacacggaaatgcgatcggctgagtagtaggctgctgtttgagaccttatttttgtcatctcagtaattctttccaagtgctaagcagacgtgtattaaagagtctgatgcccaggctcagcgttgtagttgtcgcaaagcacaccggtattcgtttcttcgctgtcctttgtttctcttcagtgccgcatcaaaacgatctttagtgagtgctcagtggaattttgaccatgaaatctcttgtgacagctgccgtactggcggccgctgtgtctgcgctacccgccgtcactcgaaacgataattcaaaaccttcatactcgattcctctccacgacaaaaatcctaagtcaagagcatctgccctcgccacaaaacgtgcgggttggacatataaagagtatcctttaggtggcgctccgcttcctgacggtccacttgccaaccagacactcgccgaacaagacaaatcttggctaccgtttctcggtgttattcaaaaccaaatcgttcaagacacgaacaaagcaacagaagatcttcatgcttcaggtccattcacgtcgctagatgactatgctaggttgtatgacaacgaatggcagaccatagttcccggtgagctgttagttcctggcatgatgacaaactataccgatgatcgtttgttttccatgtcgcggctttctgcgaatccctacaggacgcgccgtgtccagcgtaaggagaagctgctcttccctgtcgacaatgccgcctcgattactggcctgtctctggaacagctgcgggatcaaggccgcctattctccgtcgattacagcgatatggccgagctcccacgatcgaagaactacggcgccatctgccaggcatttttctacatcgacacaaagtctggcgactttctccctcttgcagtgaacgcaatgtacagcaactcatcgcttatttacacgccagaagactccgcagatgactggttgctaggcaagcttctcttcaatcagaacgacaattggtacattacatacgcccacatctctttctcgcattcagcctcggatttcgcctacttgactgctatgcgatcactgagtgagagccatcctctcatggccctcattgaacgatttgagagcacgcccttgaacattcgtcctgttctctacaatggaatcatcacgagtggtgccattgacaaatattacccctggactggcgacggagcaaggctgtatgcgaaccaagtttttgagtctggcgaggcaagcaatttccagagcaattacatcgagacaaggctggagaatgccggtctgatcaacagtcgattcggacctgagctgaagagcttccccttctgggaagatacatccgttattgtcagcgtgatgaataaattcttcaaggaggtcatcgactcgtactatagcactgatcttgctgtgctactagacaaagaggtccagggctgggcgcatgaggctcaagttgccggtctccctgacttcccgaaagtcatctctagccgcaagcaacttgctgacatacttacccatatcgactacttgggcgccgttgtacacggtgtgattagctccaatggtgtgatcggttacatggcagcgctgcccttcgccccgactgcattctacaagcctctaccgacgaccaagggagccacgaacctcattcagtacatgccaaacatctaccaaggtgtggcacaagtgtcgacactgctcgctgcgtcccgctcagcttgggttaacagcaatcagactataacgcatatgtgggatgacgaggccatgttggcgcgcatgaacagtaaaacacgtgctgccaataaccacttcaaggacgcaatgaacgatttcagtgccgaggtccgagcccgtacattcgatagtgagggcctgaaccgcggaatgccagttatgtggcggcctctcgatcccaacgcggccccctattggagtgttgtataaaaggcgaagaactgggaaggaagtgcggatcctacctacgaattgcggcctatagattaatgagagacgtctttccttatctggttacatagaataattgctttgactcagattcgctcggctctgtttgaaaggcattactgtatatagttcaaccgtaaatatacctagagttcaaagacatacaaaccgcccgatgtgcc

SEQ ID NO: 16393 - DNA, 1749 bp, Muscodor strobelii
  misc_feature: SGI cDNA ID NO. 565451
  misc_feature: Reduced expression when VOC is produced
  misc_feature: Encodes the peptide sequence at SEQ ID NO 16394
atgaagtctacatctgttctttcggcagcgttgctattcttccacgaagtcagtggcaaatgcaccaacacttccatccacccgtctgtcgtagatgacgtacagggtgttacctataaaggcctgaatcgtaatggcatcgaagtgttcctcggaattccctatggcgcggacacgggtggtgcaaaccgcttcaaaccgccgacggcctataaaccagaacgcgggagtgtgatcactgctcagtcttacgggccttcgtgtccacagtcgacttatgatgcctttcccccatttttctacagcaatgtcactgagatatcggaagattgtctgaatctagtgctcggacgtccaaagggaacgacaaaagacagtcgcttacctgtcatgatttacatccacggtggctccttcttcgaaggctcgaatgtggaagtaagccaacagcccgacggcttagttaaggagtctatcaagaatggactgcctgttattgaggtcggcatcaactatcgtcttggcccattcggattcgccaattctgacgctcttcaagccgaaggctctacaaatgctggactgagagaccaacgccttggaattgaatgggttcgcgatcatatcgagcagtttggaggagacccggagaagataactatcttcggacagtctagtggtggtctagctattggtatgcaaattatggcatatggtggcagtaaaccggtcccctttcagcagggcatatgtgagagccaggcactcgagcctggaatcacgggtaattttacaatggatgctatgcaattactcgtcgattatctcggctgcaacacaacggatctaaattcgccagagacggtcgagtgtctacgaagctttgacacagtcacattgttcaatgcatcctccgaaacacatttatcagacttcgctcataacatcggcgatacctggttgccagccgtcgacggcgacttccttcctgcagcgccatcagagcttatcagacagggcaggtttgcgaacgttacaactatggtcgtttggtgtgatggagatctgaatgttttcctccccacctcgattcaaacgaatcaagatacttatgatctcgtccaagcataccaacctgctatgacagctagcaacatcaacaagttgctctcactttatgacgtatcagagttctcagcaaatgaggccgcaggcttgagcagtgaattctaccgtgcgtcgcgaattacccgagacattctaatgacctgccagcccatccactatgccgaggccattgcacgtcgcggcaacgctgtgtatctcgtagattggaaccagactatcagtgatcaggttatcaaggctttgtggaacgaaacgggctacggggtaattcacacctctgatttagaatatgtattcggaaacatctcggccttagatccgggtggcattcctttccacatttcagctgcggatcgggccctggtgtccagaggatcacgctcatggtcgacattcgcaactactgggagcccaagtctaagtggccacgacacatttgttgggctttcgcatgcatttaccggaaatgaccaggtgaatgtgttcgtcgctggtggcccgagcgagggtctctccccgatagatggaccaggtgcacacccggcgattgaagtacagaagctcagggaacgatgcggattcatcaactctgaggaaattattaaacagctccaatattag

SEQ ID NO: 16394 - protein, 582 aa, Muscodor strobelii
  misc_feature: SGI Peptide ID NO. 565451
  misc_feature (1)..(571): Pfam Id: PF00135 Pfam Desc: Carboxylesterase
  misc_feature (1)..(349): Pfam Id: PF00135 Pfam Desc: Carboxylesterase
  misc_feature (28)..(582): NCBI GI: 119191482 Blast Desc: CIMG_00118 [Coccidioides immitis RS]
  misc_feature (28)..(582): NCBI GI: 240106455 Blast Desc: lipase, [Coccidioides posadasii C735 delta SOWgp]
  misc_feature (30)..(558): NCBI GI: 116197194 Blast Desc: CHGG_05195 [Chaetomium globosum CBS 148.51] gi|88181108|gb|EAQ88576.1| CHGG_05195 [Chaetomium globosum CBS 148.51]
  misc_feature (37)..(582): NCBI GI: 189207396 Blast Desc: para-nitrobenzyl esterase [Pyrenophora tritici-repentis Pt-1C-BFP] gi|187976125|gb|EDU42751.1| para-nitrobenzyl esterase [Pyrenophora tritici-repentis
  misc_feature (21)..(582): NCBI GI: 238838319 Blast Desc: carboxylesterase family protein [Microsporum canis CBS 113480]
  misc_feature (30)..(582): NCBI GI: 169619191 Blast Desc: SNOG_12790 [Phaeosphaeria nodorum SN15] gi|111058470|gb|EAT79590.1| SNOG_12790 [Phaeosphaeria nodorum SN15]
  misc_feature (1)..(582): NCBI GI: 154304491 Blast Desc: BC1G_09121 [Botryotinia fuckeliana B05.10] gi|150854101|gb|EDN29293.1| BC1G_09121 [Botryotinia fuckeliana B05.10]
  misc_feature (139)..(582): NCBI GI: 238582804 Blast Desc: MPER_10745 [Moniliophthora perniciosa FA553] gi|215452993|gb|EEB90974.1| MPER_10745 [Moniliophthora perniciosa FA553]
  misc_feature (36)..(579): NCBI GI: 119487447 Blast Desc: carboxylesterase family protein [Neosartorya fischeri NRRL 181] gi|119410673|gb|EAW20619.1| carboxylesterase family protein [Neosartorya fischeri NRRL 181]
  misc_feature (24)..(580): NCBI GI: 145245011 Blast Desc: An11g08070 [Aspergillus niger] gi|134079468|emb|CAK46000.1| protein product [Aspergillus niger]
  misc_feature (41)..(422): SWISSPROT Homolog: EC 3.1.1.3 Triacylglycerol lipase
  misc_feature: Useful for introducing or modulating the production of volatile compounds
MKSTSVLSAALLFFHEVSGKCTNTSIHPSVVDDVQGVTYKGLNRNGIEVFLGIPYGADTGGANRFKPPTAYKPERGSVITAQSYGPSCPQSTYDAFPPFFYSNVTEISEDCLNLVLGRPKGTTKDSRLPVMIYIHGGSFFEGSNVEVSQQPDGLVKESIKNGLPVIEVGINYRLGPFGFANSDALQAEGSTNAGLRDQRLGIEWVRDHIEQFGGDPEKITIFGQSSGGLAIGMQIMAYGGSKPVPFQQGICESQALEPGITGNFTMDAMQLLVDYLGCNTTDLNSPETVECLRSFDTVTLFNASSETHLSDFAHNIGDTWLPAVDGDFLPAAPSELIRQGRFANVTTMVVWCDGDLNVFLPTSIQTNQDTYDLVQAYQPAMTASNINKLLSLYDVSEFSANEAAGLSSEFYRASRITRDILMTCQPIHYAEAIARRGNAVYLVDWNQTISDQVIKALWNETGYGVIHTSDLEYVFGNISALDPGGIPFHISAADRALVSRGSRSWSTFATTGSPSLSGHDTFVGLSHAFTGNDQVNVFVAGGPSEGLSPIDGPGAHPAIEVQKLRERCGFINSEEIIKQLQY

SEQ ID NO: 16395 - DNA, 2887 bp, Muscodor strobelii
  misc_feature: SGI EST ID NO. CUFF.38741.0
  misc_feature: Variant of the nucleotide sequence at SEQ ID NO 16393
tccgcgaatgccctataattgggaaacttcattaccgttgttatgacattgaggtcgttagctctagggccctagggcctgggatacaaagtcttacagtcgtgaatcgattagtgatgtttaatgttgcaaagtcttcatgcctgagtccattacacgattctcccgtgtagtagtatcacaacatggcccgccaggaacaatagggcttacctagtcttttgtcttgctcatttccggcatcgcgttgaagatgctccacaggaaccgaagccgatgccgaaggtccggcgtcgagtcattctgaatgacgttgctctcaatcacaagggtcgcactcttaatcgctcttcaaatgctcatcttggatagggcgtgcaggggtcagctcccggtccctctgcaggacctcatcaggcaatagcctgcgcgttcccgtagataaaaggccaaccgctcgcaaatggacgtgcccagatagcaatcgacggggcagctcaatctccagccatgaagtctacatctgttctttcggcagcgttgctattcttccacgaagtcagtggcaaatgcaccaacacttccatccacccgtctgtcgtagatgacgtacagggtgttacctataaaggcctgaatcgtaatggcatcgaagtgttcctcggaattccctatggcgcggacacgggtggtgcaaaccgcttcaaaccgccgacggcctataaaccagaacgcgggagtgtgatcactgctcagtcttacgggccttcgtgtccacagtcgacttatgatgcctttcccccatttttctacagcaatgtcactgagatatcggaagattgtctgaatctagtgctcggacgtccaaagggaacgacaaaagacagtcgcttacctgtcatgatttacatccacggtggctccttcttcgaaggctcgaatgtggaagtaagccaacagcccgacggcttagttaaggagtctatcaagaatggactgcctgttattgaggtcggcatcaactatcgtcttggcccattcggattcgccaattctgacgctcttcaagccgaaggctctacaaatgctggactgagagaccaacgccttggaattgaatgggttcgcgatcatatcgagcagtttggaggagacccggagaagataactatcttcggacagtctagtggtggtctagctattggtatgcaaattatggcatatggtggcagtaaaccggtcccctttcagcagggcatatgtgagagccaggcactcgagcctggaatcacgggtaattttacaatggatgctatgcaattactcgtcgattatctcggctgcaacacaacggatctaaattcgccagagacggtcgagtgtctacgaagctttgacacagtcacattgttcaatgcatcctccgaaacacatttatcagacttcgctcataacatcggcgatacctggttgccagccgtcgacggcgacttccttcctgcagcgccatcagagcttatcagacagggcaggtttgcgaacgttacaactatggtcgtttggtgtgatggagatctgaatgttttcctccccacctcgattcaaacgaatcaagatacttatgatctcgtccaagcataccaacctgctatgacagctagcaacatcaacaagttgctctcactttatgacgtatcagagttctcagcaaatgaggccgcaggcttgagcagtgaattctaccgtgcgtcgcgaattacccgagacattctaatgacctgccagcccatccactatgccgaggccattgcacgtcgcggcaacgctgtgtatctcgtagattggaaccagactatcagtgatcaggttatcaaggctttgtggaacgaaacgggctacggggtaattcacacctctgatttagaatatgtattcggaaacatctcggccttagatccgggtggcattcctttccacatttcagctgcggatcgggccctggtgtccagaggatcacgctcatggtcgacattcgcaactactgggagcccaagtctaagtggccacgacacatttgttgggctttcgcatgcatttaccggaaatgaccaggtgaatgtgttcgtcgctggtggcccgagcgagggtctctccccgatagatggaccaggtgcacacccggcgattgaagtacagaagctcagggaacgatgcggattcatcaactctgaggaaattattaaacagctccaatattagattgcataattcagggctatcttgaatagagatcgttattcaatcatggagtttgctaatgcttgttggggtgtatcatgattctgattacgaagacacattaaattggttacattcgtaccaggataacataaattcgcgagacgttgcttgctgattgtaagtcgattattatatgctatagccctcgaattgctgcattcttttcagcactagctgaaatgggttgtagcagcgaagaagaccacctcctattgttttcaataggcaaattcccaatactccttccatgccgcatgagcaattctcgctagaatgagtgaaacatattggaactatcattgacgaacggagaaaaggatgtgaagtctgtctcgggcttgtagagatagctaggagggtcctatgatagggctacaatacatgcattgccacatgacacagaaaaggggaggtatgaagaataggataggatattacttacaatgtcaaattcagagccttagaggacatcatatgcatagattttcaagttacaatcatgtgcaccctacacttctagtctctaggtccagcagtttatcacaaacactgtgaagtgatgcgcaggaagttctgaagtctgcga

SEQ ID NO: 16396 - DNA, 558 bp, Muscodor strobelii
  misc_feature: SGI cDNA ID NO. 565452
  misc_feature: Elevated expression when VOC is produced
  misc_feature: Encodes the peptide sequence at SEQ ID NO 16397
attcatttgtgccttgagggcagtttcctctaccactcgttcttctcatggattcccctttcaagcgtctctaaccctcatgcgcttgctcctactgcctacaacttcttgggacacactgatcgcgcctatggcccccaagctggcggtgatgctcctatggcgcaactctggatgatatacggcaaagctgaccgccgttgggctggcgccgacttgtccgtcattgcgctcgaacttcttaccgtcttcatcgccggcccgctggcagcctacatttcgtatggcattgccaagaagaaggagagcgtcaacgtgctcatggtcgttattgcgacaatggaaatgtacggtggctggatcaccttctgccctgagtggcttgtcatgaactacaacctcgacactagcaccttcatgtacaagtggatctacctgatcttcttcaacgtcctttgggtcttcattcctttgtacgcttgctatattggtatttctgatatgaacgatgcctacgctgtgcgcgctaaagtcaaggccgcgagcaagtcgaagtaa

SEQ ID NO: 16397 - protein, 185 aa, Muscodor strobelii
  misc_feature: SGI Peptide ID NO. 565452
  misc_feature (1)..(180): Pfam Id: PF05241 Pfam Desc: Emopamil binding protein
  misc_feature (1)..(172): NCBI GI: 261355700 Blast Desc: EBDP3 [Verticillium albo-atrum VaMs.102]
  misc_feature (1)..(185): NCBI GI: 39974283 Blast Desc: MGG_00712 [Magnaporthe grisea 70-15] gi|145018354|gb|EDK02633.1| MGG_00712 [Magnaporthe grisea 70-15]
  misc_feature (2)..(179): NCBI GI: 46125547 Blast Desc: FG07151.1 [Gibberella zeae PH-1]
  misc_feature (2)..(180): NCBI GI: 256730950 Blast Desc: [Nectria haematococca mpVI 77-13-4]
  misc_feature (1)..(184): NCBI GI: 85101179 Blast Desc: NCU03752 [Neurospora crassa OR74A] gi|12718322|emb|CAC28673.1| related to C-8, 7 sterol isomerase/emopamil-binding protein [Neurospora crassa] conserved
  misc_feature (1)..(185): NCBI GI: 154298878 Blast Desc: BC1G_11686 [Botryotinia fuckeliana B05.10] gi|150857591|gb|EDN32783.1| BC1G_11686 [Botryotinia fuckeliana B05.10]
  misc_feature (1)..(181): NCBI GI: 156064059 Blast Desc: SS1G_00037 [Sclerotinia sclerotiorum 1980] gi|154690899|gb|EDN90637.1| SS1G_00037 [Sclerotinia sclerotiorum 1980]
  misc_feature (1)..(185): NCBI GI: 171694165 Blast Desc: protein product [Podospora anserina] gi|170947031|emb|CAP73835.1| protein product [Podospora anserina]
  misc_feature (2)..(172): NCBI GI: 119190649 Blast Desc: CIMG_05372 [Coccidioides immitis RS]
  misc_feature (2)..(172): NCBI GI: 240107259 Blast Desc: Emopamil binding protein [Coccidioides posadasii C735 delta SOWgp]
  misc_feature (49)..(157): SWISSPROT Homolog: EC 5.3.3.5 Cholestenol Delta-isomerase
  misc_feature: Useful for introducing or modulating the production of volatile compounds
IHLCLEGSFLYHSFFSWIPLSSVSNPHALAPTAYNFLGHTDRAYGPQAGGDAPMAQLWMIYGKADRRWAGADLSVIALELLTVFIAGPLAAYISYGIAKKKESVNVLMVVIATMEMYGGWITFCPEWLVMNYNLDTSTFMYKWIYLIFFNVLWVFIPLYACYIGISDMNDAYAVRAKVKAASKSK

SEQ ID NO: 16398 - DNA, 912 bp, Muscodor strobelii
  misc_feature: SGI EST ID NO. CUFF.38772.0
  misc_feature: Variant of the nucleotide sequence at SEQ ID NO 16396
attcatttgtgccttgagggcagtttcctctaccactcgttcttctcatggattcccctttcaagcgtctctaaccctcatgcgcttgctcctactgcctacaacttcttgggacacactgatcgcgcctatggcccccaagctggcggtgatgctcctatggcgcaactctggatgatatacggcaaagctgaccgccgttgggctggcgccgacttgtccgtcattgcgctcgaacttcttaccgtcttcatcgccggcccgctggcagcctacatttcgtatggcattgccaagaagaaggagagcgtcaacgtgctcatggtcgttattgcgacaatggaaatgtacggtggctggatcaccttctgccctgagtggcttgtcatgaactacaacctcgacactagcaccttcatgtacaagtggatctacctgatcttcttcaacgtcctttgggtcttcattcctttgtacgcttgctatattggtatttctgatatgaacgatgcctacgctgtgcgcgctaaagtcaaggccgcgagcaagtcgaagtaatcatggagctgggggatccgatgagtttgggggctttggtggtaatatgttggtttggcgatctgatcagtctatttcccgcgcttgcagtttggtaggatgacttgaacttccatggatggactatgatgacgatttcgtcatcgtatggcgttacagtatgtagtcaaagatttttgtattgtctggttgtatcatggtaggatagctcaatgccctcgttggttccgatccgttgctagagccacttaatcgtttttcgtaatggtatgggccgagcagctctacgtacaaaccacgatgtgtaatatgacgacccatcattggctcggtccgacgccaaccacgaaccgc

SEQ ID NO: 16399 - DNA, 2655 bp, Muscodor strobelii
  misc_feature: SGI cDNA ID NO. 565453
  misc_feature: Reduced expression when VOC is produced
  misc_feature: Encodes the peptide sequence at SEQ ID NO 16400
ccacgactacccgccctcggcaccctacgcatcgcccaccagctaccatcccccagcccccagcccggcagcgcatacggcagcagaccgtcggtgcccccgctgcagccgctgggcccgcacgacacacacaacacgcgctcgccaggcagcatctcgggcccctcgccctaccagcgccagacacccacctcgtccatcagcacggccagcgggagcggaggctatccttttccggcacagcagcagcagcagcagccaccgccgagccccggccagcggcaccagtaccctccctcgcacagctactcgcgcgacagctatcagtcccagtcccagacgcccacaggcatccctccctcccacggcggctccatctcctacgggccaggccagccacatcctcagcaacagcaacatccacagcacgcagtcgcacagacgccgccagtgggatctatgtccatccactccacgcccacgcccacatcggcacacagccaaccatcatcgttccccccggtctacggcagccccgtggccacccaccatcctcatcccgcacatctcgaccagcagcatccccatccccatcaccatcagtcgccgcagccgcccacgcccttgggtcctcccatggcgccccgacagtcgcccgccatgagctaccagcagccgccgagcccgtaccagcagagaatgtcgcagacgtcgatgccgtcgatgccgtcgtaccagcagcaggtgatgcagaggtccccgcctccgccgccgccgtcagcagtgccgcgggtgccaagcgtcgcgcacagtgcgtacgacgcgggcggtgaatcacaaaggaggtctcaatcccttcagtcccgcggcgagcgtgaaagaagcctcagtgtctcacccaagacccgtgtgcccagcttgccctccagcactgacgactcttttcctcactcccaaccttactcacactcacaaccacaaccacacccctactccaactccaaggatcctcatgcccatgcccagacacaagcacaggcccagtacaaccacaaccatataaaccacaacaacagcaacaacaacaacagcaacaacaacaacagcaacaacaacaacagcaacaacaacaacaacaaccgcctgcaacctcaacaccctcaacaccccggtgcaggtgcgggtgcaggcgcaggtgcagctacagctagcctaggtaacaactccgtcgccaccggcatggaccgcatcgagcgaatggagccacagcgggactcgacccctgcaaagaggaagatggacgaccgcgatctgcgacccgacgagatggaaaatcttcgacagccgccgccgccgcccaagctcaacggcacccacgccgctgctggttctatcaccactcctactgtagctccgccctcagctccgtcctctctgccgcgctcgtcggcctcgcccgtcatggcacgaaagaagcgcatagtccaccgagatccacccatttgggcccagtccggccacaaacgcccgctcggacgcagccgcaacttctcgatcaagaacccttccgcgaccacgcccagcacccgcgccgtcaacggtgtccatcacgagccccatgccgccattaagcccgaacgcttctcccgtcacaactcgcccgagacggctcgctccaccaccctccccaaagaagagcctggccacagccatcccgccatcgaccctagcttcccttgggagccgagcatcgagaacacgaagcccatcgatgtcatctcccgcgcagtcggagacttcttcttcgagcatgtcttgaccagtcccaacaccgatgacctccgcgcccgcggtgcacagtttgagatcgaggccaagctgggacacatcgtcgaccgagccacgaacgagcgtctctatctccctggcgtctcgagcggcgaaatagtcatagcgaacgacgccagaattatgttcgagagctccatgacgctgaaccaacatcgcttcttcaataattacctcaacgaacaagtcaaggcctccttccccggcaaccccaccgccgccggccctcgcgtccaggtccactacgtccaccgccgcgagaccgaccggttctttgagctgctgccagacatgcgacagcgactgcccgcctccgttgctagtcacctctcgtccaacacggcgctgaaagcccgcatcacttacgaccagaagacaggcagtgtcctggccaagattgtaaaggcccgagtggccaacctccacatccacatgccgcatctgcacctcgactgtcgcgtctccgtcaacatagaatgggactgggacgggccggcgcaggagatcgagcagaaccagatccccaacaaagaacggccggcagaccgtaacaaggaccgactgagctataagcagggcgtctaccagatcgacctcacgcaggtcacacagccgacgctgggaccgcggggcgaaccgggacccccgaagaaggagcatgagctggagatcgagctcgactcccaggtgctcctggaacagggcagaaagctgatgagtggagagaaacaacataggtacacggacttggtggatggattcgtcgacaatatcagactgctagccaggcgttgtgctgatagttaa

SEQ ID NO: 16400 - protein, 884 aa, Muscodor strobelii
  misc_feature: SGI Peptide ID NO. 565453
  misc_feature (590)..(842): Pfam Id: PF02940 Pfam Desc: mRNA capping enzyme, beta chain
  misc_feature (420)..(883): NCBI GI: 256724701 Blast Desc: NECHADRAFT_84518 [Nectria haematococca mpVI 77-13-4]
  misc_feature (420)..(883): NCBI GI: 46126241 Blast Desc: FG07498.1 [Gibberella zeae PH-1]
  misc_feature (424)..(883): NCBI GI: 171681559 Blast Desc: protein product [Podospora anserina] gi|170940738|emb|CAP65966.1| protein product [Podospora anserina]
  misc_feature (423)..(883): NCBI GI: 116203887 Blast Desc: CHGG_09827 [Chaetomium globosum CBS 148.51] gi|88175955|gb|EAQ83423.1| CHGG_09827 [Chaetomium globosum CBS 148.51]
  misc_feature (444)..(879): NCBI GI: 154314171 Blast Desc: BC1G_05179 [Botryotinia fuckeliana B05.10] gi|150848824|gb|EDN24017.1| BC1G_05179 [Botryotinia fuckeliana B05.10]
  misc_feature (491)..(879): NCBI GI: 156057605 Blast Desc: SS1G_04534 [Sclerotinia sclerotiorum 1980] gi|154702319|gb|EDO02058.1| SS1G_04534 [Sclerotinia sclerotiorum 1980]
  misc_feature (405)..(882): NCBI GI: 85089627 Blast Desc: NCU09449 [Neurospora crassa OR74A] gi|28919346|gb|EAA28799.1| [Neurospora crassa OR74A]
  misc_feature (625)..(883): NCBI GI: 261358561 Blast Desc: mRNA-capping enzyme subunit beta [Verticillium albo-atrum VaMs.102]
  misc_feature (579)..(879): NCBI GI: 67522481 Blast Desc: AN1697.2 [Aspergillus nidulans FGSC A4] gi|40745661|gb|EAA64817.1| AN1697.2 [Aspergillus nidulans FGSC A4] gi|259487038|tpe|CBF85389.1| TPA: mRNA capping AFUA_4G08510)
  misc_feature (579)..(879): NCBI GI: 121707140 Blast Desc: mRNA capping nucleoside-triphosphatase, [Aspergillus clavatus NRRL 1] gi|119399892|gb|EAW10318.1| mRNA capping nucleoside-triphosphatase, [Aspergillus clavatus NRRL 1]
  misc_feature: Useful for introducing or modulating the production of volatile compounds
PRLPALGTLRIAHQLPSPSPQPGSAYGSRPSVPPLQPLGPHDTHNTRSPGSISGPSPYQRQTPTSSISTASGSGGYPFPAQQQQQQPPPSPGQRHQYPPSHSYSRDSYQSQSQTPTGIPPSHGGSISYGPGQPHPQQQQHPQHAVAQTPPVGSMSIHSTPTPTSAHSQPSSFPPVYGSPVATHHPHPAHLDQQHPHPHHHQSPQPPTPLGPPMAPRQSPAMSYQQPPSPYQQRMSQTSMPSMPSYQQQVMQRSPPPPPPSAVPRVPSVAHSAYDAGGESQRRSQSLQSRGERERSLSVSPKTRVPSLPSSTDDSFPHSQPYSHSQPQPHPYSNSKDPHAHAQTQAQAQYNHNHINHNNSNNNNSNNNNSNNNNSNNNNNNRLQPQHPQHPGAGAGAGAGAATASLGNNSVATGMDRIERMEPQRDSTPAKRKMDDRDLRPDEMENLRQPPPPPKLNGTHAAAGSITTPTVAPPSAPSSLPRSSASPVMARKKRIVHRDPPIWAQSGHKRPLGRSRNFSIKNPSATTPSTRAVNGVHHEPHAAIKPERFSRHNSPETARSTTLPKEEPGHSHPAIDPSFPWEPSIENTKPIDVISRAVGDFFFEHVLTSPNTDDLRARGAQFEIEAKLGHIVDRATNERLYLPGVSSGEIVIANDARIMFESSMTLNQHRFFNNYLNEQVKASFPGNPTAAGPRVQVHYVHRRETDRFFELLPDMRQRLPASVASHLSSNTALKARITYDQKTGSVLAKIVKARVANLHIHMPHLHLDCRVSVNIEWDWDGPAQEIEQNQIPNKERPADRNKDRLSYKQGVYQIDLTQVTQPTLGPRGEPGPPKKEHELEIELDSQVLLEQGRKLMSGEKQHRYTDLVDGFVDNIRLLARRCADS

SEQ ID NO: 16401 - DNA, 3066 bp, Muscodor strobelii
  misc_feature: SGI EST ID NO. CUFF.38756.0
  misc_feature: Variant of the nucleotide sequence at SEQ ID NO 16399
gtcggtgctcctcctggtgctgcacctgcgacgcccgtgcaggcaggccacccgtcgtcgcatgcattccgcgactacagccactcgacgcacgcgtcgcccgtcgcccagccccacgactacccgccctcggcaccctacgcatcgcccaccagctaccatcccccagcccccagcccggcagcgcatacggcagcagaccgtcggtgcccccgctgcagccgctgggcccgcacgacacacacaacacgcgctcgccaggcagcatctcgggcccctcgccctaccagcgccagacacccacctcgtccatcagcacggccagcgggagcggaggctatccttttccggcacagcagcagcagcagcagccaccgccgagccccggccagcggcaccagtaccctccctcgcacagctactcgcgcgacagctatcagtcccagtcccagacgcccacaggcatccctccctcccacggcggctccatctcctacgggccaggccagccacatcctcagcaacagcaacatccacagcacgcagtcgcacagacgccgccagtgggatctatgtccatccactccacgcccacgcccacatcggcacacagccaaccatcatcgttccccccggtctacggcagccccgtggccacccaccatcctcatcccgcacatctcgaccagcagcatccccatccccatcaccatcagtcgccgcagccgcccacgcccttgggtcctcccatggcgccccgacagtcgcccgccatgagctaccagcagccgccgagcccgtaccagcagagaatgtcgcagacgtcgatgccgtcgatgccgtcgtaccagcagcaggtgatgcagaggtccccgcctccgccgccgccgtcagcagtgccgcgggtgccaagcgtcgcgcacagtgcgtacgacgcgggcggtgaatcacaaaggaggtctcaatcccttcagtcccgcggcgagcgtgaaagaagcctcagtgtctcacccaagacccgtgtgcccagcttgccctccagcactgacgactcttttcctcactcccaaccttactcacactcacaaccacaaccacacccctactccaactccaaggatcctcatgcccatgcccagacacaagcacaggcccagtacaaccacaaccatataaaccacaacaacagcaacaacaacaacagcaacaacaacaacagcaacaacaacaacagcaacaacaacaacaacaaccgcctgcaacctcaacaccctcaacaccccggtgcaggtgcgggtgcaggcgcaggtgcagctacagctagcctaggtaacaactccgtcgccaccggcatggaccgcatcgagcgaatggagccacagcgggactcgacccctgcaaagaggaagatggacgaccgcgatctgcgacccgacgagatggaaaatcttcgacagccgccgccgccgcccaagctcaacggcacccacgccgctgctggttctatcaccactcctactgtagctccgccctcagctccgtcctctctgccgcgctcgtcggcctcgcccgtcatggcacgaaagaagcgcatagtccaccgagatccacccatttgggcccagtccggccacaaacgcccgctcggacgcagccgcaacttctcgatcaagaacccttccgcgaccacgcccagcacccgcgccgtcaacggtgtccatcacgagccccatgccgccattaagcccgaacgcttctcccgtcacaactcgcccgagacggctcgctccaccaccctccccaaagaagagcctggccacagccatcccgccatcgaccctagcttcccttgggagccgagcatcgagaacacgaagcccatcgatgtcatctcccgcgcagtcggagacttcttcttcgagcatgtcttgaccagtcccaacaccgatgacctccgcgcccgcggtgcacagtttgagatcgaggccaagctgggacacatcgtcgaccgagccacgaacgagcgtctctatctccctggcgtctcgagcggcgaaatagtcatagcgaacgacgccagaattatgttcgagagctccatgacgctgaaccaacatcgcttcttcaataattacctcaacgaacaagtcaaggcctccttccccggcaaccccaccgccgccggccctcgcgtccaggtccactacgtccaccgccgcgagaccgaccggttctttgagctgctgccagacatgcgacagcgactgcccgcctccgttgctagtcacctctcgtccaacacggcgctgaaagcccgcatcacttacgaccagaagacaggcagtgtcctggccaagattgtaaaggcccgagtggccaacctccacatccacatgccgcatctgcacctcgactgtcgcgtctccgtcaacatagaatgggactgggacgggccggcgcaggagatcgagcagaaccagatccccaacaaagaacggccggcagaccgtaacaaggaccgactgagctataagcagggcgtctaccagatcgacctcacgcaggtcacacagccgacgctgggaccgcggggcgaaccgggacccccgaagaaggagcatgagctggagatcgagctcgactcccaggtgctcctggaacagggcagaaagctgatgagtggagagaaacaacataggtacacggacttggtggatggattcgtcgacaatatcagactgctagccaggcgttgtgctgatagttaattatctaactgactgagataaagatcgcgattgtaaatagtttggtttgggttacggtaccattacggataatatcattatgaatatgaagcgttttcatcttctacctcggagttcggatagacgtcgtgttggggtgtgtgtggacgtgataggcaatggaatcgtatgttactatgggtcaagtaggttagtgacgagcattcctggctactgacttaggatatatgaaaatctctggtatatctatcatctacctaattgtaaggctttgagaatctccgtacttatatggccc

SEQ ID NO: 16402 - DNA, 1761 bp, Muscodor strobelii
  misc_feature: SGI cDNA ID NO. 565454
  misc_feature: Encodes the peptide sequence at SEQ ID NO 16403
atggcgcctcaacaaatagagcgtctactctcccggccaacagcaaagccctacagaacgggaaatctcgagccaagctcagaatcttcaggaccatacctgaatgatgaaggatacatcgacttcaagcccggcgacgatatcgaaaatccacatgaatggagctcaacacgtcgcttctacatcacagtgtgctgcgtcttattagtcgtcaatgcgacttttgcgtcgtcgagtcccagtggttgtataaaaggcattgctaagagttttggtgtctcgactgaggccgcaggtctgactatcacgttattcttgttaggatatgttgctggccctttagtttttgcgccgctcagcgagttctatggtcggcgctggatcttctacatgacattcctctcctacatagcattcaacttcctctgcgctttcgcaccaaacttcggatccttactggtcggacgtttcctcaccggaacattcgtctcggcgccgctttccaacggtcccggtgtcttggctgatctctggggacccgtcgaacgcggaaacgccatggcggtattctcctccatggtatgggttggcccagcactcgggcccgttgtcggcggatttatacagctaaaagaagactggcgctggagcttctatgtccttctttggctcggtgccgggacagcgatcctcatgttcactattcccgagacgtttggccccgttattctgttgcaccgcgcgagacgtgtacgagcgcagaagatccctgggttcgaagatgtcaaagcaccgattgagaaagaggacggaagtctattgcaggtatacaaagtggcactcacgcgcccgtggattttgctcttcgatccgataagtttcctttgtgcgctatacatgagcgtggtgtacgcactgctgtatatgctgttttctatctatcctatcgtattccaagacatgcgtggttggaatgccggagtgggtgagctcccacttctgggaacagctatcggtgcagcgattgggggcgtaattacgtttgtagattcgagaatgaaggcaaagaagctagagaatgggggcaagatcgtacccgaggatagactcacgctggccattatgggaggtgtgggctttccgatcactatcggatctaccacaaaatcgctaacatcagacgtagtgttttggttcgcatggacagcaaacttcaatagcgttcattgggttgtgccaacgctcgctggtgtatttctcggcacatcgctcatgttgatcttcgttggatatctgaactacttagtcgacacctacctgatgtatgcagcatctgcaatcgccatcaacacggtaactcgatctttggcaggtgctgccgcccccttgtttacgaattatatgttcgaagccttgggcgttggcccaggcggcagtttaattggtggagtagcaacgcttcttgcccttattccatttgctttttataaatatggcgcgcgcatccgcagacgttcacgctttgcccctactgacgatgatgagcacgatgagcacgacgatgaggaaaagcaggccagaagaagtgatggagattcagctgcaagtactgtcgttggtgatggaaaaataccacatgccttcaaggaaaatgagaaacatcgtgaaggcgatgatgacctccagaatgatcttggagagcctagagatgagaatgcacagtttggggatgagaggaggcaaggtgaaaatataaattag

SEQ ID NO: 16403 - protein, 586 aa, Muscodor strobelii
  misc_feature: SGI Peptide ID NO. 565454
  misc_feature (66)..(462): Pfam Id: PF07690 Pfam Desc: Major Facilitator Superfamily
  misc_feature (65)..(506): Pfam Id: PF00083 Pfam Desc: Sugar (and other) transporter
  misc_feature (99)..(160): Pfam Id: PF00083 Pfam Desc: Sugar (and other) transporter
  misc_feature (1)..(542): NCBI GI: 46137165 Blast Desc: FG10098.1 [Gibberella zeae PH-1]
  misc_feature (4)..(554): NCBI GI: 154291422 Blast Desc: BC1G_15172 [Botryotinia fuckeliana B05.10] gi|150846785|gb|EDN21978.1| BC1G_15172 [Botryotinia fuckeliana B05.10]
  misc_feature (4)..(557): NCBI GI: 156054196 Blast Desc: SS1G_05946 [Sclerotinia sclerotiorum 1980] gi|154703726|gb|EDO03465.1| SS1G_05946 [Sclerotinia sclerotiorum 1980]
  misc_feature (31)..(552): NCBI GI: 46108840 Blast Desc: FG01302.1 [Gibberella zeae PH-1]
  misc_feature (5)..(522): NCBI GI: 256734327 Blast Desc: NECHADRAFT_31547 [Nectria haematococca mpVI 77-13-4]
  misc_feature (46)..(525): NCBI GI: 121701221 Blast Desc: MFS multidrug transporter, [Aspergillus clavatus NRRL 1] gi|119397018|gb|EAW07449.1| MFS multidrug transporter, [Aspergillus clavatus NRRL 1]
  misc_feature (46)..(536): NCBI GI: 189189792 Blast Desc: benomyl/methotrexate resistance protein [Pyrenophora tritici-repentis Pt-1C-BFP] gi|187972841|gb|EDU40340.1| benomyl/methotrexate resistance protein [Pyrenophora Pt-1C-BFP]
  misc_feature (46)..(568): NCBI GI: 46115766 Blast Desc: FG03725.1 [Gibberella zeae PH-1]
  misc_feature (46)..(571): NCBI GI: 70995990 Blast Desc: MFS multidrug transporter [Aspergillus fumigatus Af293] gi|66850385|gb|EAL90712.1| MFS multidrug transporter, [Aspergillus fumigatus Af293]
  misc_feature (46)..(571): NCBI GI: 159131504 Blast Desc: MFS multidrug transporter, [Aspergillus fumigatus A1163]
MAPQQIERLLSRPTAKPYRTGNLEPSSESSGPYLNDEGYIDFKPGDDIENPHEWSSTRRFYITVCCVLLVVNATFASSSPSGCIKGIAKSFGVSTEAAGLTITLFLLGYVAGPLVFAPLSEFYGRRWIFYMTFLSYIAFNFLCAFAPNFGSLLVGRFLTGTFVSAPLSNGPGVLADLWGPVERGNAMAVFSSMVWVGPALGPVVGGFIQLKEDWRWSFYVLLWLGAGTAILMFTIPETFGPVILLHRARRVRAQKIPGFEDVKAPIEKEDGSLLQVYKVALTRPWILLFDPISFLCALYMSVVYALLYMLFSIYPIVFQDMRGWNAGVGELPLLGTAIGAAIGGVITFVDSRMKAKKLENGGKIVPEDRLTLAIMGGVGFPITIGSTTKSLTSDVVFWFAWTANFNSVHWVVPTLAGVFLGTSLMLIFVGYLNYLVDTYLMYAASAIAINTVTRSLAGAAAPLFTNYMFEALGVGPGGSLIGGVATLLALIPFAFYKYGARIRRRSRFAPTDDDEHDEHDDEEKQARRSDGDSAASTVVGDGKIPHAFKENEKHREGDDDLQNDLGEPRDENAQFGDERRQGENIN

SEQ ID NO: 16404 - DNA, 1761 bp, Muscodor strobelii
  misc_feature: SGI cDNA ID NO. 565455
  misc_feature: Encodes the peptide sequence at SEQ ID NO 16405
atggatgaagaccagggcccttcccaaataacgccacctgtaacggcgtcacgccgcacaattggcgaccgactacggggtgtgcggaagaagttcacgacgcgcgagggcttgcttggaaattacgattatggcttcttgtttatgcccaatatcccatttatgcgcaaacaccgacaagcatcgccattcttcggcctgaacgacaagatgccggtctttttggccttgctactcggacttcagcattcgcttgccatgttagcgggaatcatcacgcctccgttgatcatggccggtaccgctggtgtgaatctaggtgtcgacttacagcaatatcttgttagtacggcgctcatcgtttcgggcattttgagcatgattcagatcacgaggtttaagataaggggaacgccttactacattggcacaggcttgatatccgtagtgggtatctcattctccattattcccgtggcccttggtgcctttgcccagatgtacaccaatggtttctgtccggtagccgaagatggcacgaaactaccttgcccagatgcttatggggctctgcttggtacttcggctgtggctgcattacttgaaatcattatcgcctttatccctccgagagcaatgctgaagatttttccgcccttagtcacaggcccgacagtgatgcttattggtatcagcttgatcgaaagtggcttcaagggctggcttggtggaagcggttcctgttttggtggaacgggattctatgccaaatgtcccgatattgacgctcctcatgccttgccatggggctcgccagaatatctcggtctcggcttctctgtctttgcaaccatcattctgtgtgagcgctttggatctccgatcatgaagtcgatgagcgtcatcattggactgttggtgggaagcatcatcgcagctgctactggctacttcgactcaagcacgatcacacaagcaccagtcgcatcctttatttgggtgcatactttcaaactcactgtatatgcgccccttatccttcccatgctcgccgttttcatcatttgcccttgcgaagctattggcgatattaccgccacttgcgatgtctcgcggcttgaagtcgacggcaagatctacgagacccgaattcaaggcggtgttctcgcagatggaatcaatagtatcttggccgcattggcaactattacccccatgactacattcgctcagaataatggtgtcatcgcattgacccgctgcgcaaaccggacggctgggtattgctgctgtttgttcctgattgtggctggaattttcgccaaattcgcagcggcactgatcgccattccggcctccgtgctcggcggcatgacaacattcctgttcacctccgttgccgtatcaggtatatccatcatagctcgcggcgttgtcttcacccgccgcaaccgcttcattctcacagctggtctggcaatcggctatggcgccacgctagtcccaacctattttgacaacatcttcagctacaacgggcccaatacgcgattgattggcttcttgaacgctattgagctggtcgtcacgactggatatgcagtcacagcgcttgttaccatgctacttaatcttatactacccgaggaggtcgaggagactgagtcggtcgagcgggaagagcaggtagtgaatgagcgaagagtcgagagcgatgagatggaggacagcgagcgaatgaaagagcagaaggccgtctag

SEQ ID NO: 16405 - protein, 586 aa, Muscodor strobelii
  misc_feature: SGI Peptide ID NO. 565455
  misc_feature (74)..(504): Pfam Id: PF00860 Pfam Desc: Permease family
  misc_feature (1)..(582): NCBI GI: 171679379 Blast Desc: protein product [Podospora anserina] gi|170939315|emb|CAP64543.1| protein product [Podospora anserina]
  misc_feature (1)..(560): NCBI GI: 85092177 Blast Desc: purine permease [Neurospora crassa OR74A] gi|28920668|gb|EAA30029.1| purine permease [Neurospora crassa OR74A]
  misc_feature (1)..(561): NCBI GI: 116203733 Blast Desc: CHGG_09750 [Chaetomium globosum CBS 148.51] gi|88175878|gb|EAQ83346.1| CHGG_09750 [Chaetomium globosum CBS 148.51]
  misc_feature (1)..(584): NCBI GI: 256724825 Blast Desc: [Nectria haematococca mpVI 77-13-4]
  misc_feature (1)..(579): NCBI GI: 39945872 Blast Desc: MGG_08056 [Magnaporthe grisea 70-15] gi|145019293|gb|EDK03521.1| MGG_08056 [Magnaporthe grisea 70-15]
  misc_feature (1)..(573): NCBI GI: 46126235 Blast Desc: FG07495.1 [Gibberella zeae PH-1]
  misc_feature (13)..(585): NCBI GI: 189210391 Blast Desc: purine permease [Pyrenophora tritici-repentis Pt-1C-BFP] gi|187977620|gb|EDU44246.1| purine permease [Pyrenophora tritici-repentis Pt-1C-BFP]
  misc_feature (5)..(584): NCBI GI: 169766098 Blast Desc: [Aspergillus oryzae RIB40] gi|238482731|ref|XP_002372604.1| purine permease, [Aspergillus flavus NRRL3357] gi|83017210|dbj|BAE53534.1| purine permease
  misc_feature (1)..(578): NCBI GI: 88984992 Blast Desc: UAPA_EMENI RecName: Full=Uric acid-xanthine permease; AltName: Full=UAPA transporter gi|62867716|emb|CAA50681.2| uric acid-xanthine permease [Emericella nidulans]
  misc_feature (5)..(578): NCBI GI: 145237268 Blast Desc: An07g01950 [Aspergillus niger] gi|134075748|emb|CAK48096.1| protein product [Aspergillus niger]
MDEDQGPSQITPPVTASRRTIGDRLRGVRKKFTTREGLLGNYDYGFLFMPNIPFMRKHRQASPFFGLNDKMPVFLALLLGLQHSLAMLAGIITPPLIMAGTAGVNLGVDLQQYLVSTALIVSGILSMIQITRFKIRGTPYYIGTGLISVVGISFSIIPVALGAFAQMYTNGFCPVAEDGTKLPCPDAYGALLGTSAVAALLEIIIAFIPPRAMLKIFPPLVTGPTVMLIGISLIESGFKGWLGGSGSCFGGTGFYAKCPDIDAPHALPWGSPEYLGLGFSVFATIILCERFGSPIMKSMSVIIGLLVGSIIAAATGYFDSSTITQAPVASFIWVHTFKLTVYAPLILPMLAVFIICPCEAIGDITATCDVSRLEVDGKIYETRIQGGVLADGINSILAALATITPMTTFAQNNGVIALTRCANRTAGYCCCLFLIVAGIFAKFAAALIAIPASVLGGMTTFLFTSVAVSGISIIARGVVFTRRNRFILTAGLAIGYGATLVPTYFDNIFSYNGPNTRLIGFLNAIELVVTTGYAVTALVTMLLNLILPEEVEETESVEREEQVVNERRVESDEMEDSERMKEQKAV

SEQ ID NO: 16406 - DNA, 1633 bp, Muscodor strobelii
  misc_feature: SGI EST ID NO. CUFF.38781.1
  misc_feature: Variant of the nucleotide sequence at SEQ ID NO 16404
gttttggtggaacgggattctatgccaaatgtcccgatattgacgctcctcatgccttgccatggggctcgccagaatatctcggtctcggcttctctgtctttgcaaccatcattctgtgtgagcgctttggatctccgatcatgaagtcgatgagcgtcatcattggactgttggtgggaagcatcatcgcagctgctactggctacttcgactcaagcacgatcacacaagcaccagtcgcatcctttatttgggtgcatactttcaaactcactgtatatgcgccccttatccttcccatgctcgccgttttcatcatttgcccttgcgaagctattggcgatattaccgccacttgcgatgtctcgcggcttgaagtcgacggcaagatctacgagacccgaattcaaggcggtgttctcgcagatggaatcaatagtatcttggccgcattggcaactattacccccatgactacattcgctcagaataatggtgtcatcgcattgacccgctgcgcaaaccggacggctgggtattgctgctgtttgttcctgattgtggctggaattttcgccaaattcgcagcggcactgatcgccattccggcctccgtgctcggcggcatgacaacattcctgttcacctccgttgccgtatcaggtatatccatcatagctcgcggcgttgtcttcacccgccgcaaccgcttcattctcacagctggtctggcaatcggctatggcgccacgctagtcccaacctattttgacaacatcttcagctacaacgggcccaatacgcgattgattggcttcttgaacgctattgagctggtcgtcacgactggatatgcagtcacagcgcttgttaccatgctacttaatcttatactacccgaggaggtcgaggagactgagtcggtcgagcgggaagagcaggtagtgaatgagcgaagagtcgagagcgatgagatggaggacagcgagcgaatgaaagagcagaaggccgtctagatgacccctacacgaacatgcagttattggtacatgactaagctgttgtggtccacaaactcataccctttgcgatgtcgaatggaatggattttggaccgatcatctatttggctgtgaaactaccataatccgacgcacaatgtgccttgcaagattccgcgttagggagtcagtcggcttcgagaacgtagtggcccatttattatgatgccttgagacccaccctactcttaactacgccgtctctcatccgacgtcaccaccatctttgccgcgtagaagcttcccccaaggctaaaatattctacgtgctcatgaggttttcgcttcttcttgaaggaaaacgagcgcaggactgtgctcgggtatatcgtatttgcttgtttcaaaccctaatctactcttccggaagcatctccgaggcaaagatgaaagcttggctcatatactcgacgtcatacccgctttgacttacaaatacagtgcttatggggaacattggagatagagatccgatctgtgtccgattcttgttatatccggcgaaccatcgctcgattttgcttagatgcttgggcaggtagtaattcgacagattgtaaagcggcgtc

SEQ ID NO: 16407 - DNA, 1167 bp, Muscodor strobelii
  misc_feature: SGI cDNA ID NO. 565456
  misc_feature: Elevated expression when VOC is produced
  misc_feature: Encodes the peptide sequence at SEQ ID NO 16408
atggccatcatccactggacacaaatagtaccactctggctactcatatccgcagccatctcagcgacagcaatgcgtaatcttatgtacttgaccggacagcatccggtcgtcccagatgcctctctcacggcccccatcactcatgtagccctggctttcatgggctctcacatcttcaatgtcgatgaggagaccggatcatggccaatcttcatgtctgtcgatgaggcccgatccaaattccatcctggtaccaaaataatggtagccatcggcggctggggtgacaccgccggttttgatgcagctgctcgtacccaagagactcgagccagatttgcacgcaatgtgaaggccatggtgcagcaaacgggtgctgatggtgtagatatcgactgggaataccctggtggcaacggagaggactacaagcaggtccccaacgcggaaaaagcatgggagatcgatgcctacccgctccttctcgccgaaattcgcaaggcactcggccccgacaagctcatctcggccgcagtgccaggcattccacgggatatgttggcattcacagcagacactgtgccggccatcatgacctcacttgatatcctcaacgttatgtcttacgacctgatgaatcggcgagataccgtaacgaagcaccacactggtgtccgggctagtcttgagtctgtgaatgcgtacatggcggcaggtgctcccgccgacaagatcaatctgggattcgcattctacaccaagtatttccgcgtcgaagggcaatcatgcgctgagaatcccatcggttgtcctaccggaccgatggaggacgagaagacgggtgcggatcttggtaaaactggtggcttctcatggcatgatactgtgcccgacgacgtcaaggattcgtttgaaaaggcgaagagcgagggagaatacgatgaggtgggtggtggttattggtattatgacagagaccagtacctttggtggacattcgacgacgcaaaggcggtcgagaaaaagttcccgctcatcatcgaggagaggaagttgggcggcgtttttgcctggggactaggcgaggatgcgcctgagttcgagcatttggcagcgcttaacaaaggggttctagacctgatgaagaagaaggatgagctgtga

SEQ ID NO: 16408 - protein, 388 aa, Muscodor strobelii
  misc_feature: SGI Peptide ID NO. 565456
  misc_feature (25)..(364): Pfam Id: PF00704 Pfam Desc: Glycosyl hydrolases family 18
  misc_feature (83)..(364): Pfam Id: PF00704 Pfam Desc: Glycosyl hydrolases family 18
  misc_feature (15)..(378): NCBI GI: 261358556 Blast Desc: chitinase 18-4 [Verticillium albo-atrum VaMs.102]
  misc_feature (29)..(380): NCBI GI: 67515879 Blast Desc: AN0221.2 [Aspergillus nidulans FGSC A4] gi|40746938|gb|EAA66094.1| AN0221.2 [Aspergillus nidulans FGSC A4] gi|259489567|tpe|CBF89945.1| TPA: conserved [Aspergillus FGSC
  misc_feature (19)..(388): NCBI GI: 164425616 Blast Desc: NCU06020 [Neurospora crassa OR74A] gi|157070997|gb|EAA30374.2| NCU06020 [Neurospora crassa OR74A]
  misc_feature (14)..(388): NCBI GI: 171680857 Blast Desc: protein product [Podospora anserina] gi|27764323|emb|CAD60603.1| protein product [Podospora anserina] gi|170940056|emb|CAP65283.1| protein product [Podospora anserina]
  misc_feature (55)..(384): NCBI GI: 39945868 Blast Desc: MGG_08054 [Magnaporthe grisea 70-15] gi|145019291|gb|EDK03519.1| MGG_08054 [Magnaporthe grisea 70-15]
  misc_feature (68)..(387): NCBI GI: 189206183 Blast Desc: chitinase 18-4 [Pyrenophora tritici-repentis Pt-1C-BFP] gi|187975519|gb|EDU42145.1| chitinase 18-4 [Pyrenophora tritici-repentis Pt-1C-BFP]
  misc_feature (28)..(381): NCBI GI: 154283367 Blast Desc: HCAG_02650 [Ajellomyces capsulatus NAm1] gi|150410659|gb|EDN06047.1| HCAG_02650 [Ajellomyces capsulatus NAm1]
  misc_feature (4)..(388): NCBI GI: 256724706 Blast Desc: NECHADRAFT_48349 [Nectria haematococca mpVI 77-13-4]
  misc_feature (28)..(381): NCBI GI: 225561819 Blast Desc: chitinase [Ajellomyces capsulatus G186AR]
  misc_feature (28)..(374): NCBI GI: 240275425 Blast Desc: chitinase [Ajellomyces capsulatus H143]
  misc_feature (87)..(373): SWISSPROT Homolog: EC 3.2.1.14 Chitinase
  misc_feature: Useful for introducing or modulating the production of volatile compounds
MAIIHWTQIVPLWLLISAAISATAMRNLMYLTGQHPVVPDASLTAPITHVALAFMGSHIFNVDEETGSWPIFMSVDEARSKFHPGTKIMVAIGGWGDTAGFDAAARTQETRARFARNVKAMVQQTGADGVDIDWEYPGGNGEDYKQVPNAEKAWEIDAYPLLLAEIRKALGPDKLISAAVPGIPRDMLAFTADTVPAIMTSLDILNVMSYDLMNRRDTVTKHHTGVRASLESVNAYMAAGAPADKINLGFAFYTKYFRVEGQSCAENPIGCPTGPMEDEKTGADLGKTGGFSWHDTVPDDVKDSFEKAKSEGEYDEVGGGYWYYDRDQYLWWTFDDAKAVEKKFPLIIEERKLGGVFAWGLGEDAPEFEHLAALNKGVLDLMKKKDEL

SEQ ID NO: 16409 - DNA, 2579 bp, Muscodor strobelii
  misc_feature: SGI EST ID NO. CUFF.38830.2
  misc_feature: Variant of the nucleotide sequence at SEQ ID NO 16407
gtaacattctagacctggacagtaagggtagctgttcacaataatgagcataccgggagataacattcattctgttttctaataggaaactaccccactaagacttcttcgacctggtctcgaggggcagtttcactggagctgtcaatgctgttgcacgttacaccttgtcgtcaatcgacatgagtttctttacatatgccctggtggctgtttcattcgtattctatgttagagaaacaagcaccagacctattaatcgcattctaggttgagacaaagaacgctgcggttccagccactccgaggtcaccaacacacaccctctagcttcagtatggccatcatccactggacacaaatagtaccactctggctactcatatccgcagccatctcagcgacagcaatgcgtaatcttatgtacttgaccggacagcatccggtcgtcccagatgcctctctcacggcccccatcactcatgtagccctggctttcatgggctctcacatcttcaatgtcgatgaggagaccggatcatggccaatcttcatgtctgtcgatgaggcccgatccaaattccatcctggtaccaaaataatggtagccatcggcggctggggtgacaccgccggttttgatgcagctgctcgtacccaagagactcgagccagatttgcacgcaatgtgaaggccatggtgcagcaaacgggtgctgatggtgtagatatcgactgggaataccctggtggcaacggagaggactacaagcaggtccccaacgcggaaaaagcatgggagatcgatgcctacccgctccttctcgccgaaattcgcaaggcactcggccccgacaagctcatctcggccgcagtgccaggcattccacgggatatgttggcattcacagcagacactgtgccggccatcatgacctcacttgatatcctcaacgttatgtcttacgacctgatgaatcggcgagataccgtaacgaagcaccacactggtgtccgggctagtcttgagtctgtgaatgcgtacatggcggcaggtgctcccgccgacaagatcaatctgggattcgcattctacaccaagtatttccgcgtcgaagggcaatcatgcgctgagaatcccatcggttgtcctaccggaccgatggaggacgagaagacgggtgcggatcttggtaaaactggtggcttctcatggcatgatactgtgcccgacgacgtcaaggattcgtttgaaaaggcgaagagcgagggagaatacgatgaggtgggtggtggttattggtattatgacagagaccagtacctttggtggacattcgacgacgcaaaggcggtcgagaaaaagttcccgctcatcatcgaggagaggaagttgggcggcgtttttgcctggggactaggcgaggatgcgcctgagttcgagcatttggcagcgcttaacaaaggggttctagacctgatgaagaagaaggatgagctgtgaggttgatgtcgtggcgcgcacagcttgcgacgatgtgagatcatgaaaaaaaactagttaatgcgatgtattcgacaacccagaaagaagagcattctcgtctgcgatgcgcatgcgttgataggcgatcatctacatgctaccattcgttgtctagtagtatgctccatcggtcttcatcaagatttttcgcccacaagagcacaatctcagaaactcttcacgttcagtggtgtgtcagtattcaaatacaccgcgaggttagggagcgcgttcaggcgtatcccgatataaattctcttcgaaggtaagatctgctgcggaatgagttgtcgcatttcgcctgcgaagtttcattgcacggttttttgtttcttttgctcagacgcgtcatggattaattgcagcttcatgacggcggcacccgcccgcgtcgcgctagaccctcgcttgcaccggaatcgctatcggctgttaagctactaacgttgtattcaatttgcctaggaatgttgtggttttttagaaatttgtagaaaatactggaatgatctatatcacccagttcccactgaaatgatagaggttattacaatgagccttcctgttgagatgcgagatagggatgttcaatgcaaaactgtagcgttgatactataaatcaagacacgtgagataagacaaatgaatgcatttacggattagacatgcagaactccattcactactgcataatgagaaggggcaaccacgaaggttatagcatcgagcactgctggtatctcagtatctggagacagcgctgcctggctcgtctggcaaacggaatcatcacgtgcatattgtaagcagctccaagtcatttgatgtttaaggcggtgcgatggccggttgcctcgccacaaatgcaaccttgtgtatagtgcagtagttgaagtgcaatgggaagcaggtacgtaaggcacatctttcgaacggtttgtgccgcggactgcagtgacctcattcgccaagtccgagttattgttgtttactttcttcgcctgatggaaaaaggcctcaactagaatatatc

SEQ ID NO: 16410 - DNA, 1272 bp, Muscodor strobelii
  misc_feature: SGI cDNA ID NO. 565457
  misc_feature: Encodes the peptide sequence at SEQ ID NO 16411
atgttcgaaaactactgcacgctcccgctgagcgccgagctcttcgcgcaggccgtccaccccaccgagcctctgctgggcgtcggtctgtcgtcgggccacgtccagtgcttccgcctgccgggccccgaagacgacgaagacgcggatgccagtgtcgtgtccgacggcaagggcaccatcgacaccgtctggcgcacccgccggcacaagggcagctgccgctcgctcgtcttctcccgcgacggcgcctcgctctactcggccggcaccgactccctcgtcaagcacttctcccccgcgtccggcagggtcgcctccaagatcgccgtccccagcttcaagtccaagcccgacgcgcccgccctgctgcacgccctctcgccccagaccctgctcctggcctgcgactcgggcgtcctgcacctcctcgacctgcgcgactgcgccctcgccgcctccaagccccagcagagccacttcccccacgacgacttcgtctccagcctcacgcccctgcccccgaccgccgagagcaccaccggcttcagcaagcagtggatctccaccggcggcaccaccctcgccgtcaccgacctgcgccgcggcgtcatggtccgcagcgaggaccaggaggacgagctcctctgctccgccttcgtctccggcatggggcccaagaagaacagagacaatggcatcatcgctgtcggcaccggcaccggcgtcttgaccatctgggacaagggcgtctgggacgaccagcaggaccgagtcaccgtcgaccgcggcaagggaggtggcgagagtctggactgtatcgtacaggtccccgagcatgtgggacgcggcaagaaggtcgccatcggtcttggtgatggcaatcttcgtatcgtcgacctcatgaagcgtgaggtcgttggctccctgaggcacgacgatatcgacgctgttgtcgggatcgatttcgacaatcaaggccggatgatcagtggcggcggtcagacggtgaagatctggcaggagtcccccgaattaggccagggaagtgacgacgatagtgacgatagcgatgacgacgacgatgacgattcggatagagatgccaaacccccaccgaaaggtaagaggccggcaaagaaggacccgaactctgacgattcagacagtgatgaccagaagaagcggaagaaaagaaagaagggcaagggcaaggttgacctgggtgtgtatggcgctcatggcatcatgagattcgagggtttggattag

SEQ ID NO: 16411 - protein, 423 aa, Muscodor strobelii
  misc_feature: SGI Peptide ID NO. 565457
  misc_feature (1)..(423): NCBI GI: 256724826 Blast Desc: NECHADRAFT_48204 [Nectria haematococca mpVI 77-13-4]
  misc_feature (1)..(423): NCBI GI: 46126233 Blast Desc: FG07494.1 [Gibberella zeae PH-1]
  misc_feature (1)..(343): NCBI GI: 171680855 Blast Desc: protein product [Podospora anserina] gi|74697104|sp|Q875D4.1|JIP5_PODAN RecName: Full=WD repeat-containing protein JIP5 gi|27764322|emb|CAD60602.1|
  misc_feature (1)..(343): NCBI GI: 189045850 Blast Desc: protein product [Podospora anserina] gi|74697104|sp|Q875D4.1|JIP5_PODAN RecName: Full=WD repeat-containing protein JIP5 gi|27764322|emb|CAD60602.1|
  misc_feature (1)..(343): NCBI GI: 145612045 Blast Desc: MGG_08053 [Magnaporthe grisea 70-15] gi|145019290|gb|EDK03518.1| MGG_08053 [Magnaporthe grisea 70-15]
  misc_feature (1)..(343): NCBI GI: 116200606 Blast Desc: CHGG_10848 [Chaetomium globosum CBS 148.51] gi|121927463|sp|Q2GMF6.1|JIP5_CHAGB RecName: Full=WD repeat-containing protein JIP5 gi|88175562|gb|EAQ83030.1| CBS
  misc_feature (1)..(342): NCBI GI: 156057601 Blast Desc: SS1G_04532 [Sclerotinia sclerotiorum 1980] gi|189045846|sp|A7EGU0.1|JIP5_SCLS1 RecName: Full=WD repeat-containing protein jip5 gi|154702317|gb|EDO02056.1| 1980]
  misc_feature (1)..(341): NCBI GI: 154314179 Blast Desc: BC1G_05183 [Botryotinia fuckeliana B05.10] gi|189045840|sp|A6RWR8.1|JIP5_BOTFB RecName: Full=WD repeat-containing protein jip5 gi|150848828|gb|EDN24021.1|
  misc_feature (1)..(382): NCBI GI: 85093035 Blast Desc: NCU06021 [Neurospora crassa OR74A] gi|74696390|sp|Q7S4F7.1|JIP5_NEUCR RecName: Full=WD repeat-containing protein jip-5 gi|28921056|gb|EAA30375.1| crassa
  misc_feature (1)..(354): NCBI GI: 169763960 Blast Desc: [Aspergillus oryzae RIB40] gi|238489937|ref|XP_002376206.1| nucleolar protein Jip5, [Aspergillus flavus NRRL3357] gi|121801323|sp|Q2UBM4.1|JIP5_ASPOR
MFENYCTLPLSAELFAQAVHPTEPLLGVGLSSGHVQCFRLPGPEDDEDADASVVSDGKGTIDTVWRTRRHKGSCRSLVFSRDGASLYSAGTDSLVKHFSPASGRVASKIAVPSFKSKPDAPALLHALSPQTLLLACDSGVLHLLDLRDCALAASKPQQSHFPHDDFVSSLTPLPPTAESTTGFSKQWISTGGTTLAVTDLRRGVMVRSEDQEDELLCSAFVSGMGPKKNRDNGIIAVGTGTGVLTIWDKGVWDDQQDRVTVDRGKGGGESLDCIVQVPEHVGRGKKVAIGLGDGNLRIVDLMKREVVGSLRHDDIDAVVGIDFDNQGRMISGGGQTVKIWQESPELGQGSDDDSDDSDDDDDDDSDRDAKPPPKGKRPAKKDPNSDDSDSDDQKKRKKRKKGKGKVDLGVYGAHGIMRFEGLD

SEQ ID NO: 16412 - DNA, 1998 bp, Muscodor strobelii
  misc_feature: SGI EST ID NO. CUFF.38774.0
  misc_feature: Variant of the nucleotide sequence at SEQ ID NO 16410
ttttgaggtacctggaaattgatggaattggaaatcagaacagattccggtaagcccctcagtacagttccgatgttgctgtccggtgctgatgcgattcttacctgtatgcaaagtaggagcaatcggggtattagttgacagtcaattcgagttgctattcaaaggacgatcgcgagtttgtgcgcctgggtacacgtacctaccttaaggtagtcgcagttccatgtatttagcccgatctggcggggggcgcacatctgtcttgagggttcaagcttggaaggtacgcgctgttcctggctcgcctagtgtaagcccactatagttgggaagctacaacaaaaactttgacgtgacgcggaaagctcccgcgattgcccacacactccaacttaacgacaacaataaccacgcgataacatgggacagtagcctcaattcgagcccattcgagccaattggaactaccttatatagaactaccaggggcggcgccatgttcgaaaactactgcacgctcccgctgagcgccgagctcttcgcgcaggccgtccaccccaccgagcctctgctgggcgtcggtctgtcgtcgggccacgtccagtgcttccgcctgccgggccccgaagacgacgaagacgcggatgccagtgtcgtgtccgacggcaagggcaccatcgacaccgtctggcgcacccgccggcacaagggcagctgccgctcgctcgtcttctcccgcgacggcgcctcgctctactcggccggcaccgactccctcgtcaagcacttctcccccgcgtccggcagggtcgcctccaagatcgccgtccccagcttcaagtccaagcccgacgcgcccgccctgctgcacgccctctcgccccagaccctgctcctggcctgcgactcgggcgtcctgcacctcctcgacctgcgcgactgcgccctcgccgcctccaagccccagcagagccacttcccccacgacgacttcgtctccagcctcacgcccctgcccccgaccgccgagagcaccaccggcttcagcaagcagtggatctccaccggcggcaccaccctcgccgtcaccgacctgcgccgcggcgtcatggtccgcagcgaggaccaggaggacgagctcctctgctccgccttcgtctccggcatggggcccaagaagaacagagacaatggcatcatcgctgtcggcaccggcaccggcgtcttgaccatctgggacaagggcgtctgggacgaccagcaggaccgagtcaccgtcgaccgcggcaagggaggtggcgagagtctggactgtatcgtacaggtccccgagcatgtgggacgcggcaagaaggtcgccatcggtcttggtgatggcaatcttcgtatcgtcgacctcatgaagcgtgaggtcgttggctccctgaggcacgacgatatcgacgctgttgtcgggatcgatttcgacaatcaaggccggatgatcagtggcggcggtcagacggtgaagatctggcaggagtcccccgaattaggccagggaagtgacgacgatagtgacgatagcgatgacgacgacgatgacgattcggatagagatgccaaacccccaccgaaaggtaagaggccggcaaagaaggacccgaactctgacgattcagacagtgatgaccagaagaagcggaagaaaagaaagaagggcaagggcaaggttgacctgggtgtgtatggcgctcatggcatcatgagattcgagggtttggattaggtttctcggaaaggacgttttctcttcatgataccccggctttacgactataggctttagctatgagatacaagttttacgaatacactcacccacaatgcgaaagtctcccgtatatgtactgattccttaccagaacacgcagagtctagagcgcttccactgcttctataaaatcgcggcgcttacaattctagatttggtttccatcgaaatgaaatgttaga

SEQ ID NO: 16413 - DNA, 999 bp, Muscodor strobelii
  misc_feature: SGI cDNA ID NO. 565458
  misc_feature: Encodes the peptide sequence at SEQ ID NO 16414
atgggcgaaatatcagaccaagaacttggcgaaatatacacttttgctgtgcaactgggcaaagatgcaggcgagctgttgatgggctttgcgaaggcgaggtggggtgataaggggaccgcagagctgcttgccgaggagaaggatagttcggttgacatcgttactaaggctgatgaagatgcggaggcatttatcaaaagctctattgagaagagataccctgaccacaagttcattggcgaagaaacatactccaaaggcagttcgcgggactacctcatcactgacgctccaacatggtgcgtcgacccgcttgatggcacagtcaactatacacacttatttcccatgttctgcgtctcgatcgcattcatcatcaaccacgagcccgtaataggggtcatttacgcgccattcatgaaccaattattttcatcatgcaaagggagaggcgcatggcttaacgagatgcaacagctgcctctaataaggaacccaatcccgcctatgcctgcaagagcgccaggcggttgtgtcttctcgtgtgaatggggcaaggatagacgggacatcccggatggaaatctgcatcgcaagatcgagagttttgtcaacatggccgctgaagcgagcgggagaggtggtaagggaggtatggtgcacggcgtgcgaagcctgggaagtgctacgcttgatcttgcctacgtggctatgggatcctttgatatttggtgggagggtggatgttgggaatgggatgtggcggctggcattgctatcttgctggaggctggtggtcttgtcaccacggcaaatccgccgaaggaatacgagacagcagaaatctctgaagcaaggttaggaagcagactttatcttgctattagaccagcggggccatctgagacggagactggacgtcaaacacaagaacgagttatccgcgaagtgtggaagagggttagagaactagattacagtagaccaggtgtttag

SEQ ID NO: 16414 - protein, 332 aa, Muscodor strobelii
  misc_feature: SGI Peptide ID NO. 565458
  misc_feature (8)..(323): Pfam Id: PF00459 Pfam Desc: Inositol monophosphatase family
  misc_feature (4)..(331): NCBI GI: 171680853 Blast Desc: protein product [Podospora anserina] gi|27764321|emb|CAD60601.1| protein product [Podospora anserina] gi|170940054|emb|CAP65281.1| protein product [Podospora anserina]
  misc_feature (1)..(331): NCBI GI: 255936475 Blast Desc: Pc13g08390 [Penicillium chrysogenum Wisconsin 54-1255] gi|211583884|emb|CAP91908.1| Pc13g08390 [Penicillium chrysogenum Wisconsin 54-1255]
  misc_feature (3)..(331): NCBI GI: 145235205 Blast Desc: An03g03700 [Aspergillus niger] gi|134057932|emb|CAK47809.1| protein product [Aspergillus niger]
  misc_feature (3)..(331): NCBI GI: 169781488 Blast Desc: [Aspergillus oryzae RIB40] gi|238498272|ref|XP_002380371.1| inositol monophosphatase QutG, [Aspergillus flavus NRRL3357] gi|83773949|dbj|BAE64074.1| protein
  misc_feature (4)..(330): NCBI GI: 146345504 Blast Desc: QUTG_EMENI RecName: Full=Protein qutG gi|259488549|tpe|CBF88072.1| TPA: Protein qutG [Source:UniProtKB/Swiss-Prot;Acc:P25416] [Aspergillus nidulans
  misc_feature (4)..(331): NCBI GI: 2399 Blast Desc: QUTG [Emericella nidulans]
  misc_feature (3)..(331): NCBI GI: 70995542 Blast Desc: inositol monophosphatase QutG [Aspergillus fumigatus Af293] gi|66850161|gb|EAL90488.1| inositol monophosphatase QutG, [Aspergillus fumigatus Af293] gi|159131281|gb|EDP56394.1| QutG,
  misc_feature (3)..(331): NCBI GI: 119495642 Blast Desc: inositol monophosphatase QutG, [Neosartorya fischeri NRRL 181] gi|119412763|gb|EAW22704.1| inositol monophosphatase QutG, [Neosartorya fischeri NRRL 181]
  misc_feature (1)..(332): NCBI GI: 261359969 Blast Desc: QA-X [Verticillium albo-atrum VaMs.102]
  misc_feature (8)..(331): NCBI GI: 85093039 Blast Desc: protein qutG [Neurospora crassa OR74A] gi|131760|sp|P11634.1|QAX_NEUCR RecName: Full=Protein QA-X gi|295928|emb|CAA32748.1| qa-x [Neurospora crassa] protein qutG
  misc_feature (39)..(327): SWISSPROT Homolog: EC 3.1.3.25 Inositol-phosphate phosphatase
MGEISDQELGEIYTFAVQLGKDAGELLMGFAKARWGDKGTAELLAEEKDSSVDIVTKADEDAEAFIKSSIEKRYPDHKFIGEETYSKGSSRDYLITDAPTWCVDPLDGTVNYTHLFPMFCVSIAFIINHEPVIGVIYAPFMNQLFSSCKGRGAWLNEMQQLPLIRNPIPPMPARAPGGCVFSCEWGKDRRDIPDGNLHRKIESFVNMAAEASGRGGKGGMVHGVRSLGSATLDLAYVAMGSFDIWWEGGCWEWDVAAGIAILLEAGGLVTTANPPKEYETAEISEARLGSRLYLAIRPAGPSETETGRQTQERVIREVWKRVRELDYSRPGV

SEQ ID NO: 16415 - DNA, 1468 bp, Muscodor strobelii
  misc_feature: SGI EST ID NO. CUFF.39052.0
  misc_feature: Variant of the nucleotide sequence at SEQ ID NO 16413
ctctctcgagataagaacgttttcagatcattctcaaattcgttcaacttaatgagaaatcgactgcatactcatttcattttggatcccgtgcgcgaatcacgatacatttatcgtccacgtctagttgtcttactatcgctcaccatatactcgacttcgatctcgcaactagtccagagtagatcagagagtgaacatgggcgaaatatcagaccaagaacttggcgaaatatacacttttgctgtgcaactgggcaaagatgcaggcgagctgttgatgggctttgcgaaggcgaggtggggtgataaggggaccgcagagctgcttgccgaggagaaggatagttcggttgacatcgttactaaggctgatgaagatgcggaggcatttatcaaaagctctattgagaagagataccctgaccacaagttcattggcgaagaaacatactccaaaggcagttcgcgggactacctcatcactgacgctccaacatggtgcgtcgacccgcttgatggcacagtcaactatacacacttatttcccatgttctgcgtctcgatcgcattcatcatcaaccacgagcccgtaataggggtcatttacgcgccattcatgaaccaattattttcatcatgcaaagggagaggcgcatggcttaacgagatgcaacagctgcctctaataaggaacccaatcccgcctatgcctgcaagagcgccaggcggttgtgtcttctcgtgtgaatggggcaaggatagacgggacatcccggatggaaatctgcatcgcaagatcgagagttttgtcaacatggccgctgaagcgagcgggagaggtggtaagggaggtatggtgcacggcgtgcgaagcctgggaagtgctacgcttgatcttgcctacgtggctatgggatcctttgatatttggtgggagggtggatgttgggaatgggatgtggcggctggcattgctatcttgctggaggctggtggtcttgtcaccacggcaaatccgccgaaggaatacgagacagcagaaatctctgaagcaaggttaggaagcagactttatcttgctattagaccagcggggccatctgagacggagactggacgtcaaacacaagaacgagttatccgcgaagtgtggaagagggttagagaactagattacagtagaccaggtgtttagatacagtgtatattgtagaataagagagtatatatatggcagctacattatgtacagatgaatatagatcccacatgcacaacgcatctatctgttgtacgaacgaaacccaacgggcgtctggtggttgctttatttcatgatgatcacgttaagccgccctcgacggtctataaccttgatctctgcgtgatgagggttgcaattacttctttacacttggcaacaggaagatctttctgctgtagtccggtccagagtttacactgt

SEQ ID NO: 16416 - DNA, 948 bp, Muscodor strobelii
  misc_feature: SGI cDNA ID NO. 565459
  misc_feature: Encodes the peptide sequence at SEQ ID NO 16417
atgagcgttgaagtcattgcctcatcacaaccggcggcggcgcctaggccccagcgccatggctacctctttggtcaaaaaatcgccgcgtcgatgtcaccacccttccaccaaacaatctttgacacgctttccatgccctgggcccaaaaacgcctcgattccgccgacatacactcatttcttaacctcatagccgatccagcttgttttgggtcttcagtaacaatgcccaacaaagtggccattatgccttacttagattccctcactgaggagtgccaagaagttggtgcttgcaacactatcttctttgaggaggagaacggtgtaagaaagctgaggggagctaatacggacgtcatcggcgtgagggagtcattttaccaaaatatcaagaatgccgatgcggttttccatgacagaccagcaatggtaataggtggcgggggcgctgcacggtctgcggtctacgcactgcggaaatggatgcgcgccacgaagatatacctcgtgaaccgtgatgccggggaggtcgaagcagtgatctcagattgccaagcaagaggatacggcgacagcttgctccacgtttcgaccatggcacaggcagacggtctggaagcgcctggtgcaattgtggcatgcgttcctgatttcccgcccaggactcaggaggaagttgttgcgagaggtgttattgagacgtttttgaggaaagagagaaagggcgcgatgctggaaatgtgttataatcctacgccttatacagagcttggtggcattgcggaagaggaagggtggcaggtcattcttgggactgaggccatgatttggcaggggtttgaacagtgtaaactctggaccggactacagcagaaagatcttcctgttgccaagtgtaaagaagtaattgcaaccctcatcacgcagagatcaaggttatag

SEQ ID NO: 16417 - protein, 315 aa, Muscodor strobelii
  misc_feature: SGI Peptide ID NO. 565459
  misc_feature (124)..(260): Pfam Id: PF01488 Pfam Desc: Shikimate / quinate 5-dehydrogenase
  misc_feature (23)..(103): Pfam Id: PF08501 Pfam Desc: Shikimate dehydrogenase substrate binding domain
  misc_feature (137)..(260): Pfam Id: PF01488 Pfam Desc: Shikimate / quinate 5-dehydrogenase
  misc_feature (16)..(314): NCBI GI: 256726705 Blast Desc: NECHADRAFT_32803 [Nectria haematococca mpVI 77-13-4]
  misc_feature (1)..(313): NCBI GI: 46122653 Blast Desc: FG05704.1 [Gibberella zeae PH-1]
  misc_feature (8)..(314): NCBI GI: 161788995 Blast Desc: FG05704.1 [Gibberella zeae PH-1]
  misc_feature (8)..(314): NCBI GI: 164425618 Blast Desc: NCU06025 [Neurospora crassa OR74A] gi|157070998|gb|EAA30379.2| conserved [Neurospora crassa OR74A]
  misc_feature (19)..(315): NCBI GI: 39972973 Blast Desc: MGG_07781 [Magnaporthe grisea 70-15] gi|145012555|gb|EDJ97209.1| MGG_07781 [Magnaporthe grisea 70-15]
  misc_feature (15)..(314): NCBI GI: 171680847 Blast Desc: protein product [Podospora anserina] gi|170940051|emb|CAP65278.1| protein product [Podospora anserina]
  misc_feature (15)..(314): NCBI GI: 27764318 Blast Desc: protein product [Podospora anserina]
  misc_feature (8)..(284): NCBI GI: 3064 Blast Desc: quinate 5-dehydrogenase [Neurospora crassa]
  misc_feature (1)..(311): NCBI GI: 169616532 Blast Desc: SNOG_11439 [Phaeosphaeria nodorum SN15] gi|111060027|gb|EAT81147.1| SNOG_11439 [Phaeosphaeria nodorum SN15]
  misc_feature (6)..(311): NCBI GI: 189206249 Blast Desc: quinate dehydrogenase [Pyrenophora tritici-repentis Pt-1C-BFP] gi|187975552|gb|EDU42178.1| quinate dehydrogenase [Pyrenophora tritici-repentis Pt-1C-BFP]
  misc_feature (20)..(314): SWISSPROT Homolog: EC 1.1.1.24 Quinate dehydrogenase
MSVEVIASSQPAAAPRPQRHGYLFGQKIAASMSPPFHQTIFDTLSMPWAQKRLDSADIHSFLNLIADPACFGSSVTMPNKVAIMPYLDSLTEECQEVGACNTIFFEEENGVRKLRGANTDVIGVRESFYQNIKNADAVFHDRPAMVIGGGGAARSAVYALRKWMRATKIYLVNRDAGEVEAVISDCQARGYGDSLLHVSTMAQADGLEAPGAIVACVPDFPPRTQEEVVARGVIETFLRKERKGAMLEMCYNPTPYTELGGIAEEEGWQVILGTEAMIWQGFEQCKLWTGLQQKDLPVAKCKEVIATLITQRSRL

SEQ ID NO: 16418 - DNA, 4605 bp, Muscodor strobelii
  misc_feature: SGI EST ID NO. CUFF.39053.1
  misc_feature: Variant of the nucleotide sequence at SEQ ID NO 16416
ctccacctcttcgtcaatgaagccgacttcttcgataagataaatattatcaacgggcagattgcgaatccatgataggttcgttaagccttgctcccgcttgccattggcgatcagccatcgtggtgactccctgatccagagagcgccaaagaagagcattccagcggggatcagctggacggcaaagggtataatccattgggtgtgtgtaggaggaacgtgcaaattaacgccgtagttgatccagaagccaacaagacctccaatttgccagcccagctcatagataccgactaatcgacctctagcagcgggaggggacaactcggagatgtagataggcacaatcatagaacaagcaccgacaccaatgccagcaagcacacgaccaccatagatgagaccaagtcctctggcagcattggcaccaagcatcaatcctgcgccgagaataaagatagagaggaagatgaaaagcgagactcttcgaccccagtagtgtgttgagccgtaggcgaaaagactaccgaaaaacgcgccggcttgatacagggagacgatgttggctgagatgagccccttttcctctgtcgaaagagaagcgaatccaaattcctcaatgaacgatggaagcttcagggtcgtgccgataaaggcagaatcataaccaatcatcatcgatgcacatgatgcgatggatgctgaggcatacaccttccagttgtaaacggccttgggcgtcggccgatcttctttaagcgtaaggagacccatgatgatagcggtacaggccgtcaggtcgtacaaggcgccagagttcgtcagcagaggtagtggtagtagagtagctgagcgaccagtgcgatgaggacgaagtctcaagtgacgagggtgggaaagttagttttataaaagtgattcaatggcgaaccagtccggggccccggtgttaggactccagccaagcgatgtccaagggcagcatggttggggatgtagtctggggtaccaaataacctagttgacttgaacctatgaggtcttacgaattttttacgatgctctgtatggcgatcagcagggccctgacgggcggtttcccacagtctgggagcgccacatccacttctggaagactaattggtaaaacatagttccctcagcaaacacgcgtctgtactcgatgaggaatcgcccagtgcctcagctagtgagccctaggcatctctaagcattgagcgtcaatgagtccaggaaggcgccagcttccaggccttggttgtggccccagacatgacaactacgcgcccgttgactggagatatgcttgccgagtttggcctgtaattgactaaagagggcaccgagtcgcagcaagcgggggagttttaggactagtcccagcctgataatcttaactaatttcttgacatttcttcatgaatgactcgtcggccggttacgtggatagtaaggttcgagtgaagggaagggtgtgaagacatggatggttctcgggccaaggaattcggcgcgttggaaaaacacttttccagagttttcaacccggctgcggggtggggtcggatcttgtacggatctggccacccgtccctcagcgagcgctggagccgcttctttcgctgccggccaaatgctttgctttccagagactatccccttccatatatcctctgagaagcgatgcgagatagctatgttccatgatttgacacccattatctgcccctccaggctacgcgttacatcaatcaagcggtaccactgtgacaatcatacagacatttttagcagcgccatctcggatcacctcggtgcattgaccgagctaaacactgtaaattgataacccacctgatactattctgacctcgcactgaaccctattctatcaacaaacaacccgtgttgatctcaagctccaccgtcgtacaactcttcacaaccaacgagccatatcccacgagtgatacatcacaactcgacaaaatgagcgttgaagtcattgcctcatcacaaccggcggcggcgcctaggccccagcgccatggctacctctttggtcaaaaaatcgccgcgtcgatgtcaccacccttccaccaaacaatctttgacacgctttccatgccctgggcccaaaaacgcctcgattccgccgacatacactcatttcttaacctcatagccgatccagcttgttttgggtcttcagtaacaatgcccaacaaagtggccattatgccttacttagattccctcactgaggagtgccaagaagttggtgcttgcaacactatcttctttgaggaggagaacggtgtaagaaagctgaggggagctaatacggacgtcatcggcgtgagggagtcattttaccaaaatatcaagaatgccgatgcggttttccatgacagaccagcaatggtaataggtggcgggggcgctgcacggtctgcggtctacgcactgcggaaatggatgcgcgccacgaagatatacctcgtgaaccgtgatgccggggaggtcgaagcagtgatctcagattgccaagcaagaggatacggcgacagcttgctccacgtttcgaccatggcacaggcagacggtctggaagcgcctggtgcaattgtggcatgcgttcctgatttcccgcccaggactcaggaggaagttgttgcgagaggtgttattgagacgtttttgaggaaagagagaaagggcgcgatgctggaaatgtgttataatcctacgccttatacagagcttggtggcattgcggaagaggaagggtggcaggtcattcttgggactgaggccatgatttggcaggggtttgaacagtgtaaactctggaccggactacagcagaaagatcttcctgttgccaagtgtaaagaagtaattgcaaccctcatcacgcagagatcaaggttatagaccgtcgagggcggcttaacgtgatcatcatgaaataaagcaaccaccagacgcccgttgggtttcgttcgtacaacagatagatgcgttgtgcatgtgggatctatattcatctgtacataatgtagctgccatatatatactctcttattctacaatatacactgtatctaaacacctggtctactgtaatctagttctctaaccctcttccacacttcgcggataactcgttcttgtgtttgacgtccagtctccgtctcagatggccccgctggtctgtgtcgattcattagatccctcttccgatcaaaactcaacccggaagtagacgaaactcacctaatagcaagataaagtctgcttcctaaccttgcttcagagatttctgctgtctcgtattccttcggcggatttgccgtggtgacaagaccaccagcctccagcaagatagcaatgccagccgccacatccctagatatctttagcttagtacacgatttttcatcgtcacatacgagtcgaaactcaccattcccaacatccaccctcccaccaaatatcaaaggatcccatagccacgtaggcaagatcaagcgtagcacttcccaggcttcgcacgccgtgcaccatacctcccttaccacctctcccgctcgcttcagcggccatgttgacaaaactctcgatcttgcgatgcagatttccatccgggatgtcccgtctatccttgccccattcacacgagaagacacaaccgcctggcgctcttgcaggcataggcgggattgggttccttattagaggcagctgttgcatctcgttaagccatgcgcctctccctttgcatgatgaaaataattggttcatgaatggcgcgtaaatgacccctattacgggctcgtggttgatgatgaatgcgatcgagacgcagaacatgggaaataagtgtgtatagttgactgtgccatcaagcgggtcgacgcaccatgttggagcgtcagtgatgaggtagtcccgcgaactgcctttggagtatgtttcttcgccaatgaacctataaaattataagcatacataatcttgacatacaaatttcctgccgttcttctcatctggccaggaaaagacatacttgtggtcagggtatctcttctcaatagagcttttgataaatgcctccgcatctgcatttcaacgatcagcactcaaaccaccacatatacatcttctcgtaacaaatataaagttgaagtagacgtaccttcatcagccttagtaacgatgtcaaccgaactatccttctcctcggcaagcagctctgcggtccccttatcaccccacctcgccttcgcaaagcccatcaacagctcgcctgcatctttgcccagttgcacagcaaaagtgtatatttcgccaagttcttggtctgatatttcgcccatgttcactctctgatctactctggactagttgcgagatcgaagtcgagtatatggtgagcgatagtaagacaactagacgtggacgataaatgtatcgtgattcgcgcacgggatccaaaatgaaatgagtatgcagtcgatttctcattaagttgaacgaatttgagaatgatctgaaaacgttcttatctcgagagag

SEQ ID NO: 16419 - DNA, 1656 bp, Muscodor strobelii
  misc_feature: SGI cDNA ID NO. 565460
  misc_feature: Encodes the peptide sequence at SEQ ID NO 16420
atgggtctccttacgcttaaagaagatcggccgacgcccaaggccgtttacaactggaaggtgtatgcctcagcatccatcgcatcatgtgcatcgatgatgattggttatgattctgcctttatcggcacgaccctgaagcttccatcgttcattgaggaatttggattcgcttctctttcgacagaggaaaaggggctcatctcagccaacatcgtctccctgtatcaagccggcgcgtttttcggtagtcttttcgcctacggctcaacacactactggggtcgaagagtctcgcttttcatcttcctctctatctttattctcggcgcaggattgatgcttggtgccaatgctgccagaggacttggtctcatctatggtggtcgtgtgcttgctggcattggtgtcggtgcttgttctatgattgtgcctatctacatctccgagttgtcccctcccgctgctagaggtcgattagtcggtatctatgagctgggctggcaaattggaggtcttgttggcttctggatcaactacggcgttaatttgcacgttcctcctacacacacccaatggattataccctttgccgtccagctgatccccgctggaatgctcttctttggcgctctctggatcagggagtcaccacgatggctgatcgccaatggcaagcgggagcaaggcttaacgaacctatcatggattcgcaatctgcccgttgataatatttatcttatcgaagaagtcggcttcattgacgaagaggtggagaggtttaatggtacgtatggaaagatcccacgcgagctatttcttgattgtagggaggttggggctggattctggaagcccttcgctgctcttaagcaacgaaaggttcagtggcggttcttcctcgggagcgctctgttcttctggcaaaacggttccggaatcaacgcgatcaactactactctcccactgtcttctctagcctgggtattacaggaactaacaccggattcctcacgactggcatcttcggtgttgtcaagactgttttgacagttgtctggcttctattcttgattgatcacttgggacgcagaaagctactcatgtacggtgcaatcggtggttcgctttgcatgtggtttattggtgcctacatcaagatcgctgatcccgaaaatcaccctacggacaatgttcctccggcaggctacgcagccatcttcttcttctacctctggactgccttctacactccaagttggaacggaacaccttgggtccttaactccgagatgttcgatcagaacactcgatcgctcggtcaagcgtcagcagcagcaagcaactggctatggaacttcctgatctcgcgctttaccccgcagctctttatcgcattgaagtatggcgtgtacttcttcttcgcctcgctaatgattttatctgtcatatttgtcttcttccttattccggagactaagggcattccactcgaggccatggaccgtctatttgccgtgcggccggtccgtaaggcgcatgataagataatggatgagctgcatgctcaggatgaggagtggaggcgcaatgctgacgggatcgtgttgactgacgaagagaagatgaaggttgatcagcgggagaatatctaa

SEQ ID NO: 16420 - protein, 551 aa, Muscodor strobelii
  misc_feature: SGI Peptide ID NO. 565460
  misc_feature (28)..(457): Pfam Id: PF07690 Pfam Desc: Major Facilitator Superfamily
  misc_feature (24)..(505): Pfam Id: PF00083 Pfam Desc: Sugar (and other) transporter
  misc_feature (278)..(505): Pfam Id: PF00083 Pfam Desc: Sugar (and other) transporter
  misc_feature (24)..(260): Pfam Id: PF00083 Pfam Desc: Sugar (and other) transporter
  misc_feature (1)..(550): NCBI GI: 3065 Blast Desc: quinate transporter [Neurospora crassa]
  misc_feature (1)..(525): NCBI GI: 39972969 Blast Desc: MGG_07779 [Magnaporthe grisea 70-15] gi|145012553|gb|EDJ97207.1| MGG_07779 [Magnaporthe grisea 70-15]
  misc_feature (1)..(550): NCBI GI: 74665876 Blast Desc: QAY_NEUAF RecName: Full=Quinate permease; AltName: Full=Quinate transporter gi|64174680|gb|AAY41161.1| qa-y [Neurospora africana]
  misc_feature (1)..(549): NCBI GI: 46122659 Blast Desc: FG05707.1 [Gibberella zeae PH-1]
  misc_feature (1)..(549): NCBI GI: 189206251 Blast Desc: quinate permease [Pyrenophora tritici-repentis Pt-1C-BFP] gi|187975553|gb|EDU42179.1| quinate permease [Pyrenophora tritici-repentis Pt-1C-BFP]
  misc_feature (1)..(550): NCBI GI: 255936467 Blast Desc: Pc13g08350 [Penicillium chrysogenum Wisconsin 54-1255] gi|211583880|emb|CAP91904.1| Pc13g08350 [Penicillium chrysogenum Wisconsin 54-1255]
  misc_feature (1)..(531): NCBI GI: 67517935 Blast Desc: QUTD_EMENI Quinate permease (Quinate transporter) [Aspergillus nidulans FGSC A4] gi|238054312|sp|P15325.2|QUTD_EMENI RecName: Full=Quinate Quinate
  misc_feature (1)..(549): NCBI GI: 116200618 Blast Desc: CHGG_10854 [Chaetomium globosum CBS 148.51] gi|88175568|gb|EAQ83036.1| CHGG_10854 [Chaetomium globosum CBS 148.51]
  misc_feature (1)..(531): NCBI GI: 2400 Blast Desc: quinate permease [Emericella nidulans]
  misc_feature (1)..(551): NCBI GI: 115491615 Blast Desc: quinate permease [Aspergillus terreus NIH2624] gi|114197295|gb|EAU38995.1| quinate permease [Aspergillus terreus NIH2624]
MGLLTLKEDRPTPKAVYNWKVYASASIASCASMMIGYDSAFIGTTLKLPSFIEEFGFASLSTEEKGLISANIVSLYQAGAFFGSLFAYGSTHYWGRRVSLFIFLSIFILGAGLMLGANAARGLGLIYGGRVLAGIGVGACSMIVPIYISELSPPAARGRLVGIYELGWQIGGLVGFWINYGVNLHVPPTHTQWIIPFAVQLIPAGMLFFGALWIRESPRWLIANGKREQGLTNLSWIRNLPVDNIYLIEEVGFIDEEVERFNGTYGKIPRELFLDCREVGAGFWKPFAALKQRKVQWRFFLGSALFFWQNGSGINAINYYSPTVFSSLGITGTNTGFLTTGIFGVVKTVLTVVWLLFLIDHLGRRKLLMYGAIGGSLCMWFIGAYIKIADPENHPTDNVPPAGYAAIFFFYLWTAFYTPSWNGTPWVLNSEMFDQNTRSLGQASAAASNWLWNFLISRFTPQLFIALKYGVYFFFASLMILSVIFVFFLIPETKGIPLEAMDRLFAVRPVRKAHDKIMDELHAQDEEWRRNADGIVLTDEEKMKVDQRENI

SEQ ID NO: 16421 - DNA, 920 bp, Muscodor strobelii
  misc_feature: SGI EST ID NO. CUFF.39062.0
  misc_feature: Variant of the nucleotide sequence at SEQ ID NO 16419
ggctaccagagggaggttggggctggattctggaagcccttcgctgctcttaagcaacgaaaggttcagtggcggttcttcctcgggagcgctctgttcttctggcaaaacggttccggaatcaacgcgatcaactactactctcccactgtcttctctagcctgggtattacaggaactaacaccggattcctcacgactggcatcttcggtgttgtcaagactgttttgacagttgtctggcttctattcttgattgatcacttgggacgcagaaagctactcatgtacggtgcaatcggtggttcgctttgcatgtggtttattggtgcctacatcaagatcgctgatcccgaaaatcaccctacggacaatgttcctccggcaggctacgcagccatcttcttcttctacctctggactgccttctacactccaagttggaacggaacaccttgggtccttaactccgagatgttcgatcagaacactcgatcgctcggtcaagcgtcagcagcagcaagcaactggctatggaacttcctgatctcgcgctttaccccgcagctctttatcgcattgaagtatggcgtgtacttcttcttcgcctcgctaatgattttatctgtcatatttgtcttcttccttattccggagactaagggcattccactcgaggccatggaccgtctatttgccgtgcggccggtccgtaaggcgcatgataagataatggatgagctgcatgctcaggatgaggagtggaggcgcaatgctgacgggatcgtgttgactgacgaagagaagatgaaggttgatcagcgggagaatatctaatgtgaaatataaatctatcgtgtaggatctttagttttagacttcgtcataaattagttcaatttgacaactgttatgatccg

SEQ ID NO: 16422 - DNA, 1056 bp, Muscodor strobelii
  misc_feature: SGI cDNA ID NO. 565461
  misc_feature: Encodes the peptide sequence at SEQ ID NO 16423
atgccgtgccgactaggaataacgtcaatgtcccttgggcggtgttgggccggccactccttcatccacaagatcgacatggctcgcgcacatggatatcaaggtatcgagctcttctacgaggacctcgtcgatatcgcagagcaacttcccggtggcgacacgcgagagaatgaattgcaagcagcgcacatagttcgtcagctatgcgccgagcggaatctcgctattctctgccttcagccttttgcgcactatgagggcttggtagaccgccaagaacacctaaaccgtctagagaaactcatattctggttcgagctcgcgcgcgcactgggcacggatatgatacagatcccgtcgagtttcggccccgccgacgagatttccgaggatatgaatctggccatagacgacttacaaaaagtggccgatatgggactgcgacaacagccaccagttcgcttcgtctatgaggcgctatgctttggtacgaggtataacttgtgggaacagagctgggaaatagtacaaggtgtcaacagaccgaactttgggctctgcatagacactttcaacatcgcgggtcgcatatacgctgaccctgcatgcccgaccggtcgcacaccaaattgcgatcaggttgtcagagagtctattgctcgacttttatctactgtcgatgttaagaaagttttctatgtccaagttgtcgacgccgagaggctctcagagccgctagtcgagggccacgagttttacaatgttgaccaaacttcacgaatgagctggtcacgaaactgtcgattattctacggcgagaaggagcatggtgcatatcttccaatcgcagagatttcgagagcaatcttccacgggcttggattcgaggggtgggtgagtcttgaattattcaacaggaggatgaacgacacagatcctactgtgcccatggagttggcaagccgtggtgcggcgtcctggaaaaagctcgttagggacatgaagctaagaaccgaggatgcggatcgagggaggatgaccgcgtcgctctaa

SEQ ID NO: 16423 - protein, 351 aa, Muscodor strobelii
  misc_feature: SGI Peptide ID NO. 565461
  misc_feature (25)..(277): Pfam Id: PF01261 Pfam Desc: Xylose isomerase-like TIM barrel
  misc_feature (1)..(340): NCBI GI: 171680849 Blast Desc: protein product [Podospora anserina] gi|27764319|emb|CAD60599.1| protein product [Podospora anserina] gi|170940052|emb|CAP65279.1| protein product [Podospora anserina]
  misc_feature (1)..(351): NCBI GI: 85093046 Blast Desc: NCU06024 [Neurospora crassa OR74A] gi|112790|sp|P07046.1|3SHD_NEUCR RecName: Full=3-dehydroshikimate dehydratase; Short=DHS dehydratase; Short=DHSase DHS dehydratase
  misc_feature (1)..(351): NCBI GI: 256727277 Blast Desc: NECHADRAFT_32792 [Nectria haematococca mpVI 77-13-4]
  misc_feature (1)..(351): NCBI GI: 46122651 Blast Desc: FG05703.1 [Gibberella zeae PH-1]
  misc_feature (1)..(345): NCBI GI: 189206253 Blast Desc: 3-dehydroshikimate dehydratase [Pyrenophora tritici-repentis Pt-1C-BFP] gi|187975554|gb|EDU42180.1| 3-dehydroshikimate dehydratase [Pyrenophora tritici-repentis
  misc_feature (1)..(342): NCBI GI: 169781496 Blast Desc: [Aspergillus oryzae RIB40] gi|238498280|ref|XP_002380375.1| 4-hydroxyphenylpyruvate dioxygenase, [Aspergillus flavus NRRL3357] protein product flavus
  misc_feature (10)..(340): NCBI GI: 169616528 Blast Desc: SNOG_11437 [Phaeosphaeria nodorum SN15] gi|160703206|gb|EAT81145.2| SNOG_11437 [Phaeosphaeria nodorum SN15]
  misc_feature (1)..(339): NCBI GI: 258573165 Blast Desc: 3-dehydroshikimate dehydratase [Uncinocarpus reesii 1704] gi|237901030|gb|EEP75431.1| 3-dehydroshikimate dehydratase [Uncinocarpus reesii 1704]
  misc_feature (1)..(351): NCBI GI: 39972971 Blast Desc: MGG_07780 [Magnaporthe grisea 70-15] gi|145012554|gb|EDJ97208.1| MGG_07780 [Magnaporthe grisea 70-15]
  misc_feature (1)..(337): NCBI GI: 145258755 Blast Desc: An04g08090 [Aspergillus niger] gi|134074780|emb|CAK44775.1| protein product [Aspergillus niger]
MPCRLGITSMSLGRCWAGHSFIHKIDMARAHGYQGIELFYEDLVDIAEQLPGGDTRENELQAAHIVRQLCAERNLAILCLQPFAHYEGLVDRQEHLNRLEKLIFWFELARALGTDMIQIPSSFGPADEISEDMNLAIDDLQKVADMGLRQQPPVRFVYEALCFGTRYNLWEQSWEIVQGVNRPNFGLCIDTFNIAGRIYADPACPTGRTPNCDQVVRESIARLLSTVDVKKVFYVQVVDAERLSEPLVEGHEFYNVDQTSRMSWSRNCRLFYGEKEHGAYLPIAEISRAIFHGLGFEGWVSLELFNRRMNDTDPTVPMELASRGAASWKKLVRDMKLRTEDADRGRMTASL

SEQ ID NO: 16424 - DNA, 1659 bp, Muscodor strobelii
  misc_feature: SGI EST ID NO. CUFF.38787.0
  misc_feature: Variant of the nucleotide sequence at SEQ ID NO 16422
gcaaattccgaggtgaatattactccttgctgcagtatccgtggacatattccctctatctgaagattggcaagcaaacgcgaatttgtgaagcagttttcgaacgcaggaagccgaccgatcacagctctacatctcgatccttactttgtttgcttcgttcgaccaagtctcacgccacgctgaatacactgtatgataagcgtcctttcctgccgcttaggtagacgattacctcgaagcgatagtgcatgcaattctcaacatcgtattcttctgcaaccagttatttcatttcatctcctttgataagtgaaagcttttcataagatatcacatacatcctcctcccttcccaaaacaccgggctcctgttagttgaatgtgcaaataattatcaacgtcggcattattactgtctcaatcttttcgttcttgatcctcctcatcaccaaagatgccgtgccgactaggaataacgtcaatgtcccttgggcggtgttgggccggccactccttcatccacaagatcgacatggctcgcgcacatggatatcaaggtatcgagctcttctacgaggacctcgtcgatatcgcagagcaacttcccggtggcgacacgcgagagaatgaattgcaagcagcgcacatagttcgtcagctatgcgccgagcggaatctcgctattctctgccttcagccttttgcgcactatgagggcttggtagaccgccaagaacacctaaaccgtctagagaaactcatattctggttcgagctcgcgcgcgcactgggcacggatatgatacagatcccgtcgagtttcggccccgccgacgagatttccgaggatatgaatctggccatagacgacttacaaaaagtggccgatatgggactgcgacaacagccaccagttcgcttcgtctatgaggcgctatgctttggtacgaggtataacttgtgggaacagagctgggaaatagtacaaggtgtcaacagaccgaactttgggctctgcatagacactttcaacatcgcgggtcgcatatacgctgaccctgcatgcccgaccggtcgcacaccaaattgcgatcaggttgtcagagagtctattgctcgacttttatctactgtcgatgttaagaaagttttctatgtccaagttgtcgacgccgagaggctctcagagccgctagtcgagggccacgagttttacaatgttgaccaaacttcacgaatgagctggtcacgaaactgtcgattattctacggcgagaaggagcatggtgcatatcttccaatcgcagagatttcgagagcaatcttccacgggcttggattcgaggggtgggtgagtcttgaattattcaacaggaggatgaacgacacagatcctactgtgcccatggagttggcaagccgtggtgcggcgtcctggaaaaagctcgttagggacatgaagctaagaaccgaggatgcggatcgagggaggatgaccgcgtcgctctaatttgacatgtgtctaattacttatttgataactgagcgtttagcgactagggtgatttcaagtatatatttctttctgatgcatcatatgcactggaaacccggctgaataatcacatgcctgtgtactgtgtgaagcgacccgaa

SEQ ID NO: 16425 - DNA, 2574 bp, Muscodor strobelii
  misc_feature: SGI cDNA ID NO. 565462
  misc_feature: Encodes the peptide sequence at SEQ ID NO 16426
atgcgacagcatgaaccagcgccgatgcgcaataacaataatggcacgagccgaactcataccagaactaacacgccatgttctagacacgttcctgtttccagattcaaacccgacgcatcgattgtgctagtcgggatccgtggctcggggaaatctacccttgccatcattgcctcaactgctatggcgcgccgaatagtcgagcttgataaagtctttcaagatgcaacgggtctttctactgtcgcttacaggaaggcgcatggctctttcgaataccagcggcgtcagtatggtgtactcgaaaacgtgcttgctacccacgagtgcaactgcataattgtgtcgtcctgggtggaacgcggagctcatgctctgcttgagaactttgcagcgtcacatcccgtgatccacatcacaagggagctagaagccatacaagattatctcaaagtcgctgaggtgggtagagtccgggagctgatgaagtatactgcgagtacgttccgcgctgtcgcaaatttagagttttgcaatgtttcagagaaacgttccgatacaggaccatcttgcaagggcggctcgcctgaatttacagtccgtgcagacggggagacgtcaccagcgccatatctcactttgaagagagctgaaagacatttcttaaagtttctctcattagttatgcccagaggatcgatgccatttatcgagtctgcttttccattagcatcagtacctacagaatcccgttccttcacatacgcagtatctatacctttaaccacacttctagcggacaaatgggaaactgaggatatcgagacaggtgccgatgctatcgagatcgttatcgatgacatcgcaactttcagtgcagaaacagcccatgatgatagtcatctcagttcggaacgtgctagccagataagcagagcgttcggcgcagtcagaaggaacgttgtgatcccgatcatctatcacgttccatggctatcatcttgccctgtcgatgattttcagcgagctgtatatcttgaccacgttcaacatggtttgcgactatgtccagaatacatgacggtagacctgcgactggatgaccgaatcctcacacaagtcattgagtctaagaggaccacgcaagtcattggtaccgtccatttcaactcctcttcaccaccatcgtggtctgatccgatttggctatcctattatcgcagagcacagtcatgttcttgtgacctagtcaaattagtgcgaccagcgctgtcgattcaagacaacttcgaaatcaacatgcttcggtgttcagctgaaagctcggaaccacctatccttcccctaatagcatacaacacgggccccaaaggcaaacactcagcttgtttcaacaaggtattgacatccgttcttccagagtcattaatcgacagtaaccccgaacgagatttgaatgcatcttacgtagccccctcgattactcctcgccaggcaacttcggccttgcagtcatcctttgctaccgacgatgccttaaagatgtatgtcctaggtgccaattgcaatcacagtctgtcacctcccatgcataatagagcaattaaagctatgggtttaagctcgatctaccaacctttctcaactggtttgctaagggatattcgagaattgatacatgacccctatttcgcaggcgcatctgtcggtcttcccttcaaagtcgaagtgatcagtctcacccattcgctcagcaatcatgcgaaagccatcggcgctgtcaacacattgattccgatacggcatctgaattctgatggcagcatcccggaggatgcgcccttgtctaacgctcgtagaggcgccggtcccgtgttagctctgtatggagaaaatacggattggattggaatcagagcgtgcatccggcgaggtctgtcgcctgtcaacgccgttcgttctaacaccgtaggattggtgataggagcgggcggtatggctcgcgctgcggtttacgccatgctccaactcggcgttaagcacattgtcattcataatagatcccaggccaacgccgagaaactcatagctcattttgaacgactcctcgcacgacatgacatccctcttatgagcacagccgataacaccaagaccgttttccacattttacagagccgagatgactcctggccaaggcaccttcgaccatcgacaatgattgtgtcgtgtattccctctcaaaatgcgggtgatcagcctccaccaaatttcactcttcctgaggcttggatgcgcagcccaactggcggcgtagtggttgacttctcatacaaggatctcaatacaccgttgatccaacagacccgcgctgaagcacatcgaggatgggtggttatggatagtctggatttactgcccgagcaaggttttgcacagttcgagctattcacgggtaggagggctccaagacgcttgatgcgtgctgaagtactgagatcatctcctgaagaagaacgaccctatccgctccaaccccgactggatgttattactgaacaggaaccgtga

SEQ ID NO: 16426 - protein, 857 aa, Muscodor strobelii
  misc_feature: SGI Peptide ID NO. 565462
  misc_feature (256)..(486): Pfam Id: PF01487 Pfam Desc: Type I 3-dehydroquinase
  misc_feature (643)..(787): Pfam Id: PF01488 Pfam Desc: Shikimate / quinate 5-dehydrogenase
  misc_feature (518)..(598): Pfam Id: PF08501 Pfam Desc: Shikimate dehydrogenase substrate binding domain
  misc_feature (48)..(227): Pfam Id: PF01202 Pfam Desc: Shikimate kinase
  misc_feature (256)..(474): Pfam Id: PF01487 Pfam Desc: Type I 3-dehydroquinase
  misc_feature (660)..(700): Pfam Id: PF01488 Pfam Desc: Shikimate / quinate 5-dehydrogenase
  misc_feature (48)..(152): Pfam Id: PF01202 Pfam Desc: Shikimate kinase
  misc_feature (36)..(857): NCBI GI: 171680843 Blast Desc: protein product [Podospora anserina] gi|27764316|emb|CAD60596.1| protein product [Podospora anserina] gi|170940049|emb|CAP65276.1| protein product [Podospora anserina]
  misc_feature (7)..(820): NCBI GI: 261359975 Blast Desc: quinate repressor [Verticillium albo-atrum VaMs.102]
  misc_feature (36)..(856): NCBI GI: 116200620 Blast Desc: CHGG_10855 [Chaetomium globosum CBS 148.51] gi|88175569|gb|EAQ83037.1| CHGG_10855 [Chaetomium globosum CBS 148.51]
  misc_feature (24)..(855): NCBI GI: 74665873 Blast Desc: QA1S_NEUTR RecName: Full=Quinate repressor gi|64174698|gb|AAY41164.1| qa-1S [Neurospora terricola]
  misc_feature (24)..(855): NCBI GI: 85093056 Blast Desc: NCU06027 [Neurospora crassa OR74A] gi|46397816|sp|P11637.2|QA1S_NEUCR RecName: Full=Quinate repressor gi|28921062|gb|EAA30381.1| NCU06027 [Neurospora crassa
  misc_feature (24)..(855): NCBI GI: 295929 Blast Desc: repressor [Neurospora crassa]
  misc_feature (24)..(855): NCBI GI: 168870 Blast Desc: qa-1S [Neurospora crassa]
  misc_feature (24)..(855): NCBI GI: 74665875 Blast Desc: QA1S_NEUAF RecName: Full=Quinate repressor gi|64174681|gb|AAY41162.1| qa-1S [Neurospora africana]
  misc_feature (12)..(856): NCBI GI: 256726721 Blast Desc: [Nectria haematococca mpVI 77-13-4]
  misc_feature (11)..(856): NCBI GI: 46122663 Blast Desc: FG05709.1 [Gibberella zeae PH-1]
  misc_feature (39)..(833): SWISSPROT Homolog: EC 4.2.1.10 3-dehydroquinate dehydratase
  misc_feature (39)..(833): SWISSPROT Homolog: EC 4.2.3.4 3-dehydroquinate synthase
  misc_feature (39)..(833): SWISSPROT Homolog: EC 2.5.1.19 3-phosphoshikimate 1-carboxyvinyltransferase
  misc_feature (39)..(833): SWISSPROT Homolog: EC 2.7.1.71 Shikimate kinase
  misc_feature (39)..(833): SWISSPROT Homolog: EC 1.1.1.25 Shikimate dehydrogenase
MRQHEPAPMRNNNNGTSRTHTRTNTPCSRHVPVSRFKPDASIVLVGIRGSGKSTLAIIASTAMARRIVELDKVFQDATGLSTVAYRKAHGSFEYQRRQYGVLENVLATHECNCIIVSSWVERGAHALLENFAASHPVIHITRELEAIQDYLKVAEVGRVRELMKYTASTFRAVANLEFCNVSEKRSDTGPSCKGGSPEFTVRADGETSPAPYLTLKRAERHFLKFLSLVMPRGSMPFIESAFPLASVPTESRSFTYAVSIPLTTLLADKWETEDIETGADAIEIVIDDIATFSAETAHDDSHLSSERASQISRAFGAVRRNVVIPIIYHVPWLSSCPVDDFQRAVYLDHVQHGLRLCPEYMTVDLRLDDRILTQVIESKRTTQVIGTVHFNSSSPPSWSDPIWLSYYRRAQSCSCDLVKLVRPALSIQDNFEINMLRCSAESSEPPILPLIAYNTGPKGKHSACFNKVLTSVLPESLIDSNPERDLNASYVAPSITPRQATSALQSSFATDDALKMYVLGANCNHSLSPPMHNRAIKAMGLSSIYQPFSTGLLRDIRELIHDPYFAGASVGLPFKVEVISLTHSLSNHAKAIGAVNTLIPIRHLNSDGSIPEDAPLSNARRGAGPVLALYGENTDWIGIRACIRRGLSPVNAVRSNTVGLVIGAGGMARAAVYAMLQLGVKHIVIHNRSQANAEKLIAHFERLLARHDIPLMSTADNTKTVFHILQSRDDSWPRHLRPSTMIVSCIPSQNAGDQPPPNFTLPEAWMRSPTGGVVVDFSYKDLNTPLIQQTRAEAHRGWVVMDSLDLLPEQGFAQFELFTGRRAPRRLMRAEVLRSSPEEERPYPLQPRLDVITEQEP

SEQ ID NO: 16427 - DNA, 1583 bp, Muscodor strobelii
  misc_feature: SGI EST ID NO. CUFF.38814.0
  misc_feature: Variant of the nucleotide sequence at SEQ ID NO 16425
ttcagctgaaagctcggaaccacctatccttcccctaatagcatacaacacgggccccaaaggcaaacactcagcttgtttcaacaaggtattgacatccgttcttccagagtcattaatcgacagtaaccccgaacgagatttgaatgcatcttacgtagccccctcgattactcctcgccaggcaacttcggccttgcagtcatcctttgctaccgacgatgccttaaagatgtatgtcctaggtgccaattgcaatcacagtctgtcacctcccatgcataatagagcaattaaagctatgggtttaagctcgatctaccaacctttctcaactggtttgctaagggatattcgagaattgatacatgacccctatttcgcaggcgcatctgtcggtcttcccttcaaagtcgaagtgatcagtctcacccattcgctcagcaatcatgcgaaagccatcggcgctgtcaacacattgattccgatacggcatctgaattctgatggcagcatcccggaggatgcgcccttgtctaacgctcgtagaggcgccggtcccgtgttagctctgtatggagaaaatacggattggattggaatcagagcgtgcatccggcgaggtctgtcgcctgtcaacgccgttcgttctaacaccgtaggattggtgataggagcgggcggtatggctcgcgctgcggtttacgccatgctccaactcggcgttaagcacattgtcattcataatagatcccaggccaacgccgagaaactcatagctcattttgaacgactcctcgcacgacatgacatccctcttatgagcacagccgataacaccaagaccgttttccacattttacagagccgagatgactcctggccaaggcaccttcgaccatcgacaatgattgtgtcgtgtattccctctcaaaatgcgggtgatcagcctccaccaaatttcactcttcctgaggcttggatgcgcagcccaactggcggcgtagtggttgacttctcatacaaggatctcaatacaccgttgatccaacagacccgcgctgaagcacatcgaggatgggtggttatggatagtctggatttactgcccgagcaaggttttgcacagttcgagctattcacgggtaggagggctccaagacgcttgatgcgtgctgaagtactgagatcatctcctgaagaagaacgaccctatccgctccaaccccgactggatgttattactgaacaggaaccgtgaggtagtctcagagcctatttacacatattaatgtggtataataaaaaaaatattcacgtgcgatgcagaacgtagctcgtctgaaattcgtgatcttgtgctcatgatttgatacgacggaggccttattcatgtgtctcgcgagtgtgagccacagtaccttcctcgtctcttgcgaacgcaaagagcccatcatcgtcaatacaataagatcaccgcaatgatactgttcccacggtagcattggtttcaaagagtagacaaaggagggaaaaattgacacaagccggtcaaattggccttgaagtcacaagtctccctc

SEQ ID NO: 16428 - DNA, 471 bp, Muscodor strobelii
  misc_feature: SGI cDNA ID NO. 565463
  misc_feature: Reduced expression when VOC is produced
  misc_feature: Encodes the peptide sequence at SEQ ID NO 16429
atggctttcggattcgccccaatcgtccacattgtggccggcatcttctccatcatcgagctcggtttgacagcatatttggctagcttcttcagcaccgactatggaaattattccccatccatcatcaacttcctcatcttcgcaagcgtatggtctattttggtcctaatctacattggtattacacctttgtacatgacatccgtcttccatcgtcttgcggctcttgtcctgaacgttttgacggctattttctggtttgcgggcgcagtcgccttcgccgttgccgttggtgtgcctaatttccacaccgttttcactagctccgcccaggctgctgtcgcctttgctttcttcctctggatcatcttcaccttcctcgctgtcctcgacggcatcgagagcatgcgacgtcgcggacaccacgtcaagacttctcagtccacgaatgcttaccctggtgcctga

SEQ ID NO: 16429 - protein, 156 aa, Muscodor strobelii
  misc_feature: SGI Peptide ID NO. 565463
  misc_feature (1)..(156): NCBI GI: 39945870 Blast Desc: MGG_08055 [Magnaporthe grisea 70-15] gi|145019292|gb|EDK03520.1| MGG_08055 [Magnaporthe grisea 70-15]
  misc_feature (1)..(156): NCBI GI: 256724710 Blast Desc: NECHADRAFT_102796 [Nectria haematococca mpVI 77-13-4]
  misc_feature (1)..(147): NCBI GI: 46126221 Blast Desc: FG07488.1 [Gibberella zeae PH-1]
  misc_feature (1)..(155): NCBI GI: 261358555 Blast Desc: conserved [Verticillium albo-atrum VaMs.102]
  misc_feature (5)..(145): NCBI GI: 85093084 Blast Desc: NCU06034 [Neurospora crassa OR74A] gi|28921069|gb|EAA30388.1| conserved [Neurospora crassa OR74A]
  misc_feature (5)..(149): NCBI GI: 171680829 Blast Desc: protein product [Podospora anserina] gi|170940042|emb|CAP65269.1| protein product [Podospora anserina]
  misc_feature (1)..(143): NCBI GI: 156059800 Blast Desc: SS1G_03913 [Sclerotinia sclerotiorum 1980] gi|154701699|gb|EDO01438.1| SS1G_03913 [Sclerotinia sclerotiorum 1980]
  misc_feature (1)..(125): NCBI GI: 154315934 Blast Desc: BC1G_04539 [Botryotinia fuckeliana B05.10] gi|150846935|gb|EDN22128.1| BC1G_04539 [Botryotinia fuckeliana B05.10]
  misc_feature (9)..(125): NCBI GI: 212537885 Blast Desc: conserved [Penicillium marneffei ATCC 18224] gi|210068840|gb|EEA22931.1| conserved [Penicillium marneffei ATCC 18224]
  misc_feature (49)..(146): NCBI GI: 27764308 Blast Desc: protein product [Podospora anserina]
  misc_feature: Useful for introducing or modulating the production of volatile compounds
MAFGFAPIVHIVAGIFSIIELGLTAYLASFFSTDYGNYSPSIINFLIFASVWSILVLIYIGITPLYMTSVFHRLAALVLNVLTAIFWFAGAVAFAVAVGVPNFHTVFTSSAQAAVAFAFFLWIIFTFLAVLDGIESMRRRGHHVKTSQSTNAYPGA

SEQ ID NO: 16430 - DNA, 1295 bp, Muscodor strobelii
  misc_feature: SGI EST ID NO. CUFF.38852.0
  misc_feature: Variant of the nucleotide sequence at SEQ ID NO 16428
tgccgattcaggcgtccattgccgttcgatcccagtgtcagtcctaaccctgagatgatcagcccacaccaagccaatctcagccgttaccatcactcgaattaagatcagggtcgtaaaatggtgaactatgtgtcagcgtgcaggcgccgggcagcgttagtttagccttgcttaaccgacaccgcctagcaagtaccgttgtcatgatcgctcgtcacgttctaagccatgccatgacgtgggttgtctcgtgtgtgtcttaaataaccctttcttccccaacattttcctttgattgccgtcatttccctagctccgaccttcgcatctcgcatttaatacactcggccttccgcctctgctattgatcaccattaaacaagacactcctagtagaccggaaaccagtcgccatggctttcggattcgccccaatcgtccacattgtggccggcatcttctccatcatcgagctcggtttgacagcatatttggctagcttcttcagcaccgactatggaaattattccccatccatcatcaacttcctcatcttcgcaagcgtatggtctattttggtcctaatctacattggtattacacctttgtacatgacatccgtcttccatcgtcttgcggctcttgtcctgaacgttttgacggctattttctggtttgcgggcgcagtcgccttcgccgttgccgttggtgtgcctaatttccacaccgttttcactagctccgcccaggctgctgtcgcctttgctttcttcctctggatcatcttcaccttcctcgctgtcctcgacggcatcgagagcatgcgacgtcgcggacaccacgtcaagacttctcagtccacgaatgcttaccctggtgcctgagcgagtttcgatgcagaactagattctgtgaggaaaaacgcatctgcatttgagtaggagatccaacagtaatatcgccacaattcatttcacgacgcatttttctcacctgatatgaatgcaagatacctacatcgttaatgatttagctacgagcaactggcgttctggatatgatggggatggtctgatttttacgaattgtggaaatactttctcatgttggatcatgttcgcattatcaatacccttttcctcatatgcggtatgattgactagatccagaataccagaataataatttttcgaaactgatactcgaagcataactaatgtgatcacgcttgggatatgcttgtttataatttaatgtcgtaaatgatgtggtaggtactaataatcgctgga

SEQ ID NO: 16431 - DNA, 1818 bp, Muscodor strobelii
  misc_feature: SGI cDNA ID NO. 565464
  misc_feature: Reduced expression when VOC is produced
  misc_feature: Encodes the peptide sequence at SEQ ID NO 16432
atgtcgtttccatttgtcaagcaactcggccaggagctttataaagcttcgactcgatctcgactaggttgcaagcctgcccaaccacaaaaagcccaattgcttagaggaccttaccccagatcaattagtgtacaaagcgtctcccgaagaccctcttccacctctgcgccgaaagcaaatacgagtgatggatctcgagctctaaagcttcctgtcctcgccgcaggcacggggctgctcgcactccttgccacttttgctcagctcagctcaaactcgagtggaacgccacagaacccaataaagcgccaatttctccctgcgctagttgaagaaacacccaaccgagacactacaaacaatgatctaccactctatcgactttgtgaaattaaagaacatggagcgcagtcggaaagaccgtgggtaatattcgaagacaaggtgtatgatatcacggactgggtcgcagcacacccaggcggtgagtatgtacgagatatattggagcagtatctggttggcaaagtgcatgcaaaagatctgcacaacggtagaccactacaagattatatcgatgacccgttcgtcgccgacccggacagagatacgagattacgccagttgacgcaaaaaccatgtaatgcagagactcccggcgaagaactggccgaagcctttttaacgccgaatgaaacgttctatgtacggaatcatatgtgggtgcctgttatagacgaggcggaagcagacaagcacgccattaccatagaacttccagacggtgaggtgcgagtctacagcattggcgaattgcgagagcgcttcaagcagcattcagtcaccgctgtgctgcagtgctccggcaaccgacgaaacgatatgacgaaacacgcgaagaagacgaatggacttcaatggactgtcggagcgatcagttgtgcgaagtgggagggggtgcgtcttcgggatgttctcgctgatgctggtctgtcggtcaccgagcccggcgaagatgcgcgccatgtacaattctccggactcgaagcatatggcgcgagtatacccatcgagtcagcagtggatccccgtggcgatgtgctacttgcattccggatgaacgacaagccattacctcgtgaccacggctttcctgtgcgagtcatcgtccccggccatgtcgctgcgagggctgtcaaatgggtgagtaggatcgtcgtgagcgatgaagagagtaccacaacgtggcagcgtaaagactacaagtgcttcggtccaaatgaaaccaagcaggactgggacaagtacaagtcgatacaagtcatgccaatcacctctgcgatcacccggacacggttgaaacccgaaccagtgcaagagtcaaccacagttgaattgagcgaaacctcgcctgccagcaaagtggtccaggtagaaggttacgcgtactcgggcggcgggcgcgagattcagcgtgtggacataagtcttgacggcggacgcacgtgggaccaggcaagtcttctggacgacacccagcacgagcagggctcaaggaagtggtgttggaaacggtggaaatatgagggcgttcttcccgatatcaaggacgccgacgagggcagaacaacttttgttgttaaagcaacagacgatgcatataatacgcaacctgagacgcatgcaagcatatacaatcttcgtggcaatcttgcaacggcttggcaccggatcgaattcgattgcaagaattgcgacaaagcagtgcagatagccaaggatgagtgcgaagatatggtaaaaggaaagaactga

SEQ ID NO: 16432 - protein, 605 aa, Muscodor strobelii
  misc_feature: SGI Peptide ID NO. 565464
  misc_feature (126)..(220): Pfam Id: PF00173 Pfam Desc: Cytochrome b5-like Heme/Steroid binding domain
  misc_feature (437)..(584): Pfam Id: PF03404 Pfam Desc: Mo-co oxidoreductase dimerisation domain
  misc_feature (236)..(419): Pfam Id: PF00174 Pfam Desc: Oxidoreductase molybdopterin binding domain
  misc_feature (126)..(163): Pfam Id: PF00173 Pfam Desc: Cytochrome b5-like Heme/Steroid binding domain
  misc_feature (437)..(579): Pfam Id: PF03404 Pfam Desc: Mo-co oxidoreductase dimerisation domain
  misc_feature (125)..(579): NCBI GI: 145603520 Blast Desc: MGG_05992 [Magnaporthe grisea 70-15] gi|145011735|gb|EDJ96391.1| MGG_05992 [Magnaporthe grisea 70-15]
  misc_feature (71)..(580): NCBI GI: 46126245 Blast Desc: FG07500.1 [Gibberella zeae PH-1]
  misc_feature (118)..(580): NCBI GI: 256724700 Blast Desc: NECHADRAFT_96028 [Nectria haematococca mpVI 77-13-4]
  misc_feature (124)..(586): NCBI GI: 85092203 Blast Desc: NCU06931 [Neurospora crassa OR74A] gi|28920681|gb|EAA30042.1| conserved [Neurospora crassa OR74A]
  misc_feature (127)..(589): NCBI GI: 171681499 Blast Desc: protein product [Podospora anserina] gi|170940708|emb|CAP65936.1| protein product [Podospora anserina]
  misc_feature (125)..(581): NCBI GI: 260805881 Blast Desc: BRAFLDRAFT_243026 [Branchiostoma floridae] gi|229283082|gb|EEN53826.1| BRAFLDRAFT_243026 [Branchiostoma floridae]
  misc_feature (39)..(580): NCBI GI: 147900973 Blast Desc: LOC735046 [Xenopus laevis] gi|50415570|gb|AAH77584.1| MGC83835 protein [Xenopus laevis]
  misc_feature (39)..(587): NCBI GI: 148238096 Blast Desc: LOC734244 [Xenopus laevis] gi|50417559|gb|AAH77573.1| MGC83566 protein [Xenopus laevis]
  misc_feature (122)..(580): NCBI GI: 262102010 Blast Desc: sulfite oxidase, [Phytophthora infestans T30-4]
  misc_feature (73)..(584): NCBI GI: 158287947 Blast Desc: AGAP010877-PA [Anopheles gambiae str. PEST] gi|157019433|gb|EAA05527.4| AGAP010877-PA [Anopheles gambiae str. PEST]
  misc_feature (126)..(580): SWISSPROT Homolog: EC 1.8.3.1 Sulfite oxidase
  misc_feature: Useful for introducing or modulating the production of volatile compounds
MSFPFVKQLGQELYKASTRSRLGCKPAQPQKAQLLRGPYPRSISVQSVSRRPSSTSAPKANTSDGSRALKLPVLAAGTGLLALLATFAQLSSNSSGTPQNPIKRQFLPALVEETPNRDTTNNDLPLYRLCEIKEHGAQSERPWVIFEDKVYDITDWVAAHPGGEYVRDILEQYLVGKVHAKDLHNGRPLQDYIDDPFVADPDRDTRLRQLTQKPCNAETPGEELAEAFLTPNETFYVRNHMWVPVIDEAEADKHAITIELPDGEVRVYSIGELRERFKQHSVTAVLQCSGNRRNDMTKHAKKTNGLQWTVGAISCAKWEGVRLRDVLADAGLSVTEPGEDARHVQFSGLEAYGASIPIESAVDPRGDVLLAFRMNDKPLPRDHGFPVRVIVPGHVAARAVKWVSRIVVSDEESTTTWQRKDYKCFGPNETKQDWDKYKSIQVMPITSAITRTRLKPEPVQESTTVELSETSPASKVVQVEGYAYSGGGREIQRVDISLDGGRTWDQASLLDDTQHEQGSRKWCWKRWKYEGVLPDIKDADEGRTTFVVKATDDAYNTQPETHASIYNLRGNLATAWHRIEFDCKNCDKAVQIAKDECEDMVKGKN

SEQ ID NO: 16433 - DNA, 3465 bp, Muscodor strobelii
  misc_feature: SGI EST ID NO. CUFF.39418.0
  misc_feature: Variant of the nucleotide sequence at SEQ ID NO 16431
ctcaattggccgaagatgtacagatgtatgtgacaatagacttgtaagtgataagtactttagaggcacagcaaagacgtaattcgtccccggtcgcgactcaccgaatccctcatgtcacagtaatctggggagcgggatagcttcagatgggatgtgtgctagaccgctggttctcatagaccaataagtattcagcccatccaatgcgcttaaccagagtcctttctgcctctctgaatattacgtatcagttagcatcgctcattctatttcagagtccacctgaccagacgcttatgcctgcgcttgcccttgttcgttagcttccgctccttgccgcttacttttctttgataacgattgcttcccaagttgcaccgtaggtctaattgacactgggctttgctattccactttagattcgctcttcgttggattcaccagactcgttccaatagtacgcaccgggcatactcattccgtattctgtttaacgtgtaagctcttggacaacaatctcgacagtgatcattggtcggaggtatacgagtatggatcataccgatatcgccaacgattgattcggtaacgaatgacaagtcgctcgacggataaagatcgcaatgtcgtttccatttgtcaagcaactcggccaggagctttataaagcttcgactcgatctcgactaggttgcaagcctgcccaaccacaaaaagcccaattgcttagaggaccttaccccagatcaattagtgtacaaagcgtctcccgaagaccctcttccacctctgcgccgaaagcaaatacgagtgatggatctcgagctctaaagcttcctgtcctcgccgcaggcacggggctgctcgcactccttgccacttttgctcagctcagctcaaactcgagtggaacgccacagaacccaataaagcgccaatttctccctgcgctagttgaagaaacacccaaccgagacactacaaacaatgatctaccactctatcgactttgtgaaattaaagaacatggagcgcagtcggaaagaccgtgggtaatattcgaagacaaggtgtatgatatcacggactgggtcgcagcacacccaggcggtgaggtcattctccgcgcagcgggtgggagtattgagccgtaatgggacattttcgctatacacaaatcacagtatgtacgagatatattggagcagtatctggttggcaaagtgcatgcaaaagatctgcacaacggtagaccactacaagattatatcgatgacccgttcgtcgccgacccggacagagatacgagattacgccagttgacgcaaaaaccatgtaatgcagagactcccggcgaagaactggccgaagcctttttaacgccgaatgaaacgttctatgtacggaatcatatgtgggtgcctgttatagacgaggcggaagcagacaagcacgccattaccatagaacttccagacggtgaggtgcgagtctacagcattggcgaattgcgagagcgcttcaagcagcattcagtcaccgctgtgctgcagtgctccggcaaccgacgaaacgatatgacgaaacacgcgaagaagacgaatggacttcaatggactgtcggagcgatcagttgtgcgaagtgggagggggtgcgtcttcgggatgttctcgctgatgctggtctgtcggtcaccgagcccggcgaagatgcgcgccatgtacaattctccggactcgaagcatatggcgcgagtatacccatcgagtcagcagtggatccccgtggcgatgtgctacttgcattccggatgaacgacaagccattacctcgtgaccacggctttcctgtgcgagtcatcgtccccggccatgtcgctgcgagggctgtcaaatgggtgagtaggatcgtcgtgagcgatgaagagagtaccacaacgtggcagcgtaaagactacaagtgcttcggtccaaatgaaaccaagcaggactgggacaagtacaagtcgatacaagtcatgccaatcacctctgcgatcacccggacacggttgaaacccgaaccagtgcaagagtcaaccacagttgaattgagcgaaacctcgcctgccagcaaagtggtccaggtagaaggttacgcgtactcgggcggcgggcgcgagattcagcgtgtggacataagtcttgacggcggacgcacgtgggaccaggcaagtcttctggacgacacccagcacgagcagggctcaaggaagtggtgttggaaacggtggaaatatgagggcgttcttcccgatatcaaggacgccgacgagggcagaacaacttttgttgttaaagcaacagacgatgcatataatacgcaacctgagacgcatgcaagcatatacaatcttcgtggcaatcttgcaacggcttggcaccggatcgaattcgattgcaagaattgcgacaaagcagtgcagatagccaaggatgagtgcgaagatatggtaaaaggaaagaactgaagcgaatcgtcgaaactgaaccggaacaatgcattgtagcatcgtgcgagttttttttacaggcatggctaaagcgaatgggcgttctgatgacaggtttagcattgtattgctcttatctcctagcgttgcttttcttttttaattacttcggttccatggcatggaattaattgacacatgctaaactgataatactaataatgtttggacttcacgaaattaatacgactttacaaattcgacccaacagctcgcatcgatagcactaatcacagttacatttgctcagcattagaacttcattaaaaccacgtgccactgaagattcgatgatattcgagaagtccaagcaattcgggggagtgaagtcggatccgaggttgatagaatgaattcgactcatattttcagtatcgccatcgtagttgtgcaaagaggctatgggacgtgcaagttagaacccctgtcgcacgtttggtgttgcctgatataagcattcgaaaatcagaatgttgacggcgagtgtaagactatgccgctaattgtcgcacaccgaccagatccgaattcgacttcgcgggtcattctgacgatttcacaattggatcatcgtgaaacgcggacgccttgcatatgtagaaaatttaccttgggaagtcataattgacgacgggttgctgtcagagcttgatgagacgtgaatgtgttgaatttgtagacagaggggtctaggccattgcctgactcgcctgacagtcaggacagtcgcgtcgtgatggtaggtgacaggggatgcgaggaccctagcttccatacaaacagcagccaatgacgagctgtcgcatatgtattgacaccggtagcttgcagaacggaaccctccatgtcgtcatacccaacccgacgcctcccggaccacttctcgaaatatgacgacacagtgcctggg

SEQ ID NO: 16434 - DNA, 1725 bp, Muscodor strobelii
  misc_feature: SGI cDNA ID NO. 565465
  misc_feature: Reduced expression when VOC is produced
  misc_feature: Encodes the peptide sequence at SEQ ID NO 16435
atggcgccatcagccgatacgaccttcgctgctcacgtagcaaaccagttcacctcgtacgagaaagaccgtcagatgaattcgcagcaaaccacctataccgctagcaacggagcgcctcagccgcacccttatgaatcacagagagccggtgacaatggaccacttctattacaggacttccatttgattgatctgctctcgcactttgatcgcgagagaatccccgagcgcgtcgtccacgcgaaagggagcggtgctcatggtttcttcgaatgcacaaatcccattccagatttaactgtcgcgaatctcttctccgagaagggcaagaagtgtcccgtcaccgctcgcttctcaactgtcggcggagagtcgggatcccacgactgcgctcgggatcctcgaggcttttcagtcaaattcaggactgaggaaggcaactgggaccttgtcgcaaacaacacgcccgtattttccctacgagatcccgccaagttccctcacttcattcacacgcagaagcgagacccatctacgcatctcactcatgctgatgactcgaccatgttttgggattatctttcacagaatcctgaatctatccaccaagtcatggttctcatgggcgaccgaggcattcccgacggctaccgtaagatgcacggttattcgggtcacactatgaagttggtcaacaaggacagcgagtgggtgtacgtgcagattcatttcaagtcccagcagggtaccggatttatcacacaggaggactcagcaaactattctcccgactactcgcagaaggacctttacgaagccattcagaatggtgactacccgaagtgggatgtcagcattcagaccatgactgccaagcaagctgaagaggcgtgggaaaaacagaagatcaatgtttttgatctgacacacatctggcctcagaagcagttccctctgacaaaggttggagaattcacgctcaacgagaatgctatcaactatttcgccgaaatcgagcaggttgccttcgcaccatcacatctcgtacctggtattgagccgtctgccgatcccgtgttgcaatcgcgcttgttttcgtatcctgacactcaccgtcatcgtctcggcgcaaactaccaacagctgccagtcaatgcctcaagaacagggttcaagaatggcaacttccaacgtgatggctttatggccttctacaaccagggtgcccgaccaaattaccttagctccatcgacccaattcagtttgagcctcgcaaggtagatgttgataagacacatggtcatttcatcggtcaggcagtgtcgttcctgtcggagattcgccctgaagattttgtcgcgcctcgtacgctttggcagaaggtcttcgacgagcctgcccgcgagcgcttcatcaacaacgttgctggcaaaatggaggcctgcaaggataaggagattttgaagcgccagatcgctatcttccgcgaggtcgatgatgatatcgctacacgtctcgagaaggctacaggcatcaagggctatgatggcatcgcaaacttgaagtttaatggcacgcacaacggcatgaccaaggatgctaaggcgcggtttgctaatggcgtcaagccggccgcaggcttggcagctaacaagagcaatggcgctccatacaccggaacgcaccagtcaccttttgtcaatggagttaatgggtcttag

SEQ ID NO: 16435 - protein, 574 aa, Muscodor strobelii
  misc_feature: SGI Peptide ID NO. 565465
  misc_feature (34)..(422): Pfam Id: PF00199 Pfam Desc: Catalase
  misc_feature (17)..(563): NCBI GI: 169623251 Blast Desc: SNOG_14863 [Phaeosphaeria nodorum SN15] gi|160704945|gb|EAT77715.2| SNOG_14863 [Phaeosphaeria nodorum SN15]
  misc_feature (1)..(573): NCBI GI: 256726687 Blast Desc: cytosolic CTT1-catalase T [Nectria haematococca mpVI 77-13-4]
  misc_feature (1)..(574): NCBI GI: 46122635 Blast Desc: FG05695.1 [Gibberella zeae PH-1]
  misc_feature (14)..(563): NCBI GI: 154303275 Blast Desc: BC1G_09386 [Botryotinia fuckeliana B05.10] gi|150854949|gb|EDN30141.1| BC1G_09386 [Botryotinia fuckeliana B05.10]
  misc_feature (4)..(510): NCBI GI: 261361066 Blast Desc: peroxisomal catalase [Verticillium albo-atrum VaMs.102]
  misc_feature (14)..(565): NCBI GI: 156053684 Blast Desc: SS1G_05689 [Sclerotinia sclerotiorum 1980] gi|154703470|gb|EDO03209.1| SS1G_05689 [Sclerotinia sclerotiorum 1980]
  misc_feature (1)..(543): NCBI GI: 12407459 Blast Desc: AF222055_1 CAT1 catalase [Passalora fulva]
  misc_feature (2)..(564): NCBI GI: 189191852 Blast Desc: peroxisomal catalase [Pyrenophora tritici-repentis Pt-1C-BFP] gi|187973871|gb|EDU41370.1| peroxisomal catalase [Pyrenophora tritici-repentis Pt-1C-BFP]
  misc_feature (19)..(558): NCBI GI: 58261446 Blast Desc: CAT1 catalase [Cryptococcus neoformans var. neoformans JEC21] gi|57230215|gb|AAW46616.1| CAT1 catalase, [Cryptococcus neoformans var. neoformans JEC21]
  misc_feature (19)..(558): NCBI GI: 109156577 Blast Desc: catalase 4 [Filobasidiella neoformans]
  misc_feature (32)..(509): SWISSPROT Homolog: EC 1.11.1.6 Catalase
  misc_feature: Useful for introducing or modulating the production of volatile compounds
MAPSADTTFAAHVANQFTSYEKDRQMNSQQTTYTASNGAPQPHPYESQRAGDNGPLLLQDFHLIDLLSHFDRERIPERVVHAKGSGAHGFFECTNPIPDLTVANLFSEKGKKCPVTARFSTVGGESGSHDCARDPRGFSVKFRTEEGNWDLVANNTPVFSLRDPAKFPHFIHTQKRDPSTHLTHADDSTMFWDYLSQNPESIHQVMVLMGDRGIPDGYRKMHGYSGHTMKLVNKDSEWVYVQIHFKSQQGTGFITQEDSANYSPDYSQKDLYEAIQNGDYPKWDVSIQTMTAKQAEEAWEKQKINVFDLTHIWPQKQFPLTKVGEFTLNENAINYFAEIEQVAFAPSHLVPGIEPSADPVLQSRLFSYPDTHRHRLGANYQQLPVNASRTGFKNGNFQRDGFMAFYNQGARPNYLSSIDPIQFEPRKVDVDKTHGHFIGQAVSFLSEIRPEDFVAPRTLWQKVFDEPARERFINNVAGKMEACKDKEILKRQIAIFREVDDDIATRLEKATGIKGYDGIANLKFNGTHNGMTKDAKARFANGVKPAAGLAANKSNGAPYTGTHQSPFVNGVNGS

SEQ ID NO: 16436 - DNA, 2506 bp, Muscodor strobelii
  misc_feature: SGI EST ID NO. CUFF.38832.0
  misc_feature: Variant of the nucleotide sequence at SEQ ID NO 16434
cgcatttccaaacaccatacaatgataggctgcgattcgggactccggggaaaagtacttacagttaacgtcatgtatctaattggctatcaactgtagtcactgcgttttgtttaattccgcatgcgttattaagcatctcgcctcccagagatcgcagacgtgagatttctcattagctacttgcctacatataatctcacagttgcgtccggacttggcacatttagacacaattttctactcattcatggagacagtccaaagagtgatacaacatccgatcgagacagccagacagactctcaacatggcgccatcagccgatacgaccttcgctgctcacgtagcaaaccagttcacctcgtacgagaaagaccgtcagatgaattcgcagcaaaccacctataccgctagcaacggagcgcctcagccgcacccttatgaatcacagagagccggtgacaatggaccacttctattacaggacttccatttgattgatctgctctcgcactttgatcgcgagagaatccccgagcgcgtcgtccacgcgaaagggagcggtgctcatggtttcttcgaatgcacaaatcccattccagatttaactgtcgcgaatctcttctccgagaagggcaagaagtgtcccgtcaccgctcgcttctcaactgtcggcggagagtcgggatcccacgactgcgctcgggatcctcgaggcttttcagtcaaattcaggactgaggaaggcaactgggaccttgtcgcaaacaacacgcccgtattttccctacgagatcccgccaagttccctcacttcattcacacgcagaagcgagacccatctacgcatctcactcatgctgatgactcgaccatgttttgggattatctttcacagaatcctgaatctatccaccaagtcatggttctcatgggcgaccgaggcattcccgacggctaccgtaagatgcacggttattcgggtcacactatgaagttggtcaacaaggacagcgagtgggtgtacgtgcagattcatttcaagtcccagcagggtaccggatttatcacacaggaggactcagcaaactattctcccgactactcgcagaaggacctttacgaagccattcagaatggtgactacccgaagtgggatgtcagcattcagaccatgactgccaagcaagctgaagaggcgtgggaaaaacagaagatcaatgtttttgatctgacacacatctggcctcagaagcagttccctctgacaaaggttggagaattcacgctcaacgagaatgctatcaactatttcgccgaaatcgagcaggttgccttcgcaccatcacatctcgtacctggtattgagccgtctgccgatcccgtgttgcaatcgcgcttgttttcgtatcctgacactcaccgtcatcgtctcggcgcaaactaccaacagctgccagtcaatgcctcaagaacagggttcaagaatggcaacttccaacgtgatggctttatggccttctacaaccagggtgcccgaccaaattaccttagctccatcgacccaattcagtttgagcctcgcaaggtagatgttgataagacacatggtcatttcatcggtcaggcagtgtcgttcctgtcggagattcgccctgaagattttgtcgcgcctcgtacgctttggcagaaggtcttcgacgagcctgcccgcgagcgcttcatcaacaacgttgctggcaaaatggaggcctgcaaggataaggagattttgaagcgccagatcgctatcttccgcgaggtcgatgatgatatcgctacacgtctcgagaaggctacaggcatcaagggctatgatggcatcgcaaacttgaagtttaatggcacgcacaacggcatgaccaaggatgctaaggcgcggtttgctaatggcgtcaagccggccgcaggcttggcagctaacaagagcaatggcgctccatacaccggaacgcaccagtcaccttttgtcaatggagttaatgggtcttagattgtagaggagctaagaacagagtaatgataacctcacgaataaatacgatataattgatggacgattttattatgcatcgacctttcagcgatgatcacgattgtcccaaaatttcagcggtgttgcctggcatgtctaatggtatttctgttgcatccacagaatctggtacgcagatccaggaatatggtacattcggttcctttcctgcaatacgcatcgcccttcacagtatcaatctctcgtgtacacgtcgcatcttgtccacttatatattcagtttctcatctacgtgatctatcctatgtctatcgaaacgcgtagctctcgtccttcagtatactcctgtccctaattagcaggtgcatgacagcgctgttcgatttcatattatttgaataagttcaattgtgacagtgacatcgtgccgctaaaaatgcaaagtttgtttgccatgttgaaatcagg

SEQ ID NO: 16437 - DNA, 798 bp, Muscodor strobelii
  misc_feature: SGI cDNA ID NO. 565466
  misc_feature: Reduced expression when VOC is produced
  misc_feature: Encodes the peptide sequence at SEQ ID NO 16438
atgatgactcaagcagtgtcgacaatcgcagtatggcttacggcggtagccctatgccgagcacagcgatatgatggccaatactggccatgtaacccgatgaagaacctgacctgtcccctaaatcccggactcaaccaatacacgtacttcatagacttcagaactgcttccactgatgcacgcaaggactggagcgcctcgaactatgctaccattacatacaacacgaagggaaagaacggtgctgagtttacctatgggaagagatatgatgcgccccagctgttcacaaacttttacatcttctttggacgcgtcgatgtcgaaatgcaggtagcaccgggaaccggaattatatcttcaagtgttctgatatctgatgactttgatgagattgactgggaaatgtcgggaaacaacttcaacttgggcgcgaaatatccggatggtgtagttcagaacaattacttctctaaagggattacgggatcgtacgatcgcggcctatacatcccttgcaccagaccagagtcgaccttccacacatattcagtcgactggacccctgaaaagttatcttggatcctggatggtaaagtcgttcggacattcctagctgcaaatgccgacagcacaactcaccaatttccacagacaccatctaaatttcaacttggactatgggctggaggtgatcctgggtcaaattcgggtactcggaattgggccggaggccttacgaatatctctgctgctccttttacgatgttcttggaggagcatcaagctccttaa

SEQ ID NO: 16438 - protein, 265 aa, Muscodor strobelii
  misc_feature: SGI Peptide ID NO. 565466
  misc_feature (59)..(245): Pfam Id: PF00722 Pfam Desc: Glycosyl hydrolases family 16
  misc_feature (31)..(261): NCBI GI: 39969643 Blast Desc: MGG_10431 [Magnaporthe grisea 70-15] gi|145015097|gb|EDJ99665.1| MGG_10431 [Magnaporthe grisea 70-15] gi|260279113|dbj|BAI44127.1| beta-glucanase [Magnaporthe oryzae]
  misc_feature (19)..(260): NCBI GI: 27372089 Blast Desc: Crh-like protein [Aspergillus fumigatus] gi|159131719|gb|EDP56832.1| extracellular cell wall glucanase Crf1/allergen Asp F9 [Aspergillus fumigatus A1163]
  misc_feature (19)..(260): NCBI GI: 70996460 Blast Desc: extracellular cell wall glucanase Crf1/allergen Asp F9 [Aspergillus fumigatus Af293] gi|85540942|sp|Q8J0P4.2|CRF1_ASPFU RecName: Full= glycosidase crf1; AltName: Full=Crh-like protein f
  misc_feature (19)..(260): NCBI GI: 2879890 Blast Desc: rAsp f 9 [Aspergillus fumigatus]
  misc_feature (10)..(260): NCBI GI: 121700787 Blast Desc: extracellular cell wall glucanase Crf1/allergen Asp F9 [Aspergillus clavatus NRRL 1] gi|119396801|gb|EAW07232.1| extracellular cell wall glucanase Crf1/allergen Asp F9 clavatus
  misc_feature (10)..(260): NCBI GI: 119494495 Blast Desc: extracellular cell wall glucanase Crf1/allergen Asp F9 [Neosartorya fischeri NRRL 181] gi|119412305|gb|EAW22246.1| extracellular cell wall glucanase Crf1/allergen Asp F9 fischeri
  misc_feature (1)..(258): NCBI GI: 47078047 Blast Desc: ice nucleation protein [Fusarium acuminatum]
  misc_feature (31)..(260): NCBI GI: 255937505 Blast Desc: Pc13g13650 [Penicillium chrysogenum Wisconsin 54-1255] gi|211584399|emb|CAP92434.1| Pc13g13650 [Penicillium chrysogenum Wisconsin 54-1255]
  misc_feature (31)..(260): NCBI GI: 259488779 Blast Desc: TPA: extracellular cell wall glucanase Crf1/allergen Asp F9 (AFU_orthologue; AFUA_1G16190) [Aspergillus nidulans FGSC A4]
  misc_feature (31)..(260): NCBI GI: 67517318 Blast Desc: AN0933.2 [Aspergillus nidulans FGSC A4] gi|40746806|gb|EAA65962.1| AN0933.2 [Aspergillus nidulans FGSC A4]
  misc_feature (103)..(258): SWISSPROT Homolog: EC 2.4.1.207 Xyloglucan:xyloglucosyl transferase
  misc_feature: Useful for introducing or modulating the production of volatile compounds
MMTQAVSTIAVWLTAVALCRAQRYDGQYWPCNPMKNLTCPLNPGLNQYTYFIDFRTASTDARKDWSASNYATITYNTKGKNGAEFTYGKRYDAPQLFTNFYIFFGRVDVEMQVAPGTGIISSSVLISDDFDEIDWEMSGNNFNLGAKYPDGVVQNNYFSKGITGSYDRGLYIPCTRPESTFHTYSVDWTPEKLSWILDGKVVRTFLAANADSTTHQFPQTPSKFQLGLWAGGDPGSNSGTRNWAGGLTNISAAPFTMFLEEHQAP

SEQ ID NO: 16439 - DNA, 4075 bp, Muscodor strobelii
  misc_feature: SGI EST ID NO. CUFF.38854.0
  misc_feature: Variant of the nucleotide sequence at SEQ ID NO 16437
aattacaccttatgccctacatcaatactattatgccattcttcagtatttcataacacagaatgagttcaaacgttcagtttgcagatcccgttgccaagggcattttgccgacggccaaacagtccttccgagacctcttccattggaaacagagagtagtcgttaccaatgaccatggcgagacgcatacagagtggcagagtccggagccactgaggaatcccttctcgcttcttgctatgttgaaggcgaaagattggctttacttcatcgtcggattcattgcatggacagctgatgcattcgacttccatgccctatcaattcagactaccaaattcgccaaatactaccatacgtccaacaccgccatttccacggccattacgcttaccctattgttgcgatccgttggcgcagctatcttcggcctcattggtgatcggtatggaaggaagtggcccatggtactgaatatgctcgttttgggcctacttcagattggaactatttacgccgatacctatcagaagtttcttgctgtgcgctctctatttggtctctttatgggtggcgtatatggcaatgccgttgcaatggctctagagaattgccccaacgaggcccgtggtctggtcagcggtgtcatgcaacaaggctattctttcggttacgtcttggctgccatcgctaatctcgctgtcggcggcgaggttgaaacgtggaagacagtcttttgggctggtgctggcctgtcattcgcctctggcattctgcgcattttcttcgccgagtctcagcaatttattgaggctaaggaatctggacaaaaaatcactgcgagtgacttttggtcagagaccaaggccatgcttcgcacggagtggcgcatgtgcgtatactgcatcattctgatgtcttggttcaacttttactctcataccagtcaggatagctacacgacattcgtgctaacgcagaaagagctatctaatcccgctgcctccagggctagtattttgatgaaaactggtgctgtcgttggcggccccataagcgggtatttctcgcagtggctaggtcgtcgccgggcaattattggagcggccatcatcagtggttttctgatcccggcctggattctctcagagggagagcgtgcgctctcggtcaccgctttcttcatgcaattcttcgttcaaggtgcctggggaatcatccctgtgcatctcagcgaactttcaccatctgcataccgaagtactttccctggcctcacatatcagcttgggaatgccatcagctctcccagcacacagattgtcaatgctctggcggaatcaaatcgtgtccgggcaaaatcaggcgacctagttgatgcatacggtcctgttatggccattgccaccgcgatcattgttactggcattgttttcacaactgctttcggtccggagagacgcggccgcaccttcgagggtggaccaattggcacgaacattcaccatgatgaagagaaaactgctgagactgtttcaatggacgaaaagacttcgagtggggaggacagaaaagagaaagaaatttcttgagatgctatcgcctttcaatcatggaggtctgggagcgggactattggcgtaggcaagtgatcgatcggcgcactgcttgatgtctaccgggcaacagactttctttatcgggtttggtactaggacgaaggccaacgggtcaaggtttgctcgattgaggagttatcaaagggttaggtagaaagctcatcaaaggactgggtggaagcttgagacaagaacgttctttgtgggttgggtcatgattactaacaaagagcgaataacacctatccgtttcaagcacttcgcgtattgggcccgataagattttgtgacacttcgagtcgtggaacatgtaggatagcgatgatgactcaagcagtgtcgacaatcgcagtatggcttacggcggtagccctatgccgagcacagcgatatgatggccaatactggcgtaagtccactcatttgtagaaagtgcagctgaaagctcacagactaacataatatcgtagcatgtaacccgatgaagaaccgtatgaagtgtctatacaattgtatcgcacctaatcattgatgcctctgcagtgacctgtcccctaaatcccggactcaaccaatacacgtacttcatagacttcagaactgcttccactgatgcacgcaaggactggagcgcctcgaactatgctaccattacatacaacacgaagggaaagaacggtgctgagtttacctatgggaagagatatgatgcgccccagctgttcacaaacttttacatcttctttggacgcgtcgatgtcgaaatgcaggtagcaccgggaaccggaattatatcttcaagtgttctgatatctgatgactttgatgagattgactgggaaatgtcgggaaacaacttcaacttgggcgcgaaatatccggatggtgtagttcagaacaattacttctctaaagggattacgggatcgtacgatcgcggcctatacatcccttgcaccagaccagagtcgaccttccacacatattcagtcgactggacccctgaaaagttatcttggatcctggatggtaaagtcgttcggacattcctagctgcaaatgccgacagcacaactcaccaatttccacagacaccatctaaatttcaacttggactatgggctggaggtgatcctgggtcaaattcgggtactcggaattgggccggaggccttacgaatatctctgctgctccttttacgatgttcgtaagaaatgtgaagatcacaaattacaatcccgcaagatactataactggacggatcaatccggtagttggaggagcatcaagctccttaacgcctcattgccaagtccatcatcaagcacacactcgagcatcgccagttccattcagccccttagaaccgagttgcccgtatctccaaacggtcactgtggggataagatcaaggcaatttgtaaagggagtttgttcggcaattgctgctcattttacggattctgcggaaatacgacggaatactgtgggctcgggtgtcagtctgcgtttggtcaatgtggtgcgcagaatccggttgcgacgacgggtgtcacgtcgtcgactgcaaaggtcccaggctcgacgaaatcatcaacgtctgagattcgagcctttacatccatgcctagcaatgaggttaatactattactacaaagacaagtaccactgcgactgcgactatctcaccgcctaaagagacacctttattcactccgcgcgtctcgatttcgacatctgcaacagtctcacaactcgcgccagcctcacatagccggacgtcggaggctagtggtatctccaatagccagcatatttcggcaataagcgacaaaattctgggagtctcaacaatcgcatcattgacagcagcacatgaggtagatgcggtcgcaacgaccgccagccatggatcagctcccagtatagttcccacaagatcggctactcaaacaaattccgatcagcggagtccctcagctgtgccagtcgacaagcccacatggcaattttgcttctggtttaagcagtggtattgttataagtttcattataagaggtcctatcctgtgtcttgagctgttatgctctatcatgatgaggtccccgttgggtttggagggtgctcaagatacgtatatttactagagaataaaccatgactctgtgggggctttatacattgttggaaaagagaatttataaagttctgaatacacttgatgatgaactgaagtttgcatttgtcctgccaagatccgtgatcaaagcatagtaggctcgcgccttgggttcactacctgcatccctatgaaagtctctatcgatacgcgctgtttacatgagagaatgcgcgattccggtcacgccagtgttagtccttttgctatcgcgcacttaccgaacctgaaacttcgcattatttcgaaacgtactcgaccttcatacca

SEQ ID NO: 16440 - DNA, 1533 bp, Muscodor strobelii
  misc_feature: SGI cDNA ID NO. 565467
  misc_feature: Elevated expression when VOC is produced
  misc_feature: Encodes the peptide sequence at SEQ ID NO 16441
atgagttcaaacgttcagtttgcagatcccgttgccaagggcattttgccgacggccaaacagtccttccgagacctcttccattggaaacagagagtagtcgttaccaatgaccatggcgagacgcatacagagtggcagagtccggagccactgaggaatcccttctcgcttcttgctatgttgaaggcgaaagattggctttacttcatcgtcggattcattgcatggacagctgatgcattcgacttccatgccctatcaattcagactaccaaattcgccaaatactaccatacgtccaacaccgccatttccacggccattacgcttaccctattgttgcgatccgttggcgcagctatcttcggcctcattggtgatcggtatggaaggaagtggcccatggtactgaatatgctcgttttgggcctacttcagattggaactatttacgccgatacctatcagaagtttcttgctgtgcgctctctatttggtctctttatgggtggcgtatatggcaatgccgttgcaatggctctagagaattgccccaacgaggcccgtggtctggtcagcggtgtcatgcaacaaggctattctttcggttacgtcttggctgccatcgctaatctcgctgtcggcggcgaggttgaaacgtggaagacagtcttttgggctggtgctggcctgtcattcgcctctggcattctgcgcattttcttcgccgagtctcagcaatttattgaggctaaggaatctggacaaaaaatcactgcgagtgacttttggtcagagaccaaggccatgcttcgcacggagtggcgcatgtgcgtatactgcatcattctgatgtcttggttcaacttttactctcataccagtcaggatagctacacgacattcgtgctaacgcagaaagagctatctaatcccgctgcctccagggctagtattttgatgaaaactggtgctgtcgttggcggccccataagcgggtatttctcgcagtggctaggtcgtcgccgggcaattattggagcggccatcatcagtggttttctgatcccggcctggattctctcagagggagagcgtgcgctctcggtcaccgctttcttcatgcaattcttcgttcaaggtgcctggggaatcatccctgtgcatctcagcgaactttcaccatctgcataccgaagtactttccctggcctcacatatcagcttgggaatgccatcagctctcccagcacacagattgtcaatgctctggcggaatcaaatcgtgtccgggcaaaatcaggcgacctagttgatgcatacggtcctgttatggccattgccaccgcgatcattgttactggcattgttttcacaactgctttcggtccggagagacgcggccgcaccttcgagggtggaccaattggcacgaacattcaccatgatgaagagaaaactgctgagactgtttcaatggacgaaaagacttcgagtggggaggacagaaaagagaaagaaatttcttga

SEQ ID NO: 16441 - protein, 510 aa, Muscodor strobelii
  misc_feature: SGI Peptide ID NO. 565467
  misc_feature (72)..(416): Pfam Id: PF07690 Pfam Desc: Major Facilitator Superfamily
  misc_feature (56)..(479): Pfam Id: PF00083 Pfam Desc: Sugar (and other) transporter
  misc_feature (69)..(259): Pfam Id: PF00083 Pfam Desc: Sugar (and other) transporter
  misc_feature (1)..(507): NCBI GI: 121698964 Blast Desc: carboxylic acid transport protein [Aspergillus clavatus NRRL 1] gi|119396004|gb|EAW06436.1| carboxylic acid transport protein [Aspergillus clavatus NRRL 1]
  misc_feature (2)..(509): NCBI GI: 71001196 Blast Desc: carboxylic acid transport protein [Aspergillus fumigatus Af293] gi|66852917|gb|EAL93241.1| carboxylic acid transport protein [Aspergillus fumigatus Af293]
  misc_feature (2)..(509): NCBI GI: 159129361 Blast Desc: carboxylic acid transport protein [Aspergillus fumigatus A1163]
  misc_feature (1)..(499): NCBI GI: 116199013 Blast Desc: CHGG_07662 [Chaetomium globosum CBS 148.51] gi|88178941|gb|EAQ86409.1| CHGG_07662 [Chaetomium globosum CBS 148.51]
  misc_feature (3)..(508): NCBI GI: 258576591 Blast Desc: UREG_01993 [Uncinocarpus reesii 1704] gi|237902743|gb|EEP77144.1| UREG_01993 [Uncinocarpus reesii 1704]
  misc_feature (1)..(508): NCBI GI: 169783732 Blast Desc: [Aspergillus oryzae RIB40] gi|83775072|dbj|BAE65195.1| protein product [Aspergillus oryzae]
  misc_feature (1)..(498): NCBI GI: 145252968 Blast Desc: An16g06950 [Aspergillus niger] gi|134083554|emb|CAK47017.1| protein product [Aspergillus niger]
  misc_feature (8)..(508): NCBI GI: 256731525 Blast Desc: [Nectria haematococca mpVI 77-13-4]
  misc_feature (1)..(508): NCBI GI: 162286825 Blast Desc: lactate transporter [Aspergillus flavus]
  misc_feature (1)..(508): NCBI GI: 164426102 Blast Desc: NCU01231 [Neurospora crassa OR74A] gi|157071200|gb|EAA32361.2| NCU01231 [Neurospora crassa OR74A]
  misc_feature: Useful for introducing or modulating the production of volatile compounds
MSSNVQFADPVAKGILPTAKQSFRDLFHWKQRVVVTNDHGETHTEWQSPEPLRNPFSLLAMLKAKDWLYFIVGFIAWTADAFDFHALSIQTTKFAKYYHTSNTAISTAITLTLLLRSVGAAIFGLIGDRYGRKWPMVLNMLVLGLLQIGTIYADTYQKFLAVRSLFGLFMGGVYGNAVAMALENCPNEARGLVSGVMQQGYSFGYVLAAIANLAVGGEVETWKTVFWAGAGLSFASGILRIFFAESQQFIEAKESGQKITASDFWSETKAMLRTEWRMCVYCIILMSWFNFYSHTSQDSYTTFVLTQKELSNPAASRASILMKTGAVVGGPISGYFSQWLGRRRAIIGAAIISGFLIPAWILSEGERALSVTAFFMQFFVQGAWGIIPVHLSELSPSAYRSTFPGLTYQLGNAISSPSTQIVNALAESNRVRAKSGDLVDAYGPVMAIATAIIVTGIVFTTAFGPERRGRTFEGGPIGTNIHHDEEKTAETVSMDEKTSSGEDRKEKEIS

SEQ ID NO: 16442 - DNA, 4075 bp, Muscodor strobelii; identical to SEQ ID NO: 16439
  misc_feature: SGI EST ID NO. CUFF.38854.0
  misc_feature: Variant of the nucleotide sequence at SEQ ID NO 16440

SEQ ID NO: 16443 - DNA, 771 bp, Muscodor strobelii
  misc_feature: SGI cDNA ID NO. 565468
  misc_feature: Encodes the peptide sequence at SEQ ID NO 16444
atggcacaagtaacgatgaatgccagcgcagagcttactgacaccaaggctcataaacttgagcgtttagatcagacgaacaaaagcgcggtgcccggagagattatccgcggaggcaaggggctcatcgataaagcactcccagttctagtggctgcattccacgacgatgcctcgttccgatatttcatgggcgctctctcagaaagcgaacaaatggattatttgccgaggttgattggcactcttctgaaggctggagtacttaacaatggaacgatactcgcaactccatcatggggatgttccgcacttatgttaccaccgggtgagacagtagattcgctacaaactatattcacaagcggcatcatacctatgtgcatagatttgagactgaaaggagtaaagcgttttcttgaatggggcgatgccgtgaaacaagccaaaaagaaagcgctttttcgaaaagaacactcctcgtatgtttatgtcttcattattggcacgtcgccagaccaacaacgccagggtcttgctagtcaactactgaagcacatgcaagaatatgcgacgcgtgaagataaacctctttggctcgaggcgtcaaacgcagacgcaagaaaagtgtatttgaagcatggttttcgagatgtcgacgagattgtcctgggtaaaggtcgcgctggtccagatgggcggaagaagaaaggaggagagggagtacaaacatgggctatgatctggcgaccaaatggtacatgtagttag

SEQ ID NO: 16444 - protein, 256 aa, Muscodor strobelii
  misc_feature: SGI Peptide ID NO. 565468
  misc_feature (125)..(217): Pfam Id: PF00583 Pfam Desc: Acetyltransferase (GNAT) family
  misc_feature (153)..(217): Pfam Id: PF00583 Pfam Desc: Acetyltransferase (GNAT) family
  misc_feature (29)..(248): NCBI GI: 255941302 Blast Desc: Pc16g11150 [Penicillium chrysogenum Wisconsin 54-1255] gi|211586043|emb|CAP93785.1| Pc16g11150 [Penicillium chrysogenum Wisconsin 54-1255]
  misc_feature (109)..(254): NCBI GI: 256732450 Blast Desc: NECHADRAFT_78664 [Nectria haematococca mpVI 77-13-4]
  misc_feature (45)..(253): NCBI GI: 169623086 Blast Desc: SNOG_14768 [Phaeosphaeria nodorum SN15] gi|111056840|gb|EAT77960.1| SNOG_14768 [Phaeosphaeria nodorum SN15]
  misc_feature (44)..(227): NCBI GI: 154299712 Blast Desc: BC1G_11482 [Botryotinia fuckeliana B05.10] gi|150857172|gb|EDN32364.1| BC1G_11482 [Botryotinia fuckeliana B05.10]
  misc_feature (1)..(227): NCBI GI: 156049219 Blast Desc: SS1G_08316 [Sclerotinia sclerotiorum 1980] gi|154692715|gb|EDN92453.1| SS1G_08316 [Sclerotinia sclerotiorum 1980]
  misc_feature (83)..(232): NCBI GI: 159470945 Blast Desc: [Chlamydomonas reinhardtii] gi|158283120|gb|EDP08871.1| [Chlamydomonas reinhardtii]
  misc_feature (50)..(227): NCBI GI: 189206349 Blast Desc: conserved [Pyrenophora tritici-repentis Pt-1C-BFP] gi|187975602|gb|EDU42228.1| conserved [Pyrenophora tritici-repentis Pt-1C-BFP]
  misc_feature (107)..(228): NCBI GI: 164423801 Blast Desc: NCU07718 [Neurospora crassa OR74A] gi|157070237|gb|EAA32732.2| conserved [Neurospora crassa OR74A]
  misc_feature (83)..(227): NCBI GI: 159471447 Blast Desc: [Chlamydomonas reinhardtii] gi|158283371|gb|EDP09122.1| [Chlamydomonas reinhardtii]
  misc_feature (172)..(249): NCBI GI: 169613969 Blast Desc: SNOG_10118 [Phaeosphaeria nodorum SN15] gi|111061333|gb|EAT82453.1| SNOG_10118 [Phaeosphaeria nodorum SN15]
MAQVTMNASAELTDTKAHKLERLDQTNKSAVPGEIIRGGKGLIDKALPVLVAAFHDDASFRYFMGALSESEQMDYLPRLIGTLLKAGVLNNGTILATPSWGCSALMLPPGETVDSLQTIFTSGIIPMCIDLRLKGVKRFLEWGDAVKQAKKKALFRKEHSSYVYVFIIGTSPDQQRQGLASQLLKHMQEYATREDKPLWLEASNADARKVYLKHGFRDVDEIVLGKGRAGPDGRKKKGGEGVQTWAMIWRPNGTCS

SEQ ID NO: 16445 - DNA, 1100 bp, Muscodor strobelii
  misc_feature: SGI EST ID NO. CUFF.38857.0
  misc_feature: Variant of the nucleotide sequence at SEQ ID NO 16443
gcgacaggcatattagtaaattagaagattgacgtaggtatagtatctttcaaagagtcggccacagaatggaaagcaccgacccattggctgggttgcgatttgagtacccttgcgtcccgaacctgcccttaactcgactcgacttcaacacggacttataatcgccaaggctgcaagatggcacaagtaacgatgaatgccagcgcagagcttactgacaccaaggctcataaacttgagcgtttagatcagacgaacaaaagcgcggtgcccggagagattatccgcggaggcaaggggctcatcgataaagcactcccagttctagtggctgcattccacgacgatgcctcgttccgatatttcatgggcgctctctcagaaagcgaacaaatggattatttgccgaggttgattggcactcttctgaaggctggagtacttaacaatggaacgatactcgcaactccatcatggggatgttccgcacttatgttaccaccgggtgagacagtagattcgctacaaactatattcacaagcggcatcatacctatgtgcatagatttgagactgaaaggagtaaagcgttttcttgaatggggcgatgccgtgaaacaagccaaaaagaaagcgctttttcgaaaagaacactcctcgtatgtttatgtcttcattattggcacgtcgccagaccaacaacgccagggtcttgctagtcaactactgaagcacatgcaagaatatgcgacgcgtgaagataaacctctttggctcgaggcgtcaaacgcagacgcaagaaaagtgtatttgaagcatggttttcgagatgtcgacgagattgtcctgggtaaaggtcgcgctggtccagatgggcggaagaagaaaggaggagagggagtacaaacatgggctatgatctggcgaccaaatggtacatgtagttagtctaatcgcagactgagtgattttgtaagtgtcaacttagtatatgcactagacgcttttgggatatttagaaccgtcgttcgtgatgaccgtgattagttctcggagtgacaaggtgtcgtttaacggaaggtgagttccgatcgaca

SEQ ID NO: 16446 - DNA, 648 bp, Muscodor strobelii
  misc_feature: SGI cDNA ID NO. 565469
  misc_feature: Encodes the peptide sequence at SEQ ID NO 16447
atgcgctcaaaaattgtcgtaacctgcgtcgttggcgctgccagcgcgcagcaaaccgcatgggggcaatcaactgcggcgacgtcaacaacgacagcatccactaccagaactaccggaacagggacaacaacgaagaccacggcgactacaactgcaactggatcaggaacataccccacaacactgcaatcgggctactactggatccgcgccgtcgagtcgccgaacttccattcctacttacaggccgcgccgaccgctaaaccatctccaggcccaggcgacgcatatctgctctcgcatacaaatgctgggcaattcaacgtcatcgacggacaattagtttacaacccaggctcaagcaccggtacaactgtgtacatgtgggtggaaaacccgacgaacaagacccagcgcacgctcgagacgtggttcgacacgtcgaagaacacatacggcacatttgcgttttcgggtgatacactcacatggtccgtgagtgatatatcgcgcccaaatgtgggcgcttggtatgtatgcggtgatgctggacggttgtatatcaatacgggcgcttatgcatataacgcaccttctggatgtgtggatgagacggtaagtttctttgaaatgttaagaggatga

SEQ ID NO: 16447 - protein, 215 aa, Muscodor strobelii
  misc_feature: SGI Peptide ID NO. 565469
  misc_feature (66)..(207): NCBI GI: 70987089 Blast Desc: AFUA_7G04840 [Aspergillus fumigatus Af293] gi|66846656|gb|EAL86988.1| AFUA_7G04840 [Aspergillus fumigatus Af293]
  misc_feature (66)..(207): NCBI GI: 159123204 Blast Desc: AFUB_090390 [Aspergillus fumigatus A1163]
  misc_feature (66)..(207): NCBI GI: 119482750 Blast Desc: NFIA_025790 [Neosartorya fischeri NRRL 181] gi|119409558|gb|EAW19506.1| NFIA_025790 [Neosartorya fischeri NRRL 181]
  misc_feature (62)..(209): NCBI GI: 169765744 Blast Desc: [Aspergillus oryzae RIB40] gi|83765198|dbj|BAE55341.1| protein product [Aspergillus oryzae]
  misc_feature (30)..(207): NCBI GI: 164422963 Blast Desc: NCU09524 [Neurospora crassa OR74A] gi|157069891|gb|EAA29283.2| conserved [Neurospora crassa OR74A]
  misc_feature (65)..(207): NCBI GI: 115437314 Blast Desc: conserved [Aspergillus terreus NIH2624] gi|114188594|gb|EAU30294.1| conserved [Aspergillus terreus NIH2624]
  misc_feature (62)..(207): NCBI GI: 238482341 Blast Desc: conserved [Aspergillus flavus NRRL3357] gi|220700459|gb|EED56797.1| conserved [Aspergillus flavus NRRL3357]
  misc_feature (1)..(211): NCBI GI: 156062514 Blast Desc: SS1G_01373 [Sclerotinia sclerotiorum 1980] gi|154696709|gb|EDN96447.1| SS1G_01373 [Sclerotinia sclerotiorum 1980]
  misc_feature (60)..(206): NCBI GI: 85092889 Blast Desc: NCU02189 [Neurospora crassa OR74A] gi|28921026|gb|EAA30347.1| conserved [Neurospora crassa OR74A]
  misc_feature (60)..(210): NCBI GI: 171678185 Blast Desc: protein product [Podospora anserina] gi|170937162|emb|CAP61819.1| protein product [Podospora anserina]
MRSKIVVTCVVGAASAQQTAWGQSTAATSTTTASTTRTTGTGTTTKTTATTTATGSGTYPTTLQSGYYWIRAVESPNFHSYLQAAPTAKPSPGPGDAYLLSHTNAGQFNVIDGQLVYNPGSSTGTTVYMWVENPTNKTQRTLETWFDTSKNTYGTFAFSGDTLTWSVSDISRPNVGAWYVCGDAGRLYINTGAYAYNAPSGCVDETVSFFEMLRG

SEQ ID NO: 16448 - DNA, 1197 bp, Muscodor strobelii
  misc_feature: SGI cDNA ID NO. 565470
  misc_feature: Encodes the peptide sequence at SEQ ID NO 16449
atgtcgagcccgcccgccagcagtagtgtgccaccaacggcgccgccagctgctactactgaaactagtaggggcgacggccaagagcctaaacagccagaacagccatctaccacatctacaatagatcccgctccagcgcccgcaacggaagcctccgcaacctcaacggcgcagtctccagctcagccgtcagcgattttaccagcttcacattgggctcaagcaccggttgaagaggatgaagacgataatgattcagcctatggcgacgacaatgcgagctcaacagcgtcactctcggcaagtatactcgagtatcgaaccgtgcacggccgtaccttccatagtgagcgcggtaatgctcaatcctggaatcctaacgacgcacaacatgatgagtccatggatatcctccatcacgtctcgacactcttgcagaagggcaaaatatgtctagctcatctcgatcccaatatacaaaaagtgttggatgtagggtgtgggacaggaatctgggcaattgacttcgcagatcaataccccaatgcgcaggtagttggcgtagatatatcgcctcagcaaccacaatggcttccaccgaatctgaaattcgagatcgatgacgtgacccaaccttggacgtatgagcccaacagcttcgactatgtacatatgagatggctggtcggcgcgatacccgacttcaattttctggtgaaagagatttacaataccgtcaaaccaggaggcatattcgagtggaaggattcgtcgtgcatgatcacaagcgatgatggcacggtccccgtcggatgcgccttagatcagtggggtcgagtcttttgggaagctggtagaaaatccggtcgcacattccgtgtcatggaagacgagattcaacgaaaatccatggaggccgctggatttgtagacattaagataactgacttcaagacaccgttaggcgcctggcctgccgacccctatcaaaaagagataggtcaatataacagacatgcacttatgcaagatattgaaggattcgtcgtctacatgtggacaagcataatgggttggacacaggaagagacccatgtatacgctgcgcatttacggcgcgagttgcggtcgaacaactaccacgcgtattatcctcaacgtgtggtaataggccgaaagcctgacaatgcctaa

SEQ ID NO: 16449 - protein, 398 aa, Muscodor strobelii
  misc_feature: SGI Peptide ID NO. 565470
  misc_feature (164)..(255): Pfam Id: PF08241 Pfam Desc: Methyltransferase domain
  misc_feature (164)..(253): Pfam Id: PF08242 Pfam Desc: Methyltransferase domain
  misc_feature (124)..(319): Pfam Id: PF01209 Pfam Desc: ubiE/COQ5 methyltransferase family
  misc_feature (164)..(253): Pfam Id: PF08241 Pfam Desc: Methyltransferase domain
  misc_feature (153)..(194): Pfam Id: PF05175 Pfam Desc: Methyltransferase small domain
  misc_feature (52)..(398): NCBI GI: 256725329 Blast Desc: NECHADRAFT_45631 [Nectria haematococca mpVI 77-13-4]
  misc_feature (44)..(396): NCBI GI: 46114338 Blast Desc: FG03011.1 [Gibberella zeae PH-1]
  misc_feature (63)..(396): NCBI GI: 256720463 Blast Desc: NECHADRAFT_55610 [Nectria haematococca mpVI 77-13-4]
  misc_feature (82)..(396): NCBI GI: 256733855 Blast Desc: NECHADRAFT_77418 [Nectria haematococca mpVI 77-13-4]
  misc_feature (50)..(396): NCBI GI: 256727930 Blast Desc: NECHADRAFT_46272 [Nectria haematococca mpVI 77-13-4]
  misc_feature (51)..(398): NCBI GI: 256724150 Blast Desc: NECHADRAFT_97152 [Nectria haematococca mpVI 77-13-4]
  misc_feature (20)..(396): NCBI GI: 46109724 Blast Desc: FG01744.1 [Gibberella zeae PH-1]
  misc_feature (60)..(396): NCBI GI: 256722430 Blast Desc: [Nectria haematococca mpVI 77-13-4]
  misc_feature (75)..(395): NCBI GI: 256720332 Blast Desc: NECHADRAFT_56071 [Nectria haematococca mpVI 77-13-4]
  misc_feature (49)..(397): NCBI GI: 256723728 Blast Desc: NECHADRAFT_72745 [Nectria haematococca mpVI 77-13-4]
MSSPPASSSVPPTAPPAATTETSRGDGQEPKQPEQPSTTSTIDPAPAPATEASATSTAQSPAQPSAILPASHWAQAPVEEDEDDNDSAYGDDNASSTASLSASILEYRTVHGRTFHSERGNAQSWNPNDAQHDESMDILHHVSTLLQKGKICLAHLDPNIQKVLDVGCGTGIWAIDFADQYPNAQVVGVDISPQQPQWLPPNLKFEIDDVTQPWTYEPNSFDYVHMRWLVGAIPDFNFLVKEIYNTVKPGGIFEWKDSSCMITSDDGTVPVGCALDQWGRVFWEAGRKSGRTFRVMEDEIQRKSMEAAGFVDIKITDFKTPLGAWPADPYQKEIGQYNRHALMQDIEGFVVYMWTSIMGWTQEETHVYAAHLRRELRSNNYHAYYPQRVVIGRKPDNA

SEQ ID NO: 16450 - DNA, 1984 bp, Muscodor strobelii
  misc_feature: SGI EST ID NO. CUFF.39348.1
  misc_feature: Variant of the nucleotide sequence at SEQ ID NO 16448
gaaagtagtcggctgtactgtgtttcccaagatcactcaaataccttttcaaagaaccttcttgtgctcccatagccctgtcctcgtcttaccctattctattttcagcttccagcctcaaatacgagataacctgtgccgaatattgagtggaaatttgaaaattgtagattcattcgcctctctcggccgccgccttctacgctctgcgcccattaacactgctcgacgtcagtagctgtcggcaggctcattttcacgaagacaatgtcgagcccgcccgccagcagtagtgtgccaccaacggcgccgccagctgctactactgaaactagtaggggcgacggccaagagcctaaacagccagaacagccatctaccacatctacaatagatcccgctccagcgcccgcaacggaagcctccgcaacctcaacggcgcagtctccagctcagccgtcagcgattttaccagcttcacattgggctcaagcaccggttgaagaggatgaagacgataatgattcagcctatggcgacgacaatgcgagctcaacagcgtcactctcggcaagtatactcgagtatcgaaccgtgcacggccgtaccttccatagtgagcgcggtaatgctcaatcctggaatcctaacgacgcacaacatgatgagtccatggatatcctccatcacgtctcgacactcttgcagaagggcaaaatatgtctagctcatctcgatcccaatatacaaaaagtgttggatgtagggtgtgggacaggtatgacactaggcgctgttcagcttttcgacgcccactgacaaaagccgcttaggaatctgggcaattgacttcgcagatcaataccccaatgcgcaggtagttggcgtagatatatcgcctcagcaaccacaatggcttccaccgaatctgaaattcgagatcgatgacgtgacccaaccttggacgtatgagcccaacagcttcgactatgtacatatgagatggctggtcggcgcgatacccgacttcaattttctggtgaaagagatttacaataccgtcaaaccaggaggcatattcgagtggaaggattcgtcgtgcatgatcacaagcgatgatggcacggtccccgtcggatgcgccttagatcagtggggtcgagtcttttgggaagctggtagaaaatccggtcgcacattccgtgtcatggaagacgagattcaacgaaaatccatggaggccgctggatttgtagacattaagataactgacttcaagacaccgttaggcgcctggcctgccgacccctatcaaaaagagataggtcaatataacagacatgcacttatgcaagatattgaaggattcgtcgtctacatgtggacaagcataatgggttggacacaggaagagacccatgtatacgctgcgcatttacggcgcgagttgcggtcgaacaactaccacgcgtattatcctcaacgtgtggtaataggccgaaagcctgacaatgcctaaagtgccttctatatcaaggctgactgaaacagtactggcacgagccaaccatatctgccgggatggcccaactgcgacacaagacccggaaagcagcgtgttactgtggccatcgagcctgtcgtctgctaacgtgctcgcctcaagacgcaggtcaacattatctgaaatacattgcgcgacatggacgactgagcttcatgtacaggacatacaaatatgtatataaggtaaacggttaatgatataatgacactgcataaataacagccgtactgtgtcataatgccgtggtgcggtcaaggagccagcgtcaagctggccccgtgtgctcatctaatttcctctatgcacaattaatcacgtacagagccatctcatgcgtctgcagttgaacctccgtaatagtgtatctaattcaaatcagctgctgacttcatcctcttaacatttcaaagaaactta

SEQ ID NO: 16451 - DNA, 858 bp, Muscodor strobelii
  misc_feature: SGI cDNA ID NO. 565471
  misc_feature: Encodes the peptide sequence at SEQ ID NO 16452
atggcatgggcccatggtcgcacgacagctcgtgcagaagatcgagcatatagcctcatgggtatatttgccatcaatatgcctctattgtatggcgaagccgtaccgaaagcattcgcgcggctccaggaggagatcatcagcactacgaatgaccaatctattcctttgcatgatggaatgacccacggtcccctggcagactctccggatgacttcgatcctagcgacgatggcagaggtggtacgacgaagagagacatcgacgatgagtaccgtattgaagaactcaaatacaacaactgggagcggaaggttatacagctacgtggaccggattcactttcgtcagcacagccttatccagacatcaattatgtgcggtctgtgactattaatgttgagtccgtactgcaaataactcaacttacctacaatcttgtggcttcgttttccaggcccaccgggccctggataatagtcgaagttcctgagcgcaaaattccaaatcagatacttgcttgccttattttccgttcaaatctatcacttcccgtgttggccatgctcatatttgaggacacgagcgggcagccaccggaagccagcgaacccaagattttcatctggttcgaagagctcttcaaatgcctaggcgcaatcgaagatgcagtaatgcatttaagacagtgtgagaagcagagccgcggattcagcgtgctaccattgttattcaacgaaattcacgggcttggcattgaagaagttgtgtccgagttcgggcaaattccttcacagtatgggtatactctcctcaccgcaaatggcgctgtgattgctacagtagacgaatcatga

SEQ ID NO: 16452 - protein, 285 aa, Muscodor strobelii
  misc_feature: SGI Peptide ID NO. 565471
  misc_feature (1)..(78): NCBI GI: 164425178 Blast Desc: NCU06304 [Neurospora crassa OR74A] gi|157070820|gb|EAA33330.2| conserved [Neurospora crassa OR74A]
  misc_feature (1)..(78): NCBI GI: 238486510 Blast Desc: ankyrin 2,3/unc44, [Aspergillus flavus NRRL3357] gi|220699372|gb|EED55711.1| ankyrin 2,3/unc44, [Aspergillus flavus NRRL3357]
  misc_feature (1)..(73): NCBI GI: 145602171 Blast Desc: MGG_12935 [Magnaporthe grisea 70-15] gi|145010601|gb|EDJ95257.1| MGG_12935 [Magnaporthe grisea 70-15]
  misc_feature (1)..(73): NCBI GI: 256725036 Blast Desc: NECHADRAFT_91508 [Nectria haematococca mpVI 77-13-4]
  misc_feature (1)..(74): NCBI GI: 46107392 Blast Desc: FG00579.1 [Gibberella zeae PH-1]
  misc_feature (1)..(78): NCBI GI: 239611724 Blast Desc: HET domain-containing protein [Ajellomyces dermatitidis ER-3]
  misc_feature (1)..(78): NCBI GI: 261201308 Blast Desc: HET domain-containing protein [Ajellomyces dermatitidis SLH14081] gi|239592113|gb|EEQ74694.1| HET domain-containing protein [Ajellomyces dermatitidis SLH14081]
  misc_feature (1)..(76): NCBI GI: 119481395 Blast Desc: HET domain protein [Neosartorya fischeri NRRL 181] gi|119408880|gb|EAW18829.1| HET domain protein [Neosartorya fischeri NRRL 181]
  misc_feature (1)..(78): NCBI GI: 169780438 Blast Desc: [Aspergillus oryzae RIB40] gi|83773423|dbj|BAE63550.1| protein product [Aspergillus oryzae]
  misc_feature (1)..(55): NCBI GI: 171694582 Blast Desc: protein product [Podospora anserina] gi|170947533|emb|CAP59694.1| protein product [Podospora anserina]
MAWAHGRTTARAEDRAYSLMGIFAINMPLLYGEAVPKAFARLQEEIISTTNDQSIPLHDGMTHGPLADSPDDFDPSDDGRGGTTKRDIDDEYRIEELKYNNWERKVIQLRGPDSLSSAQPYPDINYVRSVTINVESVLQITQLTYNLVASFSRPTGPWIIVEVPERKIPNQILACLIFRSNLSLPVLAMLIFEDTSGQPPEASEPKIFIWFEELFKCLGAIEDAVMHLRQCEKQSRGFSVLPLLFNEIHGLGIEEVVSEFGQIPSQYGYTLLTANGAVIATVDES

SEQ ID NO: 16453 - DNA, 1290 bp, Muscodor strobelii
  misc_feature: SGI cDNA ID NO. 565472
  misc_feature: Encodes the peptide sequence at SEQ ID NO 16454
atgaacaacttcagctcttcctcattcggcgagcttctaacctccatcacgacatccgtcacagaggtcaattcttcaggttcgtggaagcaatatgtcatccccgcagctttgggctacatcgcgctatgtcgtgcgctcagatatcgcggagagaaaaacctgaggaatcggttaggatacccggaagggtgtggaagagagaagctggcacaaatgacgaacgacgaggcacaggctattattaagtatctcatgggttatgaatttcccgagtttcatctgctttcgctgcagtttggattatttaagacatacggcgttgagtcaatcagcagacttctgctggcgacgcggaatttgacagatcctgtcaagagcttgaagagatatgaagacacggccaccctaatcgcagagttcatggtgaacccaccaagctcatcacgaaccatgcacgccatagcgcgtatgaacttcctacacagcaaataccgtgaagaaggcgcaatctccaacgaagatcttctctacactctttcagtctttgtgaccgaacctccccgtttcgcacgcctctatgaatggcgcgctatgaacgagatggaaatctgcgcgtacggtgttttctggaaggttgtcggtgattccatgggcatccagtataagggtttgctaccccgagacacgtggaaagatggaattgagtgggcggaggatatcaccatatgggctaaagcttatgaggccgagaagatgaagccgagtgttgttgcgaataagcctgccaaagcactgattccgatgattacgtactgggtaccatggttcgggaagtcatttgctgagcaggcggtctgtgtgttgatgggcgaccgcgtgagagaggcgttcatgctgcctgagccgagtgttgccgctggagctgtcgtttatccggccatatggctacgcagtttgtttcttcggtatctggctctcccgcggttattggaggtccgccgactcggggatatggatcccaagactgggcgcttcactttaagagagtctttcggcaattacccgttctaccgaaagccgacgctgtggaatcgatggggacccggcgctttggcgatctggttgtacgggggcaaggtgcctggtgataacccacaagagcatatgtctgacgggtatctgtggtccgatttgggaccgacgaatcgcatggggctcggaatggacgagatgaacgtcgatatcaagaagatggaggctagtcgaaggggaggatgtccgttttaa

SEQ ID NO: 16454 - protein, 429 aa, Muscodor strobelii
  misc_feature: SGI Peptide ID NO. 565472
  misc_feature (26)..(429): NCBI GI: 261358567 Blast Desc: conserved [Verticillium albo-atrum VaMs.102]
  misc_feature (40)..(429): NCBI GI: 154304077 Blast Desc: BC1G_09674 [Botryotinia fuckeliana B05.10] gi|150854309|gb|EDN29501.1| BC1G_09674 [Botryotinia fuckeliana B05.10]
  misc_feature (27)..(429): NCBI GI: 121701813 Blast Desc: conserved [Aspergillus clavatus NRRL 1] gi|119397314|gb|EAW07745.1| conserved [Aspergillus clavatus NRRL 1]
  misc_feature (33)..(429): NCBI GI: 240109808 Blast Desc: CPC735_033130 [Coccidioides posadasii C735 delta SOWgp]
  misc_feature (19)..(429): NCBI GI: 119184205 Blast Desc: CIMG_06926 [Coccidioides immitis RS]
  misc_feature (26)..(429): NCBI GI: 256733290 Blast Desc: NECHADRAFT_92958 [Nectria haematococca mpVI 77-13-4]
  misc_feature (20)..(429): NCBI GI: 238839098 Blast Desc: conserved [Microsporum canis CBS 113480]
  misc_feature (26)..(429): NCBI GI: 255955307 Blast Desc: Pc21g13890 [Penicillium chrysogenum Wisconsin 54-1255] gi|211590117|emb|CAP96286.1| Pc21g13890 [Penicillium chrysogenum Wisconsin 54-1255]
  misc_feature (13)..(429): NCBI GI: 119495804 Blast Desc: NFIA_014740 [Neosartorya fischeri NRRL 181] gi|119412841|gb|EAW22782.1| conserved [Neosartorya fischeri NRRL 181]
  misc_feature (33)..(429): NCBI GI: 255937467 Blast Desc: Pc13g13460 [Penicillium chrysogenum Wisconsin 54-1255] gi|211584380|emb|CAP92415.1| Pc13g13460 [Penicillium chrysogenum Wisconsin 54-1255]
MNNFSSSSFGELLTSITTSVTEVNSSGSWKQYVIPAALGYIALCRALRYRGEKNLRNRLGYPEGCGREKLAQMTNDEAQAIIKYLMGYEFPEFHLLSLQFGLFKTYGVESISRLLLATRNLTDPVKSLKRYEDTATLIAEFMVNPPSSSRTMHAIARMNFLHSKYREEGAISNEDLLYTLSVFVTEPPRFARLYEWRAMNEMEICAYGVFWKVVGDSMGIQYKGLLPRDTWKDGIEWAEDITIWAKAYEAEKMKPSVVANKPAKALIPMITYWVPWFGKSFAEQAVCVLMGDRVREAFMLPEPSVAAGAVVYPAIWLRSLFLRYLALPRLLEVRRLGDMDPKTGRFTLRESFGNYPFYRKPTLWNRWGPGALAIWLYGGKVPGDNPQEHMSDGYLWSDLGPTNRMGLGMDEMNVDIKKMEASRRGGCPF

SEQ ID NO: 16455 - DNA, 1962 bp, Muscodor strobelii
  misc_feature: SGI EST ID NO. CUFF.38882.0
  misc_feature: Variant of the nucleotide sequence at SEQ ID NO 16453
tctaattgcacaaacctattcgactcccttgaattctttagatgaaacatgcatctttgtcataatcgaaatactcatatgaggtctcaacgcagagaataatttgcattacccttgcattagtgttattagtgaggcccagtcatcaatctccagtctggtctccgaaacttaagacccttcaatcgcgcccccaacgtcaccagacggcgtgcagcgctccacaatttgccatcaagatgaacaacttcagctcttcctcattcggcgagcttctaacctccatcacgacatccgtcacagaggtcaattcttcaggttcgtggaagcaatatgtcatccccgcagctttgggctacatcgcgctatgtcgtgcgctcagatatcgcggagagaaaaacctgaggaatcggttaggatacccggaagggtgtggaagagagaagctggcacaaatgacgaacgacgaggcacaggctattattaagtatctcatgggttatgaatttcccgagtttcatctgctttcgctgcagtttggattatttaagacatacggcgttgagtcaatcagcagacttctgctggcgacgcggaatttgacagatcctgtcaagagcttgaagagatatgaagacacggccaccctaatcgcagagttcatggtgaacccaccaagctcatcacgaaccatgcacgccatagcgcgtatgaacttcctacacagcaaataccgtgaagaaggcgcaatctccaacgaagatcttctctacactctttcagtctttgtgaccgaacctccccgtttcgcacgcctctatgaatggcgcgctatgaacgagatggaaatctgcgcgtacggtgttttctggaaggttgtcggtgattccatgggcatccagtataagggtttgctaccccgagacacgtggaaagatggaattgagtgggcggaggatatcaccatatgggctaaagcttatgaggccgagaagatgaagccgagtgttgttgcgaataagcctgccaaagcactgattccgatgattacgtactgggtaccatggttcgggaagtcatttgctgagcaggcggtctgtgtgttgatgggcgaccgcgtgagagaggcgttcatgctgcctgagccgagtgttgccgctggagctgtcgtttatccggccatatggctacgcagtttgtttcttcggtatctggctctcccgcggttattggaggtccgccgactcggggatatggatcccaagactgggcgcttcactttaagagagtctttcggcaattacccgttctaccgaaagccgacgctgtggaatcgatggggacccggcgctttggcgatctggttgtacgggggcaaggtgcctggtgataacccacaagagcatatgtctgacgggtatctgtggtccgatttgggaccgacgaatcgcatggggctcggaatggacgagatgaacgtcgatatcaagaagatggaggctagtcgaaggggaggatgtccgttttaattggaaacacgtttcggggactcagtgccgggcatggtaatgcttggcttttcctaatatggaccacaatgcgctctaataacgtcctttagtctcctgctcttgttaggcgtcgctccagcttctacgcacgatatactgagatgggtaccaatatgactctccagatgcttcccatgcccaataggggatggtttctatccttcctacccatctactatccaacctcgctcgctcaattgtatgtactatctttcgactctgaaaattcatgtatgtccatgctggcgcagacactatggtctgccatatagtacgccatatgacgggccacatagcaatatgccaagtagttgttgttatgagccctattatagtaccatatgtggtctctattggcaaccatatggctacgtatagcagccgatcccgg

SEQ ID NO: 16456 - DNA, 1641 bp, Muscodor strobelii
  misc_feature: SGI cDNA ID NO. 565473
  misc_feature: Encodes the peptide sequence at SEQ ID NO 16457
atgtcctctccagctgtcaggaaccgcaaagacggcgctgcaacagccgagaacgatgcaaccacgagcaacgacacgaggcgtccctccgcagatgatgtctcgaagccggcacccaagctgaagcaaccaccgccagaggaccagtcacatatcactcggcggtccttgatcgtcgcatcgttctggctgctcgtcttgtgcctcgggctgccagtatggtggaacacaaccagcatctaccgggccaacttgcctgtcagccagatgatggaatgggctgatgggaaggcttgtagtccagtattccccatgcggatcgctctggcagctccaactttgagcgaccaggaggcccacgacctgatgtcacttacccaaaatgccctggatagtatgacagaatttcctggaaagagattgagactcgaactgcccaagatacccacagatccacaagagaagatagacgatagaaacattgcattgactgtgcagctgacaccgggcgagagcgctgccgctacactccatccgcacttacccatcctcgaagtcacatacatcacggatcttggagccacgtctcccgagctggctggctatatagccaatcaactgcgatggactttcgatgaagagcaggccatcatgtcctatttcctggaaagctcctccacaacatcagacgcccagaaacatgcatcataccggggagccgacccatccctctcaagacgattgacccggtctatgaaatacgcaggcacttatcacctgaccttctcactattcacgagtgggcccgcaccgagcagttgggacatcgatgccgcgattgaacagtatatgagacctgtcctggacatgctcaatccgatccacaacttcaccatcgacacccaagttcagctgtatgcgacaccgggtgtacagtcacaaatcctcagcaaagaggacctatcttcatttgtcaacgccgccgaatggcctttgtccccatcgataggcggcgcacctaccatcaactttgtcgttttcatgggcaaccaaacaattggacttgactcgggtgcagaactgtcacagtcatggcttgtgccccaatggggctccgtatatctgctccagcccccagcggcgagccacgtgcccgcagatttcctgaaacaaccagtcttgacctttgcctctcatctgctctcactccttggcacgccgaaatcaggaacattggctactcgaatttcaaccctgacgcgcgtgcggtcagtcgacatgctattgcgcgcatcgtcatcactaggatcactggcccggctatcattggccttgcccagcatttctatcccttcaagtgtcgcagatggcgtcgcgaaatccatgcatcacctggaactcgcctgctcgaatcttgggagcacagaaagcctggaacacgcgcgaatcgcagaaacggaggctgaacgagcattttttgagaagaatatggtcagccagctgtacttccccgatgagcacaagatcgccgtgtatctgccgttgctaggccctgtaggagtgccactagttatgagcttactggctgagatcaaggcttggaaggcgaggcaggcgttgctgaaggctaaaagttcgtaa

SEQ ID NO: 16457 - protein, 546 aa, Muscodor strobelii
  misc_feature: SGI Peptide ID NO. 565473
  misc_feature (42)..(538): NCBI GI: 85093080 Blast Desc: NCU06033 [Neurospora crassa OR74A] gi|28921068|gb|EAA30387.1| conserved [Neurospora crassa OR74A]
  misc_feature (18)..(531): NCBI GI: 171680763 Blast Desc: protein product [Podospora anserina] gi|27764276|emb|CAD60556.1| protein product [Podospora anserina] gi|170940009|emb|CAP65235.1| protein product [Podospora anserina]
  misc_feature (29)..(534): NCBI GI: 261358576 Blast Desc: conserved [Verticillium albo-atrum VaMs.102]
  misc_feature (50)..(538): NCBI GI: 116200700 Blast Desc: CHGG_10895 [Chaetomium globosum CBS 148.51] gi|88175609|gb|EAQ83077.1| CHGG_10895 [Chaetomium globosum CBS 148.51]
  misc_feature (5)..(538): NCBI GI: 39946504 Blast Desc: MGG_08259 [Magnaporthe grisea 70-15] gi|145020102|gb|EDK04330.1| MGG_08259 [Magnaporthe grisea 70-15]
  misc_feature (29)..(538): NCBI GI: 256724667 Blast Desc: [Nectria haematococca mpVI 77-13-4]
  misc_feature (24)..(538): NCBI GI: 46126325 Blast Desc: FG07540.1 [Gibberella zeae PH-1]
  misc_feature (15)..(537): NCBI GI: 154321924 Blast Desc: BC1G_01109 [Botryotinia fuckeliana B05.10] gi|150850356|gb|EDN25549.1| BC1G_01109 [Botryotinia fuckeliana B05.10]
  misc_feature (44)..(538): NCBI GI: 67537960 Blast Desc: AN5150.2 [Aspergillus nidulans FGSC A4] gi|40743141|gb|EAA62331.1| AN5150.2 [Aspergillus nidulans FGSC A4]
  misc_feature (44)..(538): NCBI GI: 259484600 Blast Desc: TPA: GPI transamidase component PIG-S, (AFU_orthologue; AFUA_6G07180) [Aspergillus nidulans FGSC A4]
MSSPAVRNRKDGAATAENDATTSNDTRRPSADDVSKPAPKLKQPPPEDQSHITRRSLIVASFWLLVLCLGLPVWWNTTSIYRANLPVSQMMEWADGKACSPVFPMRIALAAPTLSDQEAHDLMSLTQNALDSMTEFPGKRLRLELPKIPTDPQEKIDDRNIALTVQLTPGESAAATLHPHLPILEVTYITDLGATSPELAGYIANQLRWTFDEEQAIMSYFLESSSTTSDAQKHASYRGADPSLSRRLTRSMKYAGTYHLTFSLFTSGPAPSSWDIDAAIEQYMRPVLDMLNPIHNFTIDTQVQLYATPGVQSQILSKEDLSSFVNAAEWPLSPSIGGAPTINFVVFMGNQTIGLDSGAELSQSWLVPQWGSVYLLQPPAASHVPADFLKQPVLTFASHLLSLLGTPKSGTLATRISTLTRVRSVDMLLRASSSLGSLARLSLALPSISIPSSVADGVAKSMHHLELACSNLGSTESLEHARIAETEAERAFFEKNMVSQLYFPDEHKIAVYLPLLGPVGVPLVMSLLAEIKAWKARQALLKAKSS

SEQ ID NO: 16458 - DNA, 2833 bp, Muscodor strobelii
  misc_feature: SGI EST ID NO. CUFF.38923.0
  misc_feature: Variant of the nucleotide sequence at SEQ ID NO 16456
cgacagctctgcgtcgttgggacggcgctgttaatcgccgatggggatacataaagcttcaggggctgagctagggtctctggtagctacgaattcgttgcctcttttaatgcggaatcgacaaaagttcatcttactcgtggctcggtcccagttgcatctctttcattacttgcactacctattgtacgagcaagccgcaagacttaggaaacccccattatactgtctttgaatgccacaatcaaatgtcgtaaatatcagagttcaagcacctcaagttgacttcatgttgtgattctcgccttaaggccagcgttttcaccgatcgacagatctaacatctcatttggcgtctgtacggtcctaaaaagtacccgacagcccgcatgaattgctgcttttgtccacgcaggtctcttgttcgcagcgttacccatgccttgctaatgcgtttcgacttttgtttctgcatcgtgcctgccgaattgaattacttagaggaatcgcccactttcattcaacgtttggcctgccatttcggttgatcttgccgatgctcggcaacgtcggaagcacaggttgtaatgccacgagcgtccttagtcaacggcggcggcgccacataatgcaatccgtcaaattgtagctcatcaattcttctaacgtcgggtcgtggaatgattgcagcagatgtacagagaaagttcagtggctgagggtggagagtgaaggtactgtaccattagcaatgagcaatgcggctatgcgacatgtgcgtaaaacggtgcaatcgaagttaagagtgcagtgcatttagtaggtagacccctgtgaagtctggttgcatgtggcatcatcggcctcaagcaccaatacctcgagaatacgattttgagacacgagcgcacaggaaattgggctgcatgttgcgtggtgaccgacatcgacgacgctaggacagcaacgaggcttgctaagatacctcggaaacgtagacaatgaggtagatcgacttcacacatgcacaggcgccatgtcctctccagctgtcaggaaccgcaaagacggcgctgcaacagccgagaacgatgcaaccacgagcaacgacacgaggcgtccctccgcagatgatgtctcgaagccggcacccaagctgaagcaaccaccgccagaggaccagtcacatatcactcggcggtccttgatcgtcgcatcgttctggctgctcgtcttgtgcctcgggctgccagtatggtggaacacaaccagcatctaccgggccaacttgcctgtcagccagatgatggaatgggctgatgggaaggcttgtagtccagtattccccatgcggatcgctctggcagctccaactttgagcgaccaggaggcccacgacctgatgtcacttacccaaaatgccctggatagtatgacagaatttcctggaaagagattgagactcgaactgcccaagatacccacagatccacaagagaagatagacgatagaaacattgcattgactgtgcagctgacaccgggcgagagcgctgccgctacactccatccgcacttacccatcctcgaagtcacatacatcacggatcttggagccacgtctcccgagctggctggctatatagccaatcaactgcgatggactttcgatgaagagcaggccatcatgtcctatttcctggaaagctcctccacaacatcagacgcccagaaacatgcatcataccggggagccgacccatccctctcaagacgattgacccggtctatgaaatacgcaggcacttatcacctgaccttctcactattcacgagtgggcccgcaccgagcagttgggacatcgatgccgcgattgaacagtatatgagacctgtcctggacatgctcaatccgatccacaacttcaccatcgacacccaagttcagctgtatgcgacaccgggtgtacagtcacaaatcctcagcaaagaggacctatcttcatttgtcaacgccgccgaatggcctttgtccccatcgataggcggcgcacctaccatcaactttgtcgttttcatgggcaaccaaacaattggacttgactcgggtgcagaactgtcacagtcatggcttgtgccccaatggggctccgtatatctgctccagcccccagcggcgagccacgtgcccgcagatttcctgaaacaaccagtcttgacctttgcctctcatctgctctcactccttggcacgccgaaatcaggaacattggctactcgaatttcaaccctgacgcgcgtgcggtcagtcgacatgctattgcgcgcatcgtcatcactaggatcactggcccggctatcattggccttgcccagcatttctatcccttcaagtgtcgcagatggcgtcgcgaaatccatgcatcacctggaactcgcctgctcgaatcttgggagcacagaaagcctggaacacgcgcgaatcgcagaaacggaggctgaacgagcattttttgagaagaatatggtcagccagctgtacttccccgatgagcacaagatcgccgtgtatctgccgttgctaggccctgtaggagtgccactagttatgagcttactggctgagatcaaggcttggaaggcgaggcaggcgttgctgaaggctaaaagttcgtaattctacacattgaccgatgtagatagatattcagacctggcacaaataaaactaataccataagacgtgaacataaatgccagaggctttaagtttcttatactgcccttggatgttgtaaatggcctaaatactctcatcgaaattctggaaaat

SEQ ID NO: 16459 - DNA, 1647 bp, Muscodor strobelii
  misc_feature: SGI cDNA ID NO. 565474
  misc_feature: Encodes the peptide sequence at SEQ ID NO 16460
atgtcgtcggatctcagcgcagctccggttctttcgacacccgccgaacacacgttcctcgaggagcccgtgacgatcgacacgcgccgcgagaagagacccgacgatgaactattccaagtctacgagatagcccggacagcagccgagatatgcgacaagggatggaagcgagtcgcgttgcaattcccagatgccatgctggccgatgcaccccgggtcgttgaagccttggctcgcgaagtacaaagacgacaagaagggaaggacgaagacagttcacgaccacggccacggccacggccaaggttctacatattagcggacacctcatacagcgcatgttgcgtcgacgagatcgctgccgagcacgccgatgcagactcagtcgtacactatggacggacttgtctaagccccacggcgaggttgccagtcctgcacatcttcacgagacagaagctagactacgacgccgtcgcagccgagttcacgactcagttcgccgataaggaagcaaagatcatactcatggccgacgtcatgttccaagagcatgttcctcccatatgcgccctgctgaagagtaaaggatacagcaacatcgtcgccacagagatagtacacgacccctccgcccccatacccaaccgccgcacgcccgacgtcgacatcgacatcgacatctctctcgacaccttgaaagaatacagcctcttccacgtctcctctccacccaccgccctcctcctcactttatcctcgcgtctcgcctccttctgcatatacccaacgccctcatcgccctacaccgcaaccgccgacgtccccgatcccagcgccacaccctccatcctccgtcgccgctacgcactcgtcatcaaactcgcaaccgcgtccatcatcggcatcctagtcaacaccctctccgtcaagaactacatgtccaccatcagcaccctacggcagcagatcgccgccgcagggaagaagagctacacgatagtggtcgggaagctgaatgccgccaaactcgccaacttcgccgagatcgacggctgggtggttgtcggctgctgggagagcggacttgttgatcaggatagtctctggaagcctgtcgttacgccctttgagatgagtcttgcgctacagagtgaagagaacaggatctggacgggagagtggtggggtggtattgagggtgtcaagatcgagaccggagaaaagaggaatgatgaagacacggcagaggagcaaggagaagtggccgagcatgtagagggcggtgtgtcagacgaggagtctgagccacctgtctttgatctgaggacaggtaaactcgtgagtcattcacggccgatccgtcttccgatacggagtgcgccttctgctacaactggtgccccgacaaatggggcagtggagagagatgcctcggcgctcgtcaagagggcgccgggcgacattgcgctggtcaatggtgtcgcgagccctggtgccgagttcttgagatctcaacgcacgtggcagggcttgggcaccgatttcaaccccggcgaggatgatgccagcactgtcattgaggagggtaggagtggtgttgcgaggggttatgttgttggcgaggagcaagtcaggacttga

SEQ ID NO: 16460 - protein, 548 aa, Muscodor strobelii
  misc_feature: SGI Peptide ID NO. 565474
  misc_feature (63)..(391): Pfam Id: PF01866 Pfam Desc: diphthamide synthesis protein
  misc_feature (286)..(388): Pfam Id: PF01866 Pfam Desc: diphthamide synthesis protein
  misc_feature (105)..(203): Pfam Id: PF01866 Pfam Desc: diphthamide synthesis protein
  misc_feature (1)..(543): NCBI GI: 256724827 Blast Desc: NECHADRAFT_48180 [Nectria haematococca mpVI 77-13-4]
  misc_feature (1)..(543): NCBI GI: 46126213 Blast Desc: FG07484.1 [Gibberella zeae PH-1] gi|84028907|sp|Q4I5M4.1|DPH2_GIBZE RecName: Full=Diphthamide biosynthesis protein 2
  misc_feature (1)..(544): NCBI GI: 85095130 Blast Desc: diphthamide biosynthesis protein 2 [Neurospora crassa OR74A] gi|74615831|sp|Q7S5C0.1|DPH2_NEUCR RecName: Full=Diphthamide biosynthesis protein 2 diphthamide biosynthesis
  misc_feature (5)..(544): NCBI GI: 169606774 Blast Desc: SNOG_06436 [Phaeosphaeria nodorum SN15] gi|111065147|gb|EAT86267.1| SNOG_06436 [Phaeosphaeria nodorum SN15]
  misc_feature (5)..(544): NCBI GI: 189190958 Blast Desc: diphthamide biosynthesis protein 2 [Pyrenophora tritici-repentis Pt-1C-BFP] gi|187973424|gb|EDU40923.1| diphthamide biosynthesis protein 2 [Pyrenophora tritici-repentis
  misc_feature (3)..(547): NCBI GI: 171679078 Blast Desc: protein product [Podospora anserina] gi|170937610|emb|CAP62269.1| protein product [Podospora anserina]
  misc_feature (1)..(543): NCBI GI: 121710018 Blast Desc: diphthamide biosynthesis protein Dph2, [Aspergillus clavatus NRRL 1] gi|119400775|gb|EAW11199.1| diphthamide biosynthesis protein Dph2, [Aspergillus clavatus NRRL 1]
  misc_feature (5)..(543): NCBI GI: 212540542 Blast Desc: diphthamide biosynthesis protein Dph2, [Penicillium marneffei ATCC 18224] gi|210067725|gb|EEA21817.1| diphthamide biosynthesis protein Dph2, [Penicillium marneffei ATCC 18224]
  misc_feature (1)..(543): NCBI GI: 159124159 Blast Desc: diphthamide biosynthesis protein Dph2, [Aspergillus fumigatus A1163]
  misc_feature (1)..(543): NCBI GI: 70991509 Blast Desc: diphthamide biosynthesis protein Dph2 [Aspergillus fumigatus Af293] gi|74670996|sp|Q4WN99.1|DPH2_ASPFU RecName: Full=Diphthamide biosynthesis protein 2 diphthamide biosynthesis
MSSDLSAAPVLSTPAEHTFLEEPVTIDTRREKRPDDELFQVYEIARTAAEICDKGWKRVALQFPDAMLADAPRVVEALAREVQRRQEGKDEDSSRPRPRPRPRFYILADTSYSACCVDEIAAEHADADSVVHYGRTCLSPTARLPVLHIFTRQKLDYDAVAAEFTTQFADKEAKIILMADVMFQEHVPPICALLKSKGYSNIVATEIVHDPSAPIPNRRTPDVDIDIDISLDTLKEYSLFHVSSPPTALLLTLSSRLASFCIYPTPSSPYTATADVPDPSATPSILRRRYALVIKLATASIIGILVNTLSVKNYMSTISTLRQQIAAAGKKSYTIVVGKLNAAKLANFAEIDGWVVVGCWESGLVDQDSLWKPVVTPFEMSLALQSEENRIWTGEWWGGIEGVKIETGEKRNDEDTAEEQGEVAEHVEGGVSDEESEPPVFDLRTGKLVSHSRPIRLPIRSAPSATTGAPTNGAVERDASALVKRAPGDIALVNGVASPGAEFLRSQRTWQGLGTDFNPGEDDASTVIEEGRSGVARGYVVGEEQVRT

SEQ ID NO: 16461 - DNA, 372 bp, Muscodor strobelii
  misc_feature: SGI cDNA ID NO. 565475
  misc_feature: Encodes the peptide sequence at SEQ ID NO 16462
atggaagatgtatgtgagcttgcgaagttgtatgaagatcagaaccactaccgcaacaccaaactcaccaatcccaaaatgcagtccatcactctcaccactctcgccaccctcggcctcatctccctgtccagcgccttctcggtgaccaactgcaacagcggagactcgaccaactaccacgagtcaggcaacaacaaatgccaggagttcaacactggatccagcgtctcatttgactccaaccaaggctgcacactctacgtctacccggggtcgggctgcgagggagcagcgaagacgttcacggtcaacgatgtctgccaggatgttggattcatcggcttgagtgtcaaggccgctgactgctga

SEQ ID NO: 16462 - protein, 123 aa, Muscodor strobelii
  misc_feature: SGI Peptide ID NO. 565475
MEDVCELAKLYEDQNHYRNTKLTNPKMQSITLTTLATLGLISLSSAFSVTNCNSGDSTNYHESGNNKCQEFNTGSSVSFDSNQGCTLYVYPGSGCEGAAKTFTVNDVCQDVGFIGLSVKAADC

SEQ ID NO: 16463 - DNA, 1026 bp, Muscodor strobelii
  misc_feature: SGI cDNA ID NO. 565476
  misc_feature: Encodes the peptide sequence at SEQ ID NO 16464
atggtcacgacgtcacggcgaagcaatgaaatttccaccatcgccacgaccatgcgcgcaagaacattcatcgctctggtcgcattcgccgccaccccagcaacctcgttccaagccgactctgctgtgagctgtgcctggatatccttgcagctgaagctgttaccgtctgagcagaacacctcctcaggcgccgtgctcgcgctcagccgatactcagatccaacccagccatccttgtacaatagctcagtgtcatgggcagacttcgagccttacgggacaacgccgtatgcgaacttcacttatacgagtagtggcacatactggctcaatgtctcgaccctagcagtagtgaatgagacttggctaccaccagacggcgaatacaatgatccagcgacgctattcgtgacgctatatactgaagaagggggtgtggataggcctgtgtatgtcgagggaacgaatgcaacgaattcacagatactcttggaggataacctttactgcgacgtgtatctcgacgacgatggaaattacaatggctattatcctggcaaaccctacgatgacggtgatgacgacgacaacgatagcaacaacgacaatagcgaaggaaagagcataggcatagtgataggcagcattatagcagccgtaattgtggtggctctcattatctggagtatagtgcgttgcgaccgccgacacagcaataggatagggaagatgctaggacggcatacagacaaccacatctcatctgtaccggcggcttctcgcttgggcggtggaggcacacccttcgcgtcgcatttcatgccctctagatttcggacaagcagagcaaatgatgttgagcttgagcctgctggagcgcagcctaagcagaccaccacaccgtcaagtaatgttgatgctgcgtcatcggaggcaacgcgttcgacgagcatgagtttcggagatgagagggataacgagcctccgccgtcttatacggaggctaatctacatcacagatga

SEQ ID NO: 16464 - protein, 341 aa, Muscodor strobelii
  misc_feature: SGI Peptide ID NO. 565476
MVTTSRRSNEISTIATTMRARTFIALVAFAATPATSFQADSAVSCAWISLQLKLLPSEQNTSSGAVLALSRYSDPTQPSLYNSSVSWADFEPYGTTPYANFTYTSSGTYWLNVSTLAVVNETWLPPDGEYNDPATLFVTLYTEEGGVDRPVYVEGTNATNSQILLEDNLYCDVYLDDDGNYNGYYPGKPYDDGDDDDNDSNNDNSEGKSIGIVIGSIIAAVIVVALIIWSIVRCDRRHSNRIGKMLGRHTDNHISSVPAASRLGGGGTPFASHFMPSRFRTSRANDVELEPAGAQPKQTTTPSSNVDAASSEATRSTSMSFGDERDNEPPPSYTEANLHHR

SEQ ID NO: 16465 - DNA, 786 bp, Muscodor strobelii
  misc_feature: SGI cDNA ID NO. 565477
  misc_feature: Encodes the peptide sequence at SEQ ID NO 16466
atgtctccgtcgaccaccacaagtatccgtgcactgccaacagtattgtttgtctgtggcgcatggcatgagccgtggtatttcgatctggtgcgccagtcgctcgcagctcgtggcttcgaatcagaggcgccagcgctgccgaccgtggggactcaggataccaatctcgggctgcaagacgacgcgcaggctatccggatcgcgctagtgaagctaatcaatgagggcaaagaagtccttctcgtgcctcattcatatggcggcattgtagcctcgaatgcagtggaggggctggatctcagaacgcggactgccaagggactaaagggcggtgttgctatgattgtatttctttgtgctttcaccatccctgccggagcgacggtcaagtcaagtctcgggggcaatcttttgccttggtgggatgtatccaaggagggtttcctcgatgtgcaggacgatctgaagtgcgaattgttcttccatgacgtcgaatcttcattggcagaaaaagcagtggctgggatcaaaccacagccatatcgcatcgtcgaagatgagtcaaccttcgagccgtggctgaagggctttgaggttggatatatcttcacagagatcgacaaggctctcgccttagaggtgcagagaatgatgttttctggattccccgaaggctcctggtccactactcttgttacagcacattcgccgtttttgaacgtcccagatgaactcgccgataagatcaaggaagctgcggagtttgcagctaataagagttga

SEQ ID NO: 16466 - protein, 261 aa, Muscodor strobelii
  misc_feature: SGI Peptide ID NO. 565477
  misc_feature (13)..(261): NCBI GI: 256720361 Blast Desc: NECHADRAFT_56035 [Nectria haematococca mpVI 77-13-4]
  misc_feature (1)..(243): NCBI GI: 39962316 Blast Desc: MGG_09610 [Magnaporthe grisea 70-15] gi|149209091|ref|XP_001521920.1| MGCH7_ch7g38 [Magnaporthe grisea 70-15] gi|86195993|gb|EAQ70631.1| MGCH7_ch7g38 [Magnaporthe
  misc_feature (13)..(261): NCBI GI: 46137141 Blast Desc: FG10086.1 [Gibberella zeae PH-1]
  misc_feature (13)..(260): NCBI GI: 46115632 Blast Desc: FG03658.1 [Gibberella zeae PH-1]
  misc_feature (14)..(258): NCBI GI: 145251583 Blast Desc: An15g07840 [Aspergillus niger] gi|134082840|emb|CAK42671.1| protein product [Aspergillus niger]
  misc_feature (13)..(254): NCBI GI: 145235585 Blast Desc: An03g05620 [Aspergillus niger] gi|134058128|emb|CAK38322.1| protein product [Aspergillus niger]
  misc_feature (13)..(252): NCBI GI: 255955955 Blast Desc: Pc21g17320 [Penicillium chrysogenum Wisconsin 54-1255] gi|211590441|emb|CAP96629.1| Pc21g17320 [Penicillium chrysogenum Wisconsin 54-1255]
  misc_feature (1)..(252): NCBI GI: 119182859 Blast Desc: CIMG_06428 [Coccidioides immitis RS]
  misc_feature (13)..(252): NCBI GI: 67524969 Blast Desc: AN2942.2 [Aspergillus nidulans FGSC A4] gi|40744337|gb|EAA63513.1| AN2942.2 [Aspergillus nidulans FGSC A4] gi|259486119|tpe|CBF83706.1| TPA: conserved [Aspergillus FGSC
  misc_feature (13)..(261): NCBI GI: 255939366 Blast Desc: Pc16g00290 [Penicillium chrysogenum Wisconsin 54-1255] gi|211585075|emb|CAP92699.1| Pc16g00290 [Penicillium chrysogenum Wisconsin 54-1255]
MSPSTTTSIRALPTVLFVCGAWHEPWYFDLVRQSLAARGFESEAPALPTVGTQDTNLGLQDDAQAIRIALVKLINEGKEVLLVPHSYGGIVASNAVEGLDLRTRTAKGLKGGVAMIVFLCAFTIPAGATVKSSLGGNLLPWWDVSKEGFLDVQDDLKCELFFHDVESSLAEKAVAGIKPQPYRIVEDESTFEPWLKGFEVGYIFTEIDKALALEVQRMMFSGFPEGSWSTTLVTAHSPFLNVPDELADKIKEAAEFAANKS

SEQ ID NO: 16467 - DNA, 1134 bp, Muscodor strobelii
  misc_feature: SGI EST ID NO. CUFF.38915.0
  misc_feature: Variant of the nucleotide sequence at SEQ ID NO 16465
ctctcaatcgatcccgaaattctttgcttattacacgtttcctgtcatacgcttagaggcacacgcatgccatgtctccgtcgaccaccacaagtatccgtgcactgccaacagtattgtttgtctgtggcgcatggcatgagccgtggtatttcgatctggtgcgccagtcgctcgcagctcgtggcttcgaatcagaggcgccagcgctgccgaccgtggggactcaggataccaatctcgggctgcaagacgacgcgcaggctatccggatcgcgctagtgaagctaatcaatgagggcaaagaagtccttctcgtgcctcattcatatggcggcattgtagcctcgaatgcagtggaggggctggatctcagaacgcggactgccaagggactaaagggcggtgttgctatgattgtatttctttgtgctttcaccatccctgccggagcgacggtcaagtcaagtctcgggggcaatcttttgccttggtgggatgtatccaaggagggtttcctcgatgtgcaggacgatctgaagtgcgaattgttcttccatgacgtcgaatcttcattggcagaaaaagcagtggctgggatcaaaccacagccatatcgcatcgtcgaagatgagtcaaccttcgagccgtggctgaagggctttgaggttggatatatcttcacagagatcgacaaggctctcgccttagaggtgcagagaatgatgttttctggattccccgaaggctcctggtccactactcttgttacagcacattcgccgtttttgaacgtcccagatgaactcgccgataagatcaaggaagctgcggagtttgcagctaataagagttgagcgataggatcgggttctgcagagacagcagcagggttcaatttgctgatccaagctcttagtgtatacgtgtttacctgttatagatggctcaggaagttggcaattaggacggggtagaaatgggcttgcgtgcctctagagatcgatataatgactacgaatgttccattaagtcattagcaacgatgtgacgagtgaaggaagtccttacttatgcatagtgccctattatatgctcatcctaagactggccgtcgcacagcgtagagcttgc

SEQ ID NO: 16468 - DNA, 426 bp, Muscodor strobelii
  misc_feature: SGI cDNA ID NO. 565478
  misc_feature: Encodes the peptide sequence at SEQ ID NO 16469
atgaaagcctgggctatcggcctcttcatctctgagatgacatatcccccagcgttggctagtgtcaagtactcgagtttgtgtttctattggcgcgtcttctccaccagacgctcaatccgtccaccaatctggatcctttctggagtcgtgacaatctggttagttgcagtactcctagttacggtcttgcagtgctttccagctcgagctttttgggagcgcttcgatcccgttcatccccttccatcgagtgaatatacttgccctatcaatgcagccaacttcttcctagcaaacgcagtgccaaacatcattaccgacgcagcgattgttatattgcctataccatatgttttcacgctcaagctccggacggcgcaacgagttggactggttggcatatttctactcggtatcttgtag

SEQ ID NO: 16469 - protein, 141 aa, Muscodor strobelii
  misc_feature: SGI Peptide ID NO. 565478
  misc_feature (2)..(141): NCBI GI: 145605202 Blast Desc: MGG_02160 [Magnaporthe grisea 70-15] gi|145013050|gb|EDJ97691.1| MGG_02160 [Magnaporthe grisea 70-15]
  misc_feature (6)..(139): NCBI GI: 121712242 Blast Desc: conserved [Aspergillus clavatus NRRL 1] gi|119401888|gb|EAW12310.1| conserved [Aspergillus clavatus NRRL 1]
  misc_feature (6)..(141): NCBI GI: 119489954 Blast Desc: NFIA_061980 [Neosartorya fischeri NRRL 181] gi|119411094|gb|EAW21037.1| conserved [Neosartorya fischeri NRRL 181]
  misc_feature (6)..(139): NCBI GI: 159127132 Blast Desc: integral membrane protein, [Aspergillus fumigatus A1163]
  misc_feature (6)..(139): NCBI GI: 146323527 Blast Desc: integral membrane protein [Aspergillus fumigatus Af293] gi|129558246|gb|EAL92076.2| integral membrane protein, [Aspergillus fumigatus Af293]
  misc_feature (6)..(139): NCBI GI: 238839092 Blast Desc: conserved [Microsporum canis CBS 113480]
  misc_feature (6)..(139): NCBI GI: 145236936 Blast Desc: An07g00220 [Aspergillus niger] gi|134075580|emb|CAK39246.1| protein product [Aspergillus niger]
  misc_feature (6)..(139): NCBI GI: 154301240 Blast Desc: [Botryotinia fuckeliana B05.10] gi|150856191|gb|EDN31383.1| [Botryotinia fuckeliana B05.10]
  misc_feature (7)..(141): NCBI GI: 169626164 Blast Desc: SNOG_16361 [Phaeosphaeria nodorum SN15] gi|160705778|gb|EAT76347.2| SNOG_16361 [Phaeosphaeria nodorum SN15]
  misc_feature (7)..(139): NCBI GI: 256719955 Blast Desc: NECHADRAFT_89467 [Nectria haematococca mpVI 77-13-4]
MKAWAIGLFISEMTYPPALASVKYSSLCFYWRVFSTRRSIRPPIWILSGVVTIWLVAVLLVTVLQCFPARAFWERFDPVHPLPSSEYTCPINAANFFLANAVPNIITDAAIVILPIPYVFTLKLRTAQRVGLVGIFLLGIL

SEQ ID NO: 16470 - DNA, 1659 bp, Muscodor strobelii
  misc_feature: SGI cDNA ID NO. 565479
  misc_feature: Encodes the peptide sequence at SEQ ID NO 16471
atgtactcaattgccgtggtgggctggggatcgaccatggatgcgttggggtccggtggcgaccatgtcactgcaacccaagggggatatcctgtctatctcggcctgtggactaattggtcatatggatacgttctgggagcgactttaactgtcactcggcagaacggtactctgctaattgcatttacgagcacgttcatcgctttcgttgctaatagagtttggaagatttgctgcttcttcttgcacagatgttattcgagtccaactcctcagaacgccacttatcatcagctacaagcaatactacgaaatgcctcggcagccgatgatgccttgggactcttgatcaaattgatctcctctaagcatcgagaaagaacgaaccgcttacgaatagttctagtcgttgctgttgccataattcttatctcggtcttcacgatatttggaggatacacttcgcgcctggccataggtgacaatgaggtcctcattaagagcgctaggtgtggttatctgtttgacggagttgcagtaaacgacgatgagcatttcgccgctatctctgatttggcggaaagaatcaagaacgcagcaaactatgctcaacaatgttactcttattcaagttcgccaggtcagcttgattgcgatagattcgtggtcaaacgacttaccagcagcatcgacaccaacgcctcgtgcccctttgacgagagcgtctgccttggatccgcgcgcaatctacgaattgacagtggctacgttaacagtcatgatcagcttggcatgaatgctcttcctgcgatgagaatcttgtggagaagagtccttcactgcgcaccgttggcgacgagtaattttacgagccaagatgctcggtctcccacaaacgacacgctttttcactacgggaatttttccgtcgacaatagtttagcagattatgtctttcgctccagagacctggaagcccaatataaggccgtcttgtctaaatatacaccgtctacagacattaactaccagctgaatgctttcgtatctattgttgacgacggaaagatagctgaagatctatcggacttcgtgccaatcggatctctcgcgaggaatgatgcagatatatccttggtgatgctatccggtaatggtgttgtcttcagcaaatacgccgacgatccatggcatgctgtttcacgcaacactcaaaaagttcctatcaacggcgtcggttcgccagagaatgaatacacaattcacatacctcaaataccgtcatcgccgttggcgtgtgccgagcagcatcagttttgcaacaccaaaaaatctcgggattgcggcccattagctagttttcgagacgcagtatttggtgccgcctatgtcttcaatacgacatacaccgtcgagacagaggaagcggctcagttcacctattttatcaatcgctttttagtcagcgattataatgttgcccatgtggtaaagaaactgggtccagcagcgctgctttcgcaacgaactctggacagtggcatccaaggaacactcgctccagatcaatggcaactggacgtggtcaactgtaagtggtctgaggaaccagatatcataaaccagttctttgtcttaaagtcccgggctacgtag

SEQ ID NO: 16471 - protein, 552 aa, Muscodor strobelii
  misc_feature: SGI Peptide ID NO. 565479
  misc_feature (30)..(528): NCBI GI: 169615058 Blast Desc: SNOG_10683 [Phaeosphaeria nodorum SN15] gi|111060957|gb|EAT82077.1| SNOG_10683 [Phaeosphaeria nodorum SN15]
  misc_feature (32)..(529): NCBI GI: 189194015 Blast Desc: conserved [Pyrenophora tritici-repentis Pt-1C-BFP] gi|187978910|gb|EDU45536.1| conserved [Pyrenophora tritici-repentis Pt-1C-BFP]
  misc_feature (32)..(531): NCBI GI: 121699395 Blast Desc: ACLA_082720 [Aspergillus clavatus NRRL 1] gi|119396149|gb|EAW06581.1| ACLA_082720 [Aspergillus clavatus NRRL 1]
  misc_feature (32)..(529): NCBI GI: 119474227 Blast Desc: NFIA_004500 [Neosartorya fischeri NRRL 181] gi|119407142|gb|EAW17092.1| conserved [Neosartorya fischeri NRRL 181]
  misc_feature (32)..(538): NCBI GI: 169772941 Blast Desc: [Aspergillus oryzae RIB40] gi|83768800|dbj|BAE58937.1| protein product [Aspergillus oryzae]
  misc_feature (32)..(529): NCBI GI: 70986226 Blast Desc: conserved [Aspergillus fumigatus Af293] gi|66846236|gb|EAL86569.1| conserved [Aspergillus fumigatus Af293]
  misc_feature (32)..(529): NCBI GI: 115399382 Blast Desc: [Aspergillus terreus NIH2624] gi|114192163|gb|EAU33863.1| [Aspergillus terreus NIH2624]
  misc_feature (32)..(529): NCBI GI: 159128250 Blast Desc: conserved [Aspergillus fumigatus A1163]
  misc_feature (32)..(485): NCBI GI: 169618215 Blast Desc: SNOG_12297 [Phaeosphaeria nodorum SN15] gi|160703576|gb|EAT80110.2| SNOG_12297 [Phaeosphaeria nodorum SN15]
  misc_feature (32)..(450): NCBI GI: 115433432 Blast Desc: [Aspergillus terreus NIH2624] gi|114189705|gb|EAU31405.1| [Aspergillus terreus NIH2624]
MYSIAVVGWGSTMDALGSGGDHVTATQGGYPVYLGLWTNWSYGYVLGATLTVTRQNGTLLIAFTSTFIAFVANRVWKICCFFLHRCYSSPTPQNATYHQLQAILRNASAADDALGLLIKLISSKHRERTNRLRIVLVVAVAIILISVFTIFGGYTSRLAIGDNEVLIKSARCGYLFDGVAVNDDEHFAAISDLAERIKNAANYAQQCYSYSSSPGQLDCDRFVVKRLTSSIDTNASCPFDESVCLGSARNLRIDSGYVNSHDQLGMNALPAMRILWRRVLHCAPLATSNFTSQDARSPTNDTLFHYGNFSVDNSLADYVFRSRDLEAQYKAVLSKYTPSTDINYQLNAFVSIVDDGKIAEDLSDFVPIGSLARNDADISLVMLSGNGVVFSKYADDPWHAVSRNTQKVPINGVGSPENEYTIHIPQIPSSPLACAEQHQFCNTKKSRDCGPLASFRDAVFGAAYVFNTTYTVETEEAAQFTYFINRFLVSDYNVAHVVKKLGPAALLSQRTLDSGIQGTLAPDQWQLDVVNCKWSEEPDIINQFFVLKSRAT

SEQ ID NO: 16472 - DNA, 918 bp, Muscodor strobelii
  misc_feature: SGI cDNA ID NO. 565480
  misc_feature: Elevated expression when VOC is produced
  misc_feature: Encodes the peptide sequence at SEQ ID NO 16473
atggtcgacgattcagcatttaccgaagcaccaccaggcataatgttaaaagccgagaatgtccacgccttcaagttcagggaggccaaagagtctcaagggaggccttcagcgcctgtcagtgatctctttcgacttgatgggcgtacagtcgtgatcacgggcgcaaatggctttctgggcaccacgatagccgcggccgtgctagaaagcggtgccgacgtcgtctgtttagacgtcatggagaagccgacctcaacagactggcagaacgtggaggcagctgcaaaacgcttctcgaaccaacagctgtcttactatcagtgcgacgttcgcgacgaacaggggataaggaatctcttctcagggttcgcaacgacactacgacatcccattcgaggtcttgtcgcatgtgctggtgtgtcagagaacggaccgtcgacccattttcctgccgaaacattcagacggatgctagacatcaatgttacggggacgttcttgattgcgcaggctgttgcgagagacgtcacgaggactggcgcatcggcttcgatgatttttgtcgctagcatgagcggatatgtttcaaataagggcgtcgacacagcaggttacaactcttcgaaagcagcagtccatcaacttgctcgatcattggcagcggagtggggatcgagggtcggtatgcctctgatccgcgtcaacacgctgtcaccgggctacatacgcactgcggctacggccgaggcactcacgaaacctggcatggagagtcaatggacgggcgacaacatgttgttccggcttagtaccgttgatgaattccgggctcccgtgttgttcatgcttggcgacggaagtagcttcatgactgcggcagatctacgtgtggatggcggacactgcggttggtga

SEQ ID NO: 16473 - protein, 305 aa, Muscodor strobelii
  misc_feature: SGI Peptide ID NO. 565480
  misc_feature (49)..(225): Pfam Id: PF00106 Pfam Desc: short chain dehydrogenase
  misc_feature (51)..(285): Pfam Id: PF01370 Pfam Desc: NAD dependent epimerase/dehydratase family
  misc_feature (50)..(230): Pfam Id: PF08659 Pfam Desc: KR domain
  misc_feature (51)..(81): Pfam Id: PF01370 Pfam Desc: NAD dependent epimerase/dehydratase family
  misc_feature (106)..(159): Pfam Id: PF08659 Pfam Desc: KR domain
  misc_feature (53)..(78): Pfam Id: PF07993 Pfam Desc: Male sterility protein
  misc_feature (20)..(305): NCBI GI: 119473407 Blast Desc: short-chain dehydrogenase [Neosartorya fischeri NRRL 181] gi|119406753|gb|EAW16704.1| short-chain dehydrogenase [Neosartorya fischeri NRRL 181]
  misc_feature (20)..(305): NCBI GI: 145257570 Blast Desc: An04g04170 [Aspergillus niger] gi|134058698|emb|CAK38682.1| protein product [Aspergillus niger]
  misc_feature (20)..(305): NCBI GI: 169762946 Blast Desc: [Aspergillus oryzae RIB40] gi|83770401|dbj|BAE60534.1| protein product [Aspergillus oryzae]
  misc_feature (53)..(305): NCBI GI: 238488767 Blast Desc: short-chain dehydrogenase, [Aspergillus flavus NRRL3357] gi|220698009|gb|EED54349.1| short-chain dehydrogenase, [Aspergillus flavus NRRL3357]
  misc_feature (53)..(305): NCBI GI: 189209083 Blast Desc: short chain dehydrogenase [Pyrenophora tritici-repentis Pt-1C-BFP] gi|187976967|gb|EDU43593.1| short chain dehydrogenase [Pyrenophora tritici-repentis Pt-1C-BFP]
  misc_feature (42)..(305): NCBI GI: 169598856 Blast Desc: SNOG_02236 [Phaeosphaeria nodorum SN15] gi|111069328|gb|EAT90448.1| SNOG_02236 [Phaeosphaeria nodorum SN15]
  misc_feature (39)..(303): NCBI GI: 154322487 Blast Desc: BC1G_00586 [Botryotinia fuckeliana B05.10] gi|150847920|gb|EDN23113.1| BC1G_00586 [Botryotinia fuckeliana B05.10]
  misc_feature (31)..(303): NCBI GI: 255935837 Blast Desc: Pc13g05100 [Penicillium chrysogenum Wisconsin 54-1255] gi|211583565|emb|CAP91579.1| Pc13g05100 [Penicillium chrysogenum Wisconsin 54-1255]
  misc_feature (31)..(303): NCBI GI: 115492497 Blast Desc: conserved [Aspergillus terreus NIH2624] gi|114197736|gb|EAU39436.1| conserved [Aspergillus terreus NIH2624]
  misc_feature (31)..(303): NCBI GI: 18087499 Blast Desc: AF458074_1 oxidoreductase [Emericella nidulans]
  misc_feature (44)..(305): SWISSPROT Homolog: EC 1.1.1.250 D-arabinitol 2-dehydrogenase
  misc_feature: Useful for introducing or modulating the production of volatile compounds
MVDDSAFTEAPPGIMLKAENVHAFKFREAKESQGRPSAPVSDLFRLDGRTVVITGANGFLGTTIAAAVLESGADVVCLDVMEKPTSTDWQNVEAAAKRFSNQQLSYYQCDVRDEQGIRNLFSGFATTLRHPIRGLVACAGVSENGPSTHFPAETFRRMLDINVTGTFLIAQAVARDVTRTGASASMIFVASMSGYVSNKGVDTAGYNSSKAAVHQLARSLAAEWGSRVGMPLIRVNTLSPGYIRTAATAEALTKPGMESQWTGDNMLFRLSTVDEFRAPVLFMLGDGSSFMTAADLRVDGGHCGW

SEQ ID NO: 16474 - DNA, 2312 bp, Muscodor strobelii
  misc_feature: SGI EST ID NO. CUFF.38947.0
  misc_feature: Variant of the nucleotide sequence at SEQ ID NO 16472
tagaaatgcttgggtcttcttttgctcttttcctgttcatggcgagggaggtagggagataaatttcctttttattttctttgtgtccttttttcgttggtgacatgtggacatgtcggggagtgtggttgaagctgtccttgaaactaggtttgggtaaagggatatgcaaggcatctcatgacattcatctcagctgaacaacagaacacacacaatggattgctggagaactattttcaactaagtgtatacaagtacgagtttattatatctatagaagatcattattccaacgacgatatcgagaagagttgacgcgtctatggcttctacccgctattgactcatgtactggagttctggcaagtcctgccggtacctagaaaaggacatgtactactctccgtaacaatctctcatgtccactaagccaaactccttcaccgtcactacctaacagcccacaccaatttggaccactatggaacccatgctgtttgttgtgcatattcctcaaaacatgattaagtgtcgcggcgctttctccgccttctcgtttgtactgatgtttggcggcagcatatcaggaggatcgcaaacgatgcggcagtccgcacggcaacccggccgccagcggggccctgagcgacttgtactagcgcggttcctctcgtcgtccacagcgtcgatctcccgccgccctctggctaaatccctgcggcatagggtctcgaagctacctagcgaccataccagttcacaacctcacccaccagtgtagcatatgatacgtggccgtgcttcggaatgtaagtccatgcgtaacgtgacacagtctcgagaagatgagctatatgcggtatacagcgcgcactggtcaggtctcgcactgcgcgtgacctaaggtaggtgtctatgctagccgcccgtggagaatgcaggctatcttcagcagccgtcactactctggacgagcgatcgctcgccgccaagttggagttctacaccatcgcgtttcaaactccaatcgaaccgaaatcgattttcgctgctcgttgcagaactttactagtctaattaatcaatcgagagataggcatttgtaaactgaactcctcattgctgtcatagccgtcgtcgaatccttcaaacatggtcgacgattcagcatttaccgaagcaccaccaggcataatgttaaaagccgagaatgtccacgccttcaagttcagggaggccaaagagtctcaagggaggccttcagcgcctgtcagtgatctctttcgacttgatgggcgtacagtcgtgatcacgggcgcaaatggctttctgggcaccacgatagccgcggccgtgctagaaagcggtgccgacgtcgtctgtttagacgtcatggagaagccgacctcaacagactggcagaacgtggaggcagctgcaaaacgcttctcgaaccaacagctgtcttactatcagtgcgacgttcgcgacgaacaggggataaggaatctcttctcagggttcgcaacgacactacgacatcccattcgaggtcttgtcgcatgtgctggtgtgtcagagaacggaccgtcgacccattttcctgccgaaacattcagacggatgctagacatcaatgttacggggacgttcttgattgcgcaggctgttgcgagagacgtcacgaggactggcgcatcggcttcgatgatttttgtcgctagcatgagcggatatgtttcaaataagggcgtcgacacagcaggttacaactcttcgaaagcagcagtccatcaacttgctcgatcattggcagcggagtggggatcgagggtcggtatgcctctgatccgcgtcaacacgctgtcaccgggctacatacgcactgcggctacggccgaggcactcacgaaacctggcatggagagtcaatggacgggcgacaacatgttgttccggcttagtaccgttgatgaattccgggctcccgtgttgttcatgcttggcgacggaagtagcttcatgactgcggcagatctacgtgtggatggcggacactgcggttggtgaatgggtcgtgtctattcggcggtggaattcaatgctatggatctctcatattatttagctaacaatccgcatttcgtttccgtctgatgatactgcagtcctataaatgcgcctccggagagcttgttgcaccttgtattgtagtaagaagcatagaccagttctaagtgcatcacaagagcacgcagtatcaatatcaactatgtctacattaatagagcacaagcctctgatcgaga

SEQ ID NO: 16475 - DNA, 987 bp, Muscodor strobelii
  misc_feature: SGI cDNA ID NO. 565481
  misc_feature: Encodes the peptide sequence at SEQ ID NO 16476
atggtcgacgattcagcatttaccgaagcaccaccaggcataatgttaaaagccgagaatgtccacgccttcaagttcagggaggccaaagagtctcaagggaggccttcagcgcctgtcagtgatctctttcgacttgatgggcgtacagtcgtgagtaagtggattgaatttcccgttgtcgccgtatcaaatccatttaaccagactgatcaattcgcaccagtcacgggcgcaaatggctttctgggcaccacgatagccgcggccgtgctagaaagcggtgccgacgtcgtctgtttagacgtcatggagaagccgacctcaacagactggcagaacgtggaggcagctgcaaaacgcttctcgaaccaacagctgtcttactatcagtgcgacgttcgcgacgaacaggggataaggaatctcttctcagggttcgcaacgacactacgacatcccattcgaggtcttgtcgcatgtgctggtgtgtcagagaacggaccgtcgacccattttcctgccgaaacattcagacggatgctagacatcaatgttacggggacgttcttgattgcgcaggctgttgcgagagacgtcacgaggactggcgcatcggcttcgatgatttttgtcgctagcatgagcggatatgtttcaaataagggcgtcgacacagcaggttacaactcttcgaaagcagcagtccatcaacttgctcgatcattggcagcggagtggggatcgagggtcggtatgcctctgatccgcgtcaacacgctgtcaccgggctacatacgcactgcggctacggccgaggcactcacgaaacctggcatggagagtcaatggacgggcgacaacatgttgttccggcttagtaccgttgatgaattccgggctcccgtgttgttcatgcttggcgacggaagtagcttcatgactgcggcagatctacgtgtggatggcggacactgcggttggtga

SEQ ID NO: 16476 - protein, 328 aa, Muscodor strobelii
  misc_feature: SGI Peptide ID NO. 565481
  misc_feature (72)..(248): Pfam Id: PF00106 Pfam Desc: short chain dehydrogenase
  misc_feature (74)..(308): Pfam Id: PF01370 Pfam Desc: NAD dependent epimerase/dehydratase family
  misc_feature (76)..(253): Pfam Id: PF08659 Pfam Desc: KR domain
  misc_feature (129)..(248): Pfam Id: PF00106 Pfam Desc: short chain dehydrogenase
  misc_feature (74)..(104): Pfam Id: PF01370 Pfam Desc: NAD dependent epimerase/dehydratase family
  misc_feature (129)..(182): Pfam Id: PF08659 Pfam Desc: KR domain
  misc_feature (76)..(101): Pfam Id: PF07993 Pfam Desc: Male sterility protein
  misc_feature (20)..(328): NCBI GI: 145257570 Blast Desc: An04g04170 [Aspergillus niger] gi|134058698|emb|CAK38682.1| protein product [Aspergillus niger]
  misc_feature (20)..(328): NCBI GI: 119473407 Blast Desc: short-chain dehydrogenase [Neosartorya fischeri NRRL 181] gi|119406753|gb|EAW16704.1| short-chain dehydrogenase [Neosartorya fischeri NRRL 181]
  misc_feature (20)..(328): NCBI GI: 169762946 Blast Desc: [Aspergillus oryzae RIB40] gi|83770401|dbj|BAE60534.1| protein product [Aspergillus oryzae]
  misc_feature (65)..(328): NCBI GI: 238488767 Blast Desc: short-chain dehydrogenase, [Aspergillus flavus NRRL3357] gi|220698009|gb|EED54349.1| short-chain dehydrogenase, [Aspergillus flavus NRRL3357]
  misc_feature (76)..(328): NCBI GI: 189209083 Blast Desc: short chain dehydrogenase [Pyrenophora tritici-repentis Pt-1C-BFP] gi|187976967|gb|EDU43593.1| short chain dehydrogenase [Pyrenophora tritici-repentis Pt-1C-BFP]
  misc_feature (76)..(328): NCBI GI: 169598856 Blast Desc: SNOG_02236 [Phaeosphaeria nodorum SN15] gi|111069328|gb|EAT90448.1| SNOG_02236 [Phaeosphaeria nodorum SN15]
  misc_feature (64)..(326): NCBI GI: 154322487 Blast Desc: BC1G_00586 [Botryotinia fuckeliana B05.10] gi|150847920|gb|EDN23113.1| BC1G_00586 [Botryotinia fuckeliana B05.10]
  misc_feature (31)..(326): NCBI GI: 255935837 Blast Desc: Pc13g05100 [Penicillium chrysogenum Wisconsin 54-1255] gi|211583565|emb|CAP91579.1| Pc13g05100 [Penicillium chrysogenum Wisconsin 54-1255]
  misc_feature (59)..(328): NCBI GI: 58267846 Blast Desc: [Cryptococcus neoformans var. neoformans JEC21] gi|134111499|ref|XP_775584.1| CNBE0040 [Cryptococcus neoformans var. neoformans B-3501A] gi|50258245|gb|EAL20937.1| CNBE0040 var.
  misc_feature (67)..(326): NCBI GI: 39977789 Blast Desc: MGG_06779 [Magnaporthe grisea 70-15] gi|145013697|gb|EDJ98338.1| MGG_06779 [Magnaporthe grisea 70-15]
  misc_feature (44)..(328): SWISSPROT Homolog: EC 1.1.1.250 D-arabinitol 2-dehydrogenase
MVDDSAFTEAPPGIMLKAENVHAFKFREAKESQGRPSAPVSDLFRLDGRTVVSKWIEFPVVAVSNPFNQTDQFAPVTGANGFLGTTIAAAVLESGADVVCLDVMEKPTSTDWQNVEAAAKRFSNQQLSYYQCDVRDEQGIRNLFSGFATTLRHPIRGLVACAGVSENGPSTHFPAETFRRMLDINVTGTFLIAQAVARDVTRTGASASMIFVASMSGYVSNKGVDTAGYNSSKAAVHQLARSLAAEWGSRVGMPLIRVNTLSPGYIRTAATAEALTKPGMESQWTGDNMLFRLSTVDEFRAPVLFMLGDGSSFMTAADLRVDGGHCGW

SEQ ID NO: 16477 - DNA, 2312 bp, Muscodor strobelii; identical to SEQ ID NO: 16474
  misc_feature: SGI EST ID NO. CUFF.38947.0
  misc_feature: Variant of the nucleotide sequence at SEQ ID NO 16475

SEQ ID NO: 16478 - DNA, 1158 bp, Muscodor strobelii
  misc_feature: SGI cDNA ID NO. 565482
  misc_feature: Elevated expression when VOC is produced
  misc_feature: Encodes the peptide sequence at SEQ ID NO 16479
atgaatggtcctcccggcctaggagacgccgctccttcagcacttgccgccctggctattacatttgcgtttgtcctgcttcgtctatacactcgaatcatagtcattaagcagcttgggatcgacgaccactgctataacgcggcatttctcctattcatcgtctacaatattctacttcagatatctgcacatttcggatttgggcgagacattgggacgatttcttccctagattatgtagcgaaagctattttgtatgaggcgattggacaaacgttattggtcatcggcacagctgtcgccaaattgtcactcggtctgttcttgccgaggctcgtaactcaacgagcacatacgattgcagtcctagttcccattgccatcttcagtcttctagttgtgatctcactttttgtcttctggttctcctgccagcccacagagtatctctgggaccgccgcatagacggcaagtgttcaatcgatcccggccccgtatcagtgtttgctggagcaatgagtgttgccgttgatttgtggtatgccggctttccatggtatttgttgtggaaattgcaaatgccacaaagagagaaaattgtcatcgcctccagtatgagtttagggattgttgagtccaatcatgacgcgcttgatgacgttgctcgcgctgacggatcttcccgagaagaggacacagttgatctgattgtatggcatgcagcagaaattgctgttacaatgattggtattggcatcccagtgtgtttaccgctgtacaagggcgctttggatcgtctcttcgctagtaacaggtttgggtcaggagaagcgcacaatgtgagacatcaagatatacaacaaggcggtcttgctctgcacactatcggcggcactccattcgccttcaacgaaggctccgccagtcgaggtggaaggtctgttgggaagaaaaatcatccgggctataatcagtacccttccaagaccgatcttcgcactgagagcggagagtctatactaggacaagactttcgaaaagatgagaggatctcgtattccagagagattgaagggagaaaggcgtcagcaaaacaacctcaggggtccatgacaatatgcgaaaaggtcgagatctggtcacaagctaagtag

SEQ ID NO: 16479 - protein, 385 aa, Muscodor strobelii
  misc_feature: SGI Peptide ID NO. 565482
  misc_feature (7)..(374): NCBI GI: 256727789 Blast Desc: NECHADRAFT_83276 [Nectria haematococca mpVI 77-13-4]
  misc_feature (7)..(349): NCBI GI: 170940229 Blast Desc: protein product [Podospora anserina]
  misc_feature (1)..(333): NCBI GI: 116202915 Blast Desc: CHGG_09342 [Chaetomium globosum CBS 148.51] gi|88177860|gb|EAQ85328.1| CHGG_09342 [Chaetomium globosum CBS 148.51]
  misc_feature (19)..(355): NCBI GI: 171682726 Blast Desc: protein product [Podospora anserina] gi|170941322|emb|CAP66972.1| protein product [Podospora anserina]
  misc_feature (7)..(350): NCBI GI: 256723706 Blast Desc: NECHADRAFT_52132 [Nectria haematococca mpVI 77-13-4]
  misc_feature (8)..(278): NCBI GI: 256719973 Blast Desc: NECHADRAFT_56607 [Nectria haematococca mpVI 77-13-4]
  misc_feature (46)..(336): NCBI GI: 85108508 Blast Desc: NCU06328 [Neurospora crassa OR74A] gi|28924199|gb|EAA33354.1| [Neurospora crassa OR74A]
  misc_feature (8)..(286): NCBI GI: 119470605 Blast Desc: NFIA_055050 [Neosartorya fischeri NRRL 181] gi|119406205|gb|EAW16156.1| conserved [Neosartorya fischeri NRRL 181]
  misc_feature (7)..(385): NCBI GI: 46114278 Blast Desc: FG02981.1 [Gibberella zeae PH-1]
  misc_feature (8)..(267): NCBI GI: 261358122 Blast Desc: conserved [Verticillium albo-atrum VaMs.102]
  misc_feature: Useful for introducing or modulating the production of volatile compounds
MNGPPGLGDAAPSALAALAITFAFVLLRLYTRIIVIKQLGIDDHCYNAAFLLFIVYNILLQISAHFGFGRDIGTISSLDYVAKAILYEAIGQTLLVIGTAVAKLSLGLFLPRLVTQRAHTIAVLVPIAIFSLLVVISLFVFWFSCQPTEYLWDRRIDGKCSIDPGPVSVFAGAMSVAVDLWYAGFPWYLLWKLQMPQREKIVIASSMSLGIVESNHDALDDVARADGSSREEDTVDLIVWHAAEIAVTMIGIGIPVCLPLYKGALDRLFASNRFGSGEAHNVRHQDIQQGGLALHTIGGTPFAFNEGSASRGGRSVGKKNHPGYNQYPSKTDLRTESGESILGQDFRKDERISYSREIEGRKASAKQPQGSMTICEKVEIWSQAK

SEQ ID NO: 16480 - DNA, 1698 bp, Muscodor strobelii
  misc_feature: SGI EST ID NO. CUFF.38942.0
  misc_feature: Variant of the nucleotide sequence at SEQ ID NO 16478
ctcaaaacttcatcagaaaacagactctgcttcgaattgaaaattctatatccaaacttctttattctttgtttgtaacaattagcaagttcagaaatcgtgcgttatttatcgtcgacgctctgaagtactcgttactatgaatggtcctcccggcctaggagacgccgctccttcagcacttgccgccctgtgggccctcttggcattgagtcttatctgtttgcattaaaaaatcctggcgacggcaacgaaattccaaaacatgacaacaccatcctagagcattgcgaatagaaaaacggactgacatgttttgatacactagggctattacatttgcgtttgtcctgcttcgtctatacactcgaatcatagtcattaagcagcttgggatcgacgaccactgctataacgcggcatttctcctattcatcgtctacaatattctacttcagatatctgcacatttcggatttgggcgagacattgggacgatttcttccctagattatgtagcgaaagctattttgtatgaggcgattggacaaacgttattggtcatcggcacagctgtcgccaaattgtcactcggtctgttcttgccgaggctcgtaactcaacgagcacatacgattgcagtcctagttcccattgccatcttcagtcttctagttgtgatctcactttttgtcttctggttctcctgccagcccacagagtatctctgggaccgccgcatagacggcaagtgttcaatcgatcccggccccgtatcagtgtttgctggagcaatgagtgttgccgttgatttgtggtatgccggctttccatggtatttgttgtggaaattgcaaatgccacaaagagagaaaattgtcatcgcctccagtatgagtttagggattgtagctgcagcttgtgggatcaaaagggccctcgaactgaacaaactaggtagtccaaattacttaaaggacacagttgatctgattgtatggcatgcagcagaaattgctgttacaatgattggtattggcatcccagtgtgtttaccgctgtacaagggcgctttggatcgtctcttcgctagtaacaggtttgggtcaggagaagcgcacaatgtgagacatcaagatatacaacaaggcggtcttgctctgcacactatcggcggcactccattcgccttcaacgaaggctccgccagtcgaggtggaaggtctgttgggaagaaaaatcatccgggctataatcagtacccttccaagaccgatcttcgcactgagagcggagagtctatactaggacaagactttcgaaaagatgagaggatctcgtattccagagagattgaagggagaaaggcgtcagcaaaacaacctcaggggtccatgacaatatgcgaaaaggtcgagatctggtcacaagctaagtaggaaaacatgttaagacggtgacttctaaaggccatattattaacaacattctaaaaatgcgtcaaatattgcttctctgttctataggacccaagtggatataggtaggccagtcactatcgaagagacgatgcttgctgatactccaccctgtctccttgctttcgcatcgtaaaacttacgtattcagtatgagtatgatgtggtatacgcaccgcataggcacgacgttcattaatcgtgaatactctgggataag

SEQ ID NO: 16481 - DNA, 1062 bp, Muscodor strobelii
  misc_feature: SGI cDNA ID NO. 565483
  misc_feature: Elevated expression when VOC is produced
  misc_feature: Encodes the peptide sequence at SEQ ID NO 16482
atggagacctcaattacttgggaaaagctgaaccccggcaggaacttgtatctcccggacaatcctttatatctcatatatctttcacctattatagcaactgtcgtttggtatgtagtcgcatacgtacaatcccccttgcgcaagtaccctggaccattccttgcaggatggacgaactactggcgagtgtactatgcatggcgtggggatatgcacaccgtgagcaagaagatgcatgagaagtatggacctgttgttcgaatggggccgaactacttggacgtggactactcatcactgatcaaaacgtgttttgattttaatggtgtttggaagaagagtgagttgtatgctgtcagcggagtactgcacgaagggaagataacgtacaatatcttcagcgagacggacacagcggctttcattcgcatgaagaaacctattgccaagtgtttctcgatgaatggtgtattgtcttttcagacccatattgataatgtgctcgcgcattttgtgcgccaaatcgacgaaagatttggcgctaatcaggatggcgcattcaagactttcgactttgggaagtggatgctatacctgacctgggatatggtaggcaaagctacgtacggcagtagaattgggtaccttgaccacggaagcgattttgatggcacgttggcgagatctgagaaggcgatggactatatcgtgacagttggcgtgcaaccgaagcttgacaagttcttcgataagaacccattttttcgcatcggtccgcctacaatgctcaacctggtcaatctctctgttcaacacgtcatgaagaggttcacaggtgaagataaccatgatcctggcaacccagatttcttggatcgatacatcgaagcgaagattgaacaccctgatattgttgacgatgctcgtctgttatcgtatcttctagtgaatatggctgctggtgccgacacaactgccgtatcgctccgttctatcttctacctctgcttgaaacatcctatatggacttacccgtctccttcgctcagccccccttaa

SEQ ID NO: 16482 - protein, 353 aa, Muscodor strobelii
  misc_feature: SGI Peptide ID NO. 565483
  misc_feature (279)..(341): Pfam Id: PF00067 Pfam Desc: Cytochrome P450
  misc_feature (33)..(343): NCBI GI: 119470607 Blast Desc: benzoate 4-monooxygenase cytochrome P450 [Neosartorya fischeri NRRL 181] gi|119406206|gb|EAW16157.1| benzoate 4-monooxygenase cytochrome P450 [Neosartorya fischeri NRRL 181]
  misc_feature (33)..(343): NCBI GI: 159124402 Blast Desc: PDA-like cytochrome P450 monooxygenase , [Aspergillus fumigatus A1163]
  misc_feature (32)..(342): NCBI GI: 238506191 Blast Desc: benzoate 4-monooxygenase cytochrome P450, [Aspergillus flavus NRRL3357] gi|220689010|gb|EED45361.1| benzoate 4-monooxygenase cytochrome P450, [Aspergillus flavus NRRL3357]
  misc_feature (32)..(339): NCBI GI: 169785215 Blast Desc: [Aspergillus oryzae RIB40] gi|83775816|dbj|BAE65935.1| protein product [Aspergillus oryzae]
  misc_feature (21)..(340): NCBI GI: 164425161 Blast Desc: NCU10966 [Neurospora crassa OR74A] gi|157070814|gb|EDO65114.1| conserved [Neurospora crassa OR74A]
  misc_feature (32)..(341): NCBI GI: 116195528 Blast Desc: CHGG_04362 [Chaetomium globosum CBS 148.51] gi|88180275|gb|EAQ87743.1| CHGG_04362 [Chaetomium globosum CBS 148.51]
  misc_feature (1)..(343): NCBI GI: 256723613 Blast Desc: NECHADRAFT_52095 [Nectria haematococca mpVI 77-13-4]
  misc_feature (26)..(341): NCBI GI: 256727965 Blast Desc: NECHADRAFT_46422 [Nectria haematococca mpVI 77-13-4]
  misc_feature (2)..(343): NCBI GI: 46114280 Blast Desc: FG02982.1 [Gibberella zeae PH-1]
  misc_feature (23)..(339): NCBI GI: 171682724 Blast Desc: protein product [Podospora anserina] gi|170941321|emb|CAP66971.1| protein product [Podospora anserina]
  misc_feature (47)..(341): SWISSPROT Homolog: EC 1.14.13.12 Benzoate 4-monooxygenase
  misc_feature: Useful for introducing or modulating the production of volatile compounds
METSITWEKLNPGRNLYLPDNPLYLIYLSPIIATVVWYVVAYVQSPLRKYPGPFLAGWTNYWRVYYAWRGDMHTVSKKMHEKYGPVVRMGPNYLDVDYSSLIKTCFDFNGVWKKSELYAVSGVLHEGKITYNIFSETDTAAFIRMKKPIAKCFSMNGVLSFQTHIDNVLAHFVRQIDERFGANQDGAFKTFDFGKWMLYLTWDMVGKATYGSRIGYLDHGSDFDGTLARSEKAMDYIVTVGVQPKLDKFFDKNPFFRIGPPTMLNLVNLSVQHVMKRFTGEDNHDPGNPDFLDRYIEAKIEHPDIVDDARLLSYLLVNMAAGADTTAVSLRSIFYLCLKHPIWTYPSPSLSPP

SEQ ID NO: 16483 - DNA, 1484 bp, Muscodor strobelii
  misc_feature: SGI EST ID NO. CUFF.39056.0
  misc_feature: Variant of the nucleotide sequence at SEQ ID NO 16481
gagccgacaaagattactgtttggagtaagtagggttcctcatttactccacactcactgattcgactgcaaaaaggtatcgcgtcggctcatatatcgcagcacatagcatggcatgtgtaatcgttatttcagaagtgcatggagtttccatgttatgaggacgcccgtcgccgctgctcatcataatggagacctcaattacttgggaaaagctgaaccccggcaggaacttgtatctcccggacaatcctttatatctcatatatctttcacctattatagcaactgtcgtttggtatgtagtcgcatacgtacaatcccccttgcgcaagtaccctggaccattccttgcaggatggacgaactactggcgagtgtactatgcatggcgtggggatatgcacaccgtgagcaagaagatgcatgagaagtatggacctgttgttcgaatggggccgaactacttggacgtggactactcatcactgatcaaaacgtgttttgattttaatggtgtttggaagaaggtacaaattaataccaacgtcatggagtctgaggaacttgaattaacatgacggctcttagagtgagttgtatgctgtcagcggagtactgcacgaagggaagataacgtacaatatcttcagcgagacggacacagcggctttcattcgcatgaagaaacctattgccaagtgtttctcgatgaatggtgtattgtcttttcagacccatattgataatgtgctcgcgcattttgtgcgccaaatcgacgaaagatttggcgctaatcaggatggcgcattcaagactttcgactttgggaagtggatgctatacctgacctgggatatggtaggcaaagctacgtacggcagtagaattgggtaccttgaccacggaagcgattttgatggcacgttggcgagatctgagaaggcgatggactatatcgtgacagttggcgtgcaaccgaagcttgacaagttcttcgataagaacccattttttcgcatcggtccgcctacaatgctcaacctggtcaatctctctgttcaacacgtcatgaagaggttcacaggtgaagataaccatgatcctggcaacccagatttcttggatcgatacatcgaagcgaagattgaacaccctgatattgttgacgatgctcgtctgttatcgtatcttctagtgaatatggctgctggtgccgacacaactgccgtatcgctccgttctatcttctacctctgcttgaaacatcctagtgtgtggggacggctgcaggaggagatactatctgcacccttcgctcaaaaagacagtatggacttacccgtctccttcgctcagccccccttaatatatgaatatttccttattttagttaattataatactcgaaaaacatataggcaggaatacgggaattatatatattgttttttgtttaataaatgcatataattataaaataa

SEQ ID NO: 16484 - DNA, 3486 bp, Muscodor strobelii
  misc_feature: SGI cDNA ID NO. 565484
  misc_feature: Encodes the peptide sequence at SEQ ID NO 16485
atggaagtcaaggcagcatggattcatgaaccacgctcgccggcatttcaacatgccatcaacgatgtggactgggccagtactccgctgggtgccagaagcgaatgggatcctatactgagccaaatcttccgttttgtgatggtaaaccccgccccgacagttctttactggggcgagtctcaaacaatcatatataacgaagcatatgtacctatcgttggccgccagaaacatcccgctatactaggaaggagtgcgccagatgcgtttcgagagttctgggatgacttcgacaggatcattcgcgagcagcgtgtaaaccgtcttacagctagcgtcaatgcgtcaatgatcctgatcgagaggcacggatttctcgaagaggcacacttcgactggaaattgattcccgttattggcgaggatgggcaggtgaagggatcatacgggatacctacagatttgacaagcgacattcacagccagcggcagttagacaccacgagaaagctgagcgagctgacatcccgaacgacccggacaccccatctctggtccaatgccatcaccagcctacaagacaacaaagacctcccgcttgttctgatatatgagcttgaaacatgcgacacgacacacgagtttaacgaggagagagagatgcagttgactgggagcataggcttaacacatggccaccgtcttgcccgtgatcgagtctatgtcgaccgagatgaactcggatttgcgccttcgatgcgacaagcttcgaaaactaaatcaattgttgtactagatgccgatgccccgtgtttgtacaatgtcatcgatgatgtgctactaaacggctacgagcatccacctgaacaatttgctattgttcctctaacgaccgacgatacgacaattgggttcttcatcgtagctatcaacccttatagaagatttgaccatttgtgtcagcagtttctagagcttgtggggaacattctctctgctcagtacactcgtgtcaagttggccgaagaagttgatcgtcgtgatgaaatagcaaggcgcacgtcgctaaacctacaacgtagcgaattaaaattcactcgtttcgctgcacgttcgaccgccggattagcgatgatcagcctggaaggcgacatcatctttgcaaacaactcatgggagaaattctttagctccaattgcgccgagaaattcaatttcctttcttccgacttcgttcactccgacgacgtgtcactgctgaaagagtggcatactagggttatcgaagagaaacacggcggcacttttcatcttcgctcgaaatcaccattcgtacaagaccatatgcgctctaggtttagaactgggatctgcgcttgttatgccgacctgaacgcctatgatgaagtcgaaagcgtcatgttcatcatcatggacatcagcgagatgaaatggattgagcaggagcttctggattacaccaggaagctagaagtctccgaagggaactaccggaactatgctgaacattgccctctcggtatttgccgaaccgactacgacggctacgtggtttatggaaacgatgcatggcacgcgcactatggatttgaacgtggaaaagtacctcatgtatcgcaaccgtggatcccgtatatcaaggaagaggatatcaaaccatgccatgacttctttgcaacgcctctcttcatcgcacgctttgcacatgacctgaatgattcgctaacccgtcgtagactccaaaatcatcccggcccagaaaccgtcgagttcaagctgaaagacgaggttttcactattcaagaaggagaccggatatatacgaacgatgctgtggtactcgctaccgggttttccaaaataggcgaggatgggcgtgcagagtatatcgacttctgggtgacgaacatcagcgcacagaagatggctgctaagatcctagccgacaaaatggaggaagccatacgtctcaaaactcaacaagaacgcttcatcgatatgatcagtcatgagatccgaaatcctctttcggccatcctgcattgtggagaagaggtcgtcgatgctatgaaaattggacgtctggcactcgaggcgatagcgccagattcttcttcttcgactgcgcgtgtgtcgctacgacaggcatgccagaaacaactcgacagtgcccttgatgccgcaaatacgatcatgtattgtgttcaacaccagaagcaaattgtcgatgacgtgcttacattgtcgaagctggactctgagttctttgccatgtcgccgacgtcggttgagatcatgtctctattgcgaacatctatcaagatgttcgagctcgaacttaaactcgctgacatagatcttgcaatagtacaggatgaatcgttcgtaaaacatagagtggactgggtattcttagatgccaagaggtttcttcagatagtgatcaacttggtatctaatgcgatcaagttcactaagaaatcgaccgtccgcaagatcgagatcaatgtatctgctcatttcaaccgccctacggcagatcttcttggcggagtcaacttcgtgccccatcagtatcgtcctgccgaatcatcgtctaccttatgttcgcagccagaagacaaaataaagactgcagcagaatccaatattttcttagctttctcagtcacggatactggatctggaatctctgacgatcagaagaatctcctctttaatcggttcgcccaagcgtcacccaaaactcacatcgagtatggcggttctggtcttggtctcttcatctctcgtcaaatcacagaactactcggtggcgagatcggggtcggcggcactctcggtgttggcagcacatttgcattttacatcaagtgtcgaaagtcttcccagccgcttgtatcgagtcccgtagacgaacgggatatcctctcgatcaagagcccgtctataatccaaaacgatgacaagtatcacctttcatcaatgataggtcccgcgccacccaaacccgagtccccattgacgcccgaatctccaccggctcttcgtcggtcgatccttgttgtcgaggataacctcattaaccagaaggtgctgtgcaagcaactcagtaacaggaacttcgcagtacagacagcgaatcacggcaaggatgcacttgaagccatcttcgaaaagcggacatcaggtggcaacaagcatgccaccggtttcgacgtagttctatgcgacatcgagatgcccattatgggtggcattgagttcgctcaggaacttagacggcttgaagtatccggcgaattaggtggtcatatgcccatcataggagtaacggcgaatgtccgtagtgggcaagttgcggaggctatggatgctgggatggatggtgttacgacgaaaccatatcgtatgcatgatctgattgacaatatcaaccggctttgtcctttctgggggtga

SEQ ID NO: 16485 - protein, 1161 aa, Muscodor strobelii
  misc_feature: SGI Peptide ID NO. 565484
  misc_feature (813)..(968): Pfam Id: PF02518 Pfam Desc: Histidine kinase-, DNA gyrase B-, and HSP90-like ATPase
  misc_feature (668)..(762): Pfam Id: PF00512 Pfam Desc: His Kinase A (phosphoacceptor) domain
  misc_feature (1026)..(1154): Pfam Id: PF00072 Pfam Desc: Response regulator receiver domain
  misc_feature (23)..(1150): NCBI GI: 156049857 Blast Desc: SS1G_08636 [Sclerotinia sclerotiorum 1980] gi|154693034|gb|EDN92772.1| SS1G_08636 [Sclerotinia sclerotiorum 1980]
  misc_feature (20)..(1156): NCBI GI: 39656341 Blast Desc: histidine kinase HHK14p [Cochliobolus heterostrophus]
  misc_feature (20)..(1156): NCBI GI: 169611586 Blast Desc: SNOG_08907 [Phaeosphaeria nodorum SN15] gi|111062955|gb|EAT84075.1| SNOG_08907 [Phaeosphaeria nodorum SN15]
  misc_feature (16)..(1154): NCBI GI: 256733509 Blast Desc: [Nectria haematococca mpVI 77-13-4]
  misc_feature (16)..(1153): NCBI GI: 39726355 Blast Desc: histidine kinase M1NBp [Gibberella moniliformis]
  misc_feature (16)..(1153): NCBI GI: 46128854 Blast Desc: FG08781.1 [Gibberella zeae PH-1]
  misc_feature (20)..(1153): NCBI GI: 171684433 Blast Desc: protein product [Podospora anserina] gi|170942177|emb|CAP67829.1| protein product [Podospora anserina]
  misc_feature (487)..(1157): NCBI GI: 169621823 Blast Desc: SNOG_14124 [Phaeosphaeria nodorum SN15] gi|160704630|gb|EAT78361.2| SNOG_14124 [Phaeosphaeria nodorum SN15]
  misc_feature (121)..(1150): NCBI GI: 150036232 Blast Desc: regulatory receiver protein 3 [Alternaria brassicicola]
  misc_feature (487)..(1157): NCBI GI: 189197201 Blast Desc: conserved [Pyrenophora tritici-repentis Pt-1C-BFP] gi|187980886|gb|EDU47512.1| conserved [Pyrenophora tritici-repentis Pt-1C-BFP]
MEVKAAWIHEPRSPAFQHAINDVDWASTPLGARSEWDPILSQIFRFVMVNPAPTVLYWGESQTIIYNEAYVPIVGRQKHPAILGRSAPDAFREFWDDFDRIIREQRVNRLTASVNASMILIERHGFLEEAHFDWKLIPVIGEDGQVKGSYGIPTDLTSDIHSQRQLDTTRKLSELTSRTTRTPHLWSNAITSLQDNKDLPLVLIYELETCDTTHEFNEEREMQLTGSIGLTHGHRLARDRVYVDRDELGFAPSMRQASKTKSIVVLDADAPCLYNVIDDVLLNGYEHPPEQFAIVPLTTDDTTIGFFIVAINPYRRFDHLCQQFLELVGNILSAQYTRVKLAEEVDRRDEIARRTSLNLQRSELKFTRFAARSTAGLAMISLEGDIIFANNSWEKFFSSNCAEKFNFLSSDFVHSDDVSLLKEWHTRVIEEKHGGTFHLRSKSPFVQDHMRSRFRTGICACYADLNAYDEVESVMFIIMDISEMKWIEQELLDYTRKLEVSEGNYRNYAEHCPLGICRTDYDGYVVYGNDAWHAHYGFERGKVPHVSQPWIPYIKEEDIKPCHDFFATPLFIARFAHDLNDSLTRRRLQNHPGPETVEFKLKDEVFTIQEGDRIYTNDAVVLATGFSKIGEDGRAEYIDFWVTNISAQKMAAKILADKMEEAIRLKTQQERFIDMISHEIRNPLSAILHCGEEVVDAMKIGRLALEAIAPDSSSSTARVSLRQACQKQLDSALDAANTIMYCVQHQKQIVDDVLTLSKLDSEFFAMSPTSVEIMSLLRTSIKMFELELKLADIDLAIVQDESFVKHRVDWVFLDAKRFLQIVINLVSNAIKFTKKSTVRKIEINVSAHFNRPTADLLGGVNFVPHQYRPAESSSTLCSQPEDKIKTAAESNIFLAFSVTDTGSGISDDQKNLLFNRFAQASPKTHIEYGGSGLGLFISRQITELLGGEIGVGGTLGVGSTFAFYIKCRKSSQPLVSSPVDERDILSIKSPSIIQNDDKYHLSSMIGPAPPKPESPLTPESPPALRRSILVVEDNLINQKVLCKQLSNRNFAVQTANHGKDALEAIFEKRTSGGNKHATGFDVVLCDIEMPIMGGIEFAQELRRLEVSGELGGHMPIIGVTANVRSGQVAEAMDAGMDGVTTKPYRMHDLIDNINRLCPFWG

SEQ ID NO: 16486 - DNA, 6048 bp, Muscodor strobelii
  misc_feature: SGI EST ID NO. CUFF.38953.0
  misc_feature: Variant of the nucleotide sequence at SEQ ID NO 16484
cacaatcccgccgagaacgagatcatatgctgtcaacggattcgaaacagtgtccaatggtcgcgcaagtgagaggggagcctgattgttccaggcctagattaaaaagaggattgtctaacgacgagatcgaagctcaacgaagtcaactcgtgcgcatggaagtcaaggcagcatggattcatgaaccacgctcgccggcatttcaacatgccatcaacgatgtggactgggccagtactccgctgggtgccagaagcgaatgggatcctatactgagccaaatcttccgttttgtgatggtaaaccccgccccgacagttctttactggggcgagtctcaaacaatcatatataacgaagcatatgtacctatcgttggccgccagaaacatcccgctatactaggaaggagtgcgccagatgcgtttcgagagttctgggatgacttcgacaggatcattcgcgagcagcgtgtaaaccgtcttacagctagcgtcaatgcgtcaatgatcctgatcgagaggcacggatttctcgaagaggcacacttcgactggaaattgattcccgttattggcgaggatgggcaggtgaagggatcatacgggatacctacagatttgacaagcgacattcacagccagcggcagttagacaccacgagaaagctgagcgagctgacatcccgaacgacccggacaccccatctctggtccaatgccatcaccagcctacaagacaacaaagacctcccgcttgttctgatatatgagcttgaaacatgcgacacgacacacgagtttaacgaggagagagagatgcagttgactgggagcataggcttaacacatggccaccgtcttgcccgtgatcgagtctatgtcgaccgagatgaactcggatttgcgccttcgatgcgacaagcttcgaaaactaaatcaattgttgtactagatgccgatgccccgtgtttgtacaatgtcatcgatgatgtgctactaaacggctacgagcatccacctgaacaatttgctattgttcctctaacgaccgacgatacgacaattgggttcttcatcgtagctatcaacccttatagaagatttgaccatttgtgtcagcagtttctagagcttgtggggaacattctctctgctcagtacactcgtgtcaagttggccgaagaagttgatcgtcgtgatgaaatagcaaggcgcacgtcgctaaacctacaacgtagcgaattaaaattcactcgtttcgctgcacgttcgaccgccggattagcgatgatcagcctggaaggcgacatcatctttgcaaacaactcatgggagaaattctttagctccaattgcgccgagaaattcaatttcctttcttccgacttcgttcactccgacgacgtgtcactgctgaaagagtggcatactagggttatcgaagagaaacacggcggcacttttcatcttcgctcgaaatcaccattcgtacaagaccatatgcgctctaggtttagaactgggatctgcgcttgttatgccgacctgaacgcctatgatgaagtcgaaagcgtcatgttcatcatcatggacatcagcgagatgaaatggattgagcaggagcttctggattacaccaggaagctagaagtctccgaagggaactaccggaactatgctgaacattgccctctcggtatttgccgaaccgactacgacggctacgtggtttatggaaacgatgcatggcacgcgcactatggatttgaacgtggaaaagtacctcatgtatcgcaaccgtggatcccgtatatcaaggaagaggatatcaaaccatgccatgacttctttgcaacgctcatacttccaatcacacggtgctgttgcttctcgacaataatagcctctcttcatcgcacgctttgcacatgacctgaatgattcgctaacccgtcgtagactccaaaatcatcccggcccagaaaccgtcgagttcaagctgaaagacgaggttttcactattcaagaaggagaccggatatatacgaacgatgctgtggtactcgctaccgggttttccaaaataggcgaggatgggcgtgcagagtatatcgacttctgggtgacgaacatcagcgcacagaagatggctgctaagatcctagccgacaaaatggaggaagccatacgtctcaaaactcaacaagaacgcttcatcgatatgatcagtcatgagatccgaaatcctctttcggccatcctgcattgtggagaagaggtcgtcgatgctatgaaaattggacgtctggcactcgaggcgatagcgccagattcttcttcttcgactgcgcgtgtgtcgctacgacaggcatgccagaaacaactcgacagtgcccttgatgccgcaaatacgatcatgtattgtgttcaacaccagaagcaaattgtcgatgacgtgcttacattgtcgaagctggactctgagttctttgccatgtcgccgacgtcggttgagatcatgtctctattgcgaacatctatcaagatgttcgagctcgaacttaaactcgctgacatagatcttgcaatagtacaggatgaatcgttcgtaaaacatagagtggactgggtattcttagatgccaagaggtttcttcagatagtgatcaacttggtatctaatgcgatcaagttcactaagaaatcgaccgtccgcaagatcgagatcaatgtatctgctcatttcaaccgccctacggcagatcttcttggcggagtcaacttcgtgccccatcagtatcgtcctgccgaatcatcgtctaccttatgttcgcagccagaagacaaaataaagactgcagcagaatccaatattttcttagctttctcagtcacggatactggatctggaatctctgacgatcagaagaatctcctctttaatcggttcgcccaagcgtcacccaaaactcacatcgagtatggcggttctggtcttggtctcttcatctctcgtcaaatcacagaactactcggtggcgagatcggggtcggcggcactctcggtgttggcagcacatttgcattttacatcaagtgtcgaaagtcttcccagccgcttgtatcgagtcccgtagacgaacgggatatcctctcgatcaagagcccgtctataatccaaaacgatgacaagtatcacctttcatcaatgataggtcccgcgccacccaaacccgagtccccattgacgcccgaatctccaccggctcttcgtcggtcgatccttgttgtcgaggataacctcattaaccagaaggtgctgtgcaagcaactcagtaacaggaacttcgcagtacagacagcgaatcacggcaaggatgcacttgaagccatcttcgaaaagcggacatcaggtggcaacaagcatgccaccggtttcgacgtagttctatgcgacatcgagatgcccattatgggtggcattgagttcgctcaggaacttagacggcttgaagtatccggcgaattaggtggtcatatgcccatcataggagtaacggcgaatgtccgtagtgggcaagttgcggaggctatggatgctgggatggatggtgttacgacgaaaccatatcgtatgcatgatctgattgacaatatcaaccggctttgtcctttctgggggtgagcagatcctcgtgggagggggatctcgctcttccgagtagatctcgaagaaatggctcgatgcagttatggcctacgccaggctccagagagtgaaccaaacaagcattgcaattgctcgcatgacggaaagctgcagtgttcgacgtttattgcttggcatattcaacagtgccggcgtacggcagagtcgcagcgccgccctatccgttcagtgatctggacgcggacctcatccaatgctcgcaacggtctacctattcttgcatcaaggatgcttcaatatcagttctgatggcactgtcgatcgcttccaaaatgattctcggtccgatatggtcactcagctccggttgcttgctgtgcagaagctctaatgggcaatctcgggctagatttggccgaggatcaacgaatcctgcgacgcgtctgcactatttcatgatgtgtccaatcaaaacactagatgcaaacattgaaaacaacgtcggtgttacatttgttgatgcaatcgaccttttcaaaggtactgtctaccctaaggaagctctattgatatgagtgcgtagaagatgtcgctacgatttagtgcaataaccaaatgccataaatattctcaatatgggccgacttgtttggttatatgataggtattaatgcgtgcagctatactatttataccggagagccctgtacctcgcttggctcatgcagctccaagtcaacacctccttcctaatctgcaatctgttttcagggtcctcgatggcttgcccatgcttccccagaagaacaccctagaagagaaacctgcgttgtcaaaaggacatcacgcatccagaacagcacatgacatcggacttttgtgtattcccagcactctcggttactacatgatcagttgtcgctccatctctggagtacgataggccgagatatgatagctccgcaaactgaatgcaactgcatttgtacattatgatacaactagtcgcggttaattggttacatacctacgcagcaacaaatccccgctctcatgagctcggagcttgtatctcggatctcaagttccacaggagcggcatccagaaagaatcccaggatatgtctttcagaaaacaatcatcaattctctagtcttggcagcaccaactatcgacataagcattgttcttgaacgtcataactttacaagcagttctatcagtctacatgcaaatttcactcgagaaacccgatctgataacaggacaaagttgtgcaagcaaaaaggaaacttcgagaagcagtaaatagcattaggaacgcatcacaacgcgggatatagaagaaaatttgaaaaatgaggcaacatctccctgtttggagatatcctctagaatgcgaatccaactacaatacggccaagactgatagatgactgtatcagtattttcatgggagatcgacacattacgtagagcattgccggggctctcgtctaaggccaaccgagggcgtactgggggcttgccgggtttgcgccgggggctgtgtaaaggtttagttcgatacgtcttagcccgattcttacaaatacggtcagacccgtactgtagttggattcgcaacctaggggatagtgctgcgcacgacccctcagtactgagactaatcctcgagtctggtgctgcgtttgccagcaacacacctcacatgtttagccaagtcgagacgcgcagatcatctagcctaggtcatcatttaccgttgggatctacattaccccagatatcggtactcgcagccgttctgacatgcataatgctcctgtgtccgcctatgctgccgaagtacgtccgtattgcatgcgttcctcgcgctaacgtaagcgagaacgactcgtccaccaaaaacctgaagccatcgttgttgccggcatcatgaccttatgtaggctatgcattctcgaggaaggtggtatctgacgatgttggagattttcaatttgaacctcaactgggtctatatcgtcttggcacgattgaaagatgaatgccaagatagttctccgcatcgacggcgtgggaagacatacagcatctggcaatgcgaaccaaatacataatacgagactattgccgcgatgaaggcgcaagacaagtagctgatcgcactgggtcaagaactcaccactaagagcagagtcaaccctcaagaaaatgtggtctcttattgtaaagagagccgctccggctattgtcgcagctctcacgcttttcaatagcgctgcagtcgcatcgcccacagcgaacagtctcgctacccgccaagatggccagatgagtatgtgaacgctgagtacagtggcgaattg

SEQ ID NO: 16487 - DNA, 1527 bp, Muscodor strobelii
  misc_feature: SGI cDNA ID NO. 565485
  misc_feature: Encodes the peptide sequence at SEQ ID NO 16488
atgtggtctcttattgtaaagagagccgctccggctattgtcgcagctctcacgcttttcaatagcgctgcagtcgcatcgcccacagcgaacagtctcgctacccgccaagatggccagatgatggtcttttgccattacatgattggcattctttatgtgcggaccagctcgagcgactacgatgcggacttccaacgtgccaaggccattggcatcgacgctctagctttcaacattggtgttgacccctataccgatcagcagcttggctatgcctacgaatcagcagcaaggaacggcatcaaagctttcatctccttcgacttcaattggtatcacactgatcaggccgtccaagtcggtcagaagatcgcacagtatgcttcccagccggctcagctgaagttcggtgatgcggtagtcgcgtcttcgtttgccggcgatggactagatattgctgctatgaaggcagcggctggcacggacgtctggtttgcaccaaatttccaccctggacagggtgattttggggctattgacggtgctctcaactggctagcatggccaaatgatggaaacaacaaggcgcccaagcccggcgctaatgtcaccgtagaggagggcgaccaagcctatatcaacgctctagccggcaagccctacatcgcaccggtgtctccatggttcttcacccatttcggcagtgaagtcccatattcaaagaactgggtattcccgagtgatacgctctggttcgaccgctggactgagatcctttctctcaagccagagttcctggagattgtgacctggaatgattacggtgagtcgcattatatcggtcgcttggacagtccacatggagacgatggaagctcaaaatgggtgtacggtttccctcatgacgccttcctcgacatggctgtgccatttatctctgctttcaaggctggagcgtctgatgtcgccccatatatcactcaagacaagatcgtctactggttccgccctacgcttaagggtctggactgcgacgccaccgacaccacgctaggagacgccgacaactctacgggcaactatttcaaaggtcgacctaacggctgggagaccatggcagacgacgtgtttgtcgtgactctactgactgatgctgcatctctcacaatcaacgtcgcggggaaaagcacaacggttgacgttcccaagggagcaaagatgagcagagttgctatggcgccaggtcaagtgtcattcagtctcagcagaaatggcgcgacaacgttgcaggggacctctccgatgaaaatcctggatcactgcccttgtggtatctacaacttcaatccctatactggaagcattcctgctggcgaggcagacgagctcctgccagctgggtattcttctatcttcgctggtcttcacgtcagcacatgcggaccatcgggaatgaagaccacccctgtgccggcggcactagctgacagagttgttcacgctcaaccaacaccgacagcttga

SEQ ID NO: 16488 - protein, 508 aa, Muscodor strobelii
  misc_feature: SGI Peptide ID NO. 565485
  misc_feature (42)..(434): Pfam Id: PF03659 Pfam Desc: Glycosyl hydrolase family 71
  misc_feature (219)..(434): Pfam Id: PF03659 Pfam Desc: Glycosyl hydrolase family 71
  misc_feature (42)..(149): Pfam Id: PF03659 Pfam Desc: Glycosyl hydrolase family 71
  misc_feature (13)..(481): NCBI GI: 242786665 Blast Desc: alpha-1,3-glucanase/mutanase, [Talaromyces stipitatus ATCC 10500] gi|218720998|gb|EED20417.1| alpha-1,3-glucanase/mutanase, [Talaromyces stipitatus ATCC 10500]
  misc_feature (4)..(481): NCBI GI: 212543429 Blast Desc: alpha-1,3-glucanase/mutanase, [Penicillium marneffei ATCC 18224] gi|210066776|gb|EEA20869.1| alpha-1,3-glucanase/mutanase, [Penicillium marneffei ATCC 18224]
  misc_feature (13)..(492): NCBI GI: 259486505 Blast Desc: TPA: alpha 1,3 glucanase, GH71 family (Eurofung) [Aspergillus nidulans FGSC A4]
  misc_feature (4)..(478): NCBI GI: 119480007 Blast Desc: alpha-1,3-glucanase/mutanase, [Neosartorya fischeri NRRL 181] gi|119408186|gb|EAW18135.1| alpha-1,3-glucanase/mutanase, [Neosartorya fischeri NRRL 181]
  misc_feature (42)..(478): NCBI GI: 159128941 Blast Desc: alpha-1,3-glucanase/mutanase, [Aspergillus fumigatus A1163]
  misc_feature (42)..(478): NCBI GI: 70989361 Blast Desc: alpha-1,3-glucanase/mutanase [Aspergillus fumigatus Af293] gi|66847161|gb|EAL87492.1| alpha-1,3-glucanase/mutanase, [Aspergillus fumigatus Af293]
  misc_feature (13)..(492): NCBI GI: 67904110 Blast Desc: AN9042.2 [Aspergillus nidulans FGSC A4] gi|40745218|gb|EAA64374.1| AN9042.2 [Aspergillus nidulans FGSC A4]
  misc_feature (25)..(490): NCBI GI: 169767938 Blast Desc: [Aspergillus oryzae RIB40] gi|83766295|dbj|BAE56438.1| protein product [Aspergillus oryzae]
  misc_feature (4)..(476): NCBI GI: 67526665 Blast Desc: AN3790.2 [Aspergillus nidulans FGSC A4] gi|40740808|gb|EAA59998.1| AN3790.2 [Aspergillus nidulans FGSC A4] gi|259481655|tpe|CBF75378.1| TPA: alpha 1,3 glucanase, GH71
  misc_feature (22)..(477): NCBI GI: 121710338 Blast Desc: alpha-1,3-glucanase/mutanase, [Aspergillus clavatus NRRL 1] gi|119400935|gb|EAW11359.1| alpha-1,3-glucanase/mutanase, [Aspergillus clavatus NRRL 1]
  misc_feature (31)..(456): SWISSPROT Homolog: EC 3.2.1.59 Glucan endo-1,3-alpha-glucosidase
MWSLIVKRAAPAIVAALTLFNSAAVASPTANSLATRQDGQMMVFCHYMIGILYVRTSSSDYDADFQRAKAIGIDALAFNIGVDPYTDQQLGYAYESAARNGIKAFISFDFNWYHTDQAVQVGQKIAQYASQPAQLKFGDAVVASSFAGDGLDIAAMKAAAGTDVWFAPNFHPGQGDFGAIDGALNWLAWPNDGNNKAPKPGANVTVEEGDQAYINALAGKPYIAPVSPWFFTHFGSEVPYSKNWVFPSDTLWFDRWTEILSLKPEFLEIVTWNDYGESHYIGRLDSPHGDDGSSKWVYGFPHDAFLDMAVPFISAFKAGASDVAPYITQDKIVYWFRPTLKGLDCDATDTTLGDADNSTGNYFKGRPNGWETMADDVFVVTLLTDAASLTINVAGKSTTVDVPKGAKMSRVAMAPGQVSFSLSRNGATTLQGTSPMKILDHCPCGIYNFNPYTGSIPAGEADELLPAGYSSIFAGLHVSTCGPSGMKTTPVPAALADRVVHAQPTPTA

SEQ ID NO: 16489 - DNA, 1535 bp, Muscodor strobelii
  misc_feature: SGI EST ID NO. CUFF.38956.0
  misc_feature: Variant of the nucleotide sequence at SEQ ID NO 16487
ctacgatgcggacttccaacgtgccaaggccattggcatcgacgctctagctttcaacattggtgttgacccctataccgatcagcagcttggctatgcctacgaatcagcagcaaggaacggcatcaaagctttcatctccttcgacttcaattggtatcacactgatcaggccgtccaagtcggtcagaagatcgcacagtatgcttcccagccggctcagctgaagttcggtgatgcggtagtcgcgtcttcgtttgccggcgatggactagatattgctgctatgaaggcagcggctggcacggacgtctggtttgcaccaaatttccaccctggacagggtgattttggggctattgacggtgctctcaactggctagcatggccaaatgatggaaacaacaaggcgcccaagcccggcgctaatgtcaccgtagaggagggcgaccaagcctatatcaacgctctagccggcaagccctacatcgcaccggtgtctccatggttcttcacccatttcggcagtgaagtcccatattcaaagaactgggtattcccgagtgatacgctctggttcgaccgctggactgagatcctttctctcaagccagagttcctggagattgtgacctggaatgattacggtgagtcgcattatatcggtcgcttggacagtccacatggagacgatggaagctcaaaatgggtgtacggtttccctcatgacgccttcctcgacatggctgtgccatttatctctgctttcaaggctggagcgtctgatgtcgccccatatatcactcaagacaagatcgtctactggttccgccctacgcttaagggtctggactgcgacgccaccgacaccacgctaggagacgccgacaactctacgggcaactatttcaaaggtcgacctaacggctgggagaccatggcagacgacgtgtttgtcgtgactctactgactgatgctgcatctctcacaatcaacgtcgcggggaaaagcacaacggttgacgttcccaagggagcaaagatgagcagagttgctatggcgccaggtcaagtgtcattcagtctcagcagaaatggcgcgacaacgttgcaggggacctctccgatgaaaatcctggatcactgcccttgtggtatctacaacttcaatccctatactggaagcattcctgctggcgaggcagacgagctcctgccagctgggtattcttctatcttcgctggtcttcacgtcagcacatgcggaccatcgggaatgaagaccacccctgtgccggcggcactagctgacagagttgttcacgctcaaccaacaccgacagcttgaactgaccccaatgcgcatgtatgcaacatatgctgacactgcagcaatttgcttcatttccttcgcttttggtcgccgtgaaaagcaggttaaatagccaattgtcttggcccaagtctctgatttgtatcgcggcgtctagttccgtaaaacgatataaatcgaagctagataaaaaacaagctgc

SEQ ID NO: 16490 - DNA, 921 bp, Muscodor strobelii
  misc_feature: SGI cDNA ID NO. 565486
  misc_feature: Elevated expression when VOC is produced
  misc_feature: Encodes the peptide sequence at SEQ ID NO 16491
atgacaaccccacacgaaatcgaaggcgagttggagtttgagacaccggaaaataagctgcctgcgaagacgtggtataagatcattgggaagctcgagacaccgccaatcatcgcgattcatggcggtccgggagctggtcatgagtatctgacgcccatctcagatatgcatgataagcataagatcccagtaatattctacgatcaagtcggatgtggccagtctacgcacttccgagataagaatggcgacgcgtcgttttggaccgtcgacctcttccttaaggagttggagaacttaatcactcaattgaaactgcatgatttgggattccatttactgggccaaagctggggcggcatgctagctgcgacattcgcatcacaacgaccggtcggacttcgcaagttgatacttgccaacgcgcctgcgagtatgcccctatttagcgctggctgtaaggagctcctatctaagtttcccgaggacattcgcaagaccatcgaagaatgtgaaaggaacaaggactacgataacccggagtacgagaaggcctgtgaggcattctacgtgaagcatctgtgtcgcgttgatccattccccgagccattgatggtgtcactcggacatctaaaagaagacccgtctacttataacactatgcaaggtccatccgaattcaccgtaattgggagtctcaaggactgggaaggatggaaagaagcgcacaagatccaagtcccgactctactgctaaacggggcatatgacgaggttacagatgcatgtgtacagccttggtttggagccattccgaaaattcgatggattactctcggaaactcttctcatatgacccattacgaggaaagagaccggtatatggagatatgcgaggggttcatcaacatggcgtag

SEQ ID NO: 16491 - protein, 306 aa, Muscodor strobelii
  misc_feature: SGI Peptide ID NO. 565486
  misc_feature (63)..(301): Pfam Id: PF00561 Pfam Desc: alpha/beta hydrolase fold
  misc_feature (63)..(144): Pfam Id: PF00561 Pfam Desc: alpha/beta hydrolase fold
  misc_feature (9)..(303): NCBI GI: 154314339 Blast Desc: BC1G_05263 [Botryotinia fuckeliana B05.10] gi|150848908|gb|EDN24101.1| BC1G_05263 [Botryotinia fuckeliana B05.10]
  misc_feature (8)..(306): NCBI GI: 145252800 Blast Desc: An16g06070 [Aspergillus niger] gi|134083468|emb|CAK46945.1| protein product [Aspergillus niger]
  misc_feature (23)..(304): NCBI GI: 254406800 Blast Desc: proline imino-peptidase [Streptomyces sviceus ATCC 29083] gi|197716230|gb|EDY60264.1| proline imino-peptidase [Streptomyces sviceus ATCC 29083]
  misc_feature (8)..(303): NCBI GI: 156036178 Blast Desc: SS1G_12775 [Sclerotinia sclerotiorum 1980] gi|154698183|gb|EDN97921.1| SS1G_12775 [Sclerotinia sclerotiorum 1980]
  misc_feature (23)..(303): NCBI GI: 282864984 Blast Desc: proline-specific peptidase [Streptomyces sp. ACTE] gi|282560409|gb|EFB65957.1| proline-specific peptidase [Streptomyces sp. ACTE]
  misc_feature (23)..(304): NCBI GI: 21232248 Blast Desc: proline imino-peptidase [Xanthomonas campestris pv. campestris str. ATCC 33913] gi|66767623|ref|YP_242385.1| proline imino-peptidase [Xanthomonas campestris pv. campestris str. 8004]
  misc_feature (23)..(304): NCBI GI: 222106651 Blast Desc: hydrolases or acyltransferases (alpha/beta hydrolase superfamily) [Agrobacterium vitis S4] gi|221737830|gb|ACM38726.1| hydrolases or acyltransferases (alpha/beta hydrolase superfamily)
  misc_feature (23)..(304): NCBI GI: 188990739 Blast Desc: prolyl aminopeptidase [Xanthomonas campestris pv. campestris str. B100] gi|167732499|emb|CAP50693.1| prolyl aminopeptidase [Xanthomonas campestris pv. campestris]
  misc_feature (8)..(304): NCBI GI: 21243714 Blast Desc: proline imino-peptidase [Xanthomonas axonopodis pv. citri str. 306] gi|21109297|gb|AAM37832.1| proline imino-peptidase [Xanthomonas axonopodis pv. citri str. 306]
  misc_feature (23)..(304): NCBI GI: 83593515 Blast Desc: peptidase S33, tricorn interacting factor 1 [Rhodospirillum rubrum ATCC 11170] gi|83576429|gb|ABC22980.1| Peptidase S33, tricorn interacting factor 1 [Rhodospirillum ATCC
  misc_feature (49)..(306): SWISSPROT Homolog: EC 3.4.11.5 Prolyl aminopeptidase
  misc_feature: Useful for introducing or modulating the production of volatile compounds
MTTPHEIEGELEFETPENKLPAKTWYKIIGKLETPPIIAIHGGPGAGHEYLTPISDMHDKHKIPVIFYDQVGCGQSTHFRDKNGDASFWTVDLFLKELENLITQLKLHDLGFHLLGQSWGGMLAATFASQRPVGLRKLILANAPASMPLFSAGCKELLSKFPEDIRKTIEECERNKDYDNPEYEKACEAFYVKHLCRVDPFPEPLMVSLGHLKEDPSTYNTMQGPSEFTVIGSLKDWEGWKEAHKIQVPTLLLNGAYDEVTDACVQPWFGAIPKIRWITLGNSSHMTHYEERDRYMEICEGFINMA

SEQ ID NO: 16492 - DNA, 2183 bp, Muscodor strobelii
  misc_feature: SGI EST ID NO. CUFF.38966.0
  misc_feature: Variant of the nucleotide sequence at SEQ ID NO 16490
tgaagatctgaggtcccgtctctccctccacacaccgtctctaacaaaagagatgacaaccccacacgaaatcgaaggcgagttggagtttgagacaccggaaaataagctgcctgcgaagacgtggtataagatcattgggaagctcgagacaccgccaatcatcgcgattcatggcggtccgggagctggtcatgagtatctgacgcccatctcagatatgcatgataagcataagatcccagtaatattctacgatcaagtcggatgtggccagtctacgcacttccgagataagaatggcgacgcgtcgttttggaccgtcgacctcttccttaaggagttggagaacttaatcactcaattgaaactgcatgatttgggattccatttactgggccaaagctggggcggcatgctagctgcgacattcgcatcacaacgaccggtcggacttcgcaagttgatacttgccaacgcgcctgcgagtatgcccctatttagcgctggctgtaaggagctcctatctaagtttcccgaggacattcgcaagaccatcgaagaatgtgaaaggaacaaggactacgataacccggagtacgagaaggcctgtgaggcattctacgtgaagcatctgtgtcgcgttgatccattccccgagccattgatggtgtcactcggacatctaaaagaagacccgtctacttataacactatgcaaggtccatccgaattcaccgtaattgggagtctcaaggactgggaaggatggaaagaagcgcacaagatccaagtcccgactctactgctaaacggggcatatgacgaggttacagatgcatgtgtacagccttggtttggagccattccgaaaattcgatggattactctcggaaactcttctcatatgacccattacgaggaaagagaccggtatatggagatatgcgaggggttcatcaacatggcgtaggggtcggtatatctcctgccttcgaacctccgaattctcgaatctacgggacgacgttagcgtttgaagcaatggcgtgatctacttcaattaggctatcgaaaccccttgatctaagcagttctgggccatctgatagacttgaataacttccgaccatcggttgccgaagttcgcaacaagaatttcctgcatatcgcgtgtcgtgatgttccccaagccgcgggatcccatatgagctcggatcagattctgcatatcttttacctcgttgaccttgcgtatttgcttggccgaagctggcctcagtgaccactctgggcagccttcgtcaagcttcaatcccttaacaagtttgtacgtaggcgagcctggtggaggacgtaaaagggcttctagtcgacactcctgaattccgctattgatctcgtcgtcattgctacgaccaaagaacagagtgatgttctccggcgtatcctttccagttatgactagccgtctgactggcattctagtttcactggtcagcatgagaagtgaggctagcgagtgaggggtgacaatacttcaggccgccagcggacaaatcgaggcccatctcccttgccagtgcttgaactctggggtcacacaatgtaacgactctgtagtaaatcaagcagtccatgggggaaccgccacctgcgagttgcttgcagacacctttgtgcgctttccaattctgcctctgacagtcttttgagcagtacttcactttactttcttgcaagcaccgcaactaagaagctcattcttcgacctagttgtacatgttggattgcaacagtgagctgcgacttgggaatccattgttgcttaagataggtactggacgatgagctgatcttaggatcgagattcgtacttcactgagtagaaatatcgttcgaggaactcaaagacgtcttgaatcactctaaccaaacgcggtgtatgacgaagattactcgcttaccacgtagacgggtcaaatggcagggcatgggtgacacggatacttacataggcggacattgacggacagtcgttgactggctgtggcttgcagcttgatgcgaaaaggcaagctgcatgatatggaaacagctctgtatgcctgtttgaaagccttttgagttgagactagtccttcatgtctgatttgggttgaaaaaataaaatactaatagga

SEQ ID NO: 16493 - DNA, 2451 bp, Muscodor strobelii
  misc_feature: SGI cDNA ID NO. 565487
  misc_feature: Encodes the peptide sequence at SEQ ID NO 16494
atgtatcaccagggagagtcacatcgggactacccctttcagttcgagcatgtcgagttcaatccacatcgtcctcctgctcagtaccctccaggcgagaatccgtcacatcaatttcaagtaagtcagttcgaacatacgcagtcccagcgacgcgacccctctcgagagattttccatagtgaccagctccagcatcgtcggaatcagcggcaccaacacgcagtcccatctaccccacgaggcgctgagttggttcgatttcaagaacaatcatctcagcaaggtgaagttatgaataaccagattcaacacagtcagcctcgatacgttgggcatcatcacggccagttgcagcaaggccacccttctccagtccagtccgtcccgatctcgactccatcaccttggtcgcagcagggtcactctcaaggaggccaacttcgagaagggcagtctcagcaagccgagttccaccaagcacagcctcaacgagacagattccgcgatgcccgaatccggggtgcccagtttcagcaagaccagctatacactgcccagtctcacctgcgggagtttgagcagggctcttctcaacatcgtcagtctcacaacagccaacttcgacctgacagtgagcaccaaaacagtggactccaaaacgatgggtttcagcgggccgaacatccaacagtgccgtctttgtcaggaatagttccggcagctcggtttgagcaggatcagtttcagcaggcccgtgtccagcaacagcaggaaataatgcttggagaatctaatcgtgagcatgaaccgcttcagatttatcccgaaggcccagaaagaaccctctcctcagtgtcgcacccttcgggtctctattcttatgacagcgtccgtatataccgccaggctccgtccctagatcacactgtgttgaaatctccagatatgaatagtgccatcagccatggtcaaaatcaagacgcgccccagatggcactagccccggggaactatcgtctcgctgctaggcctcagagcggccgccttattgccagggttcaggagcagcctaccgaatcacaccaagcgctgccctctctcattcgagagatgccgtctcctttcactaatggctttggtggctacactttgctcaacggcagcgagccacagagaatgttatggcctgattccgtttccccgttttcacactttaggaatgcaagcagcggcttcggcgatgacgggaactttgatattgcgcagcagcaccggcattcagcgccaatgatgctcgcacgagatcaacaacatcggtggcaaggagacgcagacgatcaaagcaacgttgtaagtacgcaggtacaagacgtctctcataatcagagtgacgtgatcgacgatcaaaatttcactgggggaaaatatgaggaacgtgacaaagacaaagaggacccgaacctgagttacaatagcggcccaccaaatcctttccttctgtttcgcatgagcagatgccgtgatatcagagcctcgaatcccgaccttgcgaacgatgctccacgcacagcgaacggaaagatcagtaaaattgccggcagggagtggaaagctttaaccccagaagagagagcgcagtggaaatctgaatatgaaaggcaagcagatgagtaccggcgccgcggctggcagaagaacaaagaggttcagactcgacaccgacatctcgtgaaggctcggggtgctgggataaagaagaaggaaacccagcaagagcggagagtgaagtatggagcagctcaacccagaggccagcatccagctcagtcaagtcgacagctgatgatttcgacaccagtacaccgaggtgtcaatccgcctgttgcgtatgccaacagctctccgaaagtatccgatactgcccatcctgagatgaatcctgatgccagcaatttttcagtcgacatagctgatgacttccaatacattctatattggcgtgcaaatgtggaagcacctcacgtagaggctatgcaaagccaggtgggtaatagtccggagggcgttgaacatgctgtgtacagccaagaattcaaccgagatgacgctggggagataggagaaagatctgcagcgacagatgccgtccccaatctgtccatatctgagaacctggatacagacatgctggatcagcagcttgacgtgtccaatgtcgatgacattcgcataagcacagtcatagctcagtctcagtatgcctccatgaacgaacaagaacctggtgcctccaacgcgcaggctcctctcagacaagctccaggcgatcgagagggtcaggagaactggataaactttctggaatcacttcaaggtgatctatccgacgcgatgctgtcatcaccagagcgtggtggcaatcgggttcttggacgaagagccctatag

SEQ ID NO: 16494 - protein, 816 aa, Muscodor strobelii
  misc_feature: SGI Peptide ID NO. 565487
  misc_feature (495)..(560): Pfam Id: PF00505 Pfam Desc: HMG (high mobility group) box
  misc_feature (495)..(561): Pfam Id: PF00505 Pfam Desc: HMG (high mobility group) box
MYHQGESHRDYPFQFEHVEFNPHRPPAQYPPGENPSHQFQVSQFEHTQSQRRDPSREIFHSDQLQHRRNQRHQHAVPSTPRGAELVRFQEQSSQQGEVMNNQIQHSQPRYVGHHHGQLQQGHPSPVQSVPISTPSPWSQQGHSQGGQLREGQSQQAEFHQAQPQRDRFRDARIRGAQFQQDQLYTAQSHLREFEQGSSQHRQSHNSQLRPDSEHQNSGLQNDGFQRAEHPTVPSLSGIVPAARFEQDQFQQARVQQQQEIMLGESNREHEPLQIYPEGPERTLSSVSHPSGLYSYDSVRIYRQAPSLDHTVLKSPDMNSAISHGQNQDAPQMALAPGNYRLAARPQSGRLIARVQEQPTESHQALPSLIREMPSPFTNGFGGYTLLNGSEPQRMLWPDSVSPFSHFRNASSGFGDDGNFDIAQQHRHSAPMMLARDQQHRWQGDADDQSNVVSTQVQDVSHNQSDVIDDQNFTGGKYEERDKDKEDPNLSYNSGPPNPFLLFRMSRCRDIRASNPDLANDAPRTANGKISKIAGREWKALTPEERAQWKSEYERQADEYRRRGWQKNKEVQTRHRHLVKARGAGIKKKETQQERRVKYGAAQPRGQHPAQSSRQLMISTPVHRGVNPPVAYANSSPKVSDTAHPEMNPDASNFSVDIADDFQYILYWRANVEAPHVEAMQSQVGNSPEGVEHAVYSQEFNRDDAGEIGERSAATDAVPNLSISENLDTDMLDQQLDVSNVDDIRISTVIAQSQYASMNEQEPGASNAQAPLRQAPGDREGQENWINFLESLQGDLSDAMLSSPERGGNRVLGRRAL

SEQ ID NO: 16495 - DNA, 684 bp, Muscodor strobelii
  misc_feature: SGI cDNA ID NO. 565488
  misc_feature: Encodes the peptide sequence at SEQ ID NO 16496
atgccctggacaaacgagatgcgccaccagctggtggaggctgtcctccagcacggccaagtcgtccgcggcacggatccaggatccttcgtgaaggtcgccccgggcagatggcccttcattattcaagctctgtcggatcaacacggtttcaccatcactctcaccggcttgcaagcagagtggtctcgaatctcccgcgagcgtttctcgcccctgattccggctgcctttccccccggcaccactccccagcagaaactgtcaattgtttctggcattgttctcggtagccccaacaatgctactacaagcatcttccttaaccctggaaacgcccccgttgtttctgctgccgttgcccctgctgcagttacccatacccccgttgtccatgtccgcagcaacatctcgactcgccgtgcccccgccgctgcgcccagcatccgtaacgatcccggtcaagcctttctcaacggtctcggcgattgggagacgctaaaaatggacctcgaaggagtgtcaggtttggccatgcagcacaaggaggagatcaagcagatgacagagagagtagctcgtatgagcgaggaagagtttgatgaagagatgaagcagtttgccaagcaggctattgccctctacgatgcacaggagcgtcgtcgccagcagggcgaagagtag

SEQ ID NO: 16496 - protein, 227 aa, Muscodor strobelii
  misc_feature: SGI Peptide ID NO. 565488
MPWTNEMRHQLVEAVLQHGQVVRGTDPGSFVKVAPGRWPFIIQALSDQHGFTITLTGLQAEWSRISRERFSPLIPAAFPPGTTPQQKLSIVSGIVLGSPNNATTSIFLNPGNAPVVSAAVAPAAVTHTPVVHVRSNISTRRAPAAAPSIRNDPGQAFLNGLGDWETLKMDLEGVSGLAMQHKEEIKQMTERVARMSEEEFDEEMKQFAKQAIALYDAQERRRQQGEE

SEQ ID NO: 16497 - DNA, 1218 bp, Muscodor strobelii
  misc_feature: SGI cDNA ID NO. 565489
  misc_feature: Elevated expression when VOC is produced
  misc_feature: Encodes the peptide sequence at SEQ ID NO 16498
atgcctcgtcatcgtcctcatcgcctggaccaaatccaaggcatcggagtcgacaaaatggggagcctcgccgatgctgcacctgggcaggactaccttcgtcttgagaatctcgatgtcgacatcccgcctgatcaggaggcaatgattcactccgagtcagccgttcaccaagatctaaacaacagctatctcccgtttacagggcagacacatctgcgggaagttgcagcccggcacgtatcacaactctcaggggtgcaatatgacggtcaaaggaactgcactatatctgctggcgggctgtcgggtatcctcaatgtgctccttgcaacagtcgaagaaggcgatgaagtaattatgacggaccctacgtaccgcggactcatcaaccgtgtgctgctggcgggcggtgtgccgaaatatgttccattcaccctcgagccgggtggagagtggaaactggaccaggaggtgctccgatctgcggttacaaataagactagcgcaatgctgctcatgtcgccctccatgccaaccgggggatatctagacgaggcggactggcgccttgtctctgagttgtgcgtagccggcgatcttctgctcatttatgatgcggcaatggagcggcttgtcttcgacgatcgtcctattatccatcctgcgagcttcgatggcatggcggagcgcaccatcaccgtgggttcatcagcaaaggaactacgaatgataggctggagaattggctgggttataggacctgaggacgttatgaaagacgttgctgccgtctcaatggcaaatgtcgttgtgcccgtgggaattgctcaagaagctgtggcgattgcattagaacgatcatggaattcgagttcgagttcagcatcgggatcggggccagatatgtcaagtgaaatgtcattttatgtgaccgaactccaggcccgacgggacctcatcatttctgagctggagggtctccctgtgggtatcccatctggtggttggagtcttttgctacgcgtgagtgactttggcatcgatgggaacgaggcttccaaacggcttttagggcagggagtatgcgccacctcgatggatggttggggacctgttgctgggcaatacatccgattcgtgttttccaatgagcctcgtgatcgactgaaaggcttgggtgctaaggttcgcagagctttacagagctctacgtag

SEQ ID NO: 16498 - protein, 405 aa, Muscodor strobelii
  misc_feature: SGI Peptide ID NO. 565489
  misc_feature (33)..(397): Pfam Id: PF00155 Pfam Desc: Aminotransferase class I and II
  misc_feature (47)..(336): Pfam Id: PF00155 Pfam Desc: Aminotransferase class I and II
  misc_feature (1)..(401): NCBI GI: 119488504 Blast Desc: aminotransferase, [Neosartorya fischeri NRRL 181] gi|119410860|gb|EAW20805.1| aminotransferase, [Neosartorya fischeri NRRL 181]
  misc_feature (1)..(401): NCBI GI: 159122896 Blast Desc: aminotransferase, [Aspergillus fumigatus A1163]
  misc_feature (1)..(401): NCBI GI: 70982666 Blast Desc: aminotransferase [Aspergillus fumigatus Af293] gi|66844485|gb|EAL84823.1| aminotransferase, [Aspergillus fumigatus Af293]
  misc_feature (1)..(402): NCBI GI: 119196947 Blast Desc: CIMG_02848 [Coccidioides immitis RS]
  misc_feature (1)..(404): NCBI GI: 197295224 Blast Desc: aspartate aminotransferase [Burkholderia cenocepacia J2315] gi|195944703|emb|CAR57307.1| aspartate aminotransferase [Burkholderia cenocepacia J2315]
  misc_feature (8)..(400): NCBI GI: 186471304 Blast Desc: aminotransferase class I and II [Burkholderia phymatum STM815] gi|184197613|gb|ACC75576.1| aminotransferase class I and II [Burkholderia phymatum STM815]
  misc_feature (9)..(402): NCBI GI: 118592369 Blast Desc: SIAM614_26116 [Stappia aggregata IAM 12614] gi|118435027|gb|EAV41676.1| SIAM614_26116 [Stappia aggregata IAM 12614]
  misc_feature (1)..(402): NCBI GI: 116672329 Blast Desc: aminotransferase [Arthrobacter sp. FB24] gi|116612438|gb|ABK05162.1| aminotransferase [Arthrobacter sp. FB24]
  misc_feature (5)..(388): NCBI GI: 115378181 Blast Desc: aminotransferase, classes I and II superfamily [Stigmatella aurantiaca DW4/3-1] gi|115364813|gb|EAU63875.1| aminotransferase, classes I and II superfamily [Stigmatella
  misc_feature (8)..(401): NCBI GI: 159038037 Blast Desc: aminotransferase class I and II [Salinispora arenicola CNS-205] gi|157916872|gb|ABV98299.1| aminotransferase class I and II [Salinispora arenicola CNS-205]
  misc_feature (8)..(399): SWISSPROT Homolog: EC 4.4.1.13 Cysteine-S-conjugate beta-lyase
  misc_feature (8)..(399): SWISSPROT Homolog: EC 2.6.1.64 Glutamine--phenylpyruvate transaminase
  misc_feature (8)..(399): SWISSPROT Homolog: EC 2.6.1.7 Kynurenine--oxoglutarate transaminase
  misc_feature: Useful for introducing or modulating the production of volatile compounds
MPRHRPHRLDQIQGIGVDKMGSLADAAPGQDYLRLENLDVDIPPDQEAMIHSESAVHQDLNNSYLPFTGQTHLREVAARHVSQLSGVQYDGQRNCTISAGGLSGILNVLLATVEEGDEVIMTDPTYRGLINRVLLAGGVPKYVPFTLEPGGEWKLDQEVLRSAVTNKTSAMLLMSPSMPTGGYLDEADWRLVSELCVAGDLLLIYDAAMERLVFDDRPIIHPASFDGMAERTITVGSSAKELRMIGWRIGWVIGPEDVMKDVAAVSMANVVVPVGIAQEAVAIALERSWNSSSSSASGSGPDMSSEMSFYVTELQARRDLIISELEGLPVGIPSGGWSLLLRVSDFGIDGNEASKRLLGQGVCATSMDGWGPVAGQYIRFVFSNEPRDRLKGLGAKVRRALQSST

SEQ ID NO: 16499 - DNA, 1392 bp, Muscodor strobelii
  misc_feature: SGI EST ID NO. CUFF.39001.0
  misc_feature: Variant of the nucleotide sequence at SEQ ID NO 16497
cggatgtccagcagatttgcggtttctctacatcgctcgcaatcgagcattgtaaggtttcttggctgactatttctccaagaacacagaaatcagcagcgccagattcgaaactcgttagcattgttcgaaatgcctcgtcatcgtcctcatcgcctggaccaaatccaaggcatcggagtcgacaaaatggggagcctcgccgatgctgcacctgggcaggactaccttcgtcttgagaatctcgatgtcgacatcccgcctgatcaggaggcaatgattcactccgagtcagccgttcaccaagatctaaacaacagctatctcccgtttacagggcagacacatctgcgggaagttgcagcccggcacgtatcacaactctcaggggtgcaatatgacggtcaaaggaactgcactatatctgctggcgggctgtcgggtatcctcaatgtgctccttgcaacagtcgaagaaggcgatgaagtaattatgacggaccctacgtaccgcggactcatcaaccgtgtgctgctggcgggcggtgtgccgaaatatgttccattcaccctcgagccgggtggagagtggaaactggaccaggaggtgctccgatctgcggttacaaataagactagcgcaatgctgctcatgtcgccctccatgccaaccgggggatatctagacgaggcggactggcgccttgtctctgagttgtgcgtagccggcgatcttctgctcatttatgatgcggcaatggagcggcttgtcttcgacgatcgtcctattatccatcctgcgagcttcgatggcatggcggagcgcaccatcaccgtgggttcatcagcaaaggaactacgaatgataggctggagaattggctgggttataggacctgaggacgttatgaaagacgttgctgccgtctcaatggcaaatgtcgttgtgcccgtgggaattgctcaagaagctgtggcgattgcattagaacgatcatggaattcgagttcgagttcagcatcgggatcggggccagatatgtcaagtgaaatgtcattttatgtgaccgaactccaggcccgacgggacctcatcatttctgagctggagggtctccctgtgggtatcccatctggtggttggagtcttttgctacgcgtgagtgactttggcatcgatgggaacgaggcttccaaacggcttttagggcagggagtatgcgccacctcgatggatggttggggacctgttgctgggcaatacatccgattcgtgttttccaatgagcctcgtgatcgactgaaaggcttgggtgctaaggttcgcagagctttacagagctctacgtagctcgcattaatatagcataaaatactaccagtacgtaactct

SEQ ID NO: 16500 - DNA, 762 bp, Muscodor strobelii
  misc_feature: SGI cDNA ID NO. 565490
  misc_feature: Reduced expression when VOC is produced
  misc_feature: Encodes the peptide sequence at SEQ ID NO 16501
atggcgaccttccatcaattcgtgcgtctacctgcggagcttcagctgaaaatttgggaaacatttctagtgacggactttgctaaacggcccctcatccctcttgatgaatacgactgtgtccatcctcccgaacaactccggtcgtctgcgctgctgctgaccaaccgtcagagcaatgcggtcgtgcacaagttctacccatttactatccgtgtcttggattcgaaatcacgaaaacaatgcggtagtgtcagactgaatcttgacctggacgtcttcttctttggagccaaatcggattttgacaactggatcttcacagaagctcaaggaaaacatagcgacaatacttcctcaaagcattcacgccctgtgaccgagccattgaagaaatcaacactgcagttactcaagcgtggacttgagattgagtcttgctgtatcgacgatatcagattcggagctgacgagacaccacctttataccataagcatggcgacttcaagggtctagtgcgatgtttcgtcgtagcggatgaaatttgtcatagcaagacggagcagagataccgcagcgtgcgctaccttggcactaaagactatctgcacaagtacaaaggggatgttttcgttacggaacgaagccgcgcctcagtggaggatgggaggacggtaaggagaaagtggaatattgtggtggattatagtaccccaactgatgaacagatcacggagctcatgcaatggggaaatgtgtga

SEQ ID NO: 16501 - protein, 253 aa, Muscodor strobelii
  misc_feature: SGI Peptide ID NO. 565490
  misc_feature: Useful for introducing or modulating the production of volatile compounds
MATFHQFVRLPAELQLKIWETFLVTDFAKRPLIPLDEYDCVHPPEQLRSSALLLTNRQSNAVVHKFYPFTIRVLDSKSRKQCGSVRLNLDLDVFFFGAKSDFDNWIFTEAQGKHSDNTSSKHSRPVTEPLKKSTLQLLKRGLEIESCCIDDIRFGADETPPLYHKHGDFKGLVRCFVVADEICHSKTEQRYRSVRYLGTKDYLHKYKGDVFVTERSRASVEDGRTVRRKWNIVVDYSTPTDEQITELMQWGNV

SEQ ID NO: 16502 - DNA, 1290 bp, Muscodor strobelii
  misc_feature: SGI EST ID NO. CUFF.39040.1
  misc_feature: Variant of the nucleotide sequence at SEQ ID NO 16500
ctcaactggttctcccgcttgcaggtgaatctagctcatcgagtagccgatatctcatagatagagagctctaccactccctctcaagagagttggttacctaggccaaaggctcgagctgattggcaaggcactcatcatatccgatatacaccgaaattaacctcgtgtaacacgagtgcaaacgcaaccctactctcacaaatcagctcgtttgtaccctttgcgacattacatcgccacctcacccaagtcatcatcgtcgtcaaatattcatcctttcccttctacaggagcagaaatcagcatggcgaccttccatcaattcgtgcgtctacctgcggagcttcagctgaaaatttgggaaacatttctagtgacggactttgctaaacggcccctcatccctcttgatgaatacgactgtgtccatcctcccgaacaactccggtcgtctgcgctgctgctgaccaaccgtcagagcaatgcggtcgtgcacaagttctacccatttactatccgtgtcttggattcgaaatcacgaaaacaatgcggtagtgtcagactgaatcttgacctggacgtcttcttctttggagccaaatcggattttgacaactggatcttcacagaagctcaaggaaaacatagcgacaatacttcctcaaagcattcacgccctgtgaccgagccattgaagaaatcaacactgcagttactcaagcgtggacttgagattgagtcttgctgtatcgacgatatcagattcggagctgacgagacaccacctttataccataagcatggcgacttcaagggtctagtgcgatgtttcgtcgtagcggatgaaatttgtcatagcaagacggagcagagataccgcagcgtgcgctaccttggcactaaagactatctgcacaagtacaaaggggatgttttcgttacggaacgaagccgcgcctcagtggaggatgggaggacggtaaggagaaagtggaatattgtggtggattatagtaccccaactgatgaacagatcacggagctcatgcaatggggaaatgtgtgagataatgactcagagctattatctaaatggccatgtggtagcttcaagagagagagaggtgctggctggagtattcctccgctgatagatggctagttcagtagactgttgatacacagggccaacttcgagagcacatactgctctgaggcagaagacaacaatgacttcgtcccaatatatctaggaagtctgttacaaaggcctgatgtttagctaat

SEQ ID NO: 16503 - DNA, 1386 bp, Muscodor strobelii
  misc_feature: SGI cDNA ID NO. 565491
  misc_feature: Encodes the peptide sequence at SEQ ID NO 16504
atgcgatcaattcccttaggcctgttaccgccaagttttcgagacgctattacgatcacgcggaatctcggcgttcggtatctttggattgatgctctctgtatcttgcaggactcaagaccagattgggagaacgagatcaagcaaatatctacgtactttgctaactcatacttcacgatatttgctatggcatcgcccaatagccacaatgggctgtttggcagaccacaagcccagagtaacattagtcctgtctcaatcccactttcgcataatatcaaagacgatcgtaaggtggccatcgaatatgattcctcttacgacgaatataagactctcagccaagatggcccactagccacaagagcatgggcactccaggaattgatgttagcaacgcggcaattgcattacggtaggcatcaaatctattggaaatgtcatgatgggtatcgttttgtcgatggctgcccaagtgcagacagacttcctgatgtcaaacatcctatactggagttaattttgcagagcgtctcttcgagcacacctagcataattaccaatcatgaagctctacttgacgaatattacagtttagtagaagaatactgctcaaagctcttgaccaaagatagcgataagctcccggctttctcttcgctagcagaaaacatccacagacacttgggaggctattaccttgcaggactatgggatttcgattttgctaagggtctagcgtggtggtgtgagacttttgacactcggcaaaatcctgagtatcgagcaccatcatggtcttgggcggcaactaacagccggataagatatgttggagataagttcagagaagacatgtttagactggaacaattcaaatggggcatgacattgagagaccctagcaatccatacggcgagatcaagaagggctatgcactagttcgaggcttcaccacatcattaatcagaagcacacaagtggtcgatacgtacgcttcaacaccagccatcggtctgtgccgcttcgacgacatcgtggagcagaacgattcagaatcagagccgactactaggctgttccggatgaacggcaacagtaactacatactatcggtccaggcacgatcgatagacgaaaaagaatgggaaatcgacccagacaagttcatgttagaaagctacatcctgcttgtcttaggcatctgcaaggacgagtatgaaaatctacccaaactagcacactgtttagtcttgaaacccagttccggtgcctcacgatctgacggacacgagtatcaaaggattggcttggctacgctatccaacgtggacctagagtgggtgggtaagtgggatttgcgtacggtgaaattaatgtga

SEQ ID NO: 16504 - protein, 461 aa, Muscodor strobelii
  misc_feature: SGI Peptide ID NO. 565491
  misc_feature (1)..(129): Pfam Id: PF06985 Pfam Desc: Heterokaryon incompatibility protein (HET)
  misc_feature (4)..(129): Pfam Id: PF06985 Pfam Desc: Heterokaryon incompatibility protein (HET)
  misc_feature (4)..(461): NCBI GI: 145604236 Blast Desc: MGG_08449 [Magnaporthe grisea 70-15] gi|145012271|gb|EDJ96927.1| MGG_08449 [Magnaporthe grisea 70-15]
  misc_feature (3)..(461): NCBI GI: 171677566 Blast Desc: protein product [Podospora anserina] gi|170936851|emb|CAP61509.1| protein product [Podospora anserina]
  misc_feature (3)..(453): NCBI GI: 256720830 Blast Desc: NECHADRAFT_85535 [Nectria haematococca mpVI 77-13-4]
  misc_feature (2)..(461): NCBI GI: 256724255 Blast Desc: NECHADRAFT_87557 [Nectria haematococca mpVI 77-13-4]
  misc_feature (9)..(330): NCBI GI: 256722781 Blast Desc: NECHADRAFT_5039 [Nectria haematococca mpVI 77-13-4]
  misc_feature (2)..(323): NCBI GI: 154304664 Blast Desc: BC1G_08071 [Botryotinia fuckeliana B05.10] gi|150853971|gb|EDN29163.1| BC1G_08071 [Botryotinia fuckeliana B05.10]
  misc_feature (1)..(318): NCBI GI: 238914592 Blast Desc: heterokaryon incompatibility protein [Beauveria bassiana]
  misc_feature (2)..(449): NCBI GI: 46114324 Blast Desc: FG03004.1 [Gibberella zeae PH-1]
  misc_feature (2)..(309): NCBI GI: 256722409 Blast Desc: NECHADRAFT_62329 [Nectria haematococca mpVI 77-13-4]
  misc_feature (5)..(323): NCBI GI: 189188512 Blast Desc: tol protein [Pyrenophora tritici-repentis Pt-1C-BFP] gi|187972201|gb|EDU39700.1| tol protein [Pyrenophora tritici-repentis Pt-1C-BFP]
MRSIPLGLLPPSFRDAITITRNLGVRYLWIDALCILQDSRPDWENEIKQISTYFANSYFTIFAMASPNSHNGLFGRPQAQSNISPVSIPLSHNIKDDRKVAIEYDSSYDEYKTLSQDGPLATRAWALQELMLATRQLHYGRHQIYWKCHDGYRFVDGCPSADRLPDVKHPILELILQSVSSSTPSIITNHEALLDEYYSLVEEYCSKLLTKDSDKLPAFSSLAENIHRHLGGYYLAGLWDFDFAKGLAWWCETFDTRQNPEYRAPSWSWAATNSRIRYVGDKFREDMFRLEQFKWGMTLRDPSNPYGEIKKGYALVRGFTTSLIRSTQVVDTYASTPAIGLCRFDDIVEQNDSESEPTTRLFRMNGNSNYILSVQARSIDEKEWEIDPDKFMLESYILLVLGICKDEYENLPKLAHCLVLKPSSGASRSDGHEYQRIGLATLSNVDLEWVGKWDLRTVKLM

SEQ ID NO: 16505 - DNA, 422 bp, Muscodor strobelii
  misc_feature: SGI EST ID NO. CUFF.39022.0
  misc_feature: Variant of the nucleotide sequence at SEQ ID NO 16503
ttttgacactcggcaaaatcctgagtatcgagcaccatcatggtcttgggcggcaactaacagccggataagatatgttggagataagttcagagaagacatgtttagactggaacaattcaaatggggcatgacattgagagaccctagcaatccatacggcgagatcaagaagggctatgcactagttcgaggcttcaccacatcattaatcagaagcacacaagtggtcgatacgtacgcttcaacaccagccatcggtctgtgccgcttcgacgacatcgtggagcagaacgattcagaatcagagccgactactaggctgttccggatgaacggcaacagtaactacatactatcggtccaggcacgatcgatagacgaaaaagaatgggaaatcgacccagacaagttcatgttag

SEQ ID NO: 16506 - DNA, 1077 bp, Muscodor strobelii
  misc_feature: SGI cDNA ID NO. 565492
  misc_feature: Encodes the peptide sequence at SEQ ID NO 16507
atgcgagtggcgcctctggccatcttagcactcgttgcaggaggagctgcaatcggtgatggcgacaatgatttggcagagatcgagctcttaacgaacacccgagttggtgacaacctggatcaaggctcgacattcgatatcaaatgggatccaaatggcgtcactggcaaaggttacttgcaacggaattcatggaacatgaccgcaccgaccccgacataccaatccgatctcgtcgccgatgaccttgacatgaaatccgggaaatattactgggtcgtggagccagcaaaagatcgatacacgaacaattggttttatactctcaccatttcgtacaacagtggcagaagtactgcggacttcaacgaatttctgattcgcacatttgactcgttgctctcgtcttcatctttggacaattctccgacttctgctgtgacttctacagccagtaccagtagggccgacacaactgtcacgaaatcagggactgccacagaggtggcaactattgaaactgatacatcatccgcgtcacataccacaagcgcggcagagtccccggcgccgtcgacggacagcggtcaatcccaaacaaccgatgacaataaaacctcgcacacgagtcgaggaccatctatcggcgttgccgtgggaatagtagtcgcggtgctggtaattatcgctttattggcccttgtgttctactatcgacggaaatcgcaaaagaacaatagagagccgagcatcctgctcccagcgagaggcgaagaacgcgacagcgaaagtcgtactataaccgcaaatggcagcgtgacggacttcgaggctggtccggatgcaaaggagatcgccaaattgccacagccggaaatcacagtctactatgagctagatggtagagacgagcctcaacagatggacgcaggatggcaaccgccagaactcgcatctaaacaaatcgcagcggagctctccagtctctttgacgacccggacaagactcagaaacctgattcgagtccattaccaattcaaagggttagtcccacaacatctcaggtttcttga

SEQ ID NO: 16507 - protein, 358 aa, Muscodor strobelii
  misc_feature: SGI Peptide ID NO. 565492
MRVAPLAILALVAGGAAIGDGDNDLAEIELLTNTRVGDNLDQGSTFDIKWDPNGVTGKGYLQRNSWNMTAPTPTYQSDLVADDLDMKSGKYYWVVEPAKDRYTNNWFYTLTISYNSGRSTADFNEFLIRTFDSLLSSSSLDNSPTSAVTSTASTSRADTTVTKSGTATEVATIETDTSSASHTTSAAESPAPSTDSGQSQTTDDNKTSHTSRGPSIGVAVGIVVAVLVIIALLALVFYYRRKSQKNNREPSILLPARGEERDSESRTITANGSVTDFEAGPDAKEIAKLPQPEITVYYELDGRDEPQQMDAGWQPPELASKQIAAELSSLFDDPDKTQKPDSSPLPIQRVSPTTSQVS

SEQ ID NO: 16508 - DNA, 2490 bp, Muscodor strobelii
  misc_feature: SGI EST ID NO. CUFF.39060.1
  misc_feature: Variant of the nucleotide sequence at SEQ ID NO 16506
tctgcactcaagcgcacgactgtgctttgttgtgttttccagaaaagctagatctaaaagagtgctgcgtagctaaagcgcctgctgaataatatggatggaggatccgaccggcgttacccgacttcgatttcgaccggttcgctgtggaagcttagaactccatgagaccaaggagcaccccagtcatgatcgccatacaatattccggctcccaagagaagtccggcttggaaacgtccaattgttggcccatctgtcgtctttgctaggatcaggcctgaaacgattggggaagacgtatgagcacagggcgtagcgcgagcgctgtagatcggcttcattttaaacatcctaaagtcgcccactcctaactcctctggcatcgacactaacatttgatatttgacactgccttgcttggattagcattcgaacgctaaggttacgcagtgtctgcgacttgtcatctatagatctatttctcataatcgagaacttcgttgtcagactctccgttttcttcgtttctgaccgcacttcaccggtgttaacgcctattattataccgtatctcgagatcaatggatgtttacctatgagttccgaatcaatatcatgcgagtggcgcctctggccatcttagcactcgttgcaggaggagctgcaatcggtgatggcgacaatgatttggcagagatcgagctcttaacgaacacccgagttggtgacaacctggatcaaggctcgacattcgatatcaaatgggatccaaatggcgtcactggcaaaggttacttgcaacggaattcatggaacatgaccgcaccgaccccgacataccaatccgatctcgtcgccgatgaccttgacatgaaatccgggaaatattactgggtcgtggagccagcaaaagatcgatacacgaacaattggttttatactctcaccatttcgtacaacagtggcagaagtactgcggacttcaacgaatttctgattcgcacatttgactcgttgctctcgtcttcatctttggacaattctccgacttctgctgtgacttctacagccagtaccagtagggccgacacaactgtcacgaaatcagggactgccacagaggtggcaactattgaaactgatacatcatccgcgtcacataccacaagcgcggcagagtccccggcgccgtcgacggacagcggtcaatcccaaacaaccgatgacaataaaacctcgcacacgagtcgaggaccatctatcggcgttgccgtgggaatagtagtcgcggtgctggtaattatcgctttattggcccttgtgttctactatcgacggaaatcgcaaaagaacaatagagagccgagcatcctgctcccagcgagaggcgaagaacgcgacagcgaaagtcgtactataaccgcaaatggcagcgtgacggacttcgaggctggtccggatgcaaaggagatcgccaaattgccacagccggaaatcacagtctactatgagctagatggtagagacgagcctcaacagatggacgcaggatggcaaccgccagaactcgcatctaaacaaatcgcagcggagctctccagtctctttgacgacccggacaagactcagaaacctgattcgagtccattaccaattcaaagggttagtcccacaacatctcaggtttcttgacgtaggaagagttattgaatgatagattaatggaattgtcctaatgaaacttgaataccggtgctacggttgcgagtgatgtaatctgcattacgctgaagtgtggcttggtctttctgctttaaaacgtccgtgatgttttcatgccagcctttggcatttctacgatcatgttggtagatagtatgcagaggcagaactctggccgtcgacaatcttgcgccaaggaaacacgtactagaactcaaggattcacgcatcaggaagctctattgacaagaacttggggtagaccttggctatcttccttgtaccagggtagaccacaccgaacatcattctccgttaaacgtgacttattggttcgttcggtggccactaactcatccgcggaaagtcattgcggaagagaggatgatgtaatcccgttaatgacttttcgcggatttcggggatgctagcgaccgtcggtaggggcgatgaacaggcgggtcgccatcgctcagtgccatactccgctgaaactataggtacctcactgaattctgtgcctttctttccgctcatcatggcccttcaacactgtgtacgatgagcatgaaatggctgccaataatcacttgctcaaatcgagtctcagcatgtttggtgcgtcggtatccgcggccgtatgtctcaatcaacccgaaggtcaaatgtgcaacgttcaaatgcaaccgcccgtaacaggtacaggttacggaaacagagctatgacaagacaggacaagacaagcactttgggtgtccttgcaa

SEQ ID NO: 16509 - DNA, 2583 bp, Muscodor strobelii
  misc_feature: SGI cDNA ID NO. 565493
  misc_feature: Encodes the peptide sequence at SEQ ID NO 16510
atgcgtctgttgcgtgtcgaagatggcaagataagcttgaccaaggagtacatcagtagtccaggtccttatgccattctatcccatacatggaacgataacaacgacgatgaagtgagtttcgctgatatggcgggaggcagtgcggagaggaaagctggctttgccaagattgagttctgtgccaagcaggcactttccgacggtcttgagtatttctgggttgatacttgctgtatcgacaaatccaatagtaccgaactatccgaggctatcaattccatgttcagctggtatcgcgatgcagctcgatgctatgtttaccttgccgacgccacgagtcccgctcagtggtcaaggtatgctatcatgcggctgagacactgtaaatggttcactcggggctggaccctgcaggagctcatcgcatcaccttccgtggacttcttcacgccgaacggtgaaagaatcggcgataaagtgtctctggaagaccaaataagcgagatcacaggtatcactgcaacagctctgagaggcagaccattatccgattttagcatcgaagtccgaatggcatggaccaagggtcgtacaaccactagggaagaggacatggcttactcgatcatgggcctcttcggagtgcacatgccattaatttacggagagggacgaaagaatgcctggcgccgtcttaatgaagagatcacaaaatcgtcaggcggcctcggtcggatcgagaattattcgaatgacctcagttacagacagatacctgagctgctggggcaattcgtccatttaagcaatgttccatatggatcattagacgagcgacaatttcatgattctgctcacgttattttcgagcaactgcgtccttcaacatctcccctcctcgcaactgaccaccttaaagacttctatttgtacattttaacaaaatttgagatagatgcgagtcatgagccagttgtttatagcgcaattagggatcttgtggaaggagatgatgatcacattgacgtcactgagttcattcccaggcttcgaagcctgctccagggtataagaaccgcacacgagcgagttattcggaagcgactcaatgaataccggtcgattaagactactcaactgttgcccaagtttcgaccatcatggggatgggacaaggtggctgttcaaggggaaaccgtatttcgcgacgtcgtgagcggtagaagcagcactgatcgccaacccatcgcgcatcgagatgcttttagcaacatggcaacggatgctcgacattgcattgatactcttaacgtgctatgtcgccgctttttaactttcattccgagggcagagcgcgagcgttatacctcaacttttgataatctgtgcaacgctgcttcaaaatttggcctacctgacgttcccgattgcgaaaacgatgtcaattcactagacaacgtcatcattagctgcttcatctgtcgaacactcgcagacccctccgatgtcccagtgtctctcccagccttagagtcagtgatcactacactggaacctctatggctttctgccgcacgcacgttgcaaaacctccgaggagttcttgcatgcctgctcgagataaatgataaactcgaattgaagcccttattggagcgtcaggtgttgctgagtactctttggcagaagaaagacattagttgcctagcaaagcttgtgagcaacggcgcccctgattgggaggagatgtaccgtcttgtaaagcagctggtcacttcgccgcatgcgttgtctttgatgaaagcagcagaagacattgcttataactatgttctccgcacccctgccgtacttcggtggaacacgttggtggtcgatagaactaagatcagaaaacgacagaactcaatccttaacagattaaaggacacccgaccaaatttattggagttggctgtcaccgacgaatacagcgagcagaacaatctggacttctcctttcaatgcaaagatgctttccatgccatgcttcatcaagcaccgacatttaccatagatcgcgcaattcatttgcaaccgacgaccaacattattatgacgttgctgcaaaacgatacaatattgaaccaagagactatgattgggaaggatgacttccggatttttcctaaatttaatgtatctgcggaattcgagattagccgagggccctttacagctcgcttcatcgtagagcctggcgccacacagactgtcaattggcgccagcacctaatgctatgcccagtatttggcgggattcaggaatactacagaatgcccccgcccgaatgggatatgagagcaacaacggatggcaagttctattttgtcaaccacgatgacaaaaaaacgtattggattcgaccttccactcctacttcgtttaaccacggaccaatcattccggaatctatgcctgaaggctgggtccggcagtggacagctattaatccaatgccccccaagtacggcattgggggagcaccaagggagccagtcaatatcttcgatacatgggcaactaagtcgtcttattga

SEQ ID NO: 16510 - protein, 860 aa, Muscodor strobelii
  misc_feature: SGI Peptide ID NO. 565493
  misc_feature (24)..(140): Pfam Id: PF06985 Pfam Desc: Heterokaryon incompatibility protein (HET)
  misc_feature (775)..(804): Pfam Id: PF00397 Pfam Desc: WW domain
  misc_feature (1)..(285): NCBI GI: 171677728 Blast Desc: protein product [Podospora anserina] gi|154936838|emb|CAL30215.1| HET-E [Podospora anserina] gi|170936932|emb|CAP61591.1| protein product [Podospora anserina]
  misc_feature (1)..(285): NCBI GI: 17225202 Blast Desc: AF323581_1 beta transducin-like protein HET-E4s [Podospora anserina]
  misc_feature (1)..(285): NCBI GI: 17225206 Blast Desc: AF323583_1 beta transducin-like protein HET-E2C*4 [Podospora anserina]
  misc_feature (1)..(285): NCBI GI: 3023956 Blast Desc: HETE1_PODAN RecName: Full=Vegetative incompatibility protein HET-E-1 gi|607003|gb|AAA85775.1| beta transducin-like protein [Podospora anserina]
  misc_feature (1)..(285): NCBI GI: 17225204 Blast Desc: AF323582_1 beta transducin-like protein HET-E2C [Podospora anserina]
  misc_feature (1)..(285): NCBI GI: 17225208 Blast Desc: AF323584_1 beta transducin-like protein HET-E2C*40 [Podospora anserina]
  misc_feature (1)..(251): NCBI GI: 154936832 Blast Desc: HNWD3 [Podospora anserina]
  misc_feature (1)..(251): NCBI GI: 171685532 Blast Desc: protein product [Podospora anserina] gi|170942727|emb|CAP68380.1| protein product [Podospora anserina]
  misc_feature (1)..(239): NCBI GI: 154294222 Blast Desc: BC1G_13797 [Botryotinia fuckeliana B05.10] gi|150844807|gb|EDN20000.1| BC1G_13797 [Botryotinia fuckeliana B05.10]
  misc_feature (1)..(237): NCBI GI: 189209021 Blast Desc: vegetative incompatibility protein HET-E-1 [Pyrenophora tritici-repentis Pt-1C-BFP] gi|187976936|gb|EDU43562.1| vegetative incompatibility protein
MRLLRVEDGKISLTKEYISSPGPYAILSHTWNDNNDDEVSFADMAGGSAERKAGFAKIEFCAKQALSDGLEYFWVDTCCIDKSNSTELSEAINSMFSWYRDAARCYVYLADATSPAQWSRYAIMRLRHCKWFTRGWTLQELIASPSVDFFTPNGERIGDKVSLEDQISEITGITATALRGRPLSDFSIEVRMAWTKGRTTTREEDMAYSIMGLFGVHMPLIYGEGRKNAWRRLNEEITKSSGGLGRIENYSNDLSYRQIPELLGQFVHLSNVPYGSLDERQFHDSAHVIFEQLRPSTSPLLATDHLKDFYLYILTKFEIDASHEPVVYSAIRDLVEGDDDHIDVTEFIPRLRSLLQGIRTAHERVIRKRLNEYRSIKTTQLLPKFRPSWGWDKVAVQGETVFRDVVSGRSSTDRQPIAHRDAFSNMATDARHCIDTLNVLCRRFLTFIPRAERERYTSTFDNLCNAASKFGLPDVPDCENDVNSLDNVIISCFICRTLADPSDVPVSLPALESVITTLEPLWLSAARTLQNLRGVLACLLEINDKLELKPLLERQVLLSTLWQKKDISCLAKLVSNGAPDWEEMYRLVKQLVTSPHALSLMKAAEDIAYNYVLRTPAVLRWNTLVVDRTKIRKRQNSILNRLKDTRPNLLELAVTDEYSEQNNLDFSFQCKDAFHAMLHQAPTFTIDRAIHLQPTTNIIMTLLQNDTILNQETMIGKDDFRIFPKFNVSAEFEISRGPFTARFIVEPGATQTVNWRQHLMLCPVFGGIQEYYRMPPPEWDMRATTDGKFYFVNHDDKKTYWIRPSTPTSFNHGPIIPESMPEGWVRQWTAINPMPPKYGIGGAPREPVNIFDTWATKSSY

SEQ ID NO: 16511 - DNA, 6660 bp, Muscodor strobelii
  misc_feature: SGI EST ID NO. CUFF.39285.1
  misc_feature: Variant of the nucleotide sequence at SEQ ID NO 16509
cgcaagtatactgtattatctggcatttgtctcatcatgtcatgtgcgacgtatctagcccattgtcgctatcccaatgcaatggttccaatgttcgatcattatcttcagagagccccacttggtgattgtacgggatccgaccgagctctcacagtcctgagatgcgtctgttgcgtgtcgaagatggcaagataagcttgaccaaggagtacatcagtagtccaggtccttatgccattctatcccatacatggaacgataacaacgacgatgaagtgagtttcgctgatatggcgggaggcagtgcggagaggaaagctggctttgccaagattgagttctgtgccaagcaggcactttccgacggtcttgagtatttctgggttgatacttgctgtatcgacaaatccaatagtaccgaactatccgaggctatcaattccatgttcagctggtatcgcgatgcagctcgatgctatgtttaccttgccgacgccacgagtcccgctcagtggtcaaggtatgctatcatgcggctgagacactgtaaatggttcactcggggctggaccctgcaggagctcatcgcatcaccttccgtggacttcttcacgccgaacggtgaaagaatcggcgataaagtgtctctggaagaccaaataagcgagatcacaggtatcactgcaacagctctgagaggcagaccattatccgattttagcatcgaagtccgaatggcatggaccaagggtcgtacaaccactagggaagaggacatggcttactcgatcatgggcctcttcggagtgcacatgccattaatttacggagagggacgaaagaatgcctggcgccgtcttaatgaagagatcacaaaatcgtcaggcggcctcggtcggatcgagaattattcgaatgacctcagttacagacagatacctgagctgctggggcaattcgtccatttaagcaatgttccatatggatcattagacgagcgacaatttcatgattctgctcacgttattttcgagcaactgcgtccttcaacatctcccctcctcgcaactgaccaccttaaagacttctatttgtacattttaacaaaatttgagatagatgcgagtcatgagccagttgtttatagcgcaattagggatcttgtggaaggagatgatgatcacattgacgtcactgagttcattcccaggcttcgaagcctgctccagggtataagaaccgcacacgagcgagttattcggaagcgactcaatgaataccggtcgattaagactactcaactgttgcccaagtttcgaccatcatggggatgggacaaggtggctgttcaaggggaaaccgtatttcgcgacgtcgtgagcggtagaagcagcactgatcgccaacccatcgcgcatcgagatgcttttagcaacatggcaacggatgctcgacattgcattgatactcttaacgtgctatgtcgccgctttttaactttcattccgagggcagagcgcgagcgttatacctcaacttttgataatctgtgcaacgctgcttcaaaatttggcctacctgacgttcccgattgcgaaaacgatgtcaattcactagacaacgtcatcattagctgcttcatctgtcgaacactcgcagacccctccgatgtcccagtgtctctcccagccttagagtcagtgatcactacactggaacctctatggctttctgccgcacgcacgttgcaaaacctccgaggagttcttgcatgcctgctcgagataaatgataaactcgaattgaagcccttattggagcgtcaggtgttgctgagtactctttggcagaagaaagacattagttgcctagcaaagcttgtgagcaacggcgcccctgattgggaggagatgtaccgtcttgtaaagcagctggtcacttcgccgcatgcgttgtctttgatgaaagcagcagaagacattgcttataactatgttctccgcacccctgccgtacttcggtggaacacgttggtggtcgatagaactaagatcagaaaacgacagaactcaatccttaacagattaaaggacacccgaccaaatttattggagttggctgtcaccgacgaatacagcgagcagaacaatctggacttctcctttcaatgcaaagatgctttccatgccatgcttcatcaagcaccgacatttaccatagatcgcgcaattcatttgcaaccgacgaccaacattattatgacgttgctgcaaaacgatacaatattgaaccaagagactatgattgggaaggatgacttccggatttttcctaaatttaatgtatctgcggaattcgagattagccgagggccctttacagctcgcttcatcgtagagcctggcgccacacagactgtcaattggcgccagcacctaatgctatgcccagtatttggcgggattcaggaatactacagaatgcccccgcccgaatgggatatgagagcaacaacggatggcaagttctattttgtcaaccacgatgacaaaaaaacgtattggattcgaccttccactcctacttcgtttaaccacggaccaatcattccggaatctatgcctgaaggctgggtccggcagtggacagctattaatccaatgccccccaagtacggcattgggggagcaccaagggagccagtcaatatcttcgatacatgggcaactaagtcgtcttattgagctccataaagaggcacacgagcacagccgtacgctggctcgagaacagtgctcttactactcaattgcgtgggcacccaaagggtcattagacgatatttcggaccaacccagtgcgccgcgtagaacatcatcgcggtgtagacaatgtgttaagaacgtcatgactcgttctaaaacatcgacaagctcaatcctctagcatcctgtcggaagaaccgtattgtctgtatttgatcaaatacacttacagattcactcaactaatctgaactaacacacgacatcgcgaacatgtccttcgcgatgttctagacgatcgtagacgctccatacagcgctccaccgctgaatccccgtacattttcaacgtcagcgtcattggtattgggaaacatgcgaactcggtatagcatcatctggtggcagcgtgctcgcatgatttatggagcaacgtgtgctactgcatattgagatattggtgagacgcctgttgtgggcgcgaattgctgtaggatgtctgggtctccgttcccgaggataattagcgcaattgtagatggggctctgtgatagtaaagggcaaggaatatttgaagcattgtcttgaagacaactatctgtcgtcccgcgattgtgcattagagcagattgttcgagtatagagcggcgatagttgacttagcgcatcactctgttgtgatagttcaatcgtagatggcgtgattcaccgcgctgcttctgtaatgaactgcaaggactgctagcagacactttaaaactagtctaacgattgatttgcgagtatcgatattaacatatcgggaatgagccgtcaggatactgaggacgagtcggctgttgacggcgacgagggtcgtatgtggacagttcaggctttctacctaggcgccaatttggggcagtgcacatttgtgaggcgaaggggcgacgattggattatttactatcattaactttcatgcaacttaatgtatagtatcccataagacccttagctatgagtcagtatgtcgaaaaagaaaataaccaatcttcccacactctcgtatgcgaatccacgaactgtgtaatgcatacaatactgagtgagacccagcagcccagttgtcgctcaatcgagtgctagacttggcatgagcaaattcagatctccaaatccattttgtcccttaattcaagctccgacgactatcattgaaagtaatatacccttagaaacatgctagtaattacatttgaatgaacttcttgtcggagcctcgattacgataccttgtcaccaccgattgaggcgaacaggcacattggtgctaatttcagccacaatcctgcaagctgcctcacagaagtgacactgcagatgcagcttcgcctcaattctgggtccgaccataaggactcgagaattccagttattgtccttccaaagtgcgcggggtaggcatgcgatggatggccagtgccgcttcaagtctttgagtcaatctctttcggttttctcatgatacttgacaagatcgacgtggagtggtgatggtattaattgacaccaaaatatgaatagccatgatagcgaaagtcagcatgagaagagcgaggagcaactcacaacactgatctcgaggcatcgaatagaatgctgcgccgacttgcaccctgcgataaatggtgatggcagattgtcggtgggagaagattttcgaccatgggcgaggttgaagcatacgcgcccgcaagatggtacgcaagtggggcaagtcgttgttatatttgccgaggcgaatgcgctcagagggtgcgagaaatgtagaaattccttgagtcagagcttcaactttcctgattattggtggtctgaatggtgtcggaactcaaatggctattttggaagcgacagtgggttcaataacaataccgttcaatctcatacgacttggtggaagaccgaagtcaaacttgtcaacgagcgtcgcgtcgaacagtacagttggcagagactcaacttattgacgcttgctcttattagttctaagactacgtatatcttgctctttgacctacctgaggtgatgcaggacacggtatatgaaaggctcaacagaactgctacgtcggatgttatcgtgaatccttactggctctatgccccgatcctggaacatctcgttgaactacacgagaaagccatctggggtctgcggggcctcgtgaggacggtcgagaaagagcgcgatggagaacggcggcaaaggcctaattcgagacttttgcacgagatcgcccgccatgccatacaccagattgagacactggactatgcaattgagatgggtcgatctataatcacgggtcatcagcgacttctttctctcgaaccaagcccaaggatcgaactgtctttatcacatcgcactgaagataaattgttgtttttcgagaaaacccttgtcggacttcgttgtcgcgcatcggcaaacaaagatcgtctgcagaatgaaatcggtctcacgttccatatgatcgcagagatggactccaaggtatcaatgaggatcgggcaagccgcgaaggaggacagctcaaccatgaaaacactcgcattcatcacaatgctctttcttccggctacgttcatatcagcaattttcagtacatctttcttcaagtttggggacgatgggcaatggtctgtctcgaataagttctgggtgtattgggcaacggcgctccctatcaccgccgtgactattttagtatggatcttgacacaatggaacgcagcggtgcgtttctgggaaagggtcatcgactttgagaattggaagcattttcagttgtctagcgtattgcaaagaagagagacgacaatgtcagagtttttcggagataagtcaggaaaccgagtgtaggacagccgcgcaagttcacaactacgctgattcaatgatgcacattttgcatacccactgccagcatgatctttaccatttcttgattgtgatgcgattgtattgcgccatgcaaatataagcgcatggacgtgctggtctcctagctatcaagtacagtcaatcaagacgtcttagacgtagcggcctttttcacgatctcttcagatatgccctcatcagctaatgcctttaggtcatcctctcccatgtcgccatcccatccattcgcaacaaggtaagcccgaaatttttcgtcgctcttgcccagatcctcgctacttacattaggcacaaagaaccacgtgacgagtataccagcgacaccggcgatggcgccgatgatgaaagtccaacgcttgccaaggttctcctgaatgcgcgtgaagacctctgttccaacggccccgccggtctttcctagtgcggcagagataccgtaacatgttccccgaactgcagtagcgtaggcttcagatgacagaaggccaagcatgtcgcccggacctaggttccctgaagactgcataaatccgtatagtactacgaataggggcacgattttggtgactctatcataagcgaggccgacaatgagaccgaaaacgaggtagccggcgaaaccaagcatcatggtgtatttgcgaccaagtctattgcataggaaagctccaataaagacaccgggcagttggagcgtgtttagaagaagtgtccattcgaaagtggtcttgatatttttcgtcttgacgacactgctgataatcaggctggagaatattccgtttggaaatgtgacaaagtcgtagatgaactgtaatgtcgttagtcccatcatcgcatgactccaagctcgctaataggcgcttacccaagctccgcacgtgccgatgagcgttttccagtagtacctaaagatcaacttgtaaggtaccttcttc

SEQ ID NO: 16512 - DNA, 1539 bp, Muscodor strobelii
  misc_feature: SGI cDNA ID NO. 565494
  misc_feature: Elevated expression when VOC is produced
  misc_feature: Encodes the peptide sequence at SEQ ID NO 16513
atggcggtcgaccagatcactacgacagatgatgtcgtgcagagcaaacccaccacttcgacgcaatcctcgccaattgagcagaagtcaaatgcaccaaatccagatgaccctgaagcgccgtccagggaggtgtcttccaagagacaaaggctatctgatctgttcactatcttctgcgccggatttgcgttgatctctgatgggtatcaaaacaatctgatgagcgcgaccaacgtgattcttacaagacaatacaaacagtacacgtcttattacagcacgcaagtgtccaatgcgctgctcgtgggcgagattctaggtcagatctccatcggtcttgtatgcgactatttaggccggaaatgggcgatcatgatcactaccgccctgattgtagtcggcggtgtccttggcacggctgctacggcttcaacgcctatcggcttgttctggtttctgaccgtcgcccgcggtgtcgtcggattcggcaccggaggtgaatacccagccagttcagtcagcgcgagtgaggcggcaaatgagcacacgccaaagcagcgcggccctgtattcatccttgtgactaatttgccgctctcatttggtggtccgctcgtcttgtctgtcttcttaatcgtgttatcggctactggggagaatcacctaacgacgatatggaaagtgtcgtttggaattgggatcctgttgcctttgacggtattttacttccgtatcaagatgctcaatagtacattatacagacgaggagcgatcaagaagaaggtaccttacaagttgatctttaggtactactggaaaacgctcatcggcacgtgcggagcttggttcatctacgactttgtcacatttccaaacggaatattctccagcctgattatcagcagtgtcgtcaagacgaaaaatatcaagaccactttcgaatggacacttcttctaaacacgctccaactgcccggtgtctttattggagctttcctatgcaatagacttggtcgcaaatacaccatgatgcttggtttcgccggctacctcgttttcggtctcattgtcggcctcgcttatgatagagtcaccaaaatcgtgcccctattcgtagtactatacggatttatgcagtcttcagggaacctaggtccgggcgacatgcttggccttctgtcatctgaagcctacgctactgcagttcggggaacatgttacggtatctctgccgcactaggaaagaccggcggggccgttggaacagaggtcttcacgcgcattcaggagaaccttggcaagcgttggactttcatcatcggcgccatcgccggtgtcgctggtatactcgtcacgtggttctttgtgcctaatgtaagtagcgaggatctgggcaagagcgacgaaaaatttcgggcttaccttgttgcgaatggatgggatggcgacatgggagaggatgacctaaaggcattagctgatgagggcatatctgaagagatcgtgaaaaaggccgctacgtctaagacgtcttga

SEQ ID NO: 16513 - protein, 512 aa, Muscodor strobelii
  misc_feature: SGI Peptide ID NO. 565494
  misc_feature (61)..(423): Pfam Id: PF07690 Pfam Desc: Major Facilitator Superfamily
  misc_feature (57)..(472): Pfam Id: PF00083 Pfam Desc: Sugar (and other) transporter
  misc_feature (88)..(472): Pfam Id: PF00083 Pfam Desc: Sugar (and other) transporter
  misc_feature (36)..(505): NCBI GI: 145252820 Blast Desc: An16g06190 [Aspergillus niger] gi|134083478|emb|CAK46955.1| protein product [Aspergillus niger]
  misc_feature (34)..(507): NCBI GI: 212537787 Blast Desc: metabolite transport protein, [Penicillium marneffei ATCC 18224] gi|210068791|gb|EEA22882.1| metabolite transport protein, [Penicillium marneffei ATCC 18224]
  misc_feature (32)..(502): NCBI GI: 156046074 Blast Desc: SS1G_09313 [Sclerotinia sclerotiorum 1980] gi|154693709|gb|EDN93447.1| SS1G_09313 [Sclerotinia sclerotiorum 1980]
  misc_feature (46)..(496): NCBI GI: 255943129 Blast Desc: Pc18g05050 [Penicillium chrysogenum Wisconsin 54-1255] gi|211587066|emb|CAP94729.1| Pc18g05050 [Penicillium chrysogenum Wisconsin 54-1255]
  misc_feature (45)..(496): NCBI GI: 170085243 Blast Desc: MFS Git1p-related glycerophosphoinositol permease [Laccaria bicolor S238N-H82] gi|164651397|gb|EDR15637.1| MFS Git1p-related glycerophosphoinositol permease [Laccaria bicolor
  misc_feature (8)..(496): NCBI GI: 126135992 Blast Desc: permease involved in the uptake of glycerophosphoinositol (GroPIns) [Pichia stipitis CBS 6054] gi|126091718|gb|ABN66491.1| permease involved in the uptake of
  misc_feature (11)..(505): NCBI GI: 68488665 Blast Desc: potential glycerophosphoinositol permease [Candida albicans SC5314] gi|68488706|ref|XP_711819.1| potential glycerophosphoinositol permease [Candida albicans SC5314] SC5314]
  misc_feature (11)..(505): NCBI GI: 238882413 Blast Desc: CAWG_04395 [Candida albicans WO-1]
  misc_feature (44)..(506): NCBI GI: 241951694 Blast Desc: plasma membrane permease, glycerophosphoinositol and glycerophosphocholine uptake, [Candida dubliniensis CD36] gi|223641908|emb|CAX43872.1| plasma membrane permease, and CD36]
  misc_feature (29)..(504): NCBI GI: 255725346 Blast Desc: CTRG_01909 [Candida tropicalis MYA-3404] gi|240135493|gb|EER35047.1| CTRG_01909 [Candida tropicalis MYA-3404]
  misc_feature: Useful for introducing or modulating the production of volatile compounds
MAVDQITTTDDVVQSKPTTSTQSSPIEQKSNAPNPDDPEAPSREVSSKRQRLSDLFTIFCAGFALISDGYQNNLMSATNVILTRQYKQYTSYYSTQVSNALLVGEILGQISIGLVCDYLGRKWAIMITTALIVVGGVLGTAATASTPIGLFWFLTVARGVVGFGTGGEYPASSVSASEAANEHTPKQRGPVFILVTNLPLSFGGPLVLSVFLIVLSATGENHLTTIWKVSFGIGILLPLTVFYFRIKMLNSTLYRRGAIKKKVPYKLIFRYYWKTLIGTCGAWFIYDFVTFPNGIFSSLIISSVVKTKNIKTTFEWTLLLNTLQLPGVFIGAFLCNRLGRKYTMMLGFAGYLVFGLIVGLAYDRVTKIVPLFVVLYGFMQSSGNLGPGDMLGLLSSEAYATAVRGTCYGISAALGKTGGAVGTEVFTRIQENLGKRWTFIIGAIAGVAGILVTWFFVPNVSSEDLGKSDEKFRAYLVANGWDGDMGEDDLKALADEGISEEIVKKAATSKTS

SEQ ID NO: 16514 - DNA, 5377 bp, Muscodor strobelii
  misc_feature: SGI EST ID NO. CUFF.39286.2
  misc_feature: Variant of the nucleotide sequence at SEQ ID NO 16512
aaggaggtacagcataataaatcggtgagcggcagagtagttcggaatgatgttgccgtattcttaatacgtggatggcgactaggaaatgagattgcactgttttcgacgctggtgcgattgcatatatcgagcaacgtcgctgccggctgttgaagcgtgtattgagctcttcgtcgcgtaacattcgtatccccgcatctcattctagccacgcgtcatcagcagagtagaatggcggtcgaccagatcactacgacagatgatgtcgtgcagagcaaacccaccacttcgacgcaatcctcgccaattgagcagaagtcaaatgcaccaaatccagatgaccctgaagcgccgtccagggaggtgtcttccaagagacaaaggctatctgatctgttcactatcttctgcgccggatttgcgttgatctctgatgggtatcaaaacaatctgatgagcgcgaccaacgtgattcttacaagacaatacaaacagtacacgtcttattacagcacgcaagtgtccaatgcgctgctcgtgggcgagattctaggtcagatctccatcggtcttgtatgcgactatttaggccggaaatgggcgatcatgatcactaccgccctgattgtagtcggcggtgtccttggcacggctgctacggcttcaacgcctatcggcttgttctggtttctgaccgtcgcccgcggtgtcgtcggattcggcaccggaggtgaatacccagccagttcagtcagcgcgagtgaggcggcaaatgagcacacgccaaagcagcgcggccctgtattcatccttgtgactaatttgccgctctcatttggtggtccgctcgtcttgtctgtcttcttaatcgtgttatcggctactggggagaatcacctaacgacgatatggaaagtgtcgtttggaattgggatcctgttgcctttgacggtattttacttccgtatcaagatgctcaatagtacattatacagacgaggagcgatcaagaagaaggtaccttacaagttgatctttaggtactactggaaaacgctcatcggcacgtgcggagcttggttcatctacgactttgtcacatttccaaacggaatattctccagcctgattatcagcagtgtcgtcaagacgaaaaatatcaagaccactttcgaatggacacttcttctaaacacgctccaactgcccggtgtctttattggagctttcctatgcaatagacttggtcgcaaatacaccatgatgcttggtttcgccggctacctcgttttcggtctcattgtcggcctcgcttatgatagagtcaccaaaatcgtgcccctattcgtagtactatacggatttatgcagtcttcagggaacctaggtccgggcgacatgcttggccttctgtcatctgaagcctacgctactgcagttcggggaacatgttacggtatctctgccgcactaggaaagaccggcggggccgttggaacagaggtcttcacgcgcattcaggagaaccttggcaagcgttggactttcatcatcggcgccatcgccggtgtcgctggtatactcgtcacgtggttctttgtgcctaatgtaagtagcgaggatctgggcaagagcgacgaaaaatttcgggcttaccttgttgcgaatggatgggatggcgacatgggagaggatgacctaaaggcattagctgatgagggcatatctgaagagatcgtgaaaaaggccgctacgtctaagacgtcttgattgactgtacttgatagctaggagaccagcacgtccatgcgcttatatttgcatggcgcaatacaatcgcatcacaatcaagaaatggtaaagatcatgctggcagtgggtatgcaaaatgtgcatcattgaatcagcgtagttgtgaacttgcgcggctgtcctacactcggtttcctgacttatctccgaaaaactctgacattgtcgtctctcttctttgcaatacgctagacaactgaaaatgcttccaattctcaaagtcgatgaccctttcccagaaacgcaccgctgcgttccattgtgtcaagatccatactaaaatagtcacggcggtgatagggagcgccgttgcccaatacacccagaacttattcgagacagaccattgcccatcgtccccaaacttgaagaaagatgtactgaaaattgctgatatgaacgtagccggaagaaagagcattgtgatgaatgcgagtgttttcatggttgagctgtcctccttcgcggcttgcccgatcctcattgataccttggagtccatctctgcgatcatatggaacgtgagaccgatttcattctgcagacgatctttgtttgccgatgcgcgacaacgaagtccgacaagggttttctcgaaaaacaacaatttatcttcagtgcgatgtgataaagacagttcgatccttgggcttggttcgagagaaagaagtcgctgatgacccgtgattatagatcgacccatctcaattgcatagtccagtgtctcaatctggtgtatggcatggcgggcgatctcgtgcaaaagtctcgaattaggcctttgccgccgttctccatcgcgctctttctcgaccgtcctcacgaggccccgcagaccccagatggctttctcgtgtagttcaacgagatgttccaggatcggggcatagagccagtaaggattcacgataacatccgacgtagcagttctgttgagcctttcatataccgtgtcctgcatcacctcaggtaggtcaaagagcaagatatacgtagtcttagaactaataagagcaagcgtcaataagttgagtctctgccaactgtactgttcgacgcgacgctcgttgacaagtttgacttcggtcttccaccaagtcgctgtcgggtggtcaatgaaacccactctccttaggacaggcagacctactatgagattgaacggtattgttattgaacccactgtcgcttccaaaatagccatttgagttccgacaccattcagaccaccaataatcaggaaagttgaagctctgactcaaggaatttctacatttctcgcaccctctgagcgcattcgcctcggcaaatctgcatgtctgatcgtaagacacacaagacagaagcacgttacgatggtgtttctactcacataacaacgacttgccccacttgcgtaccatcttgcgggcgcgtatgcttcaacctcgcccatggtcgaaaatcttctcccaccgacaatctgccatcaccatttatcgcagggtgcaagtcggcgcagcattctattcgatgcctcgagatcagtgttgtgagttgctcctcgctcttctcatgctgactttcgctatcatggctattcatattttggtgtcaattaataccatcaccactccacgtcgatcttgtcaagtatcatgagaaaaccgaaagagattgactcaaagacttgaagcggcactggccatccatcgcatgcctaccccgcgcactttggaaggacaataactggaattctcgagtccttatggtcggacccagaattgaggcgaagctgcatctgcagtgtcacttctgtgaggcagcttgcaggattgtggctgaaattagcaccaatgtgcctgttcgcctcaatcggtggtgacaaggtatcgtaatcgaggctccgacaagaagttcattcaaatgtaattactagcatgtttctaagggtatattactttcaatgatagtcgtcggagcttgaattaagggacaaaatggatttggagatctgaatttgctcatgccaagtctagcactcgattgagcgacaactgggctgctgggtctcactcagtattgtatgcattacacagttcgtggattcgcatacgagagtgtgggaagattggttattttctttttcgacatactgactcatagctaagggtcttatgggatactatacattaagttgcatgaaagttaatgatagtaaataatccaatcgtcgccccttcgcctcacaaatgtgcactgccccaaattggcgcctaggtagaaagcctgaactgtccacatacgaccctcgtcgccgtcaacagccgactcgtcctcagtatcctgacggctcattcccgatatgttaatatcgatactcgcaaatcaatcgttagactagttttaaagtgtctgctagcagtccttgcagttcattacagaagcagcgcggtgaatcacgccatctacgattgaactatcacaacagagtgatgcgctaagtcaactatcgccgctctatactcgaacaatctgctctaatgcacaatcgcgggacgacagatagttgtcttcaagacaatgcttcaaatattccttgccctttactatcacagagccccatctacaattgcgctaattatcctcgggaacggagacccagacatcctacagcaattcgcgcccacaacaggcgtctcaccaatatctcaatatgcagtagcacacgttgctccataaatcatgcgagcacgctgccaccagatgatgctataccgagttcgcatgtttcccaataccaatgacgctgacgttgaaaatgtacggggattcagcggtggagcgctgtatggagcgtctacgatcgtctagaacatcgcgaaggacatgttcgcgatgtcgtgtgttagttcagattagttgagtgaatctgtaagtgtatttgatcaaatacagacaatacggttcttccgacaggatgctagaggattgagcttgtcgatgttttagaacgagtcatgacgttcttaacacattgtctacaccgcgatgatgttctacgcggcgcactgggttggtccgaaatatcgtctaatgaccctttgggtgcccacgcaattgagtagtaagagcactgttctcgagccagcgtacggctgtgctcgtgtgcctctttatggagctcaataagacgacttagttgcccatgtatcgaagatattgactggctcccttggtgctcccccaatgccgtacttggggggcattggattaatagctgtccactgccggacccagccttcaggcatagattccggaatgattggtccgtggttaaacgaagtaggagtggaaggtcgaatccaatacgtttttttgtcatcgtggttgacaaaatagaacttgccatccgttgttgctctcatatcccattcgggcgggggcattctgtagtattcctgaatcccgccaaatactgggcatagcattaggtgctggcgccaattgacagtctgtgtggcgccaggctctacgatgaagcgagctgtaaagggccctcggctaatctcgaattccgcag

SEQ ID NO: 16515 - DNA, 1821 bp, Muscodor strobelii
  misc_feature: SGI cDNA ID NO. 565495
  misc_feature: Elevated expression when VOC is produced
  misc_feature: Encodes the peptide sequence at SEQ ID NO 16516
atggctcgcgagttccaattcgtcgatgcctctgagccggcgcaacggatatcccccgagtctcgcagcatgaaccattcacacgtcatgcgaaatgtgcatgccaagaaacggcgattacaagtccaaatataccaagatgaactgagtcatgtcaagaaagagcagtatcgaaagaccccgaagtcaattctaagtcctcgaatccaaggtctcaccaactgcggtgatccattctcgtcgatggcaagaccgctttcttctagagaatactccatattgaatcattacaccgaggttgtcatgccagcctcaattggacattgcttgttattcagtcgtagcggagaccatcgtgaacagatgttgcgggaatgggtcagtcttgccattgcagatgaggcgtttatgatcgttgcgattctcctcagtacctgccgccatattctacgacaacgatcaggcgaccctttgtatacagcagtggcactacggtataagcagatgagccttcgttcattgcgcgtggagatcgagagaagttcctctcaaattagcgcgatgagtgttgcgaaggcgctagctttagcaatagacgaggtgaattccggcgaacaagagattgctcggaagcatttgcaaggcgtgcttgccatggtccgatttgccggcggtccaaaatcgcttggacttaatcagctactagagaaaatgtgtgacaggtttgtgcaagtattaaataccacagatcagggctgcggtgagcagcgtctcctcgtcttcatgtcttccttaacaactgctatccccgccggctcctgggtactagtgacaggagccaccgggttcctcgcgtcccatatcatccgtcagttcctcgagcgtggttaccgagttcgaggtactgtccgagatgtcaataaagcatcatggctcatagacgggcctttcaagtcccaggcagaagaaggcgtctttgagattgtggctgtccctgatctcggagctgatggcgcttatgatgcagccatcaagcgtgtcgcagctattctacatgtcgcctacgtcgccaagatcgttcctgatccgaacgaagtcattacgccatcgatcaacgccgtccgatgtatcattaaagctgcaatcggagaaccctcagtcaagcgagttgtgttcactggcagtgcagtcagtgcttcgccacttacacagggtattgataacggcacggtcgagcggaactcgtggaatgatgctgtattggaggctgcttgggcgccacctccttatggcatgtcgcatgccttagcgaactatcccgctagcaaggtcgcggccgaaaaagaggtgtggggattagtcgacaaagagacgcttccattcactgttaacgttgtgtctcctgccggattgatcggggagcctctgaaccgggcacacattgaagggcctgccaactgggttgcacacgcttacagaggacacaaagagatcatggactcgatgccggcttcattttacggtgacgtgaaagacgtcgcgttagtccacgtcgcggctgtcttagaccccgaggtcaagaatgcgcggctacagacttggggacgtagcactcactggaacgaggttttggcaatcctgcgcagaatgcgaccggagaaaaaatttgttgaagattacgcgaacgctcaacacctcagagtatcggttgatcagtcagagtctgttgtgatgctgaagaagtggggaaataaggatggatggacgcccttcgaggacagcgtttccgaaaacgtcaataatccgtacttaacggactga

SEQ ID NO: 16516 - protein, 606 aa, Muscodor strobelii
  misc_feature: SGI Peptide ID NO. 565495
  misc_feature (275)..(545): Pfam Id: PF01370 Pfam Desc: NAD dependent epimerase/dehydratase family
  misc_feature (277)..(513): Pfam Id: PF07993 Pfam Desc: Male sterility protein
  misc_feature (276)..(300): Pfam Id: PF01073 Pfam Desc: 3-beta hydroxysteroid dehydrogenase/isomerase family
  misc_feature (275)..(301): Pfam Id: PF01370 Pfam Desc: NAD dependent epimerase/dehydratase family
  misc_feature (277)..(295): Pfam Id: PF07993 Pfam Desc: Male sterility protein
  misc_feature (275)..(309): Pfam Id: PF05368 Pfam Desc: NmrA-like family
  misc_feature (262)..(604): NCBI GI: 261354262 Blast Desc: aldehyde reductase [Verticillium albo-atrum VaMs.102]
  misc_feature (262)..(500): NCBI GI: 116208520 Blast Desc: CHGG_03553 [Chaetomium globosum CBS 148.51] gi|88184150|gb|EAQ91618.1| CHGG_03553 [Chaetomium globosum CBS 148.51]
  misc_feature (262)..(599): NCBI GI: 212526402 Blast Desc: NAD dependent epimerase/dehydratase, [Penicillium marneffei ATCC 18224] gi|210072756|gb|EEA26843.1| NAD dependent epimerase/dehydratase, [Penicillium marneffei ATCC 18224]
  misc_feature (262)..(508): NCBI GI: 256721278 Blast Desc: NECHADRAFT_44664 [Nectria haematococca mpVI 77-13-4]
  misc_feature (262)..(600): NCBI GI: 256735681 Blast Desc: NECHADRAFT_103289 [Nectria haematococca mpVI 77-13-4]
  misc_feature (262)..(600): NCBI GI: 46139929 Blast Desc: FG11479.1 [Gibberella zeae PH-1]
  misc_feature (265)..(599): NCBI GI: 154311232 Blast Desc: BC1G_06734 [Botryotinia fuckeliana B05.10] gi|150851138|gb|EDN26331.1| BC1G_06734 [Botryotinia fuckeliana B05.10]
  misc_feature (262)..(597): NCBI GI: 169765928 Blast Desc: [Aspergillus oryzae RIB40] gi|83765290|dbj|BAE55433.1| protein product [Aspergillus oryzae]
  misc_feature (262)..(597): NCBI GI: 238482541 Blast Desc: aldehyde reductase II [Aspergillus flavus NRRL3357] gi|220700559|gb|EED56897.1| aldehyde reductase II [Aspergillus flavus NRRL3357]
  misc_feature (269)..(601): NCBI GI: 256727901 Blast Desc: NECHADRAFT_46394 [Nectria haematococca mpVI 77-13-4]
  misc_feature (269)..(601): SWISSPROT Homolog: EC 1.1.1.2 Alcohol dehydrogenase (NADP(+))
  misc_feature: Useful for introducing or modulating the production of volatile compounds
MAREFQFVDASEPAQRISPESRSMNHSHVMRNVHAKKRRLQVQIYQDELSHVKKEQYRKTPKSILSPRIQGLTNCGDPFSSMARPLSSREYSILNHYTEVVMPASIGHCLLFSRSGDHREQMLREWVSLAIADEAFMIVAILLSTCRHILRQRSGDPLYTAVALRYKQMSLRSLRVEIERSSSQISAMSVAKALALAIDEVNSGEQEIARKHLQGVLAMVRFAGGPKSLGLNQLLEKMCDRFVQVLNTTDQGCGEQRLLVFMSSLTTAIPAGSWVLVTGATGFLASHIIRQFLERGYRVRGTVRDVNKASWLIDGPFKSQAEEGVFEIVAVPDLGADGAYDAAIKRVAAILHVAYVAKIVPDPNEVITPSINAVRCIIKAAIGEPSVKRVVFTGSAVSASPLTQGIDNGTVERNSWNDAVLEAAWAPPPYGMSHALANYPASKVAAEKEVWGLVDKETLPFTVNVVSPAGLIGEPLNRAHIEGPANWVAHAYRGHKEIMDSMPASFYGDVKDVALVHVAAVLDPEVKNARLQTWGRSTHWNEVLAILRRMRPEKKFVEDYANAQHLRVSVDQSESVVMLKKWGNKDGWTPFEDSVSENVNNPYLTD

SEQ ID NO: 16517 - DNA, 2619 bp, Muscodor strobelii
  misc_feature: SGI EST ID NO. CUFF.39084.0
  misc_feature: Variant of the nucleotide sequence at SEQ ID NO 16515
tgataacctcttcatcccgtcattcccccaatctctcggcatgatacgtaaaaatgcaattcgcttaacagtctcagcgtgggtggcagtccaaccgtgagactctcatcatggctcgcgagttccaattcgtcgatgcctctgagccggcgcaacggatatcccccgagtctcgcagcatgaaccattcacacgtcatgcgaaatgtgcatgccaagaaacggcgattacaagtccaaatataccaagatgaactgagtcatgtcaagaaagagcagtatcgaaagaccccgaagtcaattctaagtcctcgaatccaaggtctcaccaactgcggtgatccattctcgtcgatggcaagaccgctttcttctagagaatactccatattgaatcattacaccgaggttgtcatgccagcctcaattggacattgcttgttattcagtcgtagcggagaccatcgtgaacagatgttgcgggaatgggtcagtcttgccattgcagatgaggcgtttatgatcgttgcgattctcctcagtacctgccgccatattctacgacaacgatcaggcgaccctttgtatacagcagtggcactacggtataagcagatgagccttcgttcattgcgcgtggagatcgagagaagttcctctcaaattagcgcgatgagtgttgcgaaggcgctagctttagcaatagacgaggtgaattccggcgaacaagagattgctcggaagcatttgcaaggcgtgcttgccatggtccgatttgccggcggtccaaaatcgcttggacttaatcagctactagagaaaatgtgtgacaggtttgtgcaagtattaaataccacagatcagggctgcggtgagcaggtagacacaattcgagaaacggcatccgaataaattcatattgtttaaatatggatctgaaaatatcgtcccctttgactcgtagataaaatagccgtcgtaatgctcacaatcacagatgccaagatttataacttccgtactaggcgatagcctccgttccaaccatctcgcgacgaaccacgcagccttcatagtcagtcaatggagtcgtcatcaacacagtggttctcagtcgtagtcattactcgcttgaatcaattcataagcaagttatgtgatttataaacatcagtccttgatgtcacgtacaatcacgcttataaaacaaagctccgggtccatttcgatgtgatggatgcatcagcattaagagagacctgtccgaactgacacacttccatctaaatcacatttgctgtagcgtctcctcgtcttcatgtcttccttaacaactgctatccccgccggctcctgggtactagtgacaggagccaccgggttcctcgcgtcccatatcatccgtcagttcctcgagcgtggttaccgagttcgaggtactgtccgagatgtcaataaagcatcatggctcatagacgggcctttcaagtcccaggcagaagaaggcgtctttgagattgtggctgtccctgatctcggagctgatggcgcttatgatgcagccatcaagcgtgtcgcagctattctacatgtcgcctacgtcgccaagatcgttcctgatccgaacgaagtcattacgccatcgatcaacgccgtccgatgtatcattaaagctgcaatcggagaaccctcagtcaagcgagttgtgttcactggcagtgcagtcagtgcttcgccacttacacagggtattgataacggcacggtcgagcggaactcgtggaatgatgctgtattggaggctgcttgggcgccacctccttatggcatgtcgcatgccttagcgaactatcccgctagcaaggtcgcggccgaaaaagaggtgtggggattagtcgacaaagagacgcttccattcactgttaacgttgtgtctcctgccggattgatcggggagcctctgaaccgggcacacattgaagggcctgccaactgggttgcacacgcttacagaggacacaaagagatcatggactcgatgccggcttcattttacggtgacgtgaaagacgtcgcgttagtccacgtcgcggctgtcttagaccccgaggtcaagaatgcgcggctacagacttggggacgtagcactcactggaacgaggttttggcaatcctgcgcagaatgcgaccggagaaaaaatttgttgaagattacgcgaacgctcaacacctcagagtatcggttgatcagtcagagtctgttgtgatgctgaagaagtggggaaataaggatggatggacgcccttcgaggacagcgtttccgaaaacgtcaataatccgtacttaacggactgagatgtgcattgaagtcatttgagaacgcatgtatttctattatttagattgaaaagcatcagaattggatacatctactcagattaccccaagatgtgacaacgagcagaggagctacagaaggattgtaaggatataggtagcttcttccattccacaatctgatgggtcacagcctcagaccccgcagtagttggtaaaacagtaacgctggggcaaattgcatgagcccagacacatcgttctcgagttcgagcaaatcaa

SEQ ID NO: 16518 - DNA, 663 bp, Muscodor strobelii
  misc_feature: SGI cDNA ID NO. 565496
  misc_feature: Elevated expression when VOC is produced
  misc_feature: Encodes the peptide sequence at SEQ ID NO 16519
atgaattcctcatcgtctgtcgcttcgtcgccagagtcactcctgctcaaacagcttgtcaagttctacgacgacggcattcggggcaaagatggcagaggacgcaccttcaaagaaatcctagattgggatgacgaccagctcgagatgcaccacgacttcattcagtgggtgttcccgctaactgaatgttctgcctaccaaatgggtgtccctgttctggacgaagagaccttgctcatgtttcgtacatccgcgcacctccagtatcaggcactgctcatgctgcagcgaatgctcaagttctacggctttgacacgtatctcaagtacgacgagaaaaacgtcaagagaccatttgatctcacgatcaccgccaaaggaggaccaaatatcatcctctatcgtcgctggttgaacctgaggaaccacaaccatcagcgcattacaagaatcattcgatgtctgcgactctttcatctgaacgatattgctgttgaagtctgcaacgcatttgtttatgtcgatgaaatgttcgatcgggtccacaagagcacaattgcattctggaaaagagctgcgacgctgccactggaggactgcccagatggtaacaaagtagagtggttagccgaatacaatgtaccggcaacagaacattag

SEQ ID NO: 16519 - protein, 220 aa, Muscodor strobelii
  misc_feature: SGI Peptide ID NO. 565496
  misc_feature (5)..(214): Pfam Id: PF04664 Pfam Desc: Opioid growth factor receptor (OGFr) conserved region
  misc_feature (5)..(213): NCBI GI: 169598138 Blast Desc: SNOG_01868 [Phaeosphaeria nodorum SN15] gi|111068960|gb|EAT90080.1| SNOG_01868 [Phaeosphaeria nodorum SN15]
  misc_feature (33)..(199): NCBI GI: 196255761 Blast Desc: Opioid growth factor receptor (OGFr) conserved region [Cyanothece sp. PCC 7822] gi|196202941|gb|EDX97758.1| Opioid growth factor receptor (OGFr) conserved region [Cyanothece sp.
  misc_feature (19)..(202): NCBI GI: 156040385 Blast Desc: SS1G_12209 [Sclerotinia sclerotiorum 1980] gi|154696265|gb|EDN96003.1| SS1G_12209 [Sclerotinia sclerotiorum 1980]
  misc_feature (30)..(194): NCBI GI: 186684395 Blast Desc: Opioid growth factor receptor (OGFr) region [Nostoc punctiforme PCC 73102] gi|186466847|gb|ACC82648.1| Opioid growth factor receptor (OGFr) conserved region [Nostoc punctiforme PCC
  misc_feature (19)..(122): NCBI GI: 189208348 Blast Desc: conserved [Pyrenophora tritici-repentis Pt-1C-BFP] gi|187976600|gb|EDU43226.1| conserved [Pyrenophora tritici-repentis Pt-1C-BFP]
  misc_feature (41)..(202): NCBI GI: 154320658 Blast Desc: BC1G_01801 [Botryotinia fuckeliana B05.10] gi|150853490|gb|EDN28682.1| BC1G_01801 [Botryotinia fuckeliana B05.10]
  misc_feature (29)..(193): NCBI GI: 269924481 Blast Desc: conserved [Brevundimonas subvibrioides ATCC 15264] gi|269141201|gb|EEZ67642.1| conserved [Brevundimonas subvibrioides ATCC 15264]
  misc_feature (16)..(193): NCBI GI: 262192583 Blast Desc: VIH_002985 [Vibrio cholerae CT 5369-93] gi|262031535|gb|EEY50125.1| VIH_002985 [Vibrio cholerae CT 5369-93]
  misc_feature (31)..(193): NCBI GI: 218709270 Blast Desc: VS_1277 [Vibrio splendidus LGP32] gi|218322289|emb|CAV18418.1| Conserved [Vibrio splendidus LGP32]
  misc_feature (27)..(193): NCBI GI: 254508897 Blast Desc: Opioid growth factor receptor conserved region superfamily [Vibrio parahaemolyticus 16] gi|219548211|gb|EED25227.1| Opioid growth factor receptor region
  misc_feature: Useful for introducing or modulating the production of volatile compounds
MNSSSSVASSPESLLLKQLVKFYDDGIRGKDGRGRTFKEILDWDDDQLEMHHDFIQWVFPLTECSAYQMGVPVLDEETLLMFRTSAHLQYQALLMLQRMLKFYGFDTYLKYDEKNVKRPFDLTITAKGGPNIILYRRWLNLRNHNHQRITRIIRCLRLFHLNDIAVEVCNAFVYVDEMFDRVHKSTIAFWKRAATLPLEDCPDGNKVEWLAEYNVPATEH

SEQ ID NO: 16520 - DNA, 4101 bp, Muscodor strobelii
  misc_feature: SGI EST ID NO. CUFF.39184.1
  misc_feature: Variant of the nucleotide sequence at SEQ ID NO 16518
acgcggatgcactggaatgagggactcgagacatgaccatgcataggaagcattatctcagtgcatgacaagcatggaagaccggttcgagttcacggtgtctcgagccgacacattccctcgccctgatgagaggactgacttgaagtatcacgacaaatacgtgatccactatgacttcagcaacgtcgatgatgaagaggcgattcgagaaattcgctgcatgtgtgagaagctgatcggagttggcttgcaagtagaagtgcgcgctggagaagatgaatcacttctcattttcgtccgagcgcccacagagcttctaagcacagaaatctacaagtcaagagtgaaagattggctctacagcatcacaaaaactcaaccccaagtcgacaagaagagtaaagtccaagctgcgagattcacattcgaagcagagagtcttctttgtgtctatcatctagtgacttggtcaaaggaaaatggcggggccggtatttcgacagaatctggtaaatggccaaacgtgaaggctatattcccgatacacaatgagccgaccaatcggcggctactaaaacatctgagcaaaaggctcttcttgactaagaatgatttggatgagatccgtgacctctttgggtccaaagttgccttctactttgcatatatgcaggcatacctactcttcctatcttttccctcgatcacaggcatgattgcttgggctttcttgccaaagtactccttaatatatgccattgttacgcttgtcgggtgcacagtctttcttgagtactggaagatactgcaagcggatctcagcattcggtggaacgtcaagggggtcgcagcactcaaagcaaatcgtcctaagtatcactacgagaaggtcactatcgattcagccggaaggacgaagcattattatcccaaatggaagtcctttgctcggcaaagtctacagatcccctttttcgccctttgtcttgcaacgcttggcctcatcatcacgggtgtctttgccatggagattttagtctcggaagcttaccagggacctcatcaatcatatctagaatatgttccgaccttgctgttggccatagcgttgccatatatgaactcgttcctggaggattctgcatcgtggctagctgagttcgagaatcatcgcacgtcggattattacgagatgtctgtgacacagaaactattcgtactcagtttcatcgtcaactatcttccgattcttcttactgcatttgtctacgtccctctaggcaatcagattgtaccatggttaggatcacaacttccgggacgcctcggtgccaacttagatcgagactttttccagagagatcctgacaggctacgcaacgaagtcatcgctttaacacttaccggacaactatcggatatgttcgaggagatggttgtgccgtacgttctgcaccggctccgggcttggtatcatgcctggaaattttaccgatcccaccagacatcgttcaatgctgtctcaccagatgaccccatggagaaatcattcctgcgaagggttcgacggcaggcaagcctgcctaagtacaatgttcaagatgatatatcggagatggtcattcaatttggttatctagctctcttctcgcctgtttggcctctggtgtcaatcgggtttttcgtcaacaattgtatcgagctccggaccgatttcctgaagatctgcattgaacatcaacgcccacatgctgctagaactgatggtatcggcccttggatacactcgctggatgcacttacgtggctcggtagtatctcaacagcggcaattgtacatatgttcggcaccgagacaagccggagcgacactctccttggccgcgcattgggtggagcttcatggtggacactccctatcaccatatttgtgagtgaacacatttttcttgttctgcgcgcagttgtccgtatggtgttgcagagcattggctccgaggaggtacgaaaagagcgcaacgaacgatatacgagacggcgaaagtatatggacgagctcgaggccgcggaccgcgcaaaacagatgttggatgtcggcgccgttcagcgccgcaagtcagtccgcatggctgattctgacatcttctggacgaagcaagtcgagcatggtgctagtgcagaagctggggtcgcactgatcaaagccctagcacgagcacccaagtccagcaagaagaacttataagcttcattgcttgcgccaaatacctatcaggacaaggagtaccttactcgatggttatatcctgatgtccgtaagtggtcggtttcctttctgcgccgtctgattaaatctgattaaaagggcccctgtgtcactcgccccagcttcgtcggatatttttctatgtacatcgtacgtatcgcagttgcggcattacgattaattcgtcgccgataatgttgtcaatgtcttttccctgcagtctcatagttgtgttccatcagatcgaggctaaattcaatcaatgcaaggttcacggtatcatattgagaagattgaatatgctcacattggtgagaatcgctcatcgacgcgataacgaataaaagccacaataagtttcttcattcaactcttatcatcttaccgggtggaaccaagtcactctccatcaggatcaatctccagggataacaactaaaacaactcagacattccgggtgttgcctacccattcccagcaggtgtgtctcaaagtcgcaacttcaaaatcgtccttgcaccagttttggctcgggcctaccttcagctagccaagaccagtcggtcctaattcggtaaaactcactatcagggcgcgacagtgatcgattgtttgtgacaatcaaatgcagcaactctttgtacttttgcaaacaatttgattctcacaacaacgccaagacagccaaactccactaccaacgcgatacataagggctcgtcaccgacagcatgagcttgaattagagtcatcttgaacataatcaccacacattaaatcatgaattcctcatcgtctgtcgcttcgtcgccagagtcactcctgctcaaacagcttgtcaagttctacgacgacggcattcggggcaaagatggcagaggacgcaccttcaaagaaatcctagattgggatgacgaccagctcgagatgcaccacgacttcattcagtgggtgttcccgctaactgaatgttctgcctaccaaatgggtgtccctgttctggacgaagagaccttgctcatgtttcgtacatccgcgcacctccagtatcaggcactgctcatgctgcagcgaatgctcaagttctacggctttgacacgtatctcaagtacgacgagaaaaacgtcaagagaccatttgatctcacgatcaccgccaaaggaggaccaaatatcatcctctatcgtcgctggttgaacctgaggaaccacaaccatcagcgcattacaagaatcattcgatgtctgcgactctttcatctgaacgatattgctgttgaagtctgcaacgcatttgtttatgtcgatgaaatgttcgatcgggtccacaagagcacaattgcattctggaaaagagctgcgacgctgccactggaggactgcccagatggtaacaaagtagagtggttagccgaatacaatgtaccggcaacagaacattagtcgcattgtctggacatgctaatccatcagaggacatgaagcggttttcaagtagctggagagttgttcgctaacccgccaagagcattcagtctataaggaagtgcaggtaccagggacccgggcgagagaaaaaaaaaaagatagatcagaataattaaacgacagactcatggcaatgaaattcgtttgacatcattttgttatgaagtcttctggctgcacttaggcttgagattgaaaacacgctacaggtaccattaaataatagctctattgaatcgcactgagagaattgactgcagtcactgctcagacacgtctgccatcaaccaagtgatcgcctgaccagctcaggctttaagtcaggcggtcggtctcaacttcg

SEQ ID NO: 16521 - DNA, 1533 bp, Muscodor strobelii
  misc_feature: SGI cDNA ID NO. 565497
  misc_feature: Encodes the peptide sequence at SEQ ID NO 16522
atgattgcttgggctttcttgccaaagtactccttaatatatgccattgttacgcttgtcgggtgcacagtctttcttgagtactggaagatactgcaagcggatctcagcattcggtggaacgtcaagggggtcgcagcactcaaagcaaatcgtcctaagtatcactacgagaaggtcactatcgattcagccggaaggacgaagcattattatcccaaatggaagtcctttgctcggcaaagtctacagatcccctttttcgccctttgtcttgcaacgcttggcctcatcatcacgggtgtctttgccatggagattttagtctcggaagcttaccagggacctcatcaatcatatctagaatatgttccgaccttgctgttggccatagcgttgccatatatgaactcgttcctggaggattctgcatcgtggctagctgagttcgagaatcatcgcacgtcggattattacgagatgtctgtgacacagaaactattcgtactcagtttcatcgtcaactatcttccgattcttcttactgcatttgtctacgtccctctaggcaatcagattgtaccatggttaggatcacaacttccgggacgcctcggtgccaacttagatcgagactttttccagagagatcctgacaggctacgcaacgaagtcatcgctttaacacttaccggacaactatcggatatgttcgaggagatggttgtgccgtacgttctgcaccggctccgggcttggtatcatgcctggaaattttaccgatcccaccagacatcgttcaatgctgtctcaccagatgaccccatggagaaatcattcctgcgaagggttcgacggcaggcaagcctgcctaagtacaatgttcaagatgatatatcggagatggtcattcaatttggttatctagctctcttctcgcctgtttggcctctggtgtcaatcgggtttttcgtcaacaattgtatcgagctccggaccgatttcctgaagatctgcattgaacatcaacgcccacatgctgctagaactgatggtatcggcccttggatacactcgctggatgcacttacgtggctcggtagtatctcaacagcggcaattgtacatatgttcggcaccgagacaagccggagcgacactctccttggccgcgcattgggtggagcttcatggtggacactccctatcaccatatttgtgagtgaacacatttttcttgttctgcgcgcagttgtccgtatggtgttgcagagcattggctccgaggaggtacgaaaagagcgcaacgaacgatatacgagacggcgaaagtatatggacgagctcgaggccgcggaccgcgcaaaacagatgttggatgtcggcgccgttcagcgccgcaagtcagtccgcatggctgattctgacatcttctggacgaagcaagtcgagcatggtgctagtgcagaagctggggtcgcactgatcaaagccctagcacgagcacccaagtccagcaagaagaacttataa

SEQ ID NO: 16522 - protein, 510 aa, Muscodor strobelii
  misc_feature: SGI Peptide ID NO. 565497
  misc_feature (227)..(445): Pfam Id: PF04547 Pfam Desc: Domain of function, DUF590
  misc_feature (301)..(377): Pfam Id: PF04547 Pfam Desc: Domain of function, DUF590
  misc_feature (1)..(497): NCBI GI: 261354125 Blast Desc: conserved [Verticillium albo-atrum VaMs.102]
  misc_feature (1)..(502): NCBI GI: 189207058 Blast Desc: conserved [Pyrenophora tritici-repentis Pt-1C-BFP] gi|187975956|gb|EDU42582.1| conserved [Pyrenophora tritici-repentis Pt-1C-BFP]
  misc_feature (1)..(509): NCBI GI: 256723478 Blast Desc: NECHADRAFT_69814 [Nectria haematococca mpVI 77-13-4]
  misc_feature (3)..(506): NCBI GI: 46116248 Blast Desc: FG03966.1 [Gibberella zeae PH-1]
  misc_feature (1)..(499): NCBI GI: 145611005 Blast Desc: MGG_00720 [Magnaporthe grisea 70-15] gi|145018348|gb|EDK02627.1| MGG_00720 [Magnaporthe grisea 70-15]
  misc_feature (27)..(486): NCBI GI: 116208634 Blast Desc: CHGG_03610 [Chaetomium globosum CBS 148.51] gi|88184207|gb|EAQ91675.1| CHGG_03610 [Chaetomium globosum CBS 148.51]
  misc_feature (3)..(510): NCBI GI: 258578203 Blast Desc: conserved [Uncinocarpus reesii 1704] gi|237903549|gb|EEP77950.1| conserved [Uncinocarpus reesii 1704]
  misc_feature (3)..(509): NCBI GI: 119180534 Blast Desc: CIMG_08891 [Coccidioides immitis RS]
  misc_feature (3)..(509): NCBI GI: 145249176 Blast Desc: An14g03020 [Aspergillus niger] gi|134081605|emb|CAK46539.1| protein product [Aspergillus niger]
  misc_feature (3)..(509): NCBI GI: 240110371 Blast Desc: CPC735_064030 [Coccidioides posadasii C735 delta SOWgp]
MIAWAFLPKYSLIYAIVTLVGCTVFLEYWKILQADLSIRWNVKGVAALKANRPKYHYEKVTIDSAGRTKHYYPKWKSFARQSLQIPFFALCLATLGLIITGVFAMEILVSEAYQGPHQSYLEYVPTLLLAIALPYMNSFLEDSASWLAEFENHRTSDYYEMSVTQKLFVLSFIVNYLPILLTAFVYVPLGNQIVPWLGSQLPGRLGANLDRDFFQRDPDRLRNEVIALTLTGQLSDMFEEMVVPYVLHRLRAWYHAWKFYRSHQTSFNAVSPDDPMEKSFLRRVRRQASLPKYNVQDDISEMVIQFGYLALFSPVWPLVSIGFFVNNCIELRTDFLKICIEHQRPHAARTDGIGPWIHSLDALTWLGSISTAAIVHMFGTETSRSDTLLGRALGGASWWTLPITIFVSEHIFLVLRAVVRMVLQSIGSEEVRKERNERYTRRRKYMDELEAADRAKQMLDVGAVQRRKSVRMADSDIFWTKQVEHGASAEAGVALIKALARAPKSSKKNL

SEQ ID NO: 16523 - DNA, 4101 bp, Muscodor strobelii; identical to SEQ ID NO: 16520
  misc_feature: SGI EST ID NO. CUFF.39184.1
  misc_feature: Variant of the nucleotide sequence at SEQ ID NO 16521

SEQ ID NO: 16524 - DNA, 612 bp, Muscodor strobelii
  misc_feature: SGI cDNA ID NO. 565498
  misc_feature: Encodes the peptide sequence at SEQ ID NO 16525
atggaagaccggttcgagttcacggtgtctcgagccgacacattccctcgccctgatgagaggactgacttgaagtatcacgacaaatacgtgatccactatgacttcagcaacgtcgatgatgaagaggcgattcgagaaattcgctgcatgtgtgagaagctgatcggagttggcttgcaagtagaagtgcgcgctggagaagatgaatcacttctcattttcgtccgagcgcccacagagcttctaagcacagaaatctacaagtcaagagtgaaagattggctctacagcatcacaaaaactcaaccccaagtcgacaagaagagtaaagtccaagctgcgagattcacattcgaagcagagagtcttctttgtgtctatcatctagtgacttggtcaaaggaaaatggcggggccggtatttcgacagaatctggtaaatggccaaacgtgaaggctatattcccgatacacaatgagccgaccaatcggcggctactaaaacatctgagcaaaaggctcttcttgactaagaatgatttggatgagatccgtgacctctttgggtccaaagtatgtaacaccagacatcagcgatcgcatgactga

SEQ ID NO: 16525 - protein, 203 aa, Muscodor strobelii
  misc_feature: SGI Peptide ID NO. 565498
  misc_feature (26)..(194): NCBI GI: 46116248 Blast Desc: FG03966.1 [Gibberella zeae PH-1]
  misc_feature (26)..(194): NCBI GI: 256723478 Blast Desc: NECHADRAFT_69814 [Nectria haematococca mpVI 77-13-4]
  misc_feature (11)..(194): NCBI GI: 189207058 Blast Desc: conserved [Pyrenophora tritici-repentis Pt-1C-BFP] gi|187975956|gb|EDU42582.1| conserved [Pyrenophora tritici-repentis Pt-1C-BFP]
  misc_feature (42)..(194): NCBI GI: 145611005 Blast Desc: MGG_00720 [Magnaporthe grisea 70-15] gi|145018348|gb|EDK02627.1| MGG_00720 [Magnaporthe grisea 70-15]
  misc_feature (26)..(193): NCBI GI: 70981909 Blast Desc: plasma membrane channel protein (Aqy1) [Aspergillus fumigatus Af293] gi|66844106|gb|EAL84445.1| plasma membrane channel protein (Aqy1), [Aspergillus fumigatus Af293]
  misc_feature (26)..(193): NCBI GI: 159122292 Blast Desc: plasma membrane channel protein Ist2, [Aspergillus fumigatus A1163]
  misc_feature (58)..(192): NCBI GI: 116208634 Blast Desc: CHGG_03610 [Chaetomium globosum CBS 148.51] gi|88184207|gb|EAQ91675.1| CHGG_03610 [Chaetomium globosum CBS 148.51]
  misc_feature (26)..(193): NCBI GI: 119487441 Blast Desc: plasma membrane channel protein Ist2, [Neosartorya fischeri NRRL 181] gi|119410670|gb|EAW20616.1| plasma membrane channel protein Ist2, [Neosartorya fischeri NRRL 181]
  misc_feature (18)..(193): NCBI GI: 255933634 Blast Desc: Pc12g13900 [Penicillium chrysogenum Wisconsin 54-1255] gi|211582815|emb|CAP81017.1| Pc12g13900 [Penicillium chrysogenum Wisconsin 54-1255]
  misc_feature (26)..(193): NCBI GI: 242815267 Blast Desc: plasma membrane channel protein (Aqy1), [Talaromyces stipitatus ATCC 10500] gi|218714875|gb|EED14298.1| plasma membrane channel protein (Aqy1), [Talaromyces stipitatus ATCC
MEDRFEFTVSRADTFPRPDERTDLKYHDKYVIHYDFSNVDDEEAIREIRCMCEKLIGVGLQVEVRAGEDESLLIFVRAPTELLSTEIYKSRVKDWLYSITKTQPQVDKKSKVQAARFTFEAESLLCVYHLVTWSKENGGAGISTESGKWPNVKAIFPIHNEPTNRRLLKHLSKRLFLTKNDLDEIRDLFGSKVCNTRHQRSHD

SEQ ID NO: 16526 - DNA, 4101 bp, Muscodor strobelii; identical to SEQ ID NO: 16520
  misc_feature: SGI EST ID NO. CUFF.39184.1
  misc_feature: Variant of the nucleotide sequence at SEQ ID NO 16524

SEQ ID NO: 16527 - DNA, 732 bp, Muscodor strobelii
  misc_feature: SGI cDNA ID NO. 565499
  misc_feature: Encodes the peptide sequence at SEQ ID NO 16528
atggatgttcaacttatccttgagcctttgacacagcacagctggcaaagtctggcactgctgttggtatctccctggaatgagattcctggcaccgtaccccctcgggaggactggccatcctcgccccttctcatgatcccgattgtcattccgctacctcccaccaaatgggatcccaccaaaaagagcttcctatccgacaatccatcacactttcaagtcatgctctcacgagatgtacacctattctgcgactccgaatacgcgttcaatggcatatacaagacttctatcatccgagacgatgccgtttatgagtggctgctacacatctccggttttcgtcagaatgtgatggaaggactgcttgcagagactttggtcatcagaatcaaccagcttgcccgtgccgctcatgtcggaaattggatccttgctcaggcactcaacgtcaaacgcctgggtcttggtgtctctcgagagatggcgtacttgagccagagcccagtcactgagcgcattgtcgttattggcaatatccccggcaagtgggcttcgcgatgggagtcgttcgatgttgatagacacatacgaagattgcagagacggattggtgcaccagtcactgaggttcactggttcaagattatgctgtttttcggtttcaggcgacaccgtgcattagattttgtcaaatcgatctgggggttcaaacaaccgcaaggctga

SEQ ID NO: 16528 - protein, 243 aa, Muscodor strobelii
  misc_feature: SGI Peptide ID NO. 565499
MDVQLILEPLTQHSWQSLALLLVSPWNEIPGTVPPREDWPSSPLLMIPIVIPLPPTKWDPTKKSFLSDNPSHFQVMLSRDVHLFCDSEYAFNGIYKTSIIRDDAVYEWLLHISGFRQNVMEGLLAETLVIRINQLARAAHVGNWILAQALNVKRLGLGVSREMAYLSQSPVTERIVVIGNIPGKWASRWESFDVDRHIRRLQRRIGAPVTEVHWFKIMLFFGFRRHRALDFVKSIWGFKQPQG

SEQ ID NO: 16529 - DNA, 933 bp, Muscodor strobelii
  misc_feature: SGI cDNA ID NO. 565500
  misc_feature: Encodes the peptide sequence at SEQ ID NO 16530
atgccggactcaccatatccatcaattgacggaggcgcgggagacatcgcgcttgacggagtacatgagtatactctagacgagcttttcaacatgcgatttgttgtggatcctcgaacgcaagggccgcgctcggctgataaagtgcaagtccttgctcttggtcttccgcgttgcgccaccagctctttggaagcagctttgaagtctgagtacatcgactgcaagccagtcatgcacatgggtcaaatacttccggtgcctaaagttagccagatggtcctgaatgcctttcgagagacagacaagacaaagcgacaggcaatcttgcacacactgttcgatgactatgccgcaatcactgacttaccagcatgtgcatttgctgaagacttgctggaaatgtatcccgatgcccatgtaattctgaacatgcgccaagatgctgctgaatgggccaattccatccgcgacacactcctgttcttcagctctctccgctatgctatatgcaccatcttcgtcgagtctgaccgtaatcatattgccatgcacaaggaagcctttgcacttgctcagcgcaaactcggaggcccagcaggtcgccccaaagatcttcaaactctcgtgacctggtataacgagcattacacattccttcgtgccctctgtcgcgagagcggtcgttctttcatcgagtggaagccccaggacggctggaacaacctctgcgaattcctgggcaagttcactccggatactcgtacccagcccttcccgcacctcaacaaaaagagcgagatccgagcgctgcaacgtattctcgtcatacgcggcttacaacgctgggttatgggatttctgcttctttcagccgccgtttttgctgcctgggcaatttgggcccgtgtagcaggtcttacggtcatttag

SEQ ID NO: 16530 - protein, 310 aa, Muscodor strobelii
  misc_feature: SGI Peptide ID NO. 565500
  misc_feature (32)..(304): NCBI GI: 256725018 Blast Desc: NECHADRAFT_77088 [Nectria haematococca mpVI 77-13-4]
  misc_feature (32)..(301): NCBI GI: 256728311 Blast Desc: NECHADRAFT_53787 [Nectria haematococca mpVI 77-13-4]
  misc_feature (32)..(298): NCBI GI: 255945473 Blast Desc: Pc20g10100 [Penicillium chrysogenum Wisconsin 54-1255] gi|211588239|emb|CAP86339.1| Pc20g10100 [Penicillium chrysogenum Wisconsin 54-1255]
  misc_feature (32)..(291): NCBI GI: 46114848 Blast Desc: FG03266.1 [Gibberella zeae PH-1]
  misc_feature (48)..(301): NCBI GI: 238488751 Blast Desc: NAD dependent epimerase/dehydratase, [Aspergillus flavus NRRL3357] gi|220698001|gb|EED54341.1| NAD dependent epimerase/dehydratase, [Aspergillus flavus NRRL3357]
  misc_feature (43)..(282): NCBI GI: 145247056 Blast Desc: An12g07240 [Aspergillus niger] gi|134080504|emb|CAK46352.1| protein product [Aspergillus niger]
  misc_feature (40)..(295): NCBI GI: 119501485 Blast Desc: NFIA_044210 [Neosartorya fischeri NRRL 181] gi|119415665|gb|EAW25602.1| conserved [Neosartorya fischeri NRRL 181]
  misc_feature (51)..(275): NCBI GI: 256048394 Blast Desc: [Schistosoma mansoni] gi|227280639|emb|CAY19034.1| [Schistosoma mansoni]
  misc_feature (51)..(275): NCBI GI: 256052831 Blast Desc: NAD dependent epimerase/dehydratase [Schistosoma mansoni] gi|227284710|emb|CAY17491.1| NAD dependent epimerase/dehydratase, [Schistosoma mansoni]
  misc_feature (40)..(296): NCBI GI: 67904442 Blast Desc: AN9208.2 [Aspergillus nidulans FGSC A4] gi|40742309|gb|EAA61499.1| AN9208.2 [Aspergillus nidulans FGSC A4] gi|259485362|tpe|CBF82322.1| TPA: conserved [Aspergillus FGSC
MPDSPYPSIDGGAGDIALDGVHEYTLDELFNMRFVVDPRTQGPRSADKVQVLALGLPRCATSSLEAALKSEYIDCKPVMHMGQILPVPKVSQMVLNAFRETDKTKRQAILHTLFDDYAAITDLPACAFAEDLLEMYPDAHVILNMRQDAAEWANSIRDTLLFFSSLRYAICTIFVESDRNHIAMHKEAFALAQRKLGGPAGRPKDLQTLVTWYNEHYTFLRALCRESGRSFIEWKPQDGWNNLCEFLGKFTPDTRTQPFPHLNKKSEIRALQRILVIRGLQRWVMGFLLLSAAVFAAWAIWARVAGLTVI

SEQ ID NO: 16531 - DNA, 1644 bp, Muscodor strobelii
  misc_feature: SGI cDNA ID NO. 565501
  misc_feature: Encodes the peptide sequence at SEQ ID NO 16532
atggccgagccgaatgcagcggcagtctctgcaatttcccctaaagccagagagataaatttcagtagtattgcctatcagaagaaactagggtggttccaggatctgcgccagctctttcgaaaatggtttcgcttcgatatccttcggctagctgtggcagcgatgctactcagaagtgccataccaaagatctttgaatggcaagaattcaaatccgagctaagaaaacacattttgccaattttctcaagccgtgtttccatttctggccaagacaaactcaacgagcatgtgttacactggattataacgaacgataagttccggtctcgcaatcttgccgcacaatgcgaagcgcactggtcaatcggctttaatgcgtacaagacaacaaagctcgaaggcatgaaggaggaacatacctcgaaggaaacaatatcctacacacctacttttgggacaatttgcttccggcacaacggcaactactttatcatatatagaacaccagtctcacaaggtgggcttcctccggacccccatggagtgccgacgggaagagaggatcttgtaatcaattgcctaggctggtccacagagccaatcaagagatttctcaaaacatgccaagattatgtcgaggaggacaagcagcattttctcaagatcagcgacacagtgacgattggtagtgaggcttatattcgaaatcaagatcccaaggccctacgaggactagaaagtgtgcactttgatggagaggtgaagacggatcttgtcaaggatatggaaatgtatttgtcagagcgacgcagaaattattacaagacacgaaacattccttatcggcgaggatatctattttatgggccgccggggacgggcaaaacttcgctgtgttctgctctcgcaagtcacttcaagcttgaacttttcgtcgtccaccttccagacgtcgccggcgacggaatgttacggcaatacttttctatgcttccagatcgatgccttgttattatagaagacatcgatgctgttggtttgaataatagagatgcaaatgggggccagaaaaaagaacctggatccaatgacaatcaaccgaagtgcacgctatcgggcctcctcaacgcgctagacggagccagctcgcaggaaggtcgcatagttatcatgacgacgaatcatattgagtcacttgatccagctcttgtccgcccaggacgtgtagacaagaaagtttatctcggaaaactgaagaaacccgctgcaaaggagctttttattcgaatgtatataactgatgaggaaatgaagatgaaaagggaagcagggacacttttgagattcgatagtactgatcttttcgatgaggagctcgagtcacaggcagatgagttctgccgggttcttaaagaagaggagttcacgcctgctcagatacaagggtacctcttagaacatcccgcatcgcctgccgacgcgattgcgggattcgaggagtggatgagaaacgagcctagtgaagtcaagaaacgtgcggccctggatgcagatatactggaacgggagaaagcggcagggccagtttcgtctggcattcctccacctggtatggtaccagtcgtagctcaagcctag

SEQ ID NO: 16532 - protein, 547 aa, Muscodor strobelii
  misc_feature: SGI Peptide ID NO. 565501
  misc_feature (286)..(496): Pfam Id: PF00004 Pfam Desc: ATPase family associated with various cellular activities (AAA)
  misc_feature (49)..(250): Pfam Id: PF08740 Pfam Desc: BCS1 N terminal
  misc_feature (286)..(418): Pfam Id: PF00004 Pfam Desc: ATPase family associated with various cellular activities (AAA)
  misc_feature (49)..(216): Pfam Id: PF08740 Pfam Desc: BCS1 N terminal
  misc_feature (27)..(507): NCBI GI: 116191483 Blast Desc: CHGG_05459 [Chaetomium globosum CBS 148.51] gi|88181372|gb|EAQ88840.1| CHGG_05459 [Chaetomium globosum CBS 148.51]
  misc_feature (36)..(507): NCBI GI: 46110661 Blast Desc: FG02212.1 [Gibberella zeae PH-1]
  misc_feature (39)..(507): NCBI GI: 39941778 Blast Desc: MGG_10738 [Magnaporthe grisea 70-15] gi|145012189|gb|EDJ96845.1| MGG_10738 [Magnaporthe grisea 70-15]
  misc_feature (68)..(507): NCBI GI: 212536558 Blast Desc: mitochondrial chaperone bcs1, [Penicillium marneffei ATCC 18224] gi|210070834|gb|EEA24924.1| mitochondrial chaperone bcs1, [Penicillium marneffei ATCC 18224]
  misc_feature (36)..(507): NCBI GI: 261360566 Blast Desc: mitochondrial chaperone BCS1 [Verticillium albo-atrum VaMs.102]
  misc_feature (42)..(507): NCBI GI: 256724970 Blast Desc: [Nectria haematococca mpVI 77-13-4]
  misc_feature (33)..(507): NCBI GI: 242796075 Blast Desc: metalloprotease m41 ftsh, [Talaromyces stipitatus ATCC 10500] gi|218719311|gb|EED18731.1| metalloprotease m41 ftsh, [Talaromyces stipitatus ATCC 10500]
  misc_feature (144)..(524): NCBI GI: 242816199 Blast Desc: metalloprotease m41 ftsh, [Talaromyces stipitatus ATCC 10500] gi|218715063|gb|EED14486.1| metalloprotease m41 ftsh, [Talaromyces stipitatus ATCC 10500]
  misc_feature (161)..(504): NCBI GI: 154287822 Blast Desc: [Ajellomyces capsulatus NAm1] gi|150408347|gb|EDN03888.1| [Ajellomyces capsulatus NAm1]
  misc_feature (33)..(504): NCBI GI: 164426614 Blast Desc: NCU03921 [Neurospora crassa OR74A] gi|157071407|gb|EAA28324.2| conserved [Neurospora crassa OR74A]
MAEPNAAAVSAISPKAREINFSSIAYQKKLGWFQDLRQLFRKWFRFDILRLAVAAMLLRSAIPKIFEWQEFKSELRKHILPIFSSRVSISGQDKLNEHVLHWIITNDKFRSRNLAAQCEAHWSIGFNAYKTTKLEGMKEEHTSKETISYTPTFGTICFRHNGNYFIIYRTPVSQGGLPPDPHGVPTGREDLVINCLGWSTEPIKRFLKTCQDYVEEDKQHFLKISDTVTIGSEAYIRNQDPKALRGLESVHFDGEVKTDLVKDMEMYLSERRRNYYKTRNIPYRRGYLFYGPPGTGKTSLCSALASHFKLELFVVHLPDVAGDGMLRQYFSMLPDRCLVIIEDIDAVGLNNRDANGGQKKEPGSNDNQPKCTLSGLLNALDGASSQEGRIVIMTTNHIESLDPALVRPGRVDKKVYLGKLKKPAAKELFIRMYITDEEMKMKREAGTLLRFDSTDLFDEELESQADEFCRVLKEEEFTPAQIQGYLLEHPASPADAIAGFEEWMRNEPSEVKKRAALDADILEREKAAGPVSSGIPPPGMVPVVAQA

SEQ ID NO: 16533 - DNA, 408 bp, Muscodor strobelii
  misc_feature: SGI cDNA ID NO. 565502
  misc_feature: Encodes the peptide sequence at SEQ ID NO 16534
atggcctatcgcaaccatcctaccgagccccaccttgacgatctagagctggcgctagatgtcatcaggtggaccgaggacgactacatgacaacaatgaatgatctagtcgatctaatcgtgactctgactagccaaggtgactttgtcgaggacttgacgttcgcctgccagcgtctagaggactccaggaatgcattcatggcgacatggctcggctacgctagccatcttgctgctggacaaagtgtggcatgccctgagatctcggccatgcacccagtcataaacgactgcgtggccaacgtcatggctgccatcgcagaggcaataggtattatggaccgcacagttgaattcatcgatgacaataacgtcgatgatgacacggaggacgacatatactaa

SEQ ID NO: 16534 - protein, 135 aa, Muscodor strobelii
  misc_feature: SGI Peptide ID NO. 565502
MAYRNHPTEPHLDDLELALDVIRWTEDDYMTTMNDLVDLIVTLTSQGDFVEDLTFACQRLEDSRNAFMATWLGYASHLAAGQSVACPEISAMHPVINDCVANVMAAIAEAIGIMDRTVEFIDDNNVDDDTEDDIY

SEQ ID NO: 16535 - DNA, 1242 bp, Muscodor strobelii
  misc_feature: SGI cDNA ID NO. 565503
  misc_feature: Encodes the peptide sequence at SEQ ID NO 16536
atgacttccgacccaacgaaacctcgcgtcctgattgttggcgccggcataggcggcttgacgcttgcccagtgtctgcgaaaacaaggcatcccatttcaagtatttgatcgggatcacaatctcgatgatcgacaaggatgggctataggtgtccactcgattattcatgatattacgacgtcattctgcgacgatatgccagacatcaagtctgcagaccacctggctcctctgaagttggaagcgcaaattgtgctgtactatcagaaccagcggcgtgcagtacagaacacgcctgacactccatgcatgcgccttaaccgtctcaaaatgagaagctggcttgcaacccacatcgatgtccaatggagcaaaagagttgtcaaagttgaggagaatgagaatgaggttaagttgcacttcgaggatggcgccagcgcgacgggcgacatattagtaggggcagacggtgtgaatagtgtcgtgagagagcatttgcttggtcgtccaaaccaagaggtgcttcacttgaacaagcttgctagtgtatggggcgaaacaaccctttccggcgaggcaatggaacgtcagctatcacttggtcacagcgcatatgcaacaacgtcgatgaactctgtctattcgttctttgtcggtctcaagaaaatcaacgaagacttcagcgcggatttttattggtacctttcttggcccgacgaggcggtcgggcagccagatcactggcttaacagtgcaacgaaggccgataagcacaagcgcttacacggaattatcgaacaattcgatccgaaattccgggaagtattggagctgaccccggtcgaccgtatccttcctggggtatggctttcccgagatggcgaagtgcctccatttccggtacagagtacggtcttgcttggcgatgctgcgcatccaatgactcctttccgaggtgaagggggtatgcatgcgattcgtgacgcactgaacttatctcgggcgctaggtcaattcagtgcggcggaaccggcgaagaacgagcggcttctgaagtcataccaggaagagtcgctacagcgaggagcgaaagccatgatgttgtcgagaaacgcatggaaaaacaatgctcaagcaggggcgacgatcatagcttggggccacgaggccaaaccggctgccgaagaagtggtacgcctggacaacgttcggcctcagactctcactgcgtcaacatga

SEQ ID NO: 16536 - protein, 413 aa, Muscodor strobelii
  misc_feature: SGI Peptide ID NO. 565503
  misc_feature (7)..(370): Pfam Id: PF01494 Pfam Desc: FAD binding domain
  misc_feature (307)..(370): Pfam Id: PF01494 Pfam Desc: FAD binding domain
  misc_feature (7)..(31): Pfam Id: PF01494 Pfam Desc: FAD binding domain
  misc_feature (10)..(401): NCBI GI: 189196474 Blast Desc: conserved [Pyrenophora tritici-repentis Pt-1C-BFP] gi|187980454|gb|EDU47080.1| conserved [Pyrenophora tritici-repentis Pt-1C-BFP]
  misc_feature (1)..(393): NCBI GI: 242763238 Blast Desc: monoxygenase, [Talaromyces stipitatus ATCC 10500] gi|218723731|gb|EED23148.1| monoxygenase, [Talaromyces stipitatus ATCC 10500]
  misc_feature (67)..(401): NCBI GI: 171680486 Blast Desc: protein product [Podospora anserina] gi|170939870|emb|CAP65096.1| protein product [Podospora anserina]
  misc_feature (10)..(398): NCBI GI: 164423615 Blast Desc: NCU11090 [Neurospora crassa OR74A] gi|157070167|gb|EDO64978.1| [Neurospora crassa OR74A]
  misc_feature (67)..(398): NCBI GI: 169615485 Blast Desc: SNOG_10900 [Phaeosphaeria nodorum SN15] gi|160702972|gb|EAT81399.2| SNOG_10900 [Phaeosphaeria nodorum SN15]
  misc_feature (1)..(373): NCBI GI: 242811854 Blast Desc: FAD binding domain protein [Talaromyces stipitatus ATCC 10500] gi|218714176|gb|EED13599.1| FAD binding domain protein [Talaromyces stipitatus ATCC 10500]
  misc_feature (1)..(373): NCBI GI: 212544246 Blast Desc: FAD binding domain protein [Penicillium marneffei ATCC 18224] gi|210065246|gb|EEA19340.1| FAD binding domain protein [Penicillium marneffei ATCC 18224]
  misc_feature (10)..(373): NCBI GI: 119467073 Blast Desc: FAD binding domain protein [Neosartorya fischeri NRRL 181] gi|119405495|gb|EAW15446.1| FAD binding domain protein [Neosartorya fischeri NRRL 181]
  misc_feature (10)..(373): NCBI GI: 255953751 Blast Desc: Pc21g05830 [Penicillium chrysogenum Wisconsin 54-1255] gi|211589339|emb|CAP95480.1| Pc21g05830 [Penicillium chrysogenum Wisconsin 54-1255]
  misc_feature (10)..(376): NCBI GI: 238507469 Blast Desc: monooxygenase, [Aspergillus flavus NRRL3357] gi|220689649|gb|EED46000.1| monooxygenase, [Aspergillus flavus NRRL3357]
  misc_feature (7)..(373): SWISSPROT Homolog: EC 1.14.13.90 Zeaxanthin epoxidase
MTSDPTKPRVLIVGAGIGGLTLAQCLRKQGIPFQVFDRDHNLDDRQGWAIGVHSIIHDITTSFCDDMPDIKSADHLAPLKLEAQIVLYYQNQRRAVQNTPDTPCMRLNRLKMRSWLATHIDVQWSKRVVKVEENENEVKLHFEDGASATGDILVGADGVNSVVREHLLGRPNQEVLHLNKLASVWGETTLSGEAMERQLSLGHSAYATTSMNSVYSFFVGLKKINEDFSADFYWYLSWPDEAVGQPDHWLNSATKADKHKRLHGIIEQFDPKFREVLELTPVDRILPGVWLSRDGEVPPFPVQSTVLLGDAAHPMTPFRGEGGMHAIRDALNLSRALGQFSAAEPAKNERLLKSYQEESLQRGAKAMMLSRNAWKNNAQAGATIIAWGHEAKPAAEEVVRLDNVRPQTLTAST

SEQ ID NO: 16537 - DNA, 3361 bp, Muscodor strobelii
  misc_feature: SGI EST ID NO. CUFF.39125.0
  misc_feature: Variant of the nucleotide sequence at SEQ ID NO 16535
cagaacccccatatcgtggatattgaatcattcgttaacacgtgcaaactcccaatcaccaaacaagaaatcacatcattttcattgctttgattaaacagcagactgtcatgcaagccctcgtcctcaacatcatagattttcttcccgttcgattggtgcgtgtcttcatctagataatggccttctggtcacgccgaagaatgaatccacaacttgcagtgttcatcctcaagtcctcaataccatcattctttgcagagtctactcattgtctgcgagatcgctgttataaggcagcgaagatcagatcttgcttgcttgcactgcggtgacttcttgcctgttgtaagctattccttgcaacaatgacgctcgctagtgcaggccacttcagtttctgaaattgatgctaaggatatgtagcattgtgttatttgtttatttattctgcactatcctgatattcattcacacccctttgacgttgtaggtcctacaggttttgtgtagccatgcaggtgtatgcagttcgcaaagagtgtaattatggattatcggatagctgttatgtgcgttgtgcgaggacaataataggaagaagagctatcgcatggggtcgagggtcgtgcttggggtctctcttactcgcaacaatgtggacgtaagatataacttttccagattccggacgcacccttaggcaaccgagacagccgccaccaacgagatcgatatagaacgaagtgacaacgttgatatatgtacaggcatcaggtactcagactcttgtgaagagtgagtcgaagcctttagacgtcaactctcgcacggtgaagagctgacgctgatgcagcagcatcaatcagtagctgatcaactgtatgccggaacgcgagatccgtgttcatcaaaaccaagcgatgcggtaatcataaatccgacgtcattatccgccagctggatacacattggatcgtttgtgtataaactttggtgcgcgttagttcatccggggcgcgatgcggggcggatctccgagtgaattgccttcgcgccaatcgcctatgacagaatcgtgccagatggactggggttgaatgtaacgtgagtgactgaggtaggctggtcgaataaggtatccgaaagctggggtcagggtggttttgtatgctacctgctccggacaaggattcggccgagcttgtgcgtagcgaaactttctccccggccacggctggtgtgcttgcgaccgcgcgacttgccagtactcttcaatctccgagattagtctgttttcaccttattctgacgcaacgacccaaaaatccgatgaggcctttgtgcggcccttcgtatcagacgcgacgccgaggcccccgagtacgaaaggtgttataagaacacacgaaatcatctcaagcaacacaaccttgaagaaacgatcacatctaattcctcaagaaatcatagtattgcaacgtgaaaaacgccatcatgacttccgacccaacgaaacctcgcgtcctgattgttggcgccggcataggcggcttgacgcttgcccagtgtctgcgaaaacaaggcatcccatttcaagtatttgatcgggatcacaatctcgatgatcgacaaggatgggctataggtgtccactcgattattcatgatattacgacgtcattctgcgacgatatgccagacatcaagtctgcagaccacctggctcctctgaagttggaagcgcaaattgtgctgtactatcagaaccagcggcgtgcagtacagaacacgcctgacactccatgcatgcgccttaaccgtctcaaaatgagaagctggcttgcaacccacatcgatgtccaatggagcaaaagagttgtcaaagttgaggagaatgagaatgaggttaagttgcacttcgaggatggcgccagcgcgacgggcgacatattagtaggggcagacggtgtgaatagtgtcggtaggtgccgtattttactgtctcagaagtccaacgcgtgattgcactattactgacagttggtagtgagagagcatttgcttggtcgtccaaaccaagaggtgcttcacttgaacaagcttgctagtgtatggggcgaaacaaccctttccggcgaggcaatggaacgtcagctatcacttggtcacagcgcatatgcaacaacgtcgatgaactctgtctattcgttctttgtcggtctcaagaaaatcaacgaagacttcagcgcggatttttattggtacctttcttggcccgacgaggcggtcgggcagccagatcactggcttaacagtgcaacgaaggccgataagcacaagcgcttacacggaattatcgaacaattcgatccgaaattccgggaagtattggagctgaccccggtcgaccgtatccttcctggggtatggctttcccgagatggcgaagtgcctccatttccggtacagagtacggtcttgcttggcgatgctgcgcatccaatgactcctttccgaggtgaagggggtatgcatgcgattcgtgacgcactgaacttatctcgggcgctaggtcaattcagtgcggcggaaccggcgaagaacgagcggcttctgaagtcataccaggaagagtcgctacagcgaggagcgaaagccatgatgttgtcgagaaacgcatggaaaaacaatgctcaagcaggggcgacgatcatagcttggggccacgaggccaaaccggctgccgaagaagtggtacgcctggacaacgttcggcctcagactctcactgcgtcaacatgaagagtatgaggtcgtaggtcgggcttcagactgagataggctttcctgcatgaagcagcattttgacgggaagttatgtctcagtttcattggactcagcttatgtcaaagaaaatcttgaccagttttatcaacagccaggggggctgtgcgcagatacagttgctgtctattcgagtgatgtagtagagtgcgatggagtttggtccctcatataatctcgggctacaatgttgattatctcagctcccaacagttgcgaccgctcagtactcgtgttgttcttacttgccaggctttgtatgagggctatgtcatcatctgcgagtgcggatgtgtagctgacaatcgcagagtgtcatgatttcgtcgagcttagcaaggagatgcccgactgtgtatgcatggatgggatgtcagtcgagcgcggtaagttgatcgctcaacgatgcgctcatagagccatctcgagaaaatatggggtaagacgcctcagtcctcacatctcaattatgtccacacgcgcattcagacttcaacttcggagaagttgtcg

SEQ ID NO: 16538 - DNA, 1053 bp, Muscodor strobelii
  misc_feature: SGI cDNA ID NO. 565504
  misc_feature: Encodes the peptide sequence at SEQ ID NO 16539
atgatgacttcgcttacaagaaaggcaaacgctcttccttcttatcagcttgcctcaagtagtattcgcgacccctcgtcgccgcctctgatccctaccgattcccagcgtccgcatgatgttcgcccgactatcctccaagctcgaaaacatcctcatgcagagcaagttgtcaagaacgtcaatgcctatttcctagagaattggccattcaagacagagaggcatcagaagcgattcgttgaagagggttatgcttggtttgtgtgtgtcaactgcccgctctctcttgatgaaagaatgcattggggctgtagactcctgacggccggattccttgtcgatgatgtcctggatcggatgtccgtcgaagaaggattcttacataactccagagtcattgagtgtgcttcaggcacacgattgccagatcccgagaatgcagccgaagtcattctctacgatcttttcgagaatatgcgcgcggtcgacaagacccttgccgctgaactcttggtgcccacaatcgacttttttcgagcacaggcagacggtactcgaatgaagccaatgacgcttgaagaatatttcgagtaccgcgatgcagatcttgggaaaggtttactttcgggcataatgcgattctgtgcctgcctatacatgacccctgaagagctcgagctggtcaagcctgttgaagagaatgcaatgaagcatatcactttcgtgaacgatgtgtgtagttatgagaaggaggtcttggcggcacgtgagggttttgatcttggcgcaatgtgctcctcggtccccatcatgatgagactcttcggcctgaatgaaaagcgggcaaaacaactcatgtggcagactgttcgcgaatgggagactcgtcatttcgagcttgtagcagagattctccgcacaaattcaagcccaaatcttgtcagatacctgaaggggctggagcatcaaatggctggcaacgagctctggagcctgttgacacctagatataacataaccactagcatgacatttactgaagggcgttaa

SEQ ID NO: 16539 - protein, 350 aa, Muscodor strobelii
  misc_feature: SGI Peptide ID NO. 565504
  misc_feature (20)..(350): NCBI GI: 169603596 Blast Desc: SNOG_04807 [Phaeosphaeria nodorum SN15] gi|111066078|gb|EAT87198.1| SNOG_04807 [Phaeosphaeria nodorum SN15]
  misc_feature (43)..(342): NCBI GI: 126030360 Blast Desc: SNOG_04807 [Phaeosphaeria nodorum SN15] gi|111066078|gb|EAT87198.1| SNOG_04807 [Phaeosphaeria nodorum SN15]
  misc_feature (43)..(340): NCBI GI: 169782654 Blast Desc: [Aspergillus oryzae RIB40] gi|83774533|dbj|BAE64656.1| protein product [Aspergillus oryzae]
  misc_feature (22)..(339): NCBI GI: 416643 Blast Desc: ARIS_PENRO RecName: Full=Aristolochene synthase; Short=AS; AltName: Full=Sesquiterpene cyclase gi|169178|gb|AAA33694.1| aristolochene synthase [Penicillium
  misc_feature (43)..(339): NCBI GI: 255931833 Blast Desc: Pc12g06310 [Penicillium chrysogenum Wisconsin 54-1255] gi|211582092|emb|CAP80258.1| Pc12g06310 [Penicillium chrysogenum Wisconsin 54-1255]
  misc_feature (46)..(338): NCBI GI: 171677181 Blast Desc: protein product [Podospora anserina] gi|170936658|emb|CAP61317.1| protein product [Podospora anserina]
  misc_feature (43)..(335): NCBI GI: 10120633 Blast Desc: protein product [Podospora anserina] gi|170936658|emb|CAP61317.1| protein product [Podospora anserina]
  misc_feature (51)..(329): NCBI GI: 224589059 Blast Desc: FPP cyclase [Penicillium expansum]
  misc_feature (51)..(338): NCBI GI: 121712471 Blast Desc: terpene synthase metal binding domain protein [Aspergillus clavatus NRRL 1] gi|119401999|gb|EAW12421.1| terpene synthase metal binding domain protein [Aspergillus clavatus NRRL
  misc_feature (51)..(338): NCBI GI: 67525639 Blast Desc: AN3277.2 [Aspergillus nidulans FGSC A4] gi|40744065|gb|EAA63245.1| AN3277.2 [Aspergillus nidulans FGSC A4] gi|259485756|tpe|CBF83046.1| TPA: conserved [Aspergillus FGSC
  misc_feature (22)..(339): SWISSPROT Homolog: EC 4.2.3.9 Aristolochene synthase
MMTSLTRKANALPSYQLASSSIRDPSSPPLIPTDSQRPHDVRPTILQARKHPHAEQVVKNVNAYFLENWPFKTERHQKRFVEEGYAWFVCVNCPLSLDERMHWGCRLLTAGFLVDDVLDRMSVEEGFLHNSRVIECASGTRLPDPENAAEVILYDLFENMRAVDKTLAAELLVPTIDFFRAQADGTRMKPMTLEEYFEYRDADLGKGLLSGIMRFCACLYMTPEELELVKPVEENAMKHITFVNDVCSYEKEVLAAREGFDLGAMCSSVPIMMRLFGLNEKRAKQLMWQTVREWETRHFELVAEILRTNSSPNLVRYLKGLEHQMAGNELWSLLTPRYNITTSMTFTEGR

SEQ ID NO: 16540 - DNA, 1434 bp, Muscodor strobelii
  misc_feature: SGI cDNA ID NO. 565505
  misc_feature: Encodes the peptide sequence at SEQ ID NO 16541
atgcagcattctaccatccatatcgctttaatcgtcttcttcacgactgttaaaagacatgaaccccaaacgagtctagatacacaagtgcgcaaaagactgaagagcctaggcgacgtggtccgtatcagcccgaatgagctttctttctgcacagcaagtgcatggagtgatatatacacgccaaatcataaaggggtgtcgaaggtcccgaaaaatgaattctatcaggttttcggtctgggctttgagcatcagtcgatcggtacagagcgagatccatctgttgctcatgacaagcgagcgttgttctcacaggcattctctgctaaggctttagcggaacaagaacccgtaatgcagaaaaacgtcgatgcatttatcggaaaactaggaaaattgggcgacaccgagaagggcattgacatgacgaaatggttcatctacatcgggttcgacattttgggcgaaatggcatttggagagtcttttggatgcgttgatcgagagggctcacatccctggctcgatgttatactgggactacttcgtgtcactacaatcatggataacctacgtcgatatccattgctcgttcgcgcggcgggttggatcccctctaaatggacggtgggatttcgaaacagcatgatcggctatgcgcaaatacagaccagagcgcaagtgtcctgcaaacagatcacgcatggcaatcaaggtgactttgtcgacgtcgtggcagagaaagtcctggcagggaagatcgaactggaagaaatggaggctcatgcatggaatcttgccatggcaggaggcgaaacaaccggatcgtctatggcatcgattctctacttcatcttgaaagacccaatggtataccaaaagctgaacgacgaagtccgttctgcgtttgatgactacgaggaaattacagtcgccaccgttaacagactatcgtatctcatggctgtactgaaagaggggttgcgtatcttcccgacagctccacaaggcacgccgcgcaaatcacccggtattatggtagacggacaccttgtaccggacggtacggagttgtacgtctcaccatgggcagctacgcataataagcgcttttggaaagagccctatgtttttcgacctgagagatggacggatccagactgcactgacctcaaggccgccagccagccgttttcggtcggcccacgcgcatgcccaggaaagctatttgcctacgccaagatgtcgttgcaacttgccaagatggtgtacacgtacgatatggagcttatcgaccccgatcttgactggattaatgcttgtcaaatgcattttctgtggtggaaaccggagctgtatgtgagattcaaattttcacgcattttgaattcctcgactatggaatgcatgataacatctaatgacgattga

SEQ ID NO: 16541 - protein, 477 aa, Muscodor strobelii
  misc_feature: SGI Peptide ID NO. 565505
  misc_feature (1)..(457): Pfam Id: PF00067 Pfam Desc: Cytochrome P450
  misc_feature (258)..(457): Pfam Id: PF00067 Pfam Desc: Cytochrome P450
  misc_feature (37)..(457): NCBI GI: 238492291 Blast Desc: cytochrome P450, [Aspergillus flavus NRRL3357] gi|220695876|gb|EED52218.1| cytochrome P450, [Aspergillus flavus NRRL3357]
  misc_feature (38)..(457): NCBI GI: 255931847 Blast Desc: Pc12g06380 [Penicillium chrysogenum Wisconsin 54-1255] gi|211582099|emb|CAP80265.1| Pc12g06380 [Penicillium chrysogenum Wisconsin 54-1255]
  misc_feature (25)..(461): NCBI GI: 259485752 Blast Desc: TPA: cytochrome P450, (Eurofung) [Aspergillus nidulans FGSC A4]
  misc_feature (20)..(457): NCBI GI: 188596513 Blast Desc: BCL4p [Botryotinia fuckeliana]
  misc_feature (37)..(457): NCBI GI: 169782646 Blast Desc: [Aspergillus oryzae RIB40] gi|83774529|dbj|BAE64652.1| protein product [Aspergillus oryzae]
  misc_feature (25)..(461): NCBI GI: 121712479 Blast Desc: benzoate 4-monooxygenase cytochrome P450 [Aspergillus clavatus NRRL 1] gi|119402003|gb|EAW12425.1| benzoate 4-monooxygenase cytochrome P450 [Aspergillus clavatus NRRL 1]
  misc_feature (25)..(466): NCBI GI: 67525647 Blast Desc: AN3281.2 [Aspergillus nidulans FGSC A4] gi|40744069|gb|EAA63249.1| AN3281.2 [Aspergillus nidulans FGSC A4]
  misc_feature (38)..(453): NCBI GI: 259485758 Blast Desc: TPA: cytochrome P450, (Eurofung) [Aspergillus nidulans FGSC A4]
  misc_feature (38)..(453): NCBI GI: 121712467 Blast Desc: benzoate 4-monooxygenase cytochrome P450 [Aspergillus clavatus NRRL 1] gi|119401997|gb|EAW12419.1| benzoate 4-monooxygenase cytochrome P450 [Aspergillus clavatus NRRL 1]
  misc_feature (35)..(458): NCBI GI: 156054726 Blast Desc: SS1G_06211 [Sclerotinia sclerotiorum 1980] gi|154703991|gb|EDO03730.1| SS1G_06211 [Sclerotinia sclerotiorum 1980]
  misc_feature (35)..(431): SWISSPROT Homolog: EC 1.14.13.12 Benzoate 4-monooxygenase
MQHSTIHIALIVFFTTVKRHEPQTSLDTQVRKRLKSLGDVVRISPNELSFCTASAWSDIYTPNHKGVSKVPKNEFYQVFGLGFEHQSIGTERDPSVAHDKRALFSQAFSAKALAEQEPVMQKNVDAFIGKLGKLGDTEKGIDMTKWFIYIGFDILGEMAFGESFGCVDREGSHPWLDVILGLLRVTTIMDNLRRYPLLVRAAGWIPSKWTVGFRNSMIGYAQIQTRAQVSCKQITHGNQGDFVDVVAEKVLAGKIELEEMEAHAWNLAMAGGETTGSSMASILYFILKDPMVYQKLNDEVRSAFDDYEEITVATVNRLSYLMAVLKEGLRIFPTAPQGTPRKSPGIMVDGHLVPDGTELYVSPWAATHNKRFWKEPYVFRPERWTDPDCTDLKAASQPFSVGPRACPGKLFAYAKMSLQLAKMVYTYDMELIDPDLDWINACQMHFLWWKPELYVRFKFSRILNSSTMECMITSNDD

SEQ ID NO: 16542 - DNA, 4917 bp, Muscodor strobelii
  misc_feature: SGI cDNA ID NO. 565506
  misc_feature: Encodes the peptide sequence at SEQ ID NO 16543
atggcgggttcgaagcgtcagcgctctccctccagtgaagccgccgactcaaaacgtactcgcctgtcttcccaggtcgaatccctcgtcagagaccgcgcggcatcattcttgaaggacaagtcattagacctcgctgcctccgcgttcggcttgaaacgttctctatctgactcttcggacgatgcctccgcctccaagaagaccaagcagcaagactccgataccacactgatcgagtatgctggtcttactgtcaggaatcccgtcatagccaccatcgatgcagagggtaacctcgttaccctcggcgatggtgcagcaagtctcccaaagacgcggcctcccgcatacaccctagtcgcacccttgcctacccctgatggtgaaagaatacgggatcctttctcgagcctgttccccgacaaagcccggctgggtgttccctcgcctcccatcacacctgccaacggctcacaggaaaaccccttcgaaagcactagcgaggttggctatgtgccacagctgcccgataaccatgttgtcatcggtgatgtcgacttgttcggctgcatcccagctagattgcacgtcttcaagggccaattgacgaagcttcacccctaccaagaagtcatccagctgtcggctaagcaagttaccatcggctctgtgttcaccgaactccaaggcgggcctttcgacgctgtcgtcctcgacaatcccgagatgtgctataccgacgattgcttagaccgcacactcctccaaggtacctacttggagacagatgtcatactcaagggtcccctccagcctgtgcaagacatcattcacgacatcttccagcaagagaagccggccttgcatgtcaccgctcatcttggtacggaacgaagctggctgcggccacaggtcccggcacgtctcaacctacgcggctccttcgaagaatgttccgtcaacgtgtgggatatcctgaacttcacccaacttggcgtcgagttgattctcgatatgaatggtggtccagacgatggtgttgaggttggtctcggcttctttgggaaagttgatatcactatgcccggaagcgtgatgcctttgaaggcacaatattcgatccgacacatgcatggtgaatacacactggcagtgaccctgacagacgacgactggaaggattgtttcggtatcaagaacttgactctttctgaggtcaacttctttggtgtcttgtctgagccttctgccaaggccagtctgatgcttcaggtcgaagctgtacttaagcttaacaacaccgatcttataatcagaggctcttactcaaaagatgagttctcactagaggcttatatcggtaatctcaccctgcaagaagttggcaacatcttcaccagtatcaccggtcaccaccttgacgtctttggtcacgatgtcaccttcaactctctctccatccttatctccaatgagggtgtcgctctggcaggcagcatcactatcaatggacactccactgcatacggcatgatctccatcatgcaagatggtcttcacatcagtggcggtattggtgatgtcacgtttgaagacattgagatcaagagtgcaagttttgacgtcttcgtgagcagcagcagcaacaactcaagttgcgcccgcactaccaggtttggtgttcagggagaagtttccttggctggtatcgacctctccgtcggcctcttcacggagaaggctacgggcaaagagttacaatggaccatctatggcgaggtatcgagcgaagaaccaatgtcaatcggccggctgaactccgatctcaagggatccttcctcgatgtcggagtcacagggctagctctaatcgcgagcaacaagcaaaatcctgacggcaactacaacaagttccgatatcccgtcaaaaaaggcatccagttctgtgctacggttgacagtatcccccagctggaggacctcatgagaggtagtgtgaagggcatgatgctctgtgccagttacgaggcggggggcaatctgcggatttccgtcattctccctgcggagcgcaccatcagttttggagataccgtgtacaccggtcctatcgctatcgagttcgcgaaagaaggagccgacatcttgctcatcgtgaaagcactgctcaatgtcaaagttgacagtcaacccgaccctctaaaattctctctggggctgaaagccgggacgttgggagcttcggcctacgccacaatgctcaacgaatggaccaacccagcaggcatgggtcagaagatcaagatcttgggctgctctctcgacttcgggattgtctacgcaacgttcttcaccacgggtatgccggggtctatcggccttgctggccagctcatgatcggagaaaaggaggcaaagatggctctcaaactctctcaaaaccccaaggaccaggttctcgccgcggcagtcaaagacctcggcgtgacagacctggttgacttcgcgggacaaatctgcgagatagacttccccaagccacctaaggatttgttgcatttcaacaagtttgacttgtatctgtcgacaggtgcctcgattggagagatctacttccccgcgggtgcttctctcagcggtgacatgctggtgctaggcaagagagcacagttcaacgctagcatcggcggaagcggcatcaagcttatggccaccatcgagcactttgacctcggccccctcactgtcaaaggcgcaactggtcccgaccccatcgttgatatcgagctgtcgggtgacaagcagcgtatatatatcgacggcgccgtcgagctctgggagttcaacgccgcgttgcacctcgaggctcaggtcttccctcaaaccatcttcgacttctgggtcaaggtggagctgtccgactggttcaagttcaagctcgcggccaagctgactggaaatatcgacttcaagaacctgagcagcctggctgacgcagattttgaggtggagggcgagatggaacagcatatcctcgacaatgtcattgacatgctcgacaagcagatcaactcgatgcacgagaactcggacttcgcagccgcaagacgtcgcctcacgcagaaagaaaacgagttcaacgccggcatagctgcggctcaaagccgcctcgactctgccgagcgcgcctacgagcagaaggaaaccgatgccagagcggcgcttaggcgtgccaagtccgatgcggagacctttctacaggaactgcgcagcaaggccctcgatgcggagcagacctacatcagcgcacgagcacgggcggtttcgtacaaagagcaggtctgccaagatgcgtcagtcgccattcgcgaggcagagagcgcgcttttccacgcggaccatgacagcgacgatgccattctcagagcccaggatgaactccatcgcaagagggatgcgttcaacatggcctttggtagcgcccgcactgatgtccagactgcgcagttcaacgtagacgatgcgcaggctgttgccaatgcgctcaataaggacatgttggacatcgatcgtcgaatcaacgaagcgtcactgtgggatatgcctcttctcgtcgcagagaaggcggctaaggcgctggagcaggccgttgcgggcactgcgctcgaagcttttgtgattgtcctcgatgcggccgaggctcgccttcagagcccagaattccgagaaggagaatcttctgtggcggctgacgaggctgccctagagactctcctcagctctgaagccgcagccgttgaggccgcccagttgtctctccagcagaccaagcagacacagtcggatctagttgccaaagccactcgcgctttgtatgacgttgaacgcagctctgatcagatcagagcctccaaccgagccaaggcctccgtcatcacgggcgaagaaacggctcgctccaaggtgttcgccgctcaacgtgctgtcgacgagctcgagatgtccactgagtacatcgccctggaggaggccaaaaaggggctcgtctccgcgcagggcaaatccgcggaggtggaactcgcgcgccaagcctgtgatttagtagaggaggactcgtccagctttgccgatgatatcctggacgtcggtctcaacataggcaagtggattgctagcgccgctgctgaactcatcaacatcaccgagatcaagttctccggatcgacggcgagcttccgcaagggtgggccccccctgaaagtcaaggtcaatggcaagctcgtcgggcaaaacatcgacatcgatataacgtggaagccagacttcgacatcgtccagttcatcaaggaaatcttcagcgagctgtgggaaacaatcaaggatgctgcaggcaagttcctcgaggcgatcggggccaagatcgttgaaattgctgaggatgttgctgaggctgttgttgagggggccaaggcggtaggtgaagctgcggagaaagtgggagaggctgttggggaggctgccgagaaggttggcgagaccgtgggcgaggctgctgaagcagtcggagaggtagctgaacaggtgggagaggccattggcgacgcggccagcgaggttggtcacgctgtcgacgatgcagtatcggatgttggcgaggcactgagcgacgcgggcagtgccatcggccatgttgccgacgatgttggagatgcgttcagcagcgtcggcagcgatattgacgacgccatgagcgacgcgggcagtttcattggccacacggctgatgatgtcggagacgctttcaacagcttgggcaacgacattgggaataccatgagcgacgttggcaacacggtcgagaatgtggcgagcgatattgggaatgcgtttagcagcgccttcgattggttttga

SEQ ID NO: 16543 - protein, 1638 aa, Muscodor strobelii
  misc_feature: SGI Peptide ID NO. 565506
  misc_feature (1019)..(1634): NCBI GI: 256733360 Blast Desc: NECHADRAFT_77351 [Nectria haematococca mpVI 77-13-4]
  misc_feature (236)..(1452): NCBI GI: 238845682 Blast Desc: conserved [Microsporum canis CBS 113480]
  misc_feature (497)..(1258): NCBI GI: 238494530 Blast Desc: conserved [Aspergillus flavus NRRL3357] gi|220695151|gb|EED51494.1| conserved [Aspergillus flavus NRRL3357]
  misc_feature (495)..(1153): NCBI GI: 169777399 Blast Desc: [Aspergillus oryzae RIB40] gi|83771902|dbj|BAE62032.1| protein product [Aspergillus oryzae]
  misc_feature (344)..(1234): NCBI GI: 238507994 Blast Desc: AFLA_009530 [Aspergillus flavus NRRL3357] gi|220688717|gb|EED45069.1| AFLA_009530 [Aspergillus flavus NRRL3357]
  misc_feature (754)..(1101): NCBI GI: 238582103 Blast Desc: MPER_10996 [Moniliophthora perniciosa FA553] gi|215452511|gb|EEB90755.1| MPER_10996 [Moniliophthora perniciosa FA553]
  misc_feature (716)..(924): NCBI GI: 238593981 Blast Desc: MPER_06927 [Moniliophthora perniciosa FA553] gi|215460703|gb|EEB94280.1| MPER_06927 [Moniliophthora perniciosa FA553]
  misc_feature (793)..(1178): NCBI GI: 171679755 Blast Desc: protein product [Podospora anserina] gi|170939503|emb|CAP64731.1| protein product [Podospora anserina]
  misc_feature (639)..(1046): NCBI GI: 238481843 Blast Desc: AFLA_072420 [Aspergillus flavus NRRL3357] gi|220700210|gb|EED56548.1| AFLA_072420 [Aspergillus flavus NRRL3357]
  misc_feature (819)..(1139): NCBI GI: 169784782 Blast Desc: [Aspergillus oryzae RIB40] gi|83775599|dbj|BAE65719.1| protein product [Aspergillus oryzae]
MAGSKRQRSPSSEAADSKRTRLSSQVESLVRDRAASFLKDKSLDLAASAFGLKRSLSDSSDDASASKKTKQQDSDTTLIEYAGLTVRNPVIATIDAEGNLVTLGDGAASLPKTRPPAYTLVAPLPTPDGERIRDPFSSLFPDKARLGVPSPPITPANGSQENPFESTSEVGYVPQLPDNHVVIGDVDLFGCIPARLHVFKGQLTKLHPYQEVIQLSAKQVTIGSVFTELQGGPFDAVVLDNPEMCYTDDCLDRTLLQGTYLETDVILKGPLQPVQDIIHDIFQQEKPALHVTAHLGTERSWLRPQVPARLNLRGSFEECSVNVWDILNFTQLGVELILDMNGGPDDGVEVGLGFFGKVDITMPGSVMPLKAQYSIRHMHGEYTLAVTLTDDDWKDCFGIKNLTLSEVNFFGVLSEPSAKASLMLQVEAVLKLNNTDLIIRGSYSKDEFSLEAYIGNLTLQEVGNIFTSITGHHLDVFGHDVTFNSLSILISNEGVALAGSITINGHSTAYGMISIMQDGLHISGGIGDVTFEDIEIKSASFDVFVSSSSNNSSCARTTRFGVQGEVSLAGIDLSVGLFTEKATGKELQWTIYGEVSSEEPMSIGRLNSDLKGSFLDVGVTGLALIASNKQNPDGNYNKFRYPVKKGIQFCATVDSIPQLEDLMRGSVKGMMLCASYEAGGNLRISVILPAERTISFGDTVYTGPIAIEFAKEGADILLIVKALLNVKVDSQPDPLKFSLGLKAGTLGASAYATMLNEWTNPAGMGQKIKILGCSLDFGIVYATFFTTGMPGSIGLAGQLMIGEKEAKMALKLSQNPKDQVLAAAVKDLGVTDLVDFAGQICEIDFPKPPKDLLHFNKFDLYLSTGASIGEIYFPAGASLSGDMLVLGKRAQFNASIGGSGIKLMATIEHFDLGPLTVKGATGPDPIVDIELSGDKQRIYIDGAVELWEFNAALHLEAQVFPQTIFDFWVKVELSDWFKFKLAAKLTGNIDFKNLSSLADADFEVEGEMEQHILDNVIDMLDKQINSMHENSDFAAARRRLTQKENEFNAGIAAAQSRLDSAERAYEQKETDARAALRRAKSDAETFLQELRSKALDAEQTYISARARAVSYKEQVCQDASVAIREAESALFHADHDSDDAILRAQDELHRKRDAFNMAFGSARTDVQTAQFNVDDAQAVANALNKDMLDIDRRINEASLWDMPLLVAEKAAKALEQAVAGTALEAFVIVLDAAEARLQSPEFREGESSVAADEAALETLLSSEAAAVEAAQLSLQQTKQTQSDLVAKATRALYDVERSSDQIRASNRAKASVITGEETARSKVFAAQRAVDELEMSTEYIALEEAKKGLVSAQGKSAEVELARQACDLVEEDSSSFADDILDVGLNIGKWIASAAAELINITEIKFSGSTASFRKGGPPLKVKVNGKLVGQNIDIDITWKPDFDIVQFIKEIFSELWETIKDAAGKFLEAIGAKIVEIAEDVAEAVVEGAKAVGEAAEKVGEAVGEAAEKVGETVGEAAEAVGEVAEQVGEAIGDAASEVGHAVDDAVSDVGEALSDAGSAIGHVADDVGDAFSSVGSDIDDAMSDAGSFIGHTADDVGDAFNSLGNDIGNTMSDVGNTVENVASDIGNAFSSAFDWF

SEQ ID NO: 16544 - DNA, 2370 bp, Muscodor strobelii
  misc_feature: SGI cDNA ID NO. 565507
  misc_feature: Encodes the peptide sequence at SEQ ID NO 16545
atgaactctcaagagtcggatcctgagggaccggtgatgagaatgacatttgaggacgaggatgaccttgagggtgacgatgatttcgagggtgacgacgtggagattcttattgatatgaatatggagacagacggcccggaatccatgacaggcaacaaccggaagaagaagcagaagaaaccagaaaaaggcatggacagaacgaaaatcattgacgaggaatcaacgatcaagacccgcgctggtcacaacagacagatcacttgggtccaagacgatcaaggctcgagcgtagctcgcgcccccgtctaccgagttggagcaatacaggggacgccgtccccatctccctatgcccccattgcagccaactcatcgctatatgtgacgatgccgtggtcgacagtgaagaacatgttcagctattggacagatgcggacaacctaagcacgcttcaacaggtgataacggataacaagagttggctttcctggcccaagagaacctcatttgccgaagacgagggcgtgtgggttccgttcgcgttcctgcacggcctagccgaccaggaggcgccatgggtcactctggccaatatgcggaataacgccgcgaacgacgtgtacaacgcagtctacaaggtcaaaaaggatgatagactcttccctaccggccccgtcagaaagaatgccaaaagtgctgagaatgctaaaccattcactccccaattaggagacctctgggtacctattcgcaacagcctcggccgcctgattatctgcaagcagacaggttcctgggacatcgcctccaatgccaactggatcaagctcaagtggagtgcggcgcgataccagacggtcgaagtgggcaaactcgagatcaagatcacgccgctaggctacaaaaggttcggagagaggaagtgcggagctcaaaatgtgttcagccacttcattgacaagatcaacgaggaaaaggagaagaacggaggggaggcgatacttctcagaaaggaccagctaccctctaccggctaccagtttttatccgagcaccccttcggactttatcgaacctacatcaagacatctgcacatgacgcctatatgaaacaattgctcgcgggctgtttccagacaaaggctgatgaacgtgtcgtcctctacgacaaggagctcgacaagaaaacgagaaagcctaagggcgctgtcgatccacgcgggattcccaaggatatcgaaggcctgatcaagcagctcaagccaatcgaccgcgacctgatgaaacgcgccaagaaccaaaaagatgccagagcagctggtcgcgacgcgatcaagaatggcgataagaaggccaagatcaaagagcccagcgttggcgacgtccagacaaagacttatgtcaacctctcggccgaaaagtgccagctagctcgtggcgcgcgcaagaccgagaaggctacccaaggtgtagtcatgggagattctgcatccaagagatgcgtcagcttctttggctggaaatgggttgaccctaaagggggcagagcagcaacttggccatctatcccgccgaaagatgccgcgactccgaagagagagtcggattttcgacccaatgaaatgtacaacggtctcttcattgccgagtggttgcatctctctgcatactcctggggtggcatcgcagacccaaaaagcaccggcgtctcaatcgaaagcctagctagttccagtcaggttccagagaatctcgtgatagggacttcggagaccaactcggccatgacgcgatgggagaaagcctggcagaaactcatcaagactgaaggcgagatcctcgccaacaaaggcgagaaagaggaagcgcggcgatacggcggccggctcaccatcacgcgacacccctacgcaacgcacaagcccgttctctccgaaaccgcccgcaatgccctagtcaccgaggagaagcccaagggccccatcggtccctactcccggccagtgtgctacgcgccctacctgcacgacgtcacagaaccctccggcgacgataacgatcccttcaggtacgtggtcaagaggatggagatgacaacggagctgcaggatctcacgaagcagttccgatggatctgcttccagtttgactacgacatcaaggtcgatggcaagagtgatatcttgaagctcaacccgggttgtgtcatgggccgaaatcggttctaccccttccggaggatgctgttccacaagatcgagcatgaccttgactcggccatttggaaggatatgacaaaggagggagtggagagagtcaggtgtgaatacaatggtggcaaggtggagtttatcaatacttaa

SEQ ID NO: 16545 - protein, 789 aa, Muscodor strobelii
  misc_feature: SGI Peptide ID NO. 565507
  misc_feature (248)..(775): NCBI GI: 46127647 Blast Desc: FG08201.1 [Gibberella zeae PH-1]
  misc_feature (331)..(780): NCBI GI: 256722929 Blast Desc: [Nectria haematococca mpVI 77-13-4]
  misc_feature (465)..(767): NCBI GI: 256733817 Blast Desc: NECHADRAFT_77350 [Nectria haematococca mpVI 77-13-4]
  misc_feature (519)..(630): NCBI GI: 171681369 Blast Desc: protein product [Podospora anserina] gi|170940643|emb|CAP65871.1| protein product [Podospora anserina]
MNSQESDPEGPVMRMTFEDEDDLEGDDDFEGDDVEILIDMNMETDGPESMTGNNRKKKQKKPEKGMDRTKIIDEESTIKTRAGHNRQITWVQDDQGSSVARAPVYRVGAIQGTPSPSPYAPIAANSSLYVTMPWSTVKNMFSYWTDADNLSTLQQVITDNKSWLSWPKRTSFAEDEGVWVPFAFLHGLADQEAPWVTLANMRNNAANDVYNAVYKVKKDDRLFPTGPVRKNAKSAENAKPFTPQLGDLWVPIRNSLGRLIICKQTGSWDIASNANWIKLKWSAARYQTVEVGKLEIKITPLGYKRFGERKCGAQNVFSHFIDKINEEKEKNGGEAILLRKDQLPSTGYQFLSEHPFGLYRTYIKTSAHDAYMKQLLAGCFQTKADERVVLYDKELDKKTRKPKGAVDPRGIPKDIEGLIKQLKPIDRDLMKRAKNQKDARAAGRDAIKNGDKKAKIKEPSVGDVQTKTYVNLSAEKCQLARGARKTEKATQGVVMGDSASKRCVSFFGWKWVDPKGGRAATWPSIPPKDAATPKRESDFRPNEMYNGLFIAEWLHLSAYSWGGIADPKSTGVSIESLASSSQVPENLVIGTSETNSAMTRWEKAWQKLIKTEGEILANKGEKEEARRYGGRLTITRHPYATHKPVLSETARNALVTEEKPKGPIGPYSRPVCYAPYLHDVTEPSGDDNDPFRYVVKRMEMTTELQDLTKQFRWICFQFDYDIKVDGKSDILKLNPGCVMGRNRFYPFRRMLFHKIEHDLDSAIWKDMTKEGVERVRCEYNGGKVEFINT

SEQ ID NO: 16546 - DNA, 1653 bp, Muscodor strobelii
  misc_feature: SGI cDNA ID NO. 565508
  misc_feature: Reduced expression when VOC is produced
  misc_feature: Encodes the peptide sequence at SEQ ID NO 16547
atgtcggatcaaaccctgcacaacgctccagcagtattagacccgctagcgagcccgaacaccgacttacaacgcgatactgagaaaggcgattcgtcacaaagtagtctcaacgaaaagcgcgaaacacgagaaatcactggcttcaagtggtttatcacggtattatcgttatacatcacatgttttctctacggtctcgacacgacgatagtcgcagctgttcaagcagatgttgttcggagtttcgggcatgttgaacaattggcttggattggcgctggctttccgctaggttcagtcactgtcattttcctcatgggctatctgttcaattcattcaatatgaaatggatgtatatcatcaccgtcagtttgttcgacatcggctctgcgctttgtggtgcggctcccaatatgaatgcgttgatcgtcggacgcgttattgctggtgccggtggtactggcatatatctcggatcactcaactatgtcacagccatgaccgtcccgaaagagcgcggattatacaccacattgacaggtttttgctggggccttggctgtgtccttggaccagtcgtaggaggcgccttcgccatctcttccgctacttggcgctgggcattttacttgaatttagtcattggtgccgcttcggctccggcatacttcatctgcctcccttcaatccgtctatcccactctggtctgagtatcaaagaccggctactagcaattgactacgcaggcttcatactaggtgccggactatgtacctcatttttgttggccttgaccatggcaggtgggcaatggccatggaaagacggacgtacgattgcaacatttgtcgtctttggtgctacgacagtcctctacagcttgcaacaatatttctcatggtttacgacgagtcgcgcgttcccagttcacttgttgaaagaacggacgcagattctcctgtacatcgctcaatcggctttcataactgcactgttcgtgtcgattttctacattccgctattttttacttttgtgaagaatgattcggctcttaccgctgcagtacgattactccccttcgttgtagtcgccgttgtaaccagcgtaatatcgggtcattacgtcgggcgcgtcagatacatgctcctgtttgtcgcatcagctatttggctgatactaggcggcagtctgtttgtcgcgtaccttacacccgaagcctcaaacagtcttttatatggtcttacggtcttaattgcttttggatctggtcttgccatgcagaaagcctattctgtcgccgctctgacggcagatgccgccaatgcaggcatggcgctaagtttgcagaatgtcgcggaaattggcggccaagtcattgcccttgcgatttccggtcagatataccactcaatcgctgtccgaaatctcatgtcggcacttgcgggtcatggattctctcaatcggacattattggtgcactctccggtgctcagagtactcttttctcggaattgactgggtcgctgcgtgacgcggccgttgccgcgatcgccaagtccctccagacgacgttcatccttgtcccggtttctggaggagtcatgctggtagctggattgctgatgaagtgggagaagcttacatag

SEQ ID NO: 16547 - protein, 550 aa, Muscodor strobelii
  misc_feature: SGI Peptide ID NO. 565508
  misc_feature (58)..(463): Pfam Id: PF07690 Pfam Desc: Major Facilitator Superfamily
  misc_feature (54)..(219): Pfam Id: PF00083 Pfam Desc: Sugar (and other) transporter
  misc_feature (23)..(549): NCBI GI: 255940144 Blast Desc: Pc16g04910 [Penicillium chrysogenum Wisconsin 54-1255] gi|211585464|emb|CAP93161.1| Pc16g04910 [Penicillium chrysogenum Wisconsin 54-1255]
  misc_feature (7)..(549): NCBI GI: 145251047 Blast Desc: An15g05060 [Aspergillus niger] gi|134082565|emb|CAK42480.1| protein product [Aspergillus niger]
  misc_feature (2)..(549): NCBI GI: 225555190 Blast Desc: conserved [Ajellomyces capsulatus G186AR]
  misc_feature (2)..(549): NCBI GI: 154272796 Blast Desc: [Ajellomyces capsulatus NAm1] gi|150415762|gb|EDN11106.1| [Ajellomyces capsulatus NAm1]
  misc_feature (16)..(549): NCBI GI: 212531635 Blast Desc: conserved [Penicillium marneffei ATCC 18224] gi|210071338|gb|EEA25427.1| conserved [Penicillium marneffei ATCC 18224]
  misc_feature (2)..(549): NCBI GI: 156058470 Blast Desc: SS1G_03247 [Sclerotinia sclerotiorum 1980] gi|154701034|gb|EDO00773.1| SS1G_03247 [Sclerotinia sclerotiorum 1980]
  misc_feature (20)..(549): NCBI GI: 242783880 Blast Desc: efflux pump antibiotic resistance protein, [Talaromyces stipitatus ATCC 10500] gi|218720422|gb|EED19841.1| efflux pump antibiotic resistance protein, [Talaromyces ATCC
  misc_feature (7)..(549): NCBI GI: 212545623 Blast Desc: conserved [Penicillium marneffei ATCC 18224] gi|210064485|gb|EEA18580.1| conserved [Penicillium marneffei ATCC 18224]
  misc_feature (116)..(549): NCBI GI: 240281412 Blast Desc: MFS drug efflux transporter [Ajellomyces capsulatus H143]
  misc_feature (11)..(549): NCBI GI: 238844068 Blast Desc: conserved [Microsporum canis CBS 113480]
  misc_feature: Useful for introducing or modulating the production of volatile compounds
MSDQTLHNAPAVLDPLASPNTDLQRDTEKGDSSQSSLNEKRETREITGFKWFITVLSLYITCFLYGLDTTIVAAVQADVVRSFGHVEQLAWIGAGFPLGSVTVIFLMGYLFNSFNMKWMYIITVSLFDIGSALCGAAPNMNALIVGRVIAGAGGTGIYLGSLNYVTAMTVPKERGLYTTLTGFCWGLGCVLGPVVGGAFAISSATWRWAFYLNLVIGAASAPAYFICLPSIRLSHSGLSIKDRLLAIDYAGFILGAGLCTSFLLALTMAGGQWPWKDGRTIATFVVFGATTVLYSLQQYFSWFTTSRAFPVHLLKERTQILLYIAQSAFITALFVSIFYIPLFFTFVKNDSALTAAVRLLPFVVVAVVTSVISGHYVGRVRYMLLFVASAIWLILGGSLFVAYLTPEASNSLLYGLTVLIAFGSGLAMQKAYSVAALTADAANAGMALSLQNVAEIGGQVIALAISGQIYHSIAVRNLMSALAGHGFSQSDIIGALSGAQSTLFSELTGSLRDAAVAAIAKSLQTTFILVPVSGGVMLVAGLLMKWEKLT

SEQ ID NO: 16548 - DNA, 3490 bp, Muscodor strobelii
  misc_feature: SGI EST ID NO. CUFF.39292.0
  misc_feature: Variant of the nucleotide sequence at SEQ ID NO 16546
tcaactcactttatcattgcccagtttgcacgttctcttgaatgtggtttgtagtaccagtcacgcaccgtattgatgagcgtcgaggagctgaacaagggaagatacgagtttgatgtcctcaaataccactccacaacaggcaaaacgtcatgtagcgagcctaaaggcatctgatctttctgcatattttcgatcgagacttgtagtccatcgtccccgctgtgcattgggggattcaaagactcgaccttcggtgatgccgtgtcaccttgaggcggcgactggagatcgtcgaccttgtccaccactgctgccaattgagcttctagtgttttcactctagcttccaacgctgcttctcgcgacgttgacgccaccttcttcctcatcgttgtcttgcgcgccgccatcttgcgagtgcattcgctgtcgtagataacgcaatgcgaacatcttggtttctttccatcgcatttgattcgtctccgatagcagagatcgcaggcctggattcaaccttgttagcagcgctgatgtatacggtgcaagagacttgtgcggcgccgcttcatcgtgcatgaggccatggcgaaatcaaacaaggtacctttctagatgattctccagattccatgtggagttcgtcatgcgaggtactgttataacgtgtagcctttcgttcgtttatttaattacacctacttcctcggaagagaatacgatacttcaagttctgttggtacgtccaactgagatattatgagctaattgctttgtcaccatcgacgactatcccttccgcggaacctcatagcgtcaaccgatctgcgccaagatctggatggaccccgccttagaggattgctcgaggggctggccaatcaagtctcttgatagtggggttatcctggttcatgtaccgaacagggttttggatagcgtctcaattgataagcataacgtccagaagcacgcaatttttccctccttttccgctcgtgaacttggatagccatcatccaatttgggatttccaatgaggattaaaaattcccctattcgcttgttgaccatcatctccctgtctatgcagcctaatcggtgcgccacgagaccggattcctgctgatcatgatggaaccttacaataccgagccgtcagcttgtggtgaggttccaagggtcttccgtagtagaatcggaggtagggcaacatattgctaagcaacatacaaatatttaccacttccgcctgcttacatattcagctaatgtttgaaatcctcgaatacttagtttcgatattgtatattcaacatgctcgaatactactcagagggagtataataactaaatgacctcttctagccattgtgcccctcagaaccacaaccagcaatcggaacgtccacataattactagcaaacacttcaccgctaatcaagtcaaattcttatttaagtcctcgcatcttaaatctaacacactctgataaactgcgattcgtgatctccatacttgtattggacggaagatttggtgcacacaagacgggtccaaccgcatcgctcaatgaagatgtcggatcaaaccctgcacaacgctccagcagtattagacccgctagcgagcccgaacaccgacttacaacgcgatactgagaaaggcgattcgtcacaaagtagtctcaacgaaaagcgcgaaacacgagaaatcactggcttcaagtggtttatcacggtattatcgttatacatcacatgttttctctacggtctcgacacgacgatagtcgcagctgttcaagcagatgttgttcggagtttcgggcatgttgaacaattggcttggattggcgctggctttccgctaggttcagtcactgtcattttcctcatgggctatctgttcaattcattcaatatgaaatggatgtatatcatcaccgtcagtttgttcgacatcggctctgcgctttgtggtgcggctcccaatatgaatgcgttgatcgtcggacgcgttattgctggtgccggtggtactggcatatatctcggatcactcaactatgtcacagccatgaccgtcccgaaagagcgcggattatacaccacattgacaggtttttgctggggccttggctgtgtccttggaccagtcgtaggaggcgccttcgccatctcttccgctacttggcgctgggcattttacttgaatttagtcattggtgccgcttcggctccggcatacttcatctgcctcccttcaatccgtctatcccactctggtctgagtatcaaagaccggctactagcaattgactacgcaggcttcatactaggtgccggactatgtacctcatttttgttggccttgaccatggcaggtgggcaatggccatggaaagacggacgtacgattgcaacatttgtcgtctttggtgctacgacagtcctctacagcttgcaacaatatttctcatggtttacgacgagtcgcgcgttcccagttcacttgttgaaagaacggacgcagattctcctgtacatcgctcaatcggctttcataactgcactgttcgtgtcgattttctacattccgctattttttacttttgtgaagaatgattcggctcttaccgctgcagtacgattactccccttcgttgtagtcgccgttgtaaccagcgtaatatcgggtcattacgtcgggcgcgtcagatacatgctcctgtttgtcgcatcagctatttggctgatactaggcggcagtctgtttgtcgcgtaccttacacccgaagcctcaaacagtcttttatatggtcttacggtcttaattgcttttggatctggtcttgccatgcagaaagcctattctgtcgccgctctgacggcagatgccgccaatgcaggcatggcgctaagtttgcagaatgtcgcggaaattggcggccaagtcattgcccttgcgatttccggtcagatataccactcaatcgctgtccgaaatctcatgtcggcacttgcgggtcatggattctctcaatcggacattattggtgcactctccggtgctcagagtactcttttctcggaattgactgggtcgctgcgtgacgcggccgttgccgcgatcgccaagtccctccagacgacgttcatccttgtcccggtttctggaggagtcatgctggtagctggattgctgatgaagtgggagaagcttacatagcgaatcgaatggagcattgcgtacagtgtaatggagtttcgttagttgtgagttacggtaatacagggataaatggagacaagcaattgcttttggcatcaacggggtcaagcatagatgaagcggcacatccttgggcattttctggcgtttggttagaggtctcatttcaggacacacttatgtagtgaatgcgtagatgtcggtgctatctaaggtgtcaaacccagatcatgtggtggtcgcctgtatctg

SEQ ID NO: 16549 - DNA, 1650 bp, Muscodor strobelii
  misc_feature: SGI cDNA ID NO. 565509
  misc_feature: Encodes the peptide sequence at SEQ ID NO 16550
atggcggcgcgcaagacaacgatgaggaagaaggtggcgtcaacgtcgcgagaagcagcgttggaagctagagtgaaaacactagaagctcaattggcagcagtggtggacaaggtcgacgatctccagtcgccgcctcaaggtgacacggcatcaccgaaggtcgagtctttgaatcccccaatgcacagcggggacgatggactacaagtctcgatcgaaaatatgcagaaagatcagatgcctttaggctcgctacatgacgttttgcctgttgtggagtggtatttgaggacatcaaactcgtatcttcccttgttcagctcctcgacgctcatcaatacggtgcgtgactggtactacaaaccacattcaagagaacgtgcaaactgggcaatgataaatgtcgtactggcactggcctatcatggcgggtatgaagggtctcatggctgcagccatgccgcttatatcagtaacgcacaatcagtcctgagcgaggccatctcccacgagaccaaacttgtccacgtgcaagttctgatcggtctttcgatgctcttccgaaccgctgtcgacccaactccagctgcagtacttgtagcgaccgcaatgcgtctagcccaaaaactcggattgaataggagaagtcctgattatctcgaacttgcggagcgacagcagagggaaagagtgttttggcttgcctacatcatggatagagcgatgatggcacagacgaaactagctccaatccagtacgatgatgatatcgagatagacctgccatcgctggagcctccagcagacatgcagggatgggttgtctcaggagatggacaagcaaagatcaacatcctccgcgcacatgtccaaatggcaaagtttcagggaattgtgcatacttgcgtctactctatctcgggtcagaattcaagcccctcgcaaagagcggcaaatatctcgcgtgtccatcgcgcgctcgaagaatggaaagcccagattcctcctcagttccatcccaggatacttgcagacgctggaacttctgatctatgtagacagttctgcatgatctattgtgtagcaatatctgctcgagcgatgatcagcttttgtagcgcacaggataagtttcactactccaagtgggttggacgattgtatgacgatgttgagaaagtcactaccgggcaagaggttcttcgactggccgaccaacaaggttgggatatactcactgcagaggcccgcgattttctaggtcttttcaaaaaggtcaagtcccgagacgcaatcttcacgatgacaaccatatgtgcgtttatgacaagcctaatctgcctctcagcaaacagcatgtttagtgcgcttgatgggatttggagcgcagacgaaccgctaattgaagccactatttcaccattggaacacattgtgaaagagacaggtaatctgcaggggacatatgatgcactcaaggaattgagggctcaaacgaagtcggtgattgagagacagaatttgcaacagcccacttccgggacggaggactactggtcaacagcctatgagccacctgatatggaggtcctgaagtatttatttccggttactgaggatgaagcgaattggaacatgtacggctaa

SEQ ID NO: 16550 - protein, 549 aa, Muscodor strobelii
  misc_feature: SGI Peptide ID NO. 565509
  misc_feature (174)..(266): Pfam Id: PF04082 Pfam Desc: Fungal specific transcription factor domain
  misc_feature (2)..(507): NCBI GI: 256725042 Blast Desc: NECHADRAFT_77135 [Nectria haematococca mpVI 77-13-4]
  misc_feature (3)..(520): NCBI GI: 238488159 Blast Desc: conserved [Aspergillus flavus NRRL3357] gi|220697705|gb|EED54045.1| conserved [Aspergillus flavus NRRL3357]
  misc_feature (16)..(519): NCBI GI: 256725870 Blast Desc: NECHADRAFT_94663 [Nectria haematococca mpVI 77-13-4]
  misc_feature (71)..(496): NCBI GI: 212544888 Blast Desc: conserved [Penicillium marneffei ATCC 18224] gi|210065567|gb|EEA19661.1| conserved [Penicillium marneffei ATCC 18224]
  misc_feature (15)..(485): NCBI GI: 261358544 Blast Desc: fungal specific transcription factor domain-containing protein [Verticillium albo-atrum VaMs.102]
  misc_feature (5)..(490): NCBI GI: 256734978 Blast Desc: NECHADRAFT_75779 [Nectria haematococca mpVI 77-13-4]
  misc_feature (2)..(409): NCBI GI: 46111099 Blast Desc: FG02431.1 [Gibberella zeae PH-1]
  misc_feature (3)..(350): NCBI GI: 169762386 Blast Desc: [Aspergillus oryzae RIB40] gi|83770121|dbj|BAE60254.1| protein product [Aspergillus oryzae]
  misc_feature (20)..(388): NCBI GI: 46139413 Blast Desc: FG11221.1 [Gibberella zeae PH-1]
  misc_feature (82)..(523): NCBI GI: 255943195 Blast Desc: Pc18g05390 [Penicillium chrysogenum Wisconsin 54-1255] gi|211587099|emb|CAP94763.1| Pc18g05390 [Penicillium chrysogenum Wisconsin 54-1255]
MAARKTTMRKKVASTSREAALEARVKTLEAQLAAVVDKVDDLQSPPQGDTASPKVESLNPPMHSGDDGLQVSIENMQKDQMPLGSLHDVLPVVEWYLRTSNSYLPLFSSSTLINTVRDWYYKPHSRERANWAMINVVLALAYHGGYEGSHGCSHAAYISNAQSVLSEAISHETKLVHVQVLIGLSMLFRTAVDPTPAAVLVATAMRLAQKLGLNRRSPDYLELAERQQRERVFWLAYIMDRAMMAQTKLAPIQYDDDIEIDLPSLEPPADMQGWVVSGDGQAKINILRAHVQMAKFQGIVHTCVYSISGQNSSPSQRAANISRVHRALEEWKAQIPPQFHPRILADAGTSDLCRQFCMIYCVAISARAMISFCSAQDKFHYSKWVGRLYDDVEKVTTGQEVLRLADQQGWDILTAEARDFLGLFKKVKSRDAIFTMTTICAFMTSLICLSANSMFSALDGIWSADEPLIEATISPLEHIVKETGNLQGTYDALKELRAQTKSVIERQNLQQPTSGTEDYWSTAYEPPDMEVLKYLFPVTEDEANWNMYG

SEQ ID NO: 16551 - DNA, 4761 bp, Muscodor strobelii
  misc_feature: SGI EST ID NO. CUFF.39292.1
  misc_feature: Variant of the nucleotide sequence at SEQ ID NO 16549
cagatacaggcgaccaccacatgatctgggtttgacaccttagatagcaccgacatctacgcattcactacataagtgtgtcctgaaatgagacctctaaccaaacgccagaaaatgcccaaggatgtgccgcttcatctatgcttgaccccgttgatgccaaaagcaattgcttgtctccatttatccctgtattaccgtaactcacaactaacgaaactccattacactgtacgcaatgctccattcgattcgctatgtaagcttctcccacttcatcagcaatccagctaccagcatgactcctccagaaaccgggacaaggatgaacgtcgtctggagggacttggcgatcgcggcaacggccgcgtcacgcagcgacccagtcaattccgagaaaagagtactctgagcaccggagagtgcaccaataatgtccgattgagagaatccatgacccgcaagtgccgacatgagatttcggacagcgattgagtggtatatctgaccggaaatcgcaagggcaatgacttggccgccaatttccgcgacattctgcaaacttagcgccatgcctgcattggcggcatctgccgtcagagcggcgacagaataggctttctgcatggcaagaccagatccaaaagcaattaagaccgtaagaccatataaaagactgtttgaggcttcgggtgtaaggtacgcgacaaacagactgccgcctagtatcagccaaatagctgatgcgacaaacaggagcatgtatctgacgcgcccgacgtaatgacccgatattacgctggttacaacggcgactacaacgaaggggagtaatcgtactgcagcggtaagagccgaatcattcttcacaaaagtaaaaaatagcggaatgtagaaaatcgacacgaacagtgcagttatgaaagccgattgagcgatgtacaggagaatctgcgtccgttctttcaacaagtgaactgggaacgcgcgactcgtcgtaaaccatgagaaatattgttgcaagctgtagaggactgtcgtagcaccaaagacgacaaatgttgcaatcgtacgtccgtctttccatggccattgcccacctgccatggtcaaggccaacaaaaatgaggtacatagtccggcacctagtatgaagcctgcgtagtcaattgctagtagccggtctttgatactcagaccagagtgggatagacggattgaagggaggcagatgaagtatgccggagccgaagcggcaccaatgactaaattcaagtaaaatgcccagcgccaagtagcggaagagatggcgaaggcgcctcctacgactggtccaaggacacagccaaggccccagcaaaaacctgtcaatgtggtgtataatccgcgctctttcgggacggtcatggctgtgacatagttgagtgatccgagatatatgccagtaccaccggcaccagcaataacgcgtccgacgatcaacgcattcatattgggagccgcaccacaaagcgcagagccgatgtcgaacaaactgacggtgatgatatacatccatttcatattgaatgaattgaacagatagcccatgaggaaaatgacagtgactgaacctagcggaaagccagcgccaatccaagccaattgttcaacatgcccgaaactccgaacaacatctgcttgaacagctgcgactatcgtcgtgtcgagaccgtagagaaaacatgtgatgtataacgataataccgtgataaaccacttgaagccagtgatttctcgtgtttcgcgcttttcgttgagactactttgtgacgaatcgcctttctcagtatcgcgttgtaagtcggtgttcgggctcgctagcgggtctaatactgctggagcgttgtgcagggtttgatccgacatcttcattgagcgatgcggttggacccgtcttgtgtgcaccaaatcttccgtccaatacaagtatggagatcacgaatcgcagtttatcagagtgtgttagatttaagatgcgaggacttaaataagaatttgacttgattagcggtgaagtgtttgctagtaattatgtggacgttccgattgctggttgtggttctgaggggcacaatggctagaagaggtcatttagttattatactccctctgagtagtattcgagcatgttgaatatacaatatcgaaactaagtattcgaggatttcaaacattagctgaatatgtaagcaggcggaagtggtaaatatttgtatgttgcttagcaatatgttgccctacctccgattctactacggaagacccttggaacctcaccacaagctgacggctcggtattgtaaggttccatcatgatcagcaggaatccggtctcgtggcgcaccgattaggctgcatagacagggagatgatggtcaacaagcgaataggggaatttttaatcctcattggaaatcccaaattggatgatggctatccaagttcacgagcggaaaaggagggaaaaattgcgtgcttctggacgttatgcttatcaattgagacgctatccaaaaccctgttcggtacatgaaccaggataaccccactatcaagagacttgattggccagcccctcgagcaatcctctaaggcggggtccatccagatcttggcgcagatcggttgacgctatgaggttccgcggaagggatagtcgtcgatggtgacaaagcaattagctcataatatctcagttggacgtaccaacagaacttgaagtatcgtattctcttccgaggaagtaggtgtaattaaataaacgaacgaaaggctacacgttataacagtacctcgcatgacgaactccacatggaatctggagaatcatctagaaaggcctgcgatctctgctatcggagacgaatcaaatgcgatggaaagaaaccaagatgttcgcattgcgttatctacgacagcgaatgcactcgcaagatggcggcgcgcaagacaacgatgaggaagaaggtggcgtcaacgtcgcgagaagcagcgttggaagctagagtgaaaacactagaagctcaattggcagcagtggtggacaaggtcgacgatctccagtcgccgcctcaaggtgacacggcatcaccgaaggtcgagtctttgaatcccccaatgcacagcggggacgatggactacaagtctcgatcgaaaatatgcagaaagatcagatgcctttaggctcgctacatgacgttttgcctgttgtggagtggtatttgaggacatcaaactcgtatcttcccttgttcagctcctcgacgctcatcaatacggtgcgtgactggtactacaaaccacattcaagagaacgtgcaaactgggcaatgataaatgtcgtactggcactggcctatcatggcgggtatgaagggtctcatggctgcagccatgccgcttatatcagtaacgcacaatcagtcctgagcgaggccatctcccacgagaccaaacttgtccacgtgcaagttctgatcggtctttcgatgctcttccgaaccgctgtcgacccaactccagctgcagtacttgtagcgaccgcaatgcgtctagcccaaaaactcggattgaataggagaagtcctgattatctcgaacttgcggagcgacagcagagggaaagagtgttttggcttgcctacatcatggatagagcgatgatggcacagacgaaactagctccaatccagtacgatgatgatatcgagatagacctgccatcgctggagcctccagcagacatgcagggatgggttgtctcaggagatggacaagcaaagatcaacatcctccgcgcacatgtccaaatggcaaagtttcagggaattgtgcatacttgcgtctactctatctcgggtcagaattcaagcccctcgcaaagagcggcaaatatctcgcgtgtccatcgcgcgctcgaagaatggaaagcccagattcctcctcagttccatcccaggatacttgcagacgctggaacttctgatctatgtagacagttctgcatgatctattgtgtagcaatatctgctcgagcgatgatcagcttttgtagcgcacaggataagtttcactactccaagtgggttggacgattgtatgacgatgttgagaaagtcactaccgggcaagaggttcttcgactggccgaccaacaaggttgggatatactcactgcagaggcccgcgattttctaggtcttttcaaaaaggtcaagtcccgagacgcaatcttcacgatgacaaccatatgtgcgtttatgacaagcctaatctgcctctcagcaaacagcatgtttagtgcgcttgatgggatttggagcgcagacgaaccgctaattgaagccactatttcaccattggaacacattgtgaaagagacaggtaatctgcaggggacatatgatgcactcaaggaattgagggctcaaacgaagtcggtgattgagagacagaatttgcaacagcccacttccgggacggaggactactggtcaacagcctatgagccacctgatatggaggtcctgaagtatttatttccggttactgaggatgaagcgaattggaacatgtacggctaataggcatttctattgttaaaagctgttaaagtctcgatatccattgacgtggaaggctggagatacgagacaacatgaaaacaattcgtgcgcaacgtttctattctacttgttggcgaaatgttttgcgcataa

SEQ ID NO: 16552 - DNA, 930 bp, Muscodor strobelii
  misc_feature: SGI cDNA ID NO. 565510
  misc_feature: Encodes the peptide sequence at SEQ ID NO 16553
atgtccaaaaccgccctgatgaagcaggtagcgggtcaggagcagccccaggataggctaacaaccttccacatgttcctaaacttgccaccagagctgcagctcatggtctgggagttcgcaaggccgcaacgtcctgtcactcaccaccatttcttttgcagcacagaaggtcgatacatcgcgtcggttgatacatccaaagacgagacggatcgctatattgacgctgccgtcaaaagcaacaatcatcacgacaacagtccagttgatccagtggagatgcaaatccggctgccgaacgagatcagaaaaataacctatgctgcagacgtcaagctccaagtatcatttgtgaagaagccgccgtatactgagccttcgcacgactcggataccgacttcggcatacaacgttggacttatgatctggcgaggtcggcccacttggtggttaatgttgagaaggatgtcatcatcgtcggctccagtcaccgatttcccgggcagctgcgacctctgttcagtccaatgaacgccagagttcctctgagacttccaaaagacttatggccgctcggtattcaacaactggtactgcgtgtgtacaccgagacttccgttaccgagggcgatcgccgacaattcgagaaactcaccggactacgaacgctcattcttctcgtgcatgtagttgggcttgatggtacccacgcacggagtttgccagatgattggaaaggatttaccaaatggagcacgtttttgaagtggtgtgacaccgccaagttcgatcttcgtctaagcgacaagtatgttgagaatgctttattgatgcagtacgatgtcgaagaattttttcaggaaaaggacaacaaactcgtcaaggttgaattagctgtagacaagtggcttaattgctctgactag

SEQ ID NO: 16553 - protein, 309 aa, Muscodor strobelii
  misc_feature: SGI Peptide ID NO. 565510
MSKTALMKQVAGQEQPQDRLTTFHMFLNLPPELQLMVWEFARPQRPVTHHHFFCSTEGRYIASVDTSKDETDRYIDAAVKSNNHHDNSPVDPVEMQIRLPNEIRKITYAADVKLQVSFVKKPPYTEPSHDSDTDFGIQRWTYDLARSAHLVVNVEKDVIIVGSSHRFPGQLRPLFSPMNARVPLRLPKDLWPLGIQQLVLRVYTETSVTEGDRRQFEKLTGLRTLILLVHVVGLDGTHARSLPDDWKGFTKWSTFLKWCDTAKFDLRLSDKYVENALLMQYDVEEFFQEKDNKLVKVELAVDKWLNCSD

SEQ ID NO: 16554 - DNA, 205 bp, Muscodor strobelii
  misc_feature: SGI EST ID NO. CUFF.39132.0
  misc_feature: Variant of the nucleotide sequence at SEQ ID NO 16552
cgcacgactcggataccgacttcggcatacaacgttggacttatgatctggcgaggtcggcccacttggtggttaatgttgagaaggatgtcatcatcgtcggctccagtcaccgatttcccgggcagctgcgacctctgttcagtccaatgaacgccagagttcctctgagacttccaaaagacttatggccgctcggtattca

SEQ ID NO: 16555 - DNA, 1440 bp, Muscodor strobelii
  misc_feature: SGI cDNA ID NO. 565511
  misc_feature: Encodes the peptide sequence at SEQ ID NO 16556
atgtcggactaccaggactacaaaatcgacttcggtacattcaacaacgtcataaacaacaaactgacgagcactaccggcgcacggcatacagtggatcctaatacggaagagcctttatgggacgtccccgtctcctctaagcaagaggtcgatctcgctgttgacgcggcaaaggctgcttttccgtcctggtccaaactttcgcaaaatgagcgagcaaggcatctcgataagctcgcagatgctatcgaagcaaactatgacgaattttgcaagctgctcggcaaagaggcaggcaaaacggcgcaaatcgtgcaagtcgagatggatcttgctatgggtcttgcacgcgagacacctaagctcaggttgaaagaggaaacattgatcgacgatggagagaggactgctatcgtacgccatgtgccctgtggtgtcggggttggtctagtgccctggaacttcccgcttgcattaggaatcgggaagtgcttcgctgcgcttctcgctggctgcaccttcatctggaaaccatctccatactcgccatacaccgctttgaaggtagccgagcttggggcacggattctaccgcccggtgttctccaagccctgagcggcgaagaggatatcggccccatgctcactgcacatccagatgttgcgaagataagctttacagggtcagtccaaacagggaagaaagtctttgcggcctgcgccggtacacttaagcgagtcacattagagctgggtgggaatgatgcagccatcatttgcgaagacgttgatgttgaagctgttgccgccaagatgtcctctctagcgtttatccacagcgggcagatatgtatgaatgtgaagcgcatatatatacatgagcggatatatgacaagttccttgccgctttcatcgagaccacaaagcaacttagcattggcgataccgcaaatcccgagaccactttcggacccgtgcagaatcaaatgcagcacaacaaactgcagaagctttacgcgacgaatgccgatgagggttgcaaaacagtgtatgccgggaaactaatgaataagaaaggtttcttcatggcaccggctatcatcgacaatccacctgacgattcaaccatcgtggttgaagagccattcgggcctatcgtacctgtcctcaagtggtcggacgaggaggatgtcattagacgggcaaatagttcgaagctagggcttggagcatccgtctggagtaaggatgtctctcgcgctaaggccatcgtggaaagacttgaggcaggcaatctttggatcaacaccgcattcgagcttgatcctcgcgtgccctttggcgggcacaaagagagtggcattggcgtggaatggggcgcacttgcccttcaagggtggtgtaactcccaggctctttggacgagacatacttga

SEQ ID NO: 16556 - protein, 479 aa, Muscodor strobelii
  misc_feature: SGI Peptide ID NO. 565511
  misc_feature (21)..(474): Pfam Id: PF00171 Pfam Desc: Aldehyde dehydrogenase family
  misc_feature (6)..(479): NCBI GI: 46110949 Blast Desc: FG02356.1 [Gibberella zeae PH-1]
  misc_feature (8)..(477): NCBI GI: 171676724 Blast Desc: protein product [Podospora anserina] gi|170936429|emb|CAP61086.1| protein product [Podospora anserina]
  misc_feature (9)..(475): NCBI GI: 169768486 Blast Desc: [Aspergillus oryzae RIB40] gi|238497792|ref|XP_002380131.1| aldehyde dehydrogenase, [Aspergillus flavus NRRL3357] gi|83766571|dbj|BAE56711.1| protein
  misc_feature (9)..(477): NCBI GI: 119487483 Blast Desc: aldehyde dehydrogenase [Neosartorya fischeri NRRL 181] gi|119410691|gb|EAW20637.1| aldehyde dehydrogenase [Neosartorya fischeri NRRL 181]
  misc_feature (8)..(477): NCBI GI: 145228395 Blast Desc: An01g00620 [Aspergillus niger] gi|134054593|emb|CAK43448.1| protein product [Aspergillus niger]
  misc_feature (9)..(477): NCBI GI: 70981881 Blast Desc: aldehyde dehydrogenase [Aspergillus fumigatus Af293] gi|66844092|gb|EAL84431.1| aldehyde dehydrogenase, [Aspergillus fumigatus Af293] gi|159122305|gb|EDP47427.1| aldehyde fumigatus
  misc_feature (16)..(475): NCBI GI: 67516917 Blast Desc: AN0740.2 [Aspergillus nidulans FGSC A4] gi|40746226|gb|EAA65382.1| AN0740.2 [Aspergillus nidulans FGSC A4] gi|259488982|tpe|CBF88877.1| TPA: conserved [Aspergillus FGSC
  misc_feature (13)..(477): NCBI GI: 121714751 Blast Desc: aldehyde dehydrogenase [Aspergillus clavatus NRRL 1] gi|119403140|gb|EAW13560.1| aldehyde dehydrogenase [Aspergillus clavatus NRRL 1]
  misc_feature (11)..(479): NCBI GI: 164422865 Blast Desc: NCU09648 [Neurospora crassa OR74A] gi|157069853|gb|EAA29478.2| NCU09648 [Neurospora crassa OR74A]
  misc_feature (9)..(475): NCBI GI: 145249146 Blast Desc: An14g02870 [Aspergillus niger] gi|134081589|emb|CAK41998.1| protein product [Aspergillus niger]
  misc_feature (31)..(474): SWISSPROT Homolog: EC 1.2.1.8 Betaine-aldehyde dehydrogenase
  misc_feature: Useful for introducing or modulating the production of volatile compounds
  misc_feature: Useful for fungicidal and/or biocontrol applications
MSDYQDYKIDFGTFNNVINNKLTSTTGARHTVDPNTEEPLWDVPVSSKQEVDLAVDAAKAAFPSWSKLSQNERARHLDKLADAIEANYDEFCKLLGKEAGKTAQIVQVEMDLAMGLARETPKLRLKEETLIDDGERTAIVRHVPCGVGVGLVPWNFPLALGIGKCFAALLAGCTFIWKPSPYSPYTALKVAELGARILPPGVLQALSGEEDIGPMLTAHPDVAKISFTGSVQTGKKVFAACAGTLKRVTLELGGNDAAIICEDVDVEAVAAKMSSLAFIHSGQICMNVKRIYIHERIYDKFLAAFIETTKQLSIGDTANPETTFGPVQNQMQHNKLQKLYATNADEGCKTVYAGKLMNKKGFFMAPAIIDNPPDDSTIVVEEPFGPIVPVLKWSDEEDVIRRANSSKLGLGASVWSKDVSRAKAIVERLEAGNLWINTAFELDPRVPFGGHKESGIGVEWGALALQGWCNSQALWTRHT

SEQ ID NO: 16557 - DNA, 849 bp, Muscodor strobelii
  misc_feature: SGI cDNA ID NO. 565512
  misc_feature: Encodes the peptide sequence at SEQ ID NO 16558
atgatgtccctttttcactctttggaaaccgatgatctcacgggagatgagaagcccattttcaatatcctgaaaacaagtatctcctatcctacgacgtctgaatctttagctgaaagactagcggatgatattgtcttcttctgcgaatctgcagccgaggatgaggattctatagtaatcttgagcatggtctgggatataattttcgacatgatatgctgcattccttcggaccacgagtggcaagatacgtgggttaatgccctgaaaattttacggactaaacaaagccttccaccaaaaggggatatcatgccgcaggaattatcttggaaagaacttccgttatttctacagcagcaaagatacaatctggatcgggcaactagtcgggatgatagccaattcaagaatattttctcatttgctgcgcgactatacgcctcaggggtaacgaatacgcatctgtacccaatatctgaatttcgattaacgatggagagtaacgaccctactgaggatgttggtgatgcggcgctctgggtagcgtgcgagtggtacattcgctgcgcaaaccagatattccaactcatgacagaaacagaggaacccaagggcgacgaagaaacggccgcctggcagctgggtaatgcttgggcggacaaagaaaacgttggtctctttagcattgagcgctggaacctttggaagaagtggctttgggagaaagaggagagcatatcaaaacagaacaagaatcctagtgactgtgacatggcggcccgaatctccgaagccctagagaagatggcagaggcggaaaaaactgcgaaccataaatcttga

SEQ ID NO: 16558 - protein, 282 aa, Muscodor strobelii
  misc_feature: SGI Peptide ID NO. 565512
  misc_feature (62)..(271): NCBI GI: 256722664 Blast Desc: NECHADRAFT_53008 [Nectria haematococca mpVI 77-13-4]
  misc_feature (62)..(239): NCBI GI: 46139349 Blast Desc: FG11189.1 [Gibberella zeae PH-1]
  misc_feature (2)..(195): NCBI GI: 121719165 Blast Desc: conserved [Aspergillus clavatus NRRL 1] gi|119404506|gb|EAW14882.1| conserved [Aspergillus clavatus NRRL 1]
  misc_feature (18)..(279): NCBI GI: 145603087 Blast Desc: [Magnaporthe grisea 70-15] gi|145011411|gb|EDJ96067.1| [Magnaporthe grisea 70-15]
MMSLFHSLETDDLTGDEKPIFNILKTSISYPTTSESLAERLADDIVFFCESAAEDEDSIVILSMVWDIIFDMICCIPSDHEWQDTWVNALKILRTKQSLPPKGDIMPQELSWKELPLFLQQQRYNLDRATSRDDSQFKNIFSFAARLYASGVTNTHLYPISEFRLTMESNDPTEDVGDAALWVACEWYIRCANQIFQLMTETEEPKGDEETAAWQLGNAWADKENVGLFSIERWNLWKKWLWEKEESISKQNKNPSDCDMAARISEALEKMAEAEKTANHKS

SEQ ID NO: 16559 - DNA, 1578 bp, Muscodor strobelii
  misc_feature: SGI cDNA ID NO. 565513
  misc_feature: Encodes the peptide sequence at SEQ ID NO 16560
atggacactgcctcacacgcctcgacccaatatgccgtttatattgggccctggaccaactactcgaggggacgggtacttgggggcactctcaccttgactcgccatgatggagatctcctcatcgcgtttctagccgtcttcgtttccctcgtcgcatcaagatcctggaaggtcgtgtgttttgtttttcatcgagtctattcgatcaaggcaaaacagtctgctgttcattttcagcaccaggccatattacgtaatgcggcaagtgctgaagatgggttgcggctgctgttgccgttgatgtggttcaactcccgtccagatctgctgttccgtcctctatcgacatccgcaattgcactcatctgcgtcgtagggttcacaatcgcgggcggttactcctctcgcgtatctacagcagctggtgatgaggtactcattgacagttcgaattgcggctatagatccgacacacatgcggcgtgcccctttgccgacgagaacttgtgtcgcacggcatctgaaaacttaatcatcgattctggcattctcgatagccatgttcatttcggcttcaatgctccctccaaggatagaatactatggagaaatgttgtccattgtgctccactggccactgaaggttattcaagtctgtatttcagtgatcgcccatctttgaatgggtcgactgagtattactacggctcctatccggcattctctatcgaatctcggaatcgttatcattcgtttcttgcgccacctctaacgagtcaatacgacttcggcgattcaaacgattcggctgtaacattcgggagctttgacttacaattgagcacaactcttatacaaaatcagtctactacacccgattcacactttctaatggacggaatggctcgtgatgatgccgattcctacatcttctggctaatgggcaacggtattactttcagcgaggcctttgacgatatatggtatcaggtctcacctgtcgaagaagttgctgagatattgcacaccgatacggggtccacggtcaccaatcaaaccactgcctctgagccagcttcgccgctgtactgctcatatcaatatcagttctgccatcccgtcactggcgactgcggaccgcttgcgagccaatatgacgcaatcgccggtgcagcccctttatttgacacaacttacgacgaattccttggggatgtggccaaaagcgacactgcagcccggtttatctacttcgtcaagtcagccattacaccaaatgcgccttatatccatgatattctcatacagcttggtccatcggtcttactatcccctaaaagtcagctcaacggcatccagtatggtctagctactaaccagtggcaactggacatgtcaaacgtttgggccatcttaatggctagttatcaatcggcagtcttggacgctgcacacggtcctagaagccccgaaattcttggcgattgggtcaacttcacaaacccagagtttcgaaaactttgtcaaaatcaggtacaacacggttttcaggttatttgggcaacaactgactaa

SEQ ID NO: 16560 - protein, 525 aa, Muscodor strobelii
  misc_feature: SGI Peptide ID NO. 565513
  misc_feature (6)..(512): NCBI GI: 169615058 Blast Desc: SNOG_10683 [Phaeosphaeria nodorum SN15] gi|111060957|gb|EAT82077.1| SNOG_10683 [Phaeosphaeria nodorum SN15]
  misc_feature (7)..(512): NCBI GI: 189194015 Blast Desc: conserved [Pyrenophora tritici-repentis Pt-1C-BFP] gi|187978910|gb|EDU45536.1| conserved [Pyrenophora tritici-repentis Pt-1C-BFP]
  misc_feature (8)..(515): NCBI GI: 169772941 Blast Desc: [Aspergillus oryzae RIB40] gi|83768800|dbj|BAE58937.1| protein product [Aspergillus oryzae]
  misc_feature (13)..(489): NCBI GI: 115399382 Blast Desc: [Aspergillus terreus NIH2624] gi|114192163|gb|EAU33863.1| [Aspergillus terreus NIH2624]
  misc_feature (13)..(489): NCBI GI: 119474227 Blast Desc: NFIA_004500 [Neosartorya fischeri NRRL 181] gi|119407142|gb|EAW17092.1| conserved [Neosartorya fischeri NRRL 181]
  misc_feature (13)..(515): NCBI GI: 121699395 Blast Desc: ACLA_082720 [Aspergillus clavatus NRRL 1] gi|119396149|gb|EAW06581.1| ACLA_082720 [Aspergillus clavatus NRRL 1]
  misc_feature (13)..(512): NCBI GI: 70986226 Blast Desc: conserved [Aspergillus fumigatus Af293] gi|66846236|gb|EAL86569.1| conserved [Aspergillus fumigatus Af293]
  misc_feature (13)..(512): NCBI GI: 159128250 Blast Desc: conserved [Aspergillus fumigatus A1163]
  misc_feature (13)..(374): NCBI GI: 115433432 Blast Desc: [Aspergillus terreus NIH2624] gi|114189705|gb|EAU31405.1| [Aspergillus terreus NIH2624]
  misc_feature (12)..(478): NCBI GI: 169618215 Blast Desc: SNOG_12297 [Phaeosphaeria nodorum SN15] gi|160703576|gb|EAT80110.2| SNOG_12297 [Phaeosphaeria nodorum SN15]
MDTASHASTQYAVYIGPWTNYSRGRVLGGTLTLTRHDGDLLIAFLAVFVSLVASRSWKVVCFVFHRVYSIKAKQSAVHFQHQAILRNAASAEDGLRLLLPLMWFNSRPDLLFRPLSTSAIALICVVGFTIAGGYSSRVSTAAGDEVLIDSSNCGYRSDTHAACPFADENLCRTASENLIIDSGILDSHVHFGFNAPSKDRILWRNVVHCAPLATEGYSSLYFSDRPSLNGSTEYYYGSYPAFSIESRNRYHSFLAPPLTSQYDFGDSNDSAVTFGSFDLQLSTTLIQNQSTTPDSHFLMDGMARDDADSYIFWLMGNGITFSEAFDDIWYQVSPVEEVAEILHTDTGSTVTNQTTASEPASPLYCSYQYQFCHPVTGDCGPLASQYDAIAGAAPLFDTTYDEFLGDVAKSDTAARFIYFVKSAITPNAPYIHDILIQLGPSVLLSPKSQLNGIQYGLATNQWQLDMSNVWAILMASYQSAVLDAAHGPRSPEILGDWVNFTNPEFRKLCQNQVQHGFQVIWATTD

SEQ ID NO: 16561 - DNA, 2009 bp, Muscodor strobelii
  misc_feature: SGI EST ID NO. CUFF.39147.0
  misc_feature: Variant of the nucleotide sequence at SEQ ID NO 16559
gtggtataatctcaagtgcagcaacttatgcaacgcagtgttattcaaactcaagcagcacctatagcactcggatgggcggttgtgatcagttcgtatcgagtcgtattaatggcttcagcgacacacatgcggcgtgcccctttgccgacgagaacttgtgtcgcacggcatctgaaaacttaatcatcgattctggcattctcgatagccatgttcatttcggcttcaatgctccctccaaggatagaatactatggagaaatgttgtccattgtgctccactggccactgaaggttattcaagtctgtatttcagtgatcgcccatctttgaatgggtcgactgagtattactacggctcctatccggcattctctatcgaatctcggaatcgttatcattcgtttcttgcgccacctctaacgagtcaatacgacttcggcgattcaaacgattcggctgtaacattcgggagctttgacttacaattgagcacaactcttatacaaaatcagtctactacacccgattcacactttctaatggacggaatggctcgtgatgatgccgattcctacatcttctggctaatgggcaacggtattactttcagcgaggcctttgacgatatatggtatcaggtctcacctgtcgaagaagttgctgagatattgcacaccgatacggggtccacggtcaccaatcaaaccactgcctctgagccagcttcgccgctgtactgctcatatcaatatcagttctgccatcccgtcactggcgactgcggaccgcttgcgagccaatatgacgcaatcgccggtgcagcccctttatttgacacaacttacgacgaattccttggggatgtggccaaaagcgacactgcagcccggtttatctacttcgtcaagtcagccattacaccaaatgcgccttatatccatgatattctcatacagcttggtccatcggtcttactatcccctaaaagtcagctcaacggcatccagtatggtctagctactaaccagtggcaactggacatgtcaaacgtttgggccatcttaatggctagttatcaatcggcagtcttggacgctgcacacggtcctagaagccccgaaattcttggcgattgggtcaacttcacaaacccagagtttcgaaaactttgtcaaaatcagaaatttcgaacaacatcgttcgcatccttcagtctagtgggattgatcgtcatatttgtcgctggggtgtccttggtcctgatcagctatatcctcgaaccactctctcagtttttctacagaaggggctatagacaatatgagcatctggaatgggtgaccaattcaacacttcaattacaacgctcggcatacgagtcattggaaatgggaacgtggtcaaattgtacgggaacagtgcctactacagcgcgaggtgaaatgctagggaggctggatatctccaatacggaacatcctttcatctgctccaaatatggcatctgactggtatgctcactcaggtgagagctgtgtattcacggaaacaagtaccgaattgacttgaggatgatcaccgtatatatgcgctgctgaacacctgtatcaggcgccaccgagcatggcgtattatctcacaaccctcacttcgtataagtgggctacttcgtgacacatttgactaatcttttcaaatagacgggttgcaatgctaaccgggtcaaaggctttgtagtaattacgctgctacgaccattactcgacgagtgaaatctggaacctttcctatgatctcctataatgaatcaaaactgattcgaaagcaatggtactttatattcatgaagccttatggttatgatcatcaatcaaacggatcttgatgcgtcgtgcttatccaaaacgctggcatccgataacatttcgtgttgtcggatctcttttggccgtctgttggaccagcagccattccagttgcggggtccaaagggcgtaacgaag

SEQ ID NO: 16562 - DNA, 1167 bp, Muscodor strobelii
  misc_feature: SGI cDNA ID NO. 565514
  misc_feature: Encodes the peptide sequence at SEQ ID NO 16563
atggagactttggatgttgtgattgttggcgcgggcatttcaggtatcaactgcgcataccgtcttcaagcagctcttccgcatctgacctttgccgttctcgagtcacgagatagtatcggcggtacttgggatttctggcggtttcctggtgtgcgatcggattcggacatccattctatgcgtttcgcatggcatccatttccttacgacaacccgtaccccacgggagatcaaatgatggagtatattacctctgctatatccaagcatcatctcgagagatttatacgttttcgcagccgagttgtagcaacagattggtcaacgtcagacctcgcttggcttgtctcggtcgatcagttgcgaaaccagcagcagcaacagcagaaggagcgcacaacaattcgagcgcgctggttagttttagcaacgggatactacgactatgagtcaccttcgatagccagtatccctggccttgatatcttcaaaggggacatcatcaatccacaattctggccgcaagatctggactgcaccgacaaaaaggttacgctcatcggaagcggtgcaaccgctataacaatgatgcctcagctgtcaaatacagatgggcagtttttcaaagcgcttcatcaaccaaacgtacaactcattactggcgacatcaaatctatcacgaatgatgccattgtgatgaacgacggtcatgtgacatactctgacctaatcatcactgccacaggattacgtatgatactgggaggtaagatccgtatgtccattgatggaaagcccgtctcatggcaaaagcgattcgcttggaatgctgccatgctagacaaggtgccaaacatgatattcatgctcggctaccccaatcattcttggactcttggcgtggacaactctgccatcattctagtcaggctgatgagacatatggacaagaagggtttcagatcagcaatgccccaggtgtcccctaaggcggcatcgggaacacagaggatgtggcccttggattccacatattctaaggcggcagagcctgacctgccggtgtacgggatggcagggaattggaaaccgagagctagcccaactatggacatcttgcacgcccgctggggagactttaccaatgatctagtctttttgtag

SEQ ID NO: 16563 - protein, 388 aa, Muscodor strobelii
  misc_feature: SGI Peptide ID NO. 565514
  misc_feature (13)..(42): Pfam Id: PF01593 Pfam Desc: Flavin containing amine oxidoreductase
  misc_feature (5)..(25): Pfam Id: PF01266 Pfam Desc: FAD dependent oxidoreductase
  misc_feature (5)..(47): Pfam Id: PF05834 Pfam Desc: Lycopene cyclase protein
  misc_feature (4)..(42): Pfam Id: PF01946 Pfam Desc: Thi4 family
  misc_feature (1)..(204): NCBI GI: 115449805 Blast Desc: conserved [Aspergillus terreus NIH2624] gi|114187649|gb|EAU29349.1| conserved [Aspergillus terreus NIH2624]
  misc_feature (1)..(201): NCBI GI: 67903822 Blast Desc: AN8898.2 [Aspergillus nidulans FGSC A4] gi|40744956|gb|EAA64112.1| AN8898.2 [Aspergillus nidulans FGSC A4] gi|259486668|tpe|CBF84706.1| TPA: flavin-binding [Aspergillus
  misc_feature (3)..(229): NCBI GI: 225678917 Blast Desc: monooxygenase [Paracoccidioides brasiliensis Pb03]
  misc_feature (3)..(229): NCBI GI: 226282061 Blast Desc: monooxygenase [Paracoccidioides brasiliensis Pb01]
  misc_feature (5)..(203): NCBI GI: 119484002 Blast Desc: flavin-binding monooxygenase, [Neosartorya fischeri NRRL 181] gi|119410060|gb|EAW20007.1| flavin-binding monooxygenase, [Neosartorya fischeri NRRL 181]
  misc_feature (5)..(203): NCBI GI: 70982843 Blast Desc: flavin-binding monooxygenase [Aspergillus fumigatus Af293] gi|66844574|gb|EAL84911.1| flavin-binding monooxygenase, [Aspergillus fumigatus Af293]
  misc_feature (5)..(203): NCBI GI: 159123833 Blast Desc: flavin-binding monooxygenase, [Aspergillus fumigatus A1163]
  misc_feature (5)..(204): NCBI GI: 121714827 Blast Desc: flavin-binding monooxygenase, [Aspergillus clavatus NRRL 1] gi|119403179|gb|EAW13597.1| flavin-binding monooxygenase, [Aspergillus clavatus NRRL 1]
  misc_feature (2)..(204): NCBI GI: 212536306 Blast Desc: flavin-binding monooxygenase, [Penicillium marneffei ATCC 18224] gi|210070708|gb|EEA24798.1| flavin-binding monooxygenase, [Penicillium marneffei ATCC 18224]
  misc_feature (3)..(229): NCBI GI: 226287919 Blast Desc: monoxygenase [Paracoccidioides brasiliensis Pb18]
  misc_feature (4)..(244): SWISSPROT Homolog: EC 1.14.13.84 4-hydroxyacetophenone monooxygenase
METLDVVIVGAGISGINCAYRLQAALPHLTFAVLESRDSIGGTWDFWRFPGVRSDSDIHSMRFAWHPFPYDNPYPTGDQMMEYITSAISKHHLERFIRFRSRVVATDWSTSDLAWLVSVDQLRNQQQQQQKERTTIRARWLVLATGYYDYESPSIASIPGLDIFKGDIINPQFWPQDLDCTDKKVTLIGSGATAITMMPQLSNTDGQFFKALHQPNVQLITGDIKSITNDAIVMNDGHVTYSDLIITATGLRMILGGKIRMSIDGKPVSWQKRFAWNAAMLDKVPNMIFMLGYPNHSWTLGVDNSAIILVRLMRHMDKKGFRSAMPQVSPKAASGTQRMWPLDSTYSKAAEPDLPVYGMAGNWKPRASPTMDILHARWGDFTNDLVFL

SEQ ID NO: 16564 - DNA, 951 bp, Muscodor strobelii
  misc_feature: SGI cDNA ID NO. 565515
  misc_feature: Elevated expression when VOC is produced
  misc_feature: Encodes the peptide sequence at SEQ ID NO 16565
atgtcaacttcgcccgaattcttgaccggccagccgtctcgcattcgcgagttcgttgacaagttcgacacattcatcgtaggctgccacggcgttctgctagatggagaggatgcaatcgagggaagtgttgaagctattgaatggttacaacaactaaacaaggagataattgtggccacgaataatacctcgaaatcggccagcaacctgcacgtacacctgagaaacaagggctttcagatcgagaaagcaaagcttgtgacatccggagaatgcgtttcttaccacctaaagcgggagttgctccagagcctcgactacgatattgtcttcgttattggggaggcgagccttaccactgaactggaaagggagttcattaaatgcacttccgagacaaaaaggatcggtgttcgcaacatggatccaactcaagcacagaatgacgtgcaaccagtcgaaagtcgtcgagcggaaagcaagattgtagccgtcgtagtgggcgacgatccatgtcccactgacgacaagctctctttcgcatcgtattgcattcaaaaaggagcgaagttctttgcgacgagcgtcgtggatacgaaatatcaaggtggcggtcccccgtacgggccaggccagactgcagccgctatctctcttgaagccaaaaaagaaccggaaatagcggggaagccgggcaaaatcatgatggagacacttgtacatttcctcaacattaaggaggaacagaaggctcgcatttgtgtcatcggtgatagactggacgaagatcttcaattcgctcaagtaggaggattcggaggcggtctgctcacactcaatggtgtttcaactttacagaacctagaaatgttcgcggactcgcaaaagcaatctgtcacgtatgtcaacaagctaggtgaccttgtggtaggcaaggaggagtcttga

SEQ ID NO: 16565 - protein, 316 aa, Muscodor strobelii
  misc_feature: SGI Peptide ID NO. 565515
  misc_feature (1)..(310): NCBI GI: 225562413 Blast Desc: 4-nitrophenylphosphatase [Ajellomyces capsulatus G186AR]
  misc_feature (1)..(310): NCBI GI: 154279300 Blast Desc: conserved [Ajellomyces capsulatus NAm1] gi|150412406|gb|EDN07793.1| conserved [Ajellomyces capsulatus NAm1]
  misc_feature (1)..(310): NCBI GI: 261205026 Blast Desc: 4-nitrophenylphosphatase [Ajellomyces dermatitidis SLH14081] gi|239592309|gb|EEQ74890.1| 4-nitrophenylphosphatase [Ajellomyces dermatitidis SLH14081] gi|239611537|gb|EEQ88524.1|
  misc_feature (2)..(314): NCBI GI: 242822506 Blast Desc: 4-nitrophenylphosphatase [Talaromyces stipitatus ATCC 10500] gi|218712821|gb|EED12246.1| 4-nitrophenylphosphatase [Talaromyces stipitatus ATCC 10500]
  misc_feature (3)..(309): NCBI GI: 171686686 Blast Desc: protein product [Podospora anserina] gi|170943304|emb|CAP68957.1| protein product [Podospora anserina]
  misc_feature (3)..(314): NCBI GI: 259486084 Blast Desc: TPA: 4-nitrophenylphosphatase (AFU_orthologue; AFUA_3G08310) [Aspergillus nidulans FGSC A4]
  misc_feature (1)..(313): NCBI GI: 121705178 Blast Desc: 4-nitrophenylphosphatase [Aspergillus clavatus NRRL 1] gi|119398998|gb|EAW09426.1| 4-nitrophenylphosphatase [Aspergillus clavatus NRRL 1]
  misc_feature (1)..(310): NCBI GI: 226292667 Blast Desc: 4-nitrophenylphosphatase [Paracoccidioides brasiliensis Pb18]
  misc_feature (1)..(310): NCBI GI: 169767790 Blast Desc: [Aspergillus oryzae RIB40] gi|238484699|ref|XP_002373588.1| 4-nitrophenylphosphatase [Aspergillus flavus NRRL3357] gi|83766221|dbj|BAE56364.1| protein
  misc_feature (1)..(310): NCBI GI: 240281118 Blast Desc: 4-nitrophenylphosphatase [Ajellomyces capsulatus H143]
  misc_feature (12)..(269): SWISSPROT Homolog: EC 3.1.3.41 4-nitrophenylphosphatase
  misc_feature: Useful for introducing or modulating the production of volatile compounds
MSTSPEFLTGQPSRIREFVDKFDTFIVGCHGVLLDGEDAIEGSVEAIEWLQQLNKEIIVATNNTSKSASNLHVHLRNKGFQIEKAKLVTSGECVSYHLKRELLQSLDYDIVFVIGEASLTTELEREFIKCTSETKRIGVRNMDPTQAQNDVQPVESRRAESKIVAVVVGDDPCPTDDKLSFASYCIQKGAKFFATSVVDTKYQGGGPPYGPGQTAAAISLEAKKEPEIAGKPGKIMMETLVHFLNIKEEQKARICVIGDRLDEDLQFAQVGGFGGGLLTLNGVSTLQNLEMFADSQKQSVTYVNKLGDLVVGKEES

SEQ ID NO: 16566 - DNA, 901 bp, Muscodor strobelii
  misc_feature: SGI EST ID NO. CUFF.39154.0
  misc_feature: Variant of the nucleotide sequence at SEQ ID NO 16564
gctgccacggcgttctgctagatggagaggatgcaatcgagggaagtgttgaagctattgaatggttacaacaactaaacaaggagataattgtggccacgaataatacctcgaaatcggccagcaacctgcacgtacacctgagaaacaagggctttcagatcgagaaagcaaagcttgtgacatccggagaatgcgtttcttaccacctaaagcgggagttgctccagagcctcgactacgatattgtcttcgttattggggaggcgagccttaccactgaactggaaagggagttcattaaatgcacttccgagacaaaaaggatcggtgttcgcaacatggatccaactcaagcacagaatgacgtgcaaccagtcgaaagtcgtcgagcggaaagcaagattgtagccgtcgtagtgggcgacgatccatgtcccactgacgacaagctctctttcgcatcgtattgcattcaaaaaggagcgaagttctttgcgacgagcgtcgtggatacgaaatatcaaggtggcggtcccccgtacgggccaggccagactgcagccgctatctctcttgaagccaaaaaagaaccggaaatagcggggaagccgggcaaaatcatgatggagacacttgtacatttcctcaacattaaggaggaacagaaggctcgcatttgtgtcatcggtgatagactggacgaagatcttcaattcgctcaagtaggaggattcggaggcggtctgctcacactcaatggtgtttcaactttacagaacctagaaatgttcgcggactcgcaaaagcaatctgtcacgtatgtcaacaagctaggtgaccttgtggtaggcaaggaggagtcttgactacgagattttagtagtttccagcattgatt

SEQ ID NO: 16567 - DNA, 690 bp, Muscodor strobelii
  misc_feature: SGI cDNA ID NO. 565516
  misc_feature: Encodes the peptide sequence at SEQ ID NO 16568
atgctgctcagttgggcttattactacgactccatggctcgcttcagtatccaacattggcaggatcccgatgagccacgattccctatgcctccttctatctgtcgggatgtaatgatctcgccatcccgggacttcgatgctattgatctactggcggaggtatccagcatgatctcgatgaagcctcccccatccgccccgaaagaggacattttggactaccgagaccacgtgagcctacttagaggaaaaattcggatggcactcaagaaaggaaacggaactcttgggaacactccagacatttcaatgattgttgaactatttcacatagctctgaatgtgtacctcgaccgagggacagaagacctgctcgataaaaacccgaagcaattgcgtgagcacatcgatcgagctttcaagatcatgtctcagctctccttctgcgagcggcagtttcctctgctcatacttggagttgaggctcgttcagacgagcaaaaaatagtgttccttgatcttctctggaggagcaagtctgtacactctcccaatcctgtcactcaggtcaaaggcattgttgaggctatctgggcacagcagagtcttgcagagagtcaccttgactatatgaaactactcaagggtgtaataagctcagttgcgccattgcctatctttatatag

SEQ ID NO: 16568 - protein, 229 aa, Muscodor strobelii
  misc_feature: SGI Peptide ID NO. 565516
  misc_feature (1)..(228): NCBI GI: 169613577 Blast Desc: SNOG_09919 [Phaeosphaeria nodorum SN15] gi|111061134|gb|EAT82254.1| SNOG_09919 [Phaeosphaeria nodorum SN15]
  misc_feature (2)..(222): NCBI GI: 256730463 Blast Desc: NECHADRAFT_73999 [Nectria haematococca mpVI 77-13-4]
  misc_feature (2)..(229): NCBI GI: 258575183 Blast Desc: [Uncinocarpus reesii 1704] gi|237902039|gb|EEP76440.1| [Uncinocarpus reesii 1704]
  misc_feature (1)..(229): NCBI GI: 171681172 Blast Desc: protein product [Podospora anserina] gi|170940544|emb|CAP65772.1| protein product [Podospora anserina]
  misc_feature (1)..(180): NCBI GI: 261358229 Blast Desc: conserved [Verticillium albo-atrum VaMs.102]
  misc_feature (2)..(229): NCBI GI: 212532425 Blast Desc: conserved [Penicillium marneffei ATCC 18224] gi|210071733|gb|EEA25822.1| conserved [Penicillium marneffei ATCC 18224]
  misc_feature (2)..(229): NCBI GI: 67522384 Blast Desc: AN1649.2 [Aspergillus nidulans FGSC A4] gi|40745613|gb|EAA64769.1| [Aspergillus nidulans FGSC A4] gi|259486985|tpe|CBF85292.1| TPA: conserved [Aspergillus nidulans
  misc_feature (2)..(224): NCBI GI: 238494944 Blast Desc: conserved [Aspergillus flavus NRRL3357] gi|220695358|gb|EED51701.1| conserved [Aspergillus flavus NRRL3357]
  misc_feature (2)..(229): NCBI GI: 242797958 Blast Desc: TSTA_009570 [Talaromyces stipitatus ATCC 10500] gi|218716414|gb|EED15835.1| TSTA_009570 [Talaromyces stipitatus ATCC 10500]
  misc_feature (2)..(229): NCBI GI: 242797963 Blast Desc: TSTA_009570 [Talaromyces stipitatus ATCC 10500] gi|218716415|gb|EED15836.1| TSTA_009570 [Talaromyces stipitatus ATCC 10500]
MLLSWAYYYDSMARFSIQHWQDPDEPRFPMPPSICRDVMISPSRDFDAIDLLAEVSSMISMKPPPSAPKEDILDYRDHVSLLRGKIRMALKKGNGTLGNTPDISMIVELFHIALNVYLDRGTEDLLDKNPKQLREHIDRAFKIMSQLSFCERQFPLLILGVEARSDEQKIVFLDLLWRSKSVHSPNPVTQVKGIVEAIWAQQSLAESHLDYMKLLKGVISSVAPLPIFI

SEQ ID NO: 16569 - DNA, 412 bp, Muscodor strobelii
  misc_feature: SGI EST ID NO. CUFF.39163.0
  misc_feature: Variant of the nucleotide sequence at SEQ ID NO 16567
cgactccatggctcgcttcagtatccaacattggcaggatcccgatgagccacgattccctatgcctccttctatctgtcgggatgtaatgatctcgccatcccgggacttcgatgctattgatctactggcggaggtatccagcatgatctcgatgaagcctcccccatccgccccgaaagaggacattttggactaccgagaccacgtgagcctacttagaggaaaaattcggatggcactcaagaaaggaaacggaactcttgggaacactccagacatttcaatgattgttgaactatttcacatagctctgaatgtgtacctcgaccgagggacagaagacctgctcgataaaaacccgaagcaattgcgtgagcacatcgatcgagctttcaagatcatgtctcag

SEQ ID NO: 16570 - DNA, 1164 bp, Muscodor strobelii
  misc_feature: SGI cDNA ID NO. 565517
  misc_feature: Encodes the peptide sequence at SEQ ID NO 16571
atgtctgacatgctcttagagtaccgcaaactcggaccaacgagctacaataactcgtttcaacccttagaaccagactccggggaaggggagttgttgcagtattgtacaacccgcttcatccaagatatcgaaacgcgtctgtctaatcgggctacagtccaacataccgcgtaccgatctattgcctcatttggctatgacgctgccagcatcggaaatctcatcatgcgcatatctattcaagatagcagtccatctactaaaggggtactgaagtctctcctcgctttgtcatctctacatcgccacgggatccagtcgcagtgcgttgaattcaagattgctgccatcaggtctttagcagctgcgacacagggcccagttggcaccaaggaagtcatccagcacgtcgctgctgctatgatactttgctcgatcgaggcgaacatacatcgcgatgacgacctttccatgctgctcagttgggcttattactacgactccatggctcgcttcagtatccaacattggcaggatcccgatgagccacgattccctatgcctccttctatctgtcgggatgtaatgatctcgccatcccgggacttcgatgctattgatctactggcggaggtatccagcatgatctcgatgaagcctcccccatccgccccgaaagaggacattttggactaccgagaccacgtgagcctacttagaggaaaaattcggatggcactcaagaaaggaaacggaactcttgggaacactccagacatttcaatgattgttgaactatttcacatagctctgaatgtgtacctcgaccgagggacagaagacctgctcgataaaaacccgaagcaattgcgtgagcacatcgatcgagctttcaagatcatgtctcagctctccttctgcgagcggcagtttcctctgctcatacttggagttgaggctcgttcagacgagcaaaaaatagtgttccttgatcttctctggaggagcaagtctgtacactctcccaatcctgtcactcaggtcaaaggcattgttgaggctatctgggcacagcagagtcttgcagagagtcaccttgactatatgaaactactcaagggtgtaataagctcagttgcgccattgcctatctttatatag

SEQ ID NO: 16571 - protein, 387 aa, Muscodor strobelii
  misc_feature: SGI Peptide ID NO. 565517
  misc_feature (55)..(387): NCBI GI: 171681172 Blast Desc: protein product [Podospora anserina] gi|170940544|emb|CAP65772.1| protein product [Podospora anserina]
  misc_feature (58)..(380): NCBI GI: 256730463 Blast Desc: NECHADRAFT_73999 [Nectria haematococca mpVI 77-13-4]
  misc_feature (61)..(386): NCBI GI: 169613577 Blast Desc: SNOG_09919 [Phaeosphaeria nodorum SN15] gi|111061134|gb|EAT82254.1| SNOG_09919 [Phaeosphaeria nodorum SN15]
  misc_feature (49)..(387): NCBI GI: 67522384 Blast Desc: AN1649.2 [Aspergillus nidulans FGSC A4] gi|40745613|gb|EAA64769.1| [Aspergillus nidulans FGSC A4] gi|259486985|tpe|CBF85292.1| TPA: conserved [Aspergillus nidulans
  misc_feature (49)..(340): NCBI GI: 261358229 Blast Desc: conserved [Verticillium albo-atrum VaMs.102]
  misc_feature (52)..(382): NCBI GI: 238494944 Blast Desc: conserved [Aspergillus flavus NRRL3357] gi|220695358|gb|EED51701.1| conserved [Aspergillus flavus NRRL3357]
  misc_feature (57)..(387): NCBI GI: 212532425 Blast Desc: conserved [Penicillium marneffei ATCC 18224] gi|210071733|gb|EEA25822.1| conserved [Penicillium marneffei ATCC 18224]
  misc_feature (57)..(387): NCBI GI: 242797958 Blast Desc: TSTA_009570 [Talaromyces stipitatus ATCC 10500] gi|218716414|gb|EED15835.1| TSTA_009570 [Talaromyces stipitatus ATCC 10500]
  misc_feature (57)..(387): NCBI GI: 242797963 Blast Desc: TSTA_009570 [Talaromyces stipitatus ATCC 10500] gi|218716415|gb|EED15836.1| TSTA_009570 [Talaromyces stipitatus ATCC 10500]
  misc_feature (19)..(386): NCBI GI: 256721370 Blast Desc: NECHADRAFT_82373 [Nectria haematococca mpVI 77-13-4]
MSDMLLEYRKLGPTSYNNSFQPLEPDSGEGELLQYCTTRFIQDIETRLSNRATVQHTAYRSIASFGYDAASIGNLIMRISIQDSSPSTKGVLKSLLALSSLHRHGIQSQCVEFKIAAIRSLAAATQGPVGTKEVIQHVAAAMILCSIEANIHRDDDLSMLLSWAYYYDSMARFSIQHWQDPDEPRFPMPPSICRDVMISPSRDFDAIDLLAEVSSMISMKPPPSAPKEDILDYRDHVSLLRGKIRMALKKGNGTLGNTPDISMIVELFHIALNVYLDRGTEDLLDKNPKQLREHIDRAFKIMSQLSFCERQFPLLILGVEARSDEQKIVFLDLLWRSKSVHSPNPVTQVKGIVEAIWAQQSLAESHLDYMKLLKGVISSVAPLPIFI

SEQ ID NO: 16572 - DNA, 412 bp, Muscodor strobelii; identical to SEQ ID NO: 16569
  misc_feature: SGI EST ID NO. CUFF.39163.0
  misc_feature: Variant of the nucleotide sequence at SEQ ID NO 16570

SEQ ID NO: 16573 - DNA, 816 bp, Muscodor strobelii
  misc_feature: SGI cDNA ID NO. 565518
  misc_feature: Encodes the peptide sequence at SEQ ID NO 16574
atgtcttcatatgttgttactggagcctctagaggcattggatacgggttcatactcgagctttccaacaatcctggaaatacagtgattgcaattgtccgcgatgtgaaatataccgaaaagaagctggcgaaggaacggaaacagcgcggcaatattcacttattgcaaggagacatgaccgactacgagtctctcaagaatgcggctgagaagacctcggagattaccggtggaagcctcgactacctcgtcggcaacgcgggtgttactgaccccattgaggttgtcgacgcattcgacacactagcaaatgatccttcgcgtctcgagtctgccctgcttttcccgttcaacgtcaacgtcatcggtaatgtgcatctcatcaaccttttcatgccgttgatccttaaaggtcgcgccaaaaaagtcattgctatatccagcagcgcaggcgataccgactttgtcaccaaggtccagcttgactggggcccaggctacgccatcagtaaggccgcactcaatatggcggttgctaagttcagcgctcgatacgctggagacggggtcttggtcatggctatttgtccgggaatggttgccactgaggcctttcgagggctaactgatgagcaacgcgcgaagcttcccctgatggtggagaagttcaagcatgtctacggcgaccaagtgaccacagtctcaactgagacgtccgtcaagaatgtgttgtcggtcatggagcggtcaagcgtccttaacagagacggaggttcttccgtgtctcataagggcaacaaggaatggctttga

SEQ ID NO: 16574 - protein, 271 aa, Muscodor strobelii
  misc_feature: SGI Peptide ID NO. 565518
  misc_feature (2)..(187): Pfam Id: PF00106 Pfam Desc: short chain dehydrogenase
  misc_feature (1)..(271): NCBI GI: 258575181 Blast Desc: conserved [Uncinocarpus reesii 1704] gi|237902038|gb|EEP76439.1| conserved [Uncinocarpus reesii 1704]
  misc_feature (1)..(271): NCBI GI: 67522387 Blast Desc: AN1650.2 [Aspergillus nidulans FGSC A4] gi|40745614|gb|EAA64770.1| AN1650.2 [Aspergillus nidulans FGSC A4] gi|259486986|tpe|CBF85294.1| TPA: short chain dehydrogenase
  misc_feature (1)..(271): NCBI GI: 256730666 Blast Desc: NECHADRAFT_29697 [Nectria haematococca mpVI 77-13-4]
  misc_feature (1)..(271): NCBI GI: 226281597 Blast Desc: conserved [Paracoccidioides brasiliensis Pb01]
  misc_feature (1)..(271): NCBI GI: 46114388 Blast Desc: FG03036.1 [Gibberella zeae PH-1]
  misc_feature (1)..(271): NCBI GI: 238494946 Blast Desc: short chain dehydrogenase (AtsC), [Aspergillus flavus NRRL3357] gi|220695359|gb|EED51702.1| short chain dehydrogenase (AtsC), [Aspergillus flavus NRRL3357]
  misc_feature (16)..(271): NCBI GI: 169609661 Blast Desc: SNOG_07923 [Phaeosphaeria nodorum SN15] gi|160701890|gb|EAT84199.2| SNOG_07923 [Phaeosphaeria nodorum SN15]
  misc_feature (15)..(271): NCBI GI: 169777733 Blast Desc: [Aspergillus oryzae RIB40] gi|83772069|dbj|BAE62199.1| protein product [Aspergillus oryzae]
  misc_feature (1)..(271): NCBI GI: 256724719 Blast Desc: NECHADRAFT_48385 [Nectria haematococca mpVI 77-13-4]
  misc_feature (1)..(271): NCBI GI: 242772417 Blast Desc: short chain dehydrogenase (AtsC), [Talaromyces stipitatus ATCC 10500] gi|218721654|gb|EED21072.1| short chain dehydrogenase (AtsC), [Talaromyces stipitatus ATCC 10500]
  misc_feature (5)..(203): SWISSPROT Homolog: EC 1.1.1.236 Tropinone reductase II
MSSYVVTGASRGIGYGFILELSNNPGNTVIAIVRDVKYTEKKLAKERKQRGNIHLLQGDMTDYESLKNAAEKTSEITGGSLDYLVGNAGVTDPIEVVDAFDTLANDPSRLESALLFPFNVNVIGNVHLINLFMPLILKGRAKKVIAISSSAGDTDFVTKVQLDWGPGYAISKAALNMAVAKFSARYAGDGVLVMAICPGMVATEAFRGLTDEQRAKLPLMVEKFKHVYGDQVTTVSTETSVKNVLSVMERSSVLNRDGGSSVSHKGNKEWL

SEQ ID NO: 16575 - DNA, 1017 bp, Muscodor strobelii
  misc_feature: SGI EST ID NO. CUFF.39171.0
  misc_feature: Variant of the nucleotide sequence at SEQ ID NO 16573
cttgtcagtcatttccaaactacgagcctgaaaagggtcgcaaaatattcaaactgattacaattaagtgcgaacgcaataatcgattttcagcgtattgatagatgtgagtgtctgaagattaccaagcacatgtggtcccagacttggtccctgtatgtctcatgcaagaaggggtccaccttggtgtttgggaaagtattgacgagctaacctggtttcggctgatggaacatggatctcgtttctcaaccgtacgaatactcagtctcttatatacgaaaaaggacaaatgttatatcacgtcaacatacctaccttatgcattcgaagtcgggtcaattagtaagagtaatgtccgaacatccgcagatgatgggccagcaatatagcgttaaggtatataagagcctcggctcctcgccgttcctctatccgaatattcgagcatcatatgattcggactagcatcgtcacttcattactggtaatcggcgcaaatgtcatagctgtccagatatgtcttcatatgttgttactggagcctctagaggcattggatacgggttcatactcgagctttccaacaatcctggaaatacagtgattgcaattgtccgcgatgtgaaatataccgaaaagaagctggcgaaggaacggaaacagcgcggcaatattcacttattgcaaggagacatgaccgactacgagtctctcaagaatgcggctgagaagacctcggagattaccggtggaagcctcgactacctcgtcggcaacgcgggtgttactgaccccattgaggttgtcgacgcattcgacacactagcaaatgatccttcgcgtctcgagtctgccctgcttttcccgttcaacgtcaacgtcatcggtaatgtgcatctcatcaaccttttcatgccgttgatccttaaaggtcgcgccaaaaaagtcattgctatatccagcagcgcaggcgataccgactttgtcaccaaggtccagcttgactggggccca

SEQ ID NO: 16576 - DNA, 1665 bp, Muscodor strobelii
  misc_feature: SGI cDNA ID NO. 565519
  misc_feature: Reduced expression when VOC is produced
  misc_feature: Encodes the peptide sequence at SEQ ID NO 16577
atggacgacaagacagttgcggcgacttacagccagtttgcgtgtattggcactggcttctccgggattggtctgggtgccaccctgaagcgatggtacaacatcactgacattcagtttttcgagcgccacgactcactgggaggcacttggtctataaatcagtatccaggttgcgcatgcgatgtgccaagcgtcttatacagcttctccttcgagccaaacccaaactggacgcgcgttcttcccaaccaagctgagctccgtgaatatctcaatggcgtagccaataagtatgaattgacaccaagaatgaagtttggcgtcaatgtagaggcctgcaagtggattgaggaccgcagcgtctggcgcctgcgaattcacgagtatagcactagttacaccacatatcacgagtcgcagttcttgtttgccgcatcaggccagttggtgaaaccgcgggagatcgatgtacccggcgccgacacattcaagggtcctattttccactcggcgcgttggcgaaacgatgttgatctcacgggcaagaaggttgtggtcttcggcaatggatgcacaggaacacagattatacccgctatcgtgaagaagacagagcacaccacgcacatcgttcgttcgaagcattggatcctgccgcccattgacatggagatttccgcgagggtccgattgtacctgcgctggatcccaggagcgatgcagatattccgcttcattgtatttagcttggctgagcgtggcttccgaggattcccgatgactaaggccgctgcagaataccgtcaaaaacaacgtgcacgtgtggagagctacatgcgtaggtctgcaccagagaagtatcatgatattctcattccagatttcgaggtcggctgcaagcggcggatcttcgacccgggatatttgaagagtctgcacgaggaaaatctcacattaacggatgataaacccgttgagattctcacaaatggcgttcgcactgcaaacggtgtgatagaagctgacgttattttgttggctaacggcttcgtcacgaatcacttcctagaccagatagagatccgaggccgaggagggaagactgcagaccaacactggggcgagatgggcggcgcgacagcatataattcatcggccatcagcggttttcccaacttcttcatgctgctgggccccaatgccgctacgggtcacacgtcggcaattctggcgtcggagaactcaatcaactttgcgctgcgcgtcatcaagccgatcctagacggcaagggcaccgtggtagacctgaaagaaaaggccgaacgtgactatactgagcgcattcagaatgatctggagaagactgtctggaactccggatgcgatagctggtacattcgtggtgacgggaacgggaagaaatggaactcgatgacctatccttggtctcagggctactattggtatcgcagcctgtttccttcgtggagcgactggcgcttctatggtgagaccaagccgccgagctttagacgatcccgtgttctagcagttgttggcatattctgcgcgacaatgtggtatatgaactatcgggatccaggcaggatatctgcgctgtcgagactgtggacaagaggttcagataagaaattgggctaa

SEQ ID NO: 16577 - protein, 554 aa, Muscodor strobelii
  misc_feature: SGI Peptide ID NO. 565519
  misc_feature (5)..(500): NCBI GI: 238494850 Blast Desc: monooxygenase, [Aspergillus flavus NRRL3357] gi|220695311|gb|EED51654.1| monooxygenase, [Aspergillus flavus NRRL3357]
  misc_feature (1)..(500): NCBI GI: 145248832 Blast Desc: An14g01260 [Aspergillus niger] gi|134081426|emb|CAK41908.1| protein product [Aspergillus niger]
  misc_feature (7)..(502): NCBI GI: 119473879 Blast Desc: monooxygenase [Neosartorya fischeri NRRL 181] gi|119406968|gb|EAW16918.1| monooxygenase [Neosartorya fischeri NRRL 181]
  misc_feature (5)..(500): NCBI GI: 169777665 Blast Desc: [Aspergillus oryzae RIB40] gi|83772035|dbj|BAE62165.1| protein product [Aspergillus oryzae]
  misc_feature (9)..(490): NCBI GI: 164425696 Blast Desc: NCU06153 [Neurospora crassa OR74A] gi|157071025|gb|EAA30779.2| conserved [Neurospora crassa OR74A]
  misc_feature (2)..(510): NCBI GI: 259484488 Blast Desc: TPA: conserved [Aspergillus nidulans FGSC A4]
  misc_feature (9)..(525): NCBI GI: 238492783 Blast Desc: dimethylaniline monooxygenase, [Aspergillus flavus NRRL3357] gi|220696122|gb|EED52464.1| dimethylaniline monooxygenase, [Aspergillus flavus NRRL3357]
  misc_feature (2)..(502): NCBI GI: 171678859 Blast Desc: protein product [Podospora anserina] gi|170937500|emb|CAP62158.1| protein product [Podospora anserina]
  misc_feature (9)..(525): NCBI GI: 169783038 Blast Desc: [Aspergillus oryzae RIB40] gi|83774725|dbj|BAE64848.1| protein product [Aspergillus oryzae]
  misc_feature (1)..(507): NCBI GI: 238845439 Blast Desc: monooxygenase [Microsporum canis CBS 113480]
  misc_feature (4)..(492): SWISSPROT Homolog: EC 1.14.13.84 4-hydroxyacetophenone monooxygenase
  misc_feature: Useful for introducing or modulating the production of volatile compounds
MDDKTVAATYSQFACIGTGFSGIGLGATLKRWYNITDIQFFERHDSLGGTWSINQYPGCACDVPSVLYSFSFEPNPNWTRVLPNQAELREYLNGVANKYELTPRMKFGVNVEACKWIEDRSVWRLRIHEYSTSYTTYHESQFLFAASGQLVKPREIDVPGADTFKGPIFHSARWRNDVDLTGKKVVVFGNGCTGTQIIPAIVKKTEHTTHIVRSKHWILPPIDMEISARVRLYLRWIPGAMQIFRFIVFSLAERGFRGFPMTKAAAEYRQKQRARVESYMRRSAPEKYHDILIPDFEVGCKRRIFDPGYLKSLHEENLTLTDDKPVEILTNGVRTANGVIEADVILLANGFVTNHFLDQIEIRGRGGKTADQHWGEMGGATAYNSSAISGFPNFFMLLGPNAATGHTSAILASENSINFALRVIKPILDGKGTVVDLKEKAERDYTERIQNDLEKTVWNSGCDSWYIRGDGNGKKWNSMTYPWSQGYYWYRSLFPSWSDWRFYGETKPPSFRRSRVLAVVGIFCATMWYMNYRDPGRISALSRLWTRGSDKKLG

SEQ ID NO: 16578 - DNA, 2896 bp, Muscodor strobelii
  misc_feature: SGI EST ID NO. CUFF.39223.1
  misc_feature: Variant of the nucleotide sequence at SEQ ID NO 16576
ctgaatgaaaatcactgaatcgtctttagcgatatacgttaattaatcttcatactttcactcaatcatgctcaataaacagcactgatattagtgagctacgctgtggtgggggcctattttatgattgtcccctctaccatctgtacaaaactgcttcgcgacgagtcgttgatatagcatcacaatatcctactagctcgatcatcttagcgcatagacttcatgttcaagaggggccgttatttgtccatgcatcatctgtgacgtcgaatacctaggatggatgcatgagcttcgtgccgaggtaatcaattttccaacaagtggcttagtgcgcgcgacccgcgggttgcggattggttccgttgatcatcgagctttgcctcttggtttcgcaatggatttccggaattcaacaaagtagtcgacatttgatgccgaatatttgcagtagatctccgagccatttagagtgtcgattttcgatttattctaccacatggctggcgcatttcttttagatgcgggatgttttcggctgtggcaaggatccgacagttcctgaacactggggtagctcggtttcgcatctgcatcacaatgtagactatgcagatatcgatacatccttcaataaattcggtccaaagatgcatgcccagcaattcgcatttaatgtcctttcagtgttacacttgttgtttgttgcatttgattgaattgcgaaatagtgtcaccaaagatggacgacaagacagttgcggcgacttacagccagtttgcgtgtattggcactggcttctccgggattggtctgggtgccaccctgaagcgatggtacaacatcactgacattcagtttttcgagcgccacgactcactgggaggcacttggtctataaatcagtatccaggtcagccatcattaatcctgttcgccagcatgctcaagccgttagctctaatatctgtcataaggttgcgcatgcgatgtgccaagcgtcttatacagcttctccttcgagccaaacccaaactggacgcgcgttcttcccaaccaagctgagctccgtgaatatctcaatggcgtagccaataagtatgaattgacaccaagaatgaagtttggcgtcaatgtagaggcctgcaagtggattgaggaccgcagcgtctggcgcctgcgaattcacgagtatagcactagttacaccacatatcacgagtcgcagttcttgtttgccgcatcaggccagttggtgaaaccgcgggagatcgatgtacccggcgccgacacattcaagggtcctattttccactcggcgcgttggcgaaacgatgttgatctcacgggcaagaaggttgtggtcttcggcaatggatgcacaggaacacagattatacccgctatcgtgaagaagacagagcacaccacgcacatcgttcgttcgaagcattggatcctgccgcccattgacatggagatttccgcgagggtccgattgtacctgcgctggatcccaggagcgatgcagatattccgcttcattgtatttagcttggctgagcgtggcttccgaggattcccgatgactaaggccgctgcagaataccgtcaaaaacaacgtgcacgtgtggagagctacatgcgtaggtctgcaccagagaagtatcatgatattctcattccagatttcgaggtcggctgcaagcggcggatcttcgacccgggatatttgaagagtctgcacgaggaaaatctcacattaacggatgataaacccgttgagattctcacaaatggcgttcgcactgcaaacggtgtgatagaagctgacgttattttgttggctaacggcttcgtcacgaatcacttcctagaccagatagagatccgaggccgaggagggaagactgcagaccaacactggggcgagatgggcggcgcgacagcatataattcatcggccatcagcggttttcccaacttcttcatgctgctgggccccaatgccgctacgggtcacacgtcggcaattctggcgtcggagaactcaatcaactttgcgctgcgcgtcatcaagccgatcctagacggcaagggcaccgtggtagacctgaaagaaaaggccgaacgtgactatactgagcgcattcagaatgatctggagaagactgtctggaactccggatgcgatagctggtacattcgtggtgacgggaacgggaagaaatggaactcgatgacctatccttggtctcagggctactattggtatcgcagcctgtttccttcgtggagcgactggcgcttctatggtgagaccaagccgccgagctttagacgatcccgtgttctagcagttgttggcatattctgcgcgacaatgtggtatatgaactatcgggatccaggcaggatatctgcgctgtcgagactgtggacaagaggttcagataagaaattgggctaaatgcaccggggctaggggtgtatttctgagacgcgataaccctcgcacctaacgttgagcttgtgcatcacttcaggcatccgtaattgcgcggtgcgtttcgcatatgtcgggttatcttcattcatgaaaggttggcctatttacattctcgaatgttgtgataatgtgttgatgagttagttgattgagatacgttgatgcaggtgagaagaggtactaaggtacctaaggcaatattccagatagccatagggcggaagttctggggcggtttgcgtgccaccgtagcaagtggaattaggcgatcgtaggtctagatgcaagctccaccaccggaccgcagctgacccgcggggcataaagtcacgatcgcaaaatgagatgagcaattgggtccattataaaccgctgtattaaaa

SEQ ID NO: 16579 - DNA, 2298 bp, Muscodor strobelii
  misc_feature: SGI cDNA ID NO. 565520
  misc_feature: Encodes the peptide sequence at SEQ ID NO 16580
atgtacgaagactcgtggtacagctttgggcccgaaaacacggtgaaaagaaacccgtccaactcgggacaccgacggcgcgagtccctcctccaacagcccaacggccatcagcaagcagaccgtgtcgaacctttgctgcatctctacgaagagcccgatgcccccattggaccgcccgaaccgaccctcatccctcgagccaagtcatacacagacttctaccacgtcgtccgcgcacagctgtccagagatgctgcaaggaagaagaagaagaggaaggtcaaggggcggaacttggacgcgctcgccgtagtcaagcccgaagatagcatgcccatccgcacagcccaacccttgaaatccctagacgaccagctcgccgaagccgggcagcacgagtatttactatatcaagaacaactcgagatgaccgagcgacacctcgataggctcatcgccgacaccaacgatacactcggcctgctcacctctctcgccaatgacttccgcgccgtcgagacccagacttcctccttccaagctcagtgcgatgacctcatatctgaggagaagaggctgcaaaagctggcggatgaggttggcaccgacttacactactatgcctacctggatggtgtgactaggaggttgaacgcgcccggcgcaagtcggctcgtcaaccacgacagcttcggcgagatcctcacaaacctggatgcttgtatagattttatggagaaacaccccgattaccgagatgctgaatcttatttggcccgataccaatctcttctcgtaaaggctcttcacctgctcgaagtcgggttctcggcacatctcgacaaggtgtcagccgagatatcaaaacagatattagagacacagtcggaagcagcacgtcatgctcttgcgtatgggagaagtgaagaaatgctactcgaggccgatggtctcatcaacaacgtccagcgtgtcatccgcagctgctatgaccagttcgggaagtcgacacaaggacccaacttcgacacctattccaacacggctatcagcctcttctcttcctactctgacatgagagaccgcgacttgcggcccatcacccaacaggacctcgacatcttcaagaaagaatccaaagaggtcaacgtagagacggcttgtcgcaatttcatcaagcaatgctacgagcgatccttcagtgaagcaggattattctcccaagtcttctccatagatccgcaatacaccaatgacacactttcagcctatgaagtgctgaagaagcagaataaagctctcgttaatgccgccaacatcacccctgtcgccaatgtcctacagtctgcgctgcaaggcattgcactacctgctctatgcagccttctcggctctatcacaaatgagtatctactatctgagtatgacgaagaggaaacaactcgctactcagtgcactgccacgacctgacggcgagattgctcactgaatctctttggccattcgccgataccgcatttgatgccgagatcacaaagtctatagcaagagctccgattgccgttgaatcactcaacccctcgtcagaccccgacaacgggcccctgtccaacccctatcccatcgcaaagcaagcactcgacctcctagccatgtacgaccaagctattcccaaggagagaagccaaaactcaaactccgtcctctaccgcatcatcacagaaaccatttccgctctgcaacgcgccgaagcccggctcaaaacaaacaaagctgctatcccggacccggatcctgacttgttcatgatcaagaatctgctcatactcaagaacgggctagtttcgctcgaaataggtgatgtccgatcccaatccgcgtccattcaacatttcgggcagatctgggatacactatcaccacagaactggatcggattattccggggcgcgttaggcggcaccctttctctcggtcgctggttctctgccacctccccggcggcagagacaggtaccaagggccaaactgcagtcgtcgaccaagatgcgcatcagaaattagatgagattttgaggcagagtatctacgctcttacccagcgctggggcacactcatcatctcggcaagcagaagcggcaaaaagggcagtactgtcacggcggcaagtgtggagaaggagctagatgggaagttagcgcaggcctttggcaacttgcctgaagttaggtcgaaactacgagaggctgtgtcaggctttatcgtcgccgggaaggaggttagaggtgtctaa

SEQ ID NO: 16580 - protein, 765 aa, Muscodor strobelii
  misc_feature: SGI Peptide ID NO. 565520
  misc_feature (131)..(292): Pfam Id: PF04136 Pfam Desc: Sec34-like family
  misc_feature (131)..(273): Pfam Id: PF04136 Pfam Desc: Sec34-like family
  misc_feature (1)..(752): NCBI GI: 46123843 Blast Desc: FG06299.1 [Gibberella zeae PH-1]
  misc_feature (1)..(763): NCBI GI: 256732932 Blast Desc: [Nectria haematococca mpVI 77-13-4]
  misc_feature (1)..(752): NCBI GI: 116203523 Blast Desc: CHGG_09645 [Chaetomium globosum CBS 148.51] gi|88175773|gb|EAQ83241.1| CHGG_09645 [Chaetomium globosum CBS 148.51]
  misc_feature (1)..(752): NCBI GI: 85094578 Blast Desc: NCU02268 [Neurospora crassa OR74A] gi|28921369|gb|EAA30676.1| conserved [Neurospora crassa OR74A] gi|40804619|emb|CAF05879.1| related to conserved oligomeric Golgi
  misc_feature (1)..(628): NCBI GI: 261355097 Blast Desc: conserved [Verticillium albo-atrum VaMs.102]
  misc_feature (154)..(752): NCBI GI: 145610773 Blast Desc: MGG_00915 [Magnaporthe grisea 70-15] gi|145018137|gb|EDK02416.1| MGG_00915 [Magnaporthe grisea 70-15]
  misc_feature (36)..(548): NCBI GI: 171679601 Blast Desc: protein product [Podospora anserina] gi|170939426|emb|CAP64654.1| protein product [Podospora anserina]
  misc_feature (1)..(761): NCBI GI: 154293909 Blast Desc: BC1G_14026 [Botryotinia fuckeliana B05.10] gi|150845181|gb|EDN20374.1| BC1G_14026 [Botryotinia fuckeliana B05.10]
  misc_feature (1)..(761): NCBI GI: 156039753 Blast Desc: SS1G_12013 [Sclerotinia sclerotiorum 1980] gi|154697750|gb|EDN97488.1| SS1G_12013 [Sclerotinia sclerotiorum 1980]
  misc_feature (1)..(481): NCBI GI: 189194609 Blast Desc: conserved [Pyrenophora tritici-repentis Pt-1C-BFP] gi|187979207|gb|EDU45833.1| conserved [Pyrenophora tritici-repentis Pt-1C-BFP]
MYEDSWYSFGPENTVKRNPSNSGHRRRESLLQQPNGHQQADRVEPLLHLYEEPDAPIGPPEPTLIPRAKSYTDFYHVVRAQLSRDAARKKKKRKVKGRNLDALAVVKPEDSMPIRTAQPLKSLDDQLAEAGQHEYLLYQEQLEMTERHLDRLIADTNDTLGLLTSLANDFRAVETQTSSFQAQCDDLISEEKRLQKLADEVGTDLHYYAYLDGVTRRLNAPGASRLVNHDSFGEILTNLDACIDFMEKHPDYRDAESYLARYQSLLVKALHLLEVGFSAHLDKVSAEISKQILETQSEAARHALAYGRSEEMLLEADGLINNVQRVIRSCYDQFGKSTQGPNFDTYSNTAISLFSSYSDMRDRDLRPITQQDLDIFKKESKEVNVETACRNFIKQCYERSFSEAGLFSQVFSIDPQYTNDTLSAYEVLKKQNKALVNAANITPVANVLQSALQGIALPALCSLLGSITNEYLLSEYDEEETTRYSVHCHDLTARLLTESLWPFADTAFDAEITKSIARAPIAVESLNPSSDPDNGPLSNPYPIAKQALDLLAMYDQAIPKERSQNSNSVLYRIITETISALQRAEARLKTNKAAIPDPDPDLFMIKNLLILKNGLVSLEIGDVRSQSASIQHFGQIWDTLSPQNWIGLFRGALGGTLSLGRWFSATSPAAETGTKGQTAVVDQDAHQKLDEILRQSIYALTQRWGTLIISASRSGKKGSTVTAASVEKELDGKLAQAFGNLPEVRSKLREAVSGFIVAGKEVRGV

SEQ ID NO: 16581 - DNA, 2871 bp, Muscodor strobelii
  misc_feature: SGI EST ID NO. CUFF.39274.1
  misc_feature: Variant of the nucleotide sequence at SEQ ID NO 16579
gcggagtggggaaggtgaggctcgggacatgccgcactttccagcatggatgcttcagggtatgccctatgagacatggtctctgaggtctgatgcatcccacctctggacccctgtcgctgtcagttcacgattgcgtcgtggaggaagctccacgtgtgaccagaggtgggatatctccagagcaccacgagagtgcgcacccttttaccttcctctacttgtcgccctctccgtatcaggcaccatgtacgaagactcgtggtacagctttgggcccgaaaacacggtgaaaagaaacccgtccaactcgggacaccgacggcgcgagtccctcctccaacagcccaacggccatcagcaagcagaccgtgtcgaacctttgctgcatctctacgaagagcccgatgcccccattggaccgcccgaaccgaccctcatccctcgagccaagtcatacacagacttctaccacgtcgtccgcgcacagctgtccagagatgctgcaaggaagaagaagaagaggaaggtcaaggggcggaacttggacgcgctcgccgtagtcaagcccgaagatagcatgcccatccgcacagcccaacccttgaaatccctagacgaccagctcgccgaagccgggcagcacgagtatttactatatcaagaacaactcgagatgaccgagcgacacctcgataggctcatcgccgacaccaacgatacactcggcctgctcacctctctcgccaatgacttccgcgccgtcgagacccagacttcctccttccaagctcagtgcgatgacctcatatctgaggagaagaggctgcaaaagctggcggatgaggttggcaccgacttacactactatgcctacctggatggtgtgactaggaggttgaacgcgcccggcgcaagtcggctcgtcaaccacgacagcttcggcgagatcctcacaaacctggatgcttgtatagattttatggagaaacaccccgattaccgagatgctgaatcttatttggcccgataccaatctcttctcgtaaaggctcttcacctgctcgaagtcgggttctcggcacatctcgacaaggtgtcagccgagatatcaaaacagatattagagacacagtcggaagcagcacgtcatgctcttgcgtatgggagaagtgaagaaatgctactcgaggccgatggtctcatcaacaacgtccagcgtgtcatccgcagctgctatgaccagttcgggaagtcgacacaaggacccaacttcgacacctattccaacacggctatcagcctcttctcttcctactctgacatgagagaccgcgacttgcggcccatcacccaacaggacctcgacatcttcaagaaagaatccaaagaggtcaacgtagagacggcttgtcgcaatttcatcaagcaatgctacgagcgatccttcagtgaagcaggattattctcccaagtcttctccatagatccgcaatacaccaatgacacactttcagcctatgaagtgctgaagaagcagaataaagctctcgttaatgccgccaacatcacccctgtcgccaatgtcctacagtctgcgctgcaaggcattgcactacctgctctatgcagccttctcggctctatcacaaatgagtatctactatctgagtatgacgaagaggaaacaactcgctactcagtgcactgccacgacctgacggcgagattgctcactgaatctctttggccattcgccgataccgcatttgatgccgagatcacaaagtctatagcaagagctccgattgccgttgaatcactcaacccctcgtcagaccccgacaacgggcccctgtccaacccctatcccatcgcaaagcaagcactcgacctcctagccatgtacgaccaagctattcccaaggagagaagccaaaactcaaactccgtcctctaccgcatcatcacagaaaccatttccgctctgcaacgcgccgaagcccggctcaaaacaaacaaagctgctatcccggacccggatcctgacttgttcatgatcaagaatctgctcatactcaagaacgggctagtttcgctcgaaataggtgatgtccgatcccaatccgcgtccattcaacatttcgggcagatctgggatacactatcaccacagaactggatcggattattccggggcgcgttaggcggcaccctttctctcggtcgctggttctctgccacctccccggcggcagagacaggtaccaagggccaaactgcagtcgtcgaccaagatgcgcatcagaaattagatgagattttgaggcagagtatctacgctcttacccagcgctggggcacactcatcatctcggcaagcagaagcggcaaaaagggcagtactgtcacggcggcaagtgtggagaaggagctagatgggaagttagcgcaggcctttggcaacttgcctgaagttaggtcgaaactacgagaggctgtgtcaggctttatcgtcgccgggaaggaggttagaggtgtctaattagaagacagtggaagccttgagacatcgttctcgagtttcaagccctcatctaaagagaatcgaatgatatcaactctatggctctcatatgtctcaaatacgtatttgaagctgatatgtcttttggaatccgagatcctactgcttgctcaaattgccatgttcttcataatctcattccaattttcgctatctgcagccgtgtctcacaggccaacaacaaattacaatcgcacatgtagaacgttactttctgtaccagttaggcagtcagtgagagagtaggcctgcatattgttctcggcgcgaaagtgagagcatag

SEQ ID NO: 16582 - DNA, 1776 bp, Muscodor strobelii
  misc_feature: SGI cDNA ID NO. 565521
  misc_feature: Encodes the peptide sequence at SEQ ID NO 16583
atgcccgtgtgccgaccccttctccgccaggcgccgctggcctggagatccatccgacccaactcactccgcacatccttaccgcatcccagatatgccagctcctcgagcagagatccgaagaaacagggagggggcttgggccggtttctcggcggcttcctcgtcgctatgctcgctggaggggctgtggtagtctacacatctctcaacgaggagcccgccaagcccaaagaagccatcatcgagtacgaaaaggccaggccgttgccgcaatcaaaggaagacaacagggatctgattagcagtcagcatctccaggtcaagaagagctgggagcacccgggtgtctacgcctggggatccaactctggcaaggtcgccgcgcccgactcggacgagagcgtggtcaagacgcccaggaggatcacatacttcgatggccagttgttgagggacatcaagttggacagggactttggcgctgccatcaccgagaagggcgatctggttcagtggggcaccggattcaacaaggaacaaccgacacccacccccacgctaaaaggcaaagacctagtgcaacttgagatctccagagaccgcatcattgccctcgggaaggatggttctgtctactccctgccagctgcgagtgcggatcaggcttccggcgacaaacccaagcaatcttcttggttcttctggtccaaccccacatctaccacgtaccgccagctgaggcccaacggtctcggctggggtgagcgcgtcaccgacatctcatctggtctggagcacgtcttgctactcacatccagtggccgcgtcttctctgccgcatcaagcacttcagacttcccctccaagggccaattgggggttcccggcctcacatggacaacccgaccccagggcccatatgatcaaccccacgagatcctcacactgaagggtttcaacatctccaagatcgctgcaggcgactttcactccctcgcgctcgagaaagatggccgtgttttcgtcttcggggacaacacgtcgggccaactggggtttgaagccgagaaggagattcccttcgttgatggcccgatcccgttaccattcaccaaagtctaccgcaatactggactgcaacccaaagtaacgtccatcgccgccggtggcgccaactcgtttttcaccgtagacgctacacgtgttgcgaagcccggtgaggacgagacgaacaccaaggatcttggtcgtatcacagcagacgtctttgcctgtggatccggcatctggggcacattaggcaacggcagatggacacacatctcccttgggcccgcaaagattaagaccctctccgggctctacgaattcgacgagaagaagaacgccgttgttcccatccgactagctcgattgagcgccggcagcagccatgcatcggcagtcatggacaacgtgacatacgtcgatgcaacagcttccacgtcagatagcgacacaaattggggcgccgatatcgtctggtggggtgggaatgagcactaccagcttggaacggggagacggaataacgtcgcgaccccgacttatatcgggcccttggatggtggacaagccgatgcgctaaagggaaggaaaggagaggagcacagattccagatctcaccgagggctacggtcaggcttggtgaggatggtaaggggaggaaggtcagtgtcgagcagagagtcgagtgtgggcgatttgtcaccgctgtctactccggcacgtga

SEQ ID NO: 16583 - protein, 591 aa, Muscodor strobelii
  misc_feature: SGI Peptide ID NO. 565521
  misc_feature (77)..(590): NCBI GI: 154293907 Blast Desc: BC1G_14025 [Botryotinia fuckeliana B05.10] gi|150845180|gb|EDN20373.1| BC1G_14025 [Botryotinia fuckeliana B05.10]
  misc_feature (23)..(589): NCBI GI: 116203521 Blast Desc: CHGG_09644 [Chaetomium globosum CBS 148.51] gi|88175772|gb|EAQ83240.1| CHGG_09644 [Chaetomium globosum CBS 148.51]
  misc_feature (39)..(589): NCBI GI: 85094575 Blast Desc: NCU02267 [Neurospora crassa OR74A] gi|28921368|gb|EAA30675.1| conserved [Neurospora crassa OR74A] gi|40804620|emb|CAF05880.1| conserved [Neurospora crassa]
  misc_feature (77)..(564): NCBI GI: 156039751 Blast Desc: SS1G_12012 [Sclerotinia sclerotiorum 1980] gi|154697749|gb|EDN97487.1| SS1G_12012 [Sclerotinia sclerotiorum 1980]
  misc_feature (10)..(589): NCBI GI: 256732478 Blast Desc: NECHADRAFT_37767 [Nectria haematococca mpVI 77-13-4]
  misc_feature (28)..(587): NCBI GI: 225555865 Blast Desc: conserved [Ajellomyces capsulatus G186AR]
  misc_feature (32)..(586): NCBI GI: 240278643 Blast Desc: rRNA processing protein [Ajellomyces capsulatus H143]
  misc_feature (1)..(589): NCBI GI: 46123841 Blast Desc: FG06298.1 [Gibberella zeae PH-1]
  misc_feature (32)..(591): NCBI GI: 154276274 Blast Desc: conserved [Ajellomyces capsulatus NAm1] gi|150414055|gb|EDN09420.1| conserved [Ajellomyces capsulatus NAm1]
  misc_feature (52)..(589): NCBI GI: 171679603 Blast Desc: protein product [Podospora anserina] gi|170939427|emb|CAP64655.1| protein product [Podospora anserina]
MPVCRPLLRQAPLAWRSIRPNSLRTSLPHPRYASSSSRDPKKQGGGLGRFLGGFLVAMLAGGAVVVYTSLNEEPAKPKEAIIEYEKARPLPQSKEDNRDLISSQHLQVKKSWEHPGVYAWGSNSGKVAAPDSDESVVKTPRRITYFDGQLLRDIKLDRDFGAAITEKGDLVQWGTGFNKEQPTPTPTLKGKDLVQLEISRDRIIALGKDGSVYSLPAASADQASGDKPKQSSWFFWSNPTSTTYRQLRPNGLGWGERVTDISSGLEHVLLLTSSGRVFSAASSTSDFPSKGQLGVPGLTWTTRPQGPYDQPHEILTLKGFNISKIAAGDFHSLALEKDGRVFVFGDNTSGQLGFEAEKEIPFVDGPIPLPFTKVYRNTGLQPKVTSIAAGGANSFFTVDATRVAKPGEDETNTKDLGRITADVFACGSGIWGTLGNGRWTHISLGPAKIKTLSGLYEFDEKKNAVVPIRLARLSAGSSHASAVMDNVTYVDATASTSDSDTNWGADIVWWGGNEHYQLGTGRRNNVATPTYIGPLDGGQADALKGRKGEEHRFQISPRATVRLGEDGKGRKVSVEQRVECGRFVTAVYSGT

SEQ ID NO: 16584 - DNA, 2274 bp, Muscodor strobelii
  misc_feature: SGI EST ID NO. CUFF.39186.0
  misc_feature: Variant of the nucleotide sequence at SEQ ID NO 16582
tgcgcctgctgccgcatgtcttaaccctcaactcaatttcttatgatatcaccatttcgaagccgcgagctagactgcttaattcgacttccaccctccagccagacttatctccttgggtctcaagagcctcgcttgcacaattgacaatggagacgtgaaaatcaagttccgacgcgatacccatattccgcatccacacatctccacgaccgtaataccgccccattagttcgagtcagccatgcccgtgtgccgaccccttctccgccaggcgccgctggcctggagatccatccgacccaactcactccgcacatccttaccgcatcccagatatgccagctcctcgagcagagatccgaagaaacagggagggggcttgggccggtttctcggcggcttcctcgtcgctatgctcgctggaggggctgtggtagtctacacatctctcaacgaggagcccgccaagcccaaagaagccatcatcgagtacgaaaaggccaggccgttgccgcaatcaaaggaagacaacagggatctgattagcagtcagcatctccaggtcaagaagagctgggagcacccgggtgtctacgcctggggatccaactctggcaaggtcgccgcgcccgactcggacgagagcgtggtcaagacgcccaggaggatcacatacttcgatggccagttgttgagggacatcaagttggacagggactttggcgctgccatcaccgagaagggcgatctggttcagtggggcaccggattcaacaaggaacaaccgacacccacccccacgctaaaaggcaaagacctagtgcaacttgagatctccagagaccgcatcattgccctcgggaaggatggttctgtctactccctgccagctgcgagtgcggatcaggcttccggcgacaaacccaagcaatcttcttggttcttctggtccaaccccacatctaccacgtaccgccagctgaggcccaacggtctcggctggggtgagcgcgtcaccgacatctcatctggtctggagcacgtcttgctactcacatccagtggccgcgtcttctctgccgcatcaagcacttcagacttcccctccaagggccaattgggggttcccggcctcacatggacaacccgaccccagggcccatatgatcaaccccacgagatcctcacactgaagggtttcaacatctccaagatcgctgcaggcgactttcactccctcgcgctcgagaaagatggccgtgttttcgtcttcggggacaacacgtcgggccaactggggtttgaagccgagaaggagattcccttcgttgatggcccgatcccgttaccattcaccaaagtctaccgcaatactggactgcaacccaaagtaacgtccatcgccgccggtggcgccaactcgtttttcaccgtagacgctacacgtgttgcgaagcccggtgaggacgagacgaacaccaaggatcttggtcgtatcacagcagacgtctttgcctgtggatccggcatctggggcacattaggcaacggcagatggacacacatctcccttgggcccgcaaagattaagaccctctccgggctctacgaattcgacgagaagaagaacgccgttgttcccatccgactagctcgattgagcgccggcagcagccatgcatcggcagtcatggacaacgtgacatacgtcgatgcaacagcttccacgtcagatagcgacacaaattggggcgccgatatcgtctggtggggtgggaatgagcactaccagcttggaacggggagacggaataacgtcgcgaccccgacttatatcgggcccttggatggtggacaagccgatgcgctaaagggaaggaaaggagaggagcacagattccagatctcaccgagggctacggtcaggcttggtgaggatggtaaggggaggaaggtcagtgtcgagcagagagtcgagtgtgggcgatttgtcaccgctgtctactccggcacgtgaacaggtgcttggcggtgagttggagtattgaagagcagtctgatctggaatgtggaatagtgtatcacatatctgtataaacaaatagggggctcggagcgcatctactggacgatgtgccggatcattggatctacactatatacccctctcatgaatcaatgtctaatttacatgctctgtacattccaccctagcttgtttatcactatgcttcttcgtcctatgatgcattcacttgatgcattaactcg

SEQ ID NO: 16585 - DNA, 807 bp, Muscodor strobelii
  misc_feature: SGI cDNA ID NO. 565522
  misc_feature: Encodes the peptide sequence at SEQ ID NO 16586
atgcctgcaggctaccctcggctcgcgtccttaatgggtacgcatccagagcttacagcttttcgtcgattcggatatctcaatacactcaacctgttatatttacaagcagagctggtagatctagaaagcaaattgaagacccagactggcatcgatgctgcatcgccacactttgatcgctccctttatcatagagactggcagactttagttgagtcgagttggaaagaagacggagaccctacgcagtggaatttggtaactgaaataaggtgtaaactgaaagagtacaaccaggccgtctatctccagcagcatattatgaagtcagatccgcccagcgagcaagatatgaagtctctaacccagtggatgaaagatccatcaatgggaaatgtctatcttcttggtggcgacagcgacatttggaacacgtttgaaatggcagaactcacttgcctcaagtcaaataagtacgacaatcctatcacacgattattcgcaaacaaacttgtagcattttaccatgggcttgttgggcgccatttcaggaaacctgacacgggcgatgcgcatcaaaacaccgtttactattcgcaagagggtatattacgcttaagtacgctagtcggcacagctgtcgcctcattcttaccagtggcatcgattgttgtgctgtactctataaacaatatggcgacacgcttggttgtgattgggctatttacagtgctcttctccaccggtttaggtctactcactaatgctcggacggtggagatattctcagcctcggctgcgtaa

SEQ ID NO: 16586 - protein, 268 aa, Muscodor strobelii
  misc_feature: SGI Peptide ID NO. 565522
  misc_feature (4)..(268): NCBI GI: 261358949 Blast Desc: VDBG_07487 [Verticillium albo-atrum VaMs.102]
  misc_feature (4)..(268): NCBI GI: 145247594 Blast Desc: An12g09960 [Aspergillus niger] gi|134080785|emb|CAL00899.1| protein product [Aspergillus niger]
  misc_feature (4)..(268): NCBI GI: 169604088 Blast Desc: SNOG_05053 [Phaeosphaeria nodorum SN15] gi|111066324|gb|EAT87444.1| SNOG_05053 [Phaeosphaeria nodorum SN15]
  misc_feature (2)..(268): NCBI GI: 169604935 Blast Desc: SNOG_05484 [Phaeosphaeria nodorum SN15] gi|111065428|gb|EAT86548.1| SNOG_05484 [Phaeosphaeria nodorum SN15]
  misc_feature (2)..(268): NCBI GI: 189192693 Blast Desc: conserved [Pyrenophora tritici-repentis Pt-1C-BFP] gi|187978249|gb|EDU44875.1| conserved [Pyrenophora tritici-repentis Pt-1C-BFP]
  misc_feature (4)..(268): NCBI GI: 67538634 Blast Desc: AN5487.2 [Aspergillus nidulans FGSC A4] gi|40743457|gb|EAA62647.1| [Aspergillus nidulans FGSC A4] gi|259485063|tpe|CBF81815.1| TPA: conserved [Aspergillus nidulans
  misc_feature (2)..(268): NCBI GI: 156050485 Blast Desc: [Sclerotinia sclerotiorum 1980] gi|154692230|gb|EDN91968.1| [Sclerotinia sclerotiorum 1980]
  misc_feature (3)..(262): NCBI GI: 256734893 Blast Desc: NECHADRAFT_75615 [Nectria haematococca mpVI 77-13-4]
  misc_feature (4)..(268): NCBI GI: 67524323 Blast Desc: AN2619.2 [Aspergillus nidulans FGSC A4] gi|40743780|gb|EAA62966.1| [Aspergillus nidulans FGSC A4] gi|259486481|tpe|CBF84353.1| TPA: conserved [Aspergillus nidulans
  misc_feature (2)..(267): NCBI GI: 256720608 Blast Desc: NECHADRAFT_85466 [Nectria haematococca mpVI 77-13-4]
MPAGYPRLASLMGTHPELTAFRRFGYLNTLNLLYLQAELVDLESKLKTQTGIDAASPHFDRSLYHRDWQTLVESSWKEDGDPTQWNLVTEIRCKLKEYNQAVYLQQHIMKSDPPSEQDMKSLTQWMKDPSMGNVYLLGGDSDIWNTFEMAELTCLKSNKYDNPITRLFANKLVAFYHGLVGRHFRKPDTGDAHQNTVYYSQEGILRLSTLVGTAVASFLPVASIVVLYSINNMATRLVVIGLFTVLFSTGLGLLTNARTVEIFSASAA

SEQ ID NO: 16587 - DNA, 2199 bp, Muscodor strobelii
  misc_feature: SGI cDNA ID NO. 565523
  misc_feature: Encodes the peptide sequence at SEQ ID NO 16588
atggatgctatcttcaagaaagttgccaatttcgaatcccgtcagtattggaaaggacagtgcgtcacgagtatcaaagaagctctcaaatccaataacactgctggccttgctggcggattcgtcgaccgactaggaaacatcctgccagatgtcccctacacgcctattgaccagttggccggcatcaactacgagacgtgtcaaaattactgcggattcgacaagcttccgacagtcttcaacttcgagggcttttcttccggagcaacaaactatttgttaccatggcttgccttgacagctcagcttcccttcgaaactggcgaaaatgaggttggcggaaaccttatgagcttctgctacgccgtaggtagcccgatgctcattacctactccttagcaacaactattctcaatcagcattggttacgagccaaattccagaagctcgaggccgcgggcaagcctttacacgaaacgagcaaaaacgttcgtatctttctccaggagagccagcagcttcccttgcgtctctcacaggaaaatgggagcttagcaagcctcatcgtcttacccgagaataacgattggtgggagaagctgtccaaaaacgtcttattaacacgtcgcggtgtaacattatcacttgtggcccaaatacttgtcgcagtattgtcttggctattaactgttatatcggctttcatcactgagctagggaacgcatctgcagctcttgctctggcctccggttccctatgggtttggctcatccccgttatctggggctggatcgccgtcgggacgcaaaccgactatggaactatacgacgagcgcttgaacgtgacatggcgaacattgtctatcgtcagccaacaagtcaggctaatggtggcgctcccgatcctccctctggacccggggtccgccggaatactgtcaacgaagggttcgttgacatccccagcgctacaatcacagcgttacgacaagagaatcagcgcagacaaatactaggtggtacaggtgggaacacctccattgatccgcgtcagccaagccagcaagtagctcctgcagtacagattttactggaggcccagaaggctttcgtaattgcggatgaacagaagctgctgcgccctctcacgagatcgccgacggcacatggcttcttgcatctcgagccaaaacacaagaaatttgacattccgaagtgccttggcttcagcgtcgcgggtgacgaaaagcaagaaggccctgctttcaactacgctcgcgtcttcacttggtgcaacatggccaatcggttacgcgacgcactcgagacgacagccgagaatatgaagcagagacttgacatagaccagaaaccactccctcgagagctaaagttccgccaacgagatcttaaaggcgatgtgcatgccctctctcgatactgcggcctggcccgagacaccggcggatcaactggtcaagctcaaaccattgagccagaacagatagatgagtacccggcctggagtacattggacgctgcattctatcagcgcattatcatcgcgatgctcttagctttctatgtgcagtggggcaccacaagtgccgctgtcattattgcctacttgaccgaagtcaaaggtttgggctgccgatccggtggatatcttttgtacggactgcttgcaacggccgctttcttcttcctcttcatctcgtccattttctcccacgctgccatgttgcgacatcaagtctcacagactagcgaaccaaaaccacacgacgagacggaggacaagtcggcaccttcgtcctcggaagatcagggcctcttgttcccgtcagcgaatagcaacagcacgcggcctagccaattggtcgttccacattccgtactgcgcgtctgtgccgttacaacccgaatcatcggccgaacattggtcgtggccaataccgcctggatacttctgtcttccttgtgggagcttgtaggcttttacaacaactgctggtgtgacagcacattcattagcaagggcgctggaggatgggtcattcttttcatcgacgtggccgaaatggctcagtctgctgcgccgtcatgggccggtggtgtattcctcagcgcattcgtgggagcgacaagctgcggtgcgttctggctctattgccgtgggaatcgagcctga

SEQ ID NO: 16588 - protein, 732 aa, Muscodor strobelii
  misc_feature: SGI Peptide ID NO. 565523
  misc_feature (407)..(729): NCBI GI: 240107603 Blast Desc: CPC735_042260 [Coccidioides posadasii C735 delta SOWgp]
  misc_feature (409)..(729): NCBI GI: 119177667 Blast Desc: [Coccidioides immitis RS]
  misc_feature (409)..(730): NCBI GI: 258576811 Blast Desc: [Uncinocarpus reesii 1704] gi|237902853|gb|EEP77254.1| [Uncinocarpus reesii 1704]
  misc_feature (21)..(318): NCBI GI: 170096688 Blast Desc: [Laccaria bicolor S238N-H82] gi|164645932|gb|EDR10179.1| [Laccaria bicolor S238N-H82]
  misc_feature (57)..(283): NCBI GI: 170103979 Blast Desc: [Laccaria bicolor S238N-H82] gi|164642085|gb|EDR06343.1| [Laccaria bicolor S238N-H82]
  misc_feature (62)..(283): NCBI GI: 170103873 Blast Desc: [Laccaria bicolor S238N-H82] gi|164642032|gb|EDR06290.1| [Laccaria bicolor S238N-H82]
  misc_feature (57)..(283): NCBI GI: 170103839 Blast Desc: [Laccaria bicolor S238N-H82] gi|164642015|gb|EDR06273.1| [Laccaria bicolor S238N-H82]
  misc_feature (36)..(283): NCBI GI: 170103647 Blast Desc: [Laccaria bicolor S238N-H82] gi|164641919|gb|EDR06177.1| [Laccaria bicolor S238N-H82]
  misc_feature (36)..(283): NCBI GI: 170103663 Blast Desc: [Laccaria bicolor S238N-H82] gi|164641927|gb|EDR06185.1| [Laccaria bicolor S238N-H82]
  misc_feature (118)..(304): NCBI GI: 258576811 Blast Desc: [Uncinocarpus reesii 1704] gi|237902853|gb|EEP77254.1| [Uncinocarpus reesii 1704]
MDAIFKKVANFESRQYWKGQCVTSIKEALKSNNTAGLAGGFVDRLGNILPDVPYTPIDQLAGINYETCQNYCGFDKLPTVFNFEGFSSGATNYLLPWLALTAQLPFETGENEVGGNLMSFCYAVGSPMLITYSLATTILNQHWLRAKFQKLEAAGKPLHETSKNVRIFLQESQQLPLRLSQENGSLASLIVLPENNDWWEKLSKNVLLTRRGVTLSLVAQILVAVLSWLLTVISAFITELGNASAALALASGSLWVWLIPVIWGWIAVGTQTDYGTIRRALERDMANIVYRQPTSQANGGAPDPPSGPGVRRNTVNEGFVDIPSATITALRQENQRRQILGGTGGNTSIDPRQPSQQVAPAVQILLEAQKAFVIADEQKLLRPLTRSPTAHGFLHLEPKHKKFDIPKCLGFSVAGDEKQEGPAFNYARVFTWCNMANRLRDALETTAENMKQRLDIDQKPLPRELKFRQRDLKGDVHALSRYCGLARDTGGSTGQAQTIEPEQIDEYPAWSTLDAAFYQRIIIAMLLAFYVQWGTTSAAVIIAYLTEVKGLGCRSGGYLLYGLLATAAFFFLFISSIFSHAAMLRHQVSQTSEPKPHDETEDKSAPSSSEDQGLLFPSANSNSTRPSQLVVPHSVLRVCAVTTRIIGRTLVVANTAWILLSSLWELVGFYNNCWCDSTFISKGAGGWVILFIDVAEMAQSAAPSWAGGVFLSAFVGATSCGAFWLYCRGNRA

SEQ ID NO: 16589 - DNA, 777 bp, Muscodor strobelii
  misc_feature: SGI cDNA ID NO. 565524
  misc_feature: Encodes the peptide sequence at SEQ ID NO 16590
atgacgtctatccataagccgataatactggtcgtcgggggaggtttccacatccctgacagctatcagaagctggctcgagcgcttgagttggcaggttacgagacacatgttcctcggctcccatcgacgactataacgcggccacccacgcacgacctcaacactgactctaccttcatccgcgactatgtcgagaggctcatccacaacggccgcatagtcgtcgccatcgcacactcgtatgggggccaagtcgtctccaacagcctttacggcctcagtgtcgagacgcgctctgcgcagaatctcaaagggggcctaacagctctcatctacatggcgagctgggctctgcctgaggggacggccgcgttcgataagactgctgagcttggcgacctggacatgatacccctcattttcgacgaagcccaagaccacaccgccgtcttgcaggatcctcggaccacgtttgtcgaccacaccgtcgccgatgacgaggccgacatctacttggagacgctggtccgctggaacttaaactgtgcgagacagcccaccaaacacgctgcatggcgcgagttctcaaaggtgtggtatatacatacgaccgctgatatgtgtgtgcctctccattatcagaaaaacattgttgatggtatagtcaacgcgggcatcaaagttggaaccttcgatctccagacaggtcattgtccctttttaacaaatgcagagggagtagcagacatcgtcaagacggtcatctcgagttga

SEQ ID NO: 16590 - protein, 258 aa, Muscodor strobelii
  misc_feature: SGI Peptide ID NO. 565524
  misc_feature (6)..(255): NCBI GI: 212535352 Blast Desc: conserved [Penicillium marneffei ATCC 18224] gi|210070231|gb|EEA24321.1| conserved [Penicillium marneffei ATCC 18224]
  misc_feature (6)..(253): NCBI GI: 156066009 Blast Desc: SS1G_01015 [Sclerotinia sclerotiorum 1980] gi|154691874|gb|EDN91612.1| SS1G_01015 [Sclerotinia sclerotiorum 1980]
  misc_feature (5)..(255): NCBI GI: 189206207 Blast Desc: conserved [Pyrenophora tritici-repentis Pt-1C-BFP] gi|187975531|gb|EDU42157.1| conserved [Pyrenophora tritici-repentis Pt-1C-BFP]
  misc_feature (6)..(258): NCBI GI: 169765482 Blast Desc: [Aspergillus oryzae RIB40] gi|83765067|dbj|BAE55210.1| protein product [Aspergillus oryzae]
  misc_feature (7)..(258): NCBI GI: 238482035 Blast Desc: conserved [Aspergillus flavus NRRL3357] gi|220700306|gb|EED56644.1| conserved [Aspergillus flavus NRRL3357]
  misc_feature (3)..(257): NCBI GI: 145247560 Blast Desc: An12g09780 [Aspergillus niger] gi|134080768|emb|CAL00882.1| protein product [Aspergillus niger]
  misc_feature (1)..(256): NCBI GI: 171684613 Blast Desc: protein product [Podospora anserina] gi|170942267|emb|CAP67919.1| protein product [Podospora anserina]
  misc_feature (6)..(257): NCBI GI: 238485370 Blast Desc: conserved [Aspergillus flavus NRRL3357] gi|220698802|gb|EED55141.1| conserved [Aspergillus flavus NRRL3357]
  misc_feature (6)..(257): NCBI GI: 169772025 Blast Desc: [Aspergillus oryzae RIB40] gi|83768341|dbj|BAE58480.1| protein product [Aspergillus oryzae]
  misc_feature (10)..(256): NCBI GI: 145240765 Blast Desc: An08g09180 [Aspergillus niger] gi|134077553|emb|CAK96697.1| protein product [Aspergillus niger]
MTSIHKPIILVVGGGFHIPDSYQKLARALELAGYETHVPRLPSTTITRPPTHDLNTDSTFIRDYVERLIHNGRIVVAIAHSYGGQVVSNSLYGLSVETRSAQNLKGGLTALIYMASWALPEGTAAFDKTAELGDLDMIPLIFDEAQDHTAVLQDPRTTFVDHTVADDEADIYLETLVRWNLNCARQPTKHAAWREFSKVWYIHTTADMCVPLHYQKNIVDGIVNAGIKVGTFDLQTGHCPFLTNAEGVADIVKTVISS

SEQ ID NO: 16591 - DNA, 164 bp, Muscodor strobelii
  misc_feature: SGI EST ID NO. CUFF.39219.0
  misc_feature: Variant of the nucleotide sequence at SEQ ID NO 16589
gcgacctggacatgatacccctcattttcgacgaagcccaagaccacaccgccgtcttgcaggatcctcggaccacgtttgtcgaccacaccgtcgccgatgacgaggccgacatctacttggagacgctggtccgctggaacttaaactgtgcgagacagccc

SEQ ID NO: 16592 - DNA, 2637 bp, Muscodor strobelii
  misc_feature: SGI cDNA ID NO. 565525
  misc_feature: Encodes the peptide sequence at SEQ ID NO 16593
atggcggccagtggtatcggcaacgcagaacaatttttgcatatcccttttggaaaaagatgggaataccacaagcccaccatccatgatctttacatagttcaaggcagttcggttgaagatgttgcggctgtgatgaaagaagtatacaactttgatgccaggtatctaagatttgtgctcgacagtactcgccaattcaaatatcacctcaagaaatgggatttcacgaaagccgtgcctaaatctgccaaagtaaaagctgtcagagccattcgaaaacggcttcaagacggaaacaacgtggcaggtgttagatataagggggagaaaatcgataaaggacgtatacggagatatctccgtgacgaatcccggcttgatcaagactggaaattgatcaaggttgtattcgggacttggaaccttccctacggggcgttgaaggcttcattgactcttcacgaacattcatcaccttttggcggcgattggtctagtccaagcgagatatctatcttgagcccccgtgcttcggctagtggcacatcgccagggtatattccatcgccggcgaatgctcagactccaacagcaattgctattcgagcgaagacgaatgaggatcgggcaaagtttctggtgcagggtagagccgatgagctattacaagacctgtcgagagccgagaaaagggtcgcagcaacatggctatacgagctttggttctttgctttcacaacatcgaagaactggggacgaggcccccgacattggacgccagagcttcttcggtttcgccacttccaagacgcgttgacggcgccaaatactccagcggctattatggacgtggctatgatggatgttgactccggcaatgagagttccaatgagccttcttcactgtgctcttggagtattcattgctggcttccttactatgagcgcaaccgttcaccatctcccgaagtagatgatgacatcgacatcggaggagatcctaggcgatggccacggtggagtagagtgcctaagtcaagcgaattcaggaaatactttcgtgaagcattgcaactcaattcattctctactctagagagtcgcgatgtacctttagcaacgagcaaggtcgccatggcagcatcaaattcgccagagatgctgcaagtcgaatcgataggcttcgcaatcatcgctcgtaatgtcgaactcttggaagacctgctcctcgaagatggtccttctgaattgaacttgagcagtctttacccttttcatcttgctgcgaactacctagatggagccgaggcttgttgcagcgttttaggcgctcttgttgtttttctcaatggacaaaacctcgtcagacggctttatgtcaatgattatggacacactatcctggatagtctgatgatcacaattctcaaaagccacactacttgcacacctgcagtggttgacgaaagattgagaaaaacgcagcgattcgctgctgaggacgttgacatttgtgggcgctgggatgcagattcattttgtgtccgacaaaacaactcaaaaggctcgcctcaggttctcagagcctggaaacatgctttttgtcatacttcggcccaagcaatctgtcatgccgtgattgttgtttttgcaaggtcttactcgccagacatcaatatcccaagtggaatttttacaaaaacgtgtgccaagtgttcacaacgactcaagcctgggccactacacacactcataattactgcattccacttggctcagcatgggcttaaaggcgaaaccttgttcgggattttggcttgcctagtttgtctgctgacgctaggagccgacccaactctgcgtacagaaatgtcagtagacgaacttctgggtacaagcgacggtcgtgaatgccatcacagccatcttgatcctgtggagttggcgggacaagtcccagatatgattatagctacttggactgacgatgcgcaagttggttggcaaacgatattagccgttctccggtttgcgcaacgagaaagaggtcccgggagatctgcattgctcaagtggggaggacaagatgcatatttcgactttgatcgcatcgcggaagtagatgaggacggcatccagcaagacgattcctttcgtcataggcgacaagactctgaattagaggagactgatgaagaagacgaggttgagggttggtgcccacataaggggccttacgtagacaatttctattgcggcagcaagagtcttggcacactgtgggcggctgtacagaccgaaatgctgacctaccgacgactcaaagatggagagccgtggctttcagaaaggtttagtatgcacaaggtgcgagatggtgccaatagcggtgacggatttgcaagcctcgcatttgttcagatggagatgatgaaaccgtggtgcatatgtggacggttcaaggacgctcaaacaagcgcaatcccaactacagacgaagtttgctctttttatttctcgaatttggacgactgggaacgcagcaatttcctcagtacaccgtacatcgaggaagattcggattctgatatggagagctcctttgagggagagtccgatagtgaagacgaatga

SEQ ID NO: 16593 - protein, 878 aa, Muscodor strobelii
  misc_feature: SGI Peptide ID NO. 565525
  misc_feature (11)..(852): NCBI GI: 256727513 Blast Desc: NECHADRAFT_32457 [Nectria haematococca mpVI 77-13-4]
  misc_feature (21)..(856): NCBI GI: 169614301 Blast Desc: SNOG_10288 [Phaeosphaeria nodorum SN15] gi|111061503|gb|EAT82623.1| SNOG_10288 [Phaeosphaeria nodorum SN15]
  misc_feature (11)..(859): NCBI GI: 116199825 Blast Desc: CHGG_08068 [Chaetomium globosum CBS 148.51] gi|88179347|gb|EAQ86815.1| CHGG_08068 [Chaetomium globosum CBS 148.51]
  misc_feature (20)..(852): NCBI GI: 46117354 Blast Desc: FG04519.1 [Gibberella zeae PH-1]
  misc_feature (11)..(774): NCBI GI: 171677155 Blast Desc: protein product [Podospora anserina] gi|170936645|emb|CAP61304.1| protein product [Podospora anserina]
  misc_feature (326)..(853): NCBI GI: 255946071 Blast Desc: Pc20g13220 [Penicillium chrysogenum Wisconsin 54-1255] gi|211588538|emb|CAP86651.1| Pc20g13220 [Penicillium chrysogenum Wisconsin 54-1255]
  misc_feature (16)..(270): NCBI GI: 255946071 Blast Desc: Pc20g13220 [Penicillium chrysogenum Wisconsin 54-1255] gi|211588538|emb|CAP86651.1| Pc20g13220 [Penicillium chrysogenum Wisconsin 54-1255]
  misc_feature (424)..(502): NCBI GI: 154308970 Blast Desc: BC1G_08013 [Botryotinia fuckeliana B05.10] gi|150852639|gb|EDN27831.1| BC1G_08013 [Botryotinia fuckeliana B05.10]
  misc_feature (19)..(122): NCBI GI: 145603809 Blast Desc: [Magnaporthe grisea 70-15] gi|145011959|gb|EDJ96615.1| [Magnaporthe grisea 70-15]
  misc_feature (20)..(120): NCBI GI: 85109709 Blast Desc: NCU05687 [Neurospora crassa OR74A] gi|28924699|gb|EAA33813.1| [Neurospora crassa OR74A]
MAASGIGNAEQFLHIPFGKRWEYHKPTIHDLYIVQGSSVEDVAAVMKEVYNFDARYLRFVLDSTRQFKYHLKKWDFTKAVPKSAKVKAVRAIRKRLQDGNNVAGVRYKGEKIDKGRIRRYLRDESRLDQDWKLIKVVFGTWNLPYGALKASLTLHEHSSPFGGDWSSPSEISILSPRASASGTSPGYIPSPANAQTPTAIAIRAKTNEDRAKFLVQGRADELLQDLSRAEKRVAATWLYELWFFAFTTSKNWGRGPRHWTPELLRFRHFQDALTAPNTPAAIMDVAMMDVDSGNESSNEPSSLCSWSIHCWLPYYERNRSPSPEVDDDIDIGGDPRRWPRWSRVPKSSEFRKYFREALQLNSFSTLESRDVPLATSKVAMAASNSPEMLQVESIGFAIIARNVELLEDLLLEDGPSELNLSSLYPFHLAANYLDGAEACCSVLGALVVFLNGQNLVRRLYVNDYGHTILDSLMITILKSHTTCTPAVVDERLRKTQRFAAEDVDICGRWDADSFCVRQNNSKGSPQVLRAWKHAFCHTSAQAICHAVIVVFARSYSPDINIPSGIFTKTCAKCSQRLKPGPLHTLIITAFHLAQHGLKGETLFGILACLVCLLTLGADPTLRTEMSVDELLGTSDGRECHHSHLDPVELAGQVPDMIIATWTDDAQVGWQTILAVLRFAQRERGPGRSALLKWGGQDAYFDFDRIAEVDEDGIQQDDSFRHRRQDSELEETDEEDEVEGWCPHKGPYVDNFYCGSKSLGTLWAAVQTEMLTYRRLKDGEPWLSERFSMHKVRDGANSGDGFASLAFVQMEMMKPWCICGRFKDAQTSAIPTTDEVCSFYFSNLDDWERSNFLSTPYIEEDSDSDMESSFEGESDSEDE

SEQ ID NO: 16594 - DNA, 2427 bp, Muscodor strobelii
  misc_feature: SGI EST ID NO. CUFF.39240.0
  misc_feature: Variant of the nucleotide sequence at SEQ ID NO 16592
gggacttggaaccttccctacggggcgttgaaggcttcattgactcttcacgaacattcatcaccttttggcggcgattggtctagtccaagcgagatatctatcttgagcccccgtgcttcggctagtggcacatcgccagggtatattccatcgccggcgaatgctcagactccaacagcaattgctattcgagcgaagacgaatgaggatcgggcaaagtttctggtgcagggtagagccgatgagctattacaagacctgtcgagagccgagaaaagggtcgcagcaacatggctatacgagctttggttctttgctttcacaacatcgaagaactggggacgaggcccccgacattggacgccagagcttcttcggtttcgccacttccaagacgcgttgacggcgccaaatactccagcggctattatggacgtggctatgatggatgttgactccggcaatgagagttccaatgagccttcttcactgtgctcttggagtattcattgctggcttccttactatgagcgcaaccgttcaccatctcccgaagtagatgatgacatcgacatcggaggagatcctaggcgatggccacggtggagtagagtgcctaagtcaagcgaattcaggaaatactttcgtgaagcattgcaactcaattcattctctactctagagagtcgcgatgtacctttagcaacgagcaaggtcgccatggcagcatcaaattcgccagagatgctgcaagtcgaatcgataggcttcgcaatcatcgctcgtaatgtcgaactcttggaagacctgctcctcgaagatggtccttctgaattgaacttgagcagtctttacccttttcatcttgctgcgaactacctagatggagccgaggcttgttgcagcgttttaggcgctcttgttgtttttctcaatggacaaaacctcgtcagacggctttatgtcaatgattatggacacactatcctggatagtctgatgatcacaattctcaaaagccacactacttgcacacctgcagtggttgacgaaagattgagaaaaacgcagcgattcgctgctgaggacgttgacatttgtgggcgctgggatgcagattcattttgtgtccgacaaaacaactcaaaaggctcgcctcaggttctcagagcctggaaacatgctttttgtcatacttcggcccaagcaatctgtcatgccgtgattgttgtttttgcaaggtcttactcgccagacatcaatatcccaagtggaatttttacaaaaacgtgtgccaagtgttcacaacgactcaagcctgggccactacacacactcataattactgcattccacttggctcagcatgggcttaaaggcgaaaccttgttcgggattttggcttgcctagtttgtctgctgacgctaggagccgacccaactctgcgtacagaaatgtcagtagacgaacttctgggtacaagcgacggtcgtgaatgccatcacagccatcttgatcctgtggagttggcgggacaagtcccagatatgattatagctacttggactgacgatgcgcaagttggttggcaaacgatattagccgttctccggtttgcgcaacgagaaagaggtcccgggagatctgcattgctcaagtggggaggacaagatgcatatttcgactttgatcgcatcgcggaagtagatgaggacggcatccagcaagacgattcctttcgtcataggcgacaagactctgaattagaggagactgatgaagaagacgaggttgagggttggtgcccacataaggggccttacgtagacaatttctattgcggcagcaagagtcttggcacactgtgggcggctgtacagaccgaaatgctgacctaccgacgactcaaagatggagagccgtggctttcagaaaggtttagtatgcacaaggtgcgagatggtgccaatagcggtgacggatttgcaagcctcgcatttgttcagatggagatgatgaaaccgtggtgcatatgtggacggttcaaggacgctcaaacaagcgcaatcccaactacagacgaagtttgctctttttatttctcgaatttggacgactgggaacgcagcaatttcctcagtacaccgtacatcgaggaagattcggattctgatatggagagctcctttgagggagagtccgatagtgaagacgaatgaactcttagatcatatcatcatctccgctccacaaagtattcatatcaccataggtacctagagaacactttgacagaagctcttaaacaatccgactctaatgataattgcaattatgggggacaaaatgaaagattcaaatgttacgctggtgcagatagctcagctacaagataaccatggacatctacgtcgtcaaaacta

SEQ ID NO: 16595 - DNA, 1629 bp, Muscodor strobelii
  misc_feature: SGI cDNA ID NO. 565526
  misc_feature: Encodes the peptide sequence at SEQ ID NO 16596
atgcgaccctggctgttaacctgccgggaacatgcagatgactcaataatccttgcgagttcggctgtcggctgtgtaggagaaacgattgatgagatggacgttctgaaatccatcatcgcgacgtggccacaggcgctgacaacggccgttgtgacttattactccggactcgcagtttatcgtctattctttcacccacttgcgcggttctctggaccaaagttggcggcgatttcgagatggtatgaggcgtattatgatgttgtgaaggatgggcagtataccttcaagatcaaagagttgcacaagaaatacggtatcaccagcccaataatccgcatctctcccttcgaactccacgtctcagatcctgatttctactctgaaatctacagacaggacggagtatgggataaatatgactgggcagtagacgccatcgtcgcgcccggtgcgactatgttcactccctcgcactcagttcatcgggctcgtcggcttcctctcaatccctttttctcgcgggctaagatctcatcttctgcctcccaaactttgcttttccaccacattgagaagttggtctatcagatctctcggcatataagcgagaagagtggtcagataaatattggggcggcgctgaatgcatttacaagagatgtcgcgaatgattttatcattgagcgagactgtgatagtctgtctaaagaggggttcgatttcgaggcgagtatcaatccagggcctgtttggagattgacgaagcatgtgaggtggttcaatcgcgcgttgagatcgctaccaagtttcatctttcagcggattgctggggatgggttaagggctttttatcgccatcttggtgaaaccgtagtggcactccaacacctaatggcgaaagcaaaggaagacccaaatgcgtcaagtgaaaacaatatcgtgcaagcgatcctgacctcgaagcttcccgactctgataagactttcgagcgcatcttcgaagacctttcaactattatgggtgcaggggttgagaccaccgccggtgtgctacgcatggtgttattccacgcatacaccaaccccgccatactctctcaactgcgcaccgagcttgccgcacttccaccctctacttcagacaatctctcactgaggacattggaaaagctaccctacctatcagcggtcctaactgaaggtctgcgcctaagtcctgctgttgcaactagaatgagcagggttgcgccagatagggatttattctatcaaaagctgcgtataccagctggcacccctgtaggcatgacgacgcttcttatgcataccgacgagagcgtgttccccgatccgttccgatttgatcctgagaggtggttggaagacggcgacctaataaagacaatgccgacttctttcgcgccatttgcgaagggcactaggatttgtgctggcatgcatcttgcatgggcggagttatatctcgtaacggccacactgatccgtgggtttgattttaacttccagggcacgacggcgcaggacctgagagcagtcagtgatcagttcattatcggaacgaagcatggtggcaatctgaacgcgattgcttctgtgtgctga

SEQ ID NO: 16596 - protein, 542 aa, Muscodor strobelii
  misc_feature: SGI Peptide ID NO. 565526
  misc_feature (74)..(536): Pfam Id: PF00067 Pfam Desc: Cytochrome P450
  misc_feature (338)..(508): Pfam Id: PF00067 Pfam Desc: Cytochrome P450
  misc_feature (42)..(537): NCBI GI: 238841488 Blast Desc: cytochrome P450 [Microsporum canis CBS 113480]
  misc_feature (30)..(489): NCBI GI: 116206024 Blast Desc: CHGG_02305 [Chaetomium globosum CBS 148.51] gi|88182902|gb|EAQ90370.1| CHGG_02305 [Chaetomium globosum CBS 148.51]
  misc_feature (33)..(541): NCBI GI: 171683471 Blast Desc: protein product [Podospora anserina] gi|170941695|emb|CAP67349.1| protein product [Podospora anserina]
  misc_feature (45)..(537): NCBI GI: 238839890 Blast Desc: cytochrome P450 [Microsporum canis CBS 113480]
  misc_feature (33)..(525): NCBI GI: 255938474 Blast Desc: Pc14g00120 [Penicillium chrysogenum Wisconsin 54-1255] gi|211584628|emb|CAP74153.1| Pc14g00120 [Penicillium chrysogenum Wisconsin 54-1255]
  misc_feature (22)..(526): NCBI GI: 212539279 Blast Desc: benzoate 4-monooxygenase cytochrome P450, [Penicillium marneffei ATCC 18224] gi|210069537|gb|EEA23628.1| benzoate 4-monooxygenase cytochrome P450, [Penicillium marneffei ATCC
  misc_feature (40)..(526): NCBI GI: 171688250 Blast Desc: protein product [Podospora anserina] gi|170944087|emb|CAP70197.1| protein product [Podospora anserina]
  misc_feature (35)..(518): NCBI GI: 169774759 Blast Desc: [Aspergillus oryzae RIB40] gi|238496643|ref|XP_002379557.1| cytochrome P450, [Aspergillus flavus NRRL3357] gi|83769710|dbj|BAE59845.1| protein product
  misc_feature (49)..(526): NCBI GI: 242795016 Blast Desc: cytochrome P450, [Talaromyces stipitatus ATCC 10500] gi|218719081|gb|EED18501.1| cytochrome P450, [Talaromyces stipitatus ATCC 10500]
  misc_feature (39)..(526): NCBI GI: 239609831 Blast Desc: cytochrome P450 [Ajellomyces dermatitidis ER-3]
  misc_feature (33)..(509): SWISSPROT Homolog: EC 1.14.14.1 Unspecific monooxygenase
MRPWLLTCREHADDSIILASSAVGCVGETIDEMDVLKSIIATWPQALTTAVVTYYSGLAVYRLFFHPLARFSGPKLAAISRWYEAYYDVVKDGQYTFKIKELHKKYGITSPIIRISPFELHVSDPDFYSEIYRQDGVWDKYDWAVDAIVAPGATMFTPSHSVHRARRLPLNPFFSRAKISSSASQTLLFHHIEKLVYQISRHISEKSGQINIGAALNAFTRDVANDFIIERDCDSLSKEGFDFEASINPGPVWRLTKHVRWFNRALRSLPSFIFQRIAGDGLRAFYRHLGETVVALQHLMAKAKEDPNASSENNIVQAILTSKLPDSDKTFERIFEDLSTIMGAGVETTAGVLRMVLFHAYTNPAILSQLRTELAALPPSTSDNLSLRTLEKLPYLSAVLTEGLRLSPAVATRMSRVAPDRDLFYQKLRIPAGTPVGMTTLLMHTDESVFPDPFRFDPERWLEDGDLIKTMPTSFAPFAKGTRICAGMHLAWAELYLVTATLIRGFDFNFQGTTAQDLRAVSDQFIIGTKHGGNLNAIASVC

SEQ ID NO: 16597 - DNA, 1217 bp, Muscodor strobelii
  misc_feature: SGI EST ID NO. CUFF.39244.0
  misc_feature: Variant of the nucleotide sequence at SEQ ID NO 16595
gggcggcgctgaatgcatttacaagagatgtcgcgaatgattttatcattgagcgagactgtgatagtctgtctaaagaggggttcgatttcgaggcgagtatcaatccagggcctgtttggagattgacgaagcatgtgaggtggttcaatcgcgcgttgagatcgctaccaagtttcatctttcagcggattgctggggatgggttaagggctttttatcgccatcttggtgaaaccgtagtggcactccaacacctaatggcgaaagcaaaggaagacccaaatgcgtcaagtgaaaacaatatcgtgcaagcgatcctgacctcgaagcttcccgactctgataagactttcgagcgcatcttcgaagacctttcaactattatgggtgcaggggttgagaccaccgccggtgtgctacgcatggtgttattccacgcatacaccaaccccgccatactctctcaactgcgcaccgagcttgccgcacttccaccctctacttcagacaatctctcactgaggacattggaaaagctaccctacctatcagcggtcctaactgaaggtctgcgcctaagtcctgctgttgcaactagaatgagcagggttgcgccagatagggatttattctatcaaaagctgcgtataccagctggcacccctgtaggcatgacgacgcttcttatgcataccgacgagagcgtgttccccgatccgttccgatttgatcctgagaggtggttggaagacggcgacctaataaagacaatgccgacttctttcgcgccatttgcgaagggcactaggatttgtgctggcatgcatcttgcatgggcggagttatatctcgtaacggccacactgatccgtgggtttgattttaacttccagggcacgacggcgcaggacctgagagcagtcagtgatcagttcattatcggaacgaagcatggtggcaatctgaacgcgattgcttctgtgtgctgagaaaacaggtgttgttgggtttgtttcttggcgttttggacgaggtcaaaaatctcttctcaattatagcatgttaagcaaggcgtttgagtgttaacggagtgtcatttcgttgattgggatgcgtcgtcctagctttgcgcgagcacgagcacaggcactggtgtggaggttgagtgtaagctattacggggctagtgtacagtacagaatagaaatatcccc

SEQ ID NO: 16598 - DNA, 1299 bp, Muscodor strobelii
  misc_feature: SGI cDNA ID NO. 565527
  misc_feature: Encodes the peptide sequence at SEQ ID NO 16599
atggcacctgatccgctccggcctggcgacaagcaaggcgccccttccacccccgccagtggtgaccccagcggccaagacaactgggtcataagcgtcaaggttggtaagcaaccgccattggttgtcgtccacaaggctagcgagaatcctgtggtcgtcatagccaccagacctacctctggcggccggactgtcaccgtctcagctagagaggtggaaacgcaaccagcagccgtcctagccgacgccgccgacgccatctcgtggtatcgagcagagatcgccaggaccgatgccgccgatcctgatgccaccgactctgatgccggcgacgactaccaacccaccgagcccgatgtcggtaagtctgatgtcgacaactctgatgtcggcgactctgatgtcggtgaccctaatcccatcgaccctaatcccgtcgaccctaatcccatcgaccctaatcccatcgaccctaatcccgtcgaccctaatcccatcgaccctgacgccgccgaccctaatgtcggcaacgactccgaagaggacgagctgtttgttcgaccatacccagaagaacgcgcccgtcgtttcaaccggcaatacacaccggtctcaggcgcccatcgctgcgtaatgcccaaggactatcgcgacactccgatcgaggatctcaagatctggtattccaaacccgattatgagactatttccaagactatagccgaagaaatggagcatcaccctgactacttcgccgccgctactattccgatcaaagatctcaagctctggttttctatgccattgcccaagattgtagccaaaacaatcgagcattcccccgacgcctccgaagccgctgtccaagctgtggcagattcgtcagccaagggaggagagacgaccgtcatcgctcctcagcagcttactgacgatgccgagaagcgcgatgtcgatccggtcgctcaggcagtcaactcccaagagctcgtcgccgctgacgacaagaagaacaccgccgtcactcccgcagaggtcgctactgccgacgacccaaagctaaccgccgatacagcaacctccatgaagaggcccgccccagacgaggatcagcacgctgataaaggacctcgcaccaagatggcgaagcacgacatcgggaagcacggacaccctggtggacagcgaagatccaagggctccgagagttggtacaataaagtgccaaaaggacagcagggtaaggaacgattactagtgccttatccaactattaaggagcagaaggaggagtaa

SEQ ID NO: 16599 - protein, 432 aa, Muscodor strobelii
  misc_feature: SGI Peptide ID NO. 565527
  misc_feature (116)..(199): NCBI GI: 284046017 Blast Desc: Cwoe_4569 [Conexibacter woesei DSM 14684] gi|283950238|gb|ADB52982.1| Cwoe_4569 [Conexibacter woesei DSM 14684]
  misc_feature (140)..(180): NCBI GI: 84994832 Blast Desc: pyrophosphate--fructose 6-phosphate 1-phosphotransferase alpha subunit [Theileria annulata strain gi|65302299|emb|CAI74406.1| pyrophosphate--fructose 6-phosphate
  misc_feature (99)..(175): NCBI GI: 268558700 Blast Desc: CBG19037 [Caenorhabditis briggsae] gi|187024305|emb|CAP36349.1| CBG19037 [Caenorhabditis briggsae]
  misc_feature (141)..(169): NCBI GI: 197301871 Blast Desc: RUMLAC_00596 [Ruminococcus lactaris ATCC 29176] gi|197299054|gb|EDY33586.1| RUMLAC_00596 [Ruminococcus lactaris ATCC 29176]
  misc_feature (137)..(183): NCBI GI: 27656753 Blast Desc: AF154924_3 lipoprotein [Mycoplasma arthritidis]
MAPDPLRPGDKQGAPSTPASGDPSGQDNWVISVKVGKQPPLVVVHKASENPVVVIATRPTSGGRTVTVSAREVETQPAAVLADAADAISWYRAEIARTDAADPDATDSDAGDDYQPTEPDVGKSDVDNSDVGDSDVGDPNPIDPNPVDPNPIDPNPIDPNPVDPNPIDPDAADPNVGNDSEEDELFVRPYPEERARRFNRQYTPVSGAHRCVMPKDYRDTPIEDLKIWYSKPDYETISKTIAEEMEHHPDYFAAATIPIKDLKLWFSMPLPKIVAKTIEHSPDASEAAVQAVADSSAKGGETTVIAPQQLTDDAEKRDVDPVAQAVNSQELVAADDKKNTAVTPAEVATADDPKLTADTATSMKRPAPDEDQHADKGPRTKMAKHDIGKHGHPGGQRRSKGSESWYNKVPKGQQGKERLLVPYPTIKEQKEE

SEQ ID NO: 16600 - DNA, 681 bp, Muscodor strobelii
  misc_feature: SGI cDNA ID NO. 565528
  misc_feature: Encodes the peptide sequence at SEQ ID NO 16601
atgaatctcgggagcttgaagcagcgattgaagaaggcgctcaagttgcatcgaatagagtgcacatcgccgttgagagattccagcgcccaagaaagctcaactaacacaagtgaccaaacgacattgagtaataatgccaacgactcacgagcacaacatacgggccatattaggactctagaagcaaagatcggcaatcctgaaccaaatagctcaacagagagcaagccaaaacaagaactcgaaactgcgacagaggcgacgcaaacgtttgccaacgaatacgatgcacgtgcggctttaagaagagctgtagatctaacaaatacagtcgaccatgataagaggacaacatatgcacctgctgtgacacatgaaacagtgcggcctgaagttcatgagattacccaggagaaggttttcaaagaaatacatacccatgacgtattccatcgccagcagcccgtctacgaccttgagatcctgccagcacggcatttcataaaagacgagaagacgggcgaactaagagaagcatcagaggctgaactacccatcagctgcacaggtccgcaggcgcggtggcgcaagtacgctggcttgcaagctgggaatcctctcgatgttcacgaagtagagggagacgcgcaagcagaaaaaacgagtgagaggaggtag

SEQ ID NO: 16601 - protein, 226 aa, Muscodor strobelii
  misc_feature: SGI Peptide ID NO. 565528
  misc_feature (108)..(177): NCBI GI: 46135909 Blast Desc: FG09470.1 [Gibberella zeae PH-1]
  misc_feature (121)..(170): NCBI GI: 189189536 Blast Desc: PTRG_00774 [Pyrenophora tritici-repentis Pt-1C-BFP] gi|187972713|gb|EDU40212.1| PTRG_00774 [Pyrenophora tritici-repentis Pt-1C-BFP]
MNLGSLKQRLKKALKLHRIECTSPLRDSSAQESSTNTSDQTTLSNNANDSRAQHTGHIRTLEAKIGNPEPNSSTESKPKQELETATEATQTFANEYDARAALRRAVDLTNTVDHDKRTTYAPAVTHETVRPEVHEITQEKVFKEIHTHDVFHRQQPVYDLEILPARHFIKDEKTGELREASEAELPISCTGPQARWRKYAGLQAGNPLDVHEVEGDAQAEKTSERR

SEQ ID NO: 16602 - DNA, 618 bp, Muscodor strobelii
  misc_feature: SGI cDNA ID NO. 565529
  misc_feature: Encodes the peptide sequence at SEQ ID NO 16603
atggagaaagccaagcagcacatcaaggagtttgtctccaacgccgggcaccacgagaccacagtccacaagactgagtcggctcctgtacaacacgagacggtccgaccaactcaacacgagcacatcaacccagcggtcgaccgcgaggtccataaagatcattaccagacaaccacacagcccatccacgatagagaagttctcccagagcagcaccatcacaagcttggagaggtcgagcaccgccattttgaccgccgagatcatgatgctacggaaaagaagctcgcgaccaaagccgctgagtttaaagacgagaggactgtcgaaggcactcggcacacccacagccacgcagcagtcgagggaggcgagcatgtccatcaccatatccacgagaacatacaacctgtcattcataaggagaccgttgagccccacgttgttcataccactgtccctgttcacgaagtccatcacgaggctgcgactcatcataagacaactagcctcccacccatcaccatggcagactacaagaagagtggcggagttttaggtggcaagcatgaaaccttttctcgacacgaaagagagccccagttgcgtaactga

SEQ ID NO: 16603 - protein, 205 aa, Muscodor strobelii
  misc_feature: SGI Peptide ID NO. 565529
  misc_feature (1)..(202): NCBI GI: 171676684 Blast Desc: protein product [Podospora anserina] gi|170936409|emb|CAP61066.1| protein product [Podospora anserina]
  misc_feature (1)..(202): NCBI GI: 169607999 Blast Desc: SNOG_07065 [Phaeosphaeria nodorum SN15] gi|111064596|gb|EAT85716.1| SNOG_07065 [Phaeosphaeria nodorum SN15]
  misc_feature (1)..(202): NCBI GI: 189189536 Blast Desc: PTRG_00774 [Pyrenophora tritici-repentis Pt-1C-BFP] gi|187972713|gb|EDU40212.1| PTRG_00774 [Pyrenophora tritici-repentis Pt-1C-BFP]
  misc_feature (1)..(202): NCBI GI: 154301572 Blast Desc: BC1G_10113 [Botryotinia fuckeliana B05.10] gi|150855775|gb|EDN30967.1| BC1G_10113 [Botryotinia fuckeliana B05.10]
  misc_feature (1)..(202): NCBI GI: 156032700 Blast Desc: SS1G_13755 [Sclerotinia sclerotiorum 1980] gi|154699158|gb|EDN98896.1| SS1G_13755 [Sclerotinia sclerotiorum 1980]
  misc_feature (1)..(188): NCBI GI: 46135907 Blast Desc: FG09469.1 [Gibberella zeae PH-1]
  misc_feature (1)..(190): NCBI GI: 256727678 Blast Desc: NECHADRAFT_91258 [Nectria haematococca mpVI 77-13-4]
  misc_feature (1)..(205): NCBI GI: 261354437 Blast Desc: allergen [Verticillium albo-atrum VaMs.102]
  misc_feature (19)..(189): NCBI GI: 46126671 Blast Desc: FG07713.1 [Gibberella zeae PH-1]
  misc_feature (1)..(203): NCBI GI: 58268496 Blast Desc: allergen [Cryptococcus neoformans var. neoformans JEC21] gi|134112680|ref|XP_774883.1| CNBF0480 [Cryptococcus neoformans var. neoformans B-3501A] gi|50257531|gb|EAL20236.1|
MEKAKQHIKEFVSNAGHHETTVHKTESAPVQHETVRPTQHEHINPAVDREVHKDHYQTTTQPIHDREVLPEQHHHKLGEVEHRHFDRRDHDATEKKLATKAAEFKDERTVEGTRHTHSHAAVEGGEHVHHHIHENIQPVIHKETVEPHVVHTTVPVHEVHHEAATHHKTTSLPPITMADYKKSGGVLGGKHETFSRHEREPQLRN

SEQ ID NO: 16604 - DNA, 1011 bp, Muscodor strobelii
  misc_feature: SGI cDNA ID NO. 565530
  misc_feature: Reduced expression when VOC is produced
  misc_feature: Encodes the peptide sequence at SEQ ID NO 16605
atgccagccacgaagacacctcgcatcattgtcgtcaccggcgccacgggaaaccagggcgggggcgtcgtccgcgccctgctagcctccgatcagggctggcacgtccgagcctcgacacaagatgtgacttcgtctagggccaaagcactcatcgacgaatgttccccgtacgtcgacgcaggccgcctcaccctcgtccggggccacgtctatgacccgagtagcctgcagtcggcattttctggggcgtatggcgtcttcgccatcacctctcatggccgcgctggtacagtcttggttgacgaggccgagatggctcacgagatcgaggcgggtcgcaacatggtcatggctgccaaggaatgtggtgtcgaacactttgtcttcagcagcctgcctgatatggtgaaggccactgccgggcagtttcccaagatttatcatatgaacaacaagcatgccgtcgagcagattgcaaaggagcacttgcgcggcgtgacttgtcttattcccggtttcttttacacgaacctaaggtggcctcagtacagccaacgccagtcgaacggtgtggtccggttctgtatccctattcctagcaaacaagtcgcgcaatggaccgacccaagctacgacatgggcagctttgccgcaaaggtgtttgagctaggcgtcgaaaagactgcgggtaaaacatatcccgtcttgagctcatctatcacccccgaccaaatggtcgagacgttcacgagagtcaccggccagcccgcggttcacgatcccataacccccgaagagtttggcgagatgacagctgctgcagaaaccggccctgccttcaaattagatgcgcagcagatgatggaatgggcctcggtgactccagcggacaagatatgctttggagccatggaatcgcacgaggatggttcgttcaaggacctagggcttaaggcgagcacctttgaggattggattcggcgtagcgggtggacgggacctgagtga

SEQ ID NO: 16605 - protein, 336 aa, Muscodor strobelii
  misc_feature: SGI Peptide ID NO. 565530
  misc_feature (10)..(262): Pfam Id: PF05368 Pfam Desc: NmrA-like family
  misc_feature (65)..(255): Pfam Id: PF05368 Pfam Desc: NmrA-like family
  misc_feature (10)..(51): Pfam Id: PF05368 Pfam Desc: NmrA-like family
  misc_feature (1)..(336): NCBI GI: 46127227 Blast Desc: FG07991.1 [Gibberella zeae PH-1]
  misc_feature (1)..(335): NCBI GI: 242813519 Blast Desc: cinnamoyl-CoA reductase, [Talaromyces stipitatus ATCC 10500] gi|218714522|gb|EED13945.1| cinnamoyl-CoA reductase, [Talaromyces stipitatus ATCC 10500]
  misc_feature (3)..(335): NCBI GI: 255949046 Blast Desc: Pc22g13640 [Penicillium chrysogenum Wisconsin 54-1255] gi|211592307|emb|CAP98652.1| Pc22g13640 [Penicillium chrysogenum Wisconsin 54-1255]
  misc_feature (1)..(336): NCBI GI: 256722960 Blast Desc: NECHADRAFT_97441 [Nectria haematococca mpVI 77-13-4]
  misc_feature (62)..(336): NCBI GI: 116194262 Blast Desc: CHGG_03729 [Chaetomium globosum CBS 148.51] gi|88179642|gb|EAQ87110.1| CHGG_03729 [Chaetomium globosum CBS 148.51]
  misc_feature (130)..(336): NCBI GI: 169777465 Blast Desc: [Aspergillus oryzae RIB40] gi|83771935|dbj|BAE62065.1| protein product [Aspergillus oryzae]
  misc_feature (6)..(290): NCBI GI: 171681174 Blast Desc: protein product [Podospora anserina] gi|170940545|emb|CAP65773.1| protein product [Podospora anserina]
  misc_feature (6)..(253): NCBI GI: 85091800 Blast Desc: NCU09169 [Neurospora crassa OR74A] gi|28920477|gb|EAA29843.1| conserved [Neurospora crassa OR74A]
  misc_feature (211)..(336): NCBI GI: 238494604 Blast Desc: conserved [Aspergillus flavus NRRL3357] gi|220695188|gb|EED51531.1| conserved [Aspergillus flavus NRRL3357]
  misc_feature (5)..(334): NCBI GI: 238788251 Blast Desc: NmrA family protein [Yersinia frederiksenii ATCC 33641] gi|238723497|gb|EEQ15143.1| NmrA family protein [Yersinia frederiksenii ATCC 33641]
  misc_feature: Useful for introducing or modulating the production of volatile compounds
MPATKTPRIIVVTGATGNQGGGVVRALLASDQGWHVRASTQDVTSSRAKALIDECSPYVDAGRLTLVRGHVYDPSSLQSAFSGAYGVFAITSHGRAGTVLVDEAEMAHEIEAGRNMVMAAKECGVEHFVFSSLPDMVKATAGQFPKIYHMNNKHAVEQIAKEHLRGVTCLIPGFFYTNLRWPQYSQRQSNGVVRFCIPIPSKQVAQWTDPSYDMGSFAAKVFELGVEKTAGKTYPVLSSSITPDQMVETFTRVTGQPAVHDPITPEEFGEMTAAAETGPAFKLDAQQMMEWASVTPADKICFGAMESHEDGSFKDLGLKASTFEDWIRRSGWTGPE

SEQ ID NO: 16606 - DNA, 1476 bp, Muscodor strobelii
  misc_feature: SGI EST ID NO. CUFF.40051.0
  misc_feature: Variant of the nucleotide sequence at SEQ ID NO 16604
ggggcagccagcgtaatatgcgtttgccaccatttgccatcttactcgtaccactggcacacagagagcacttatataacaccgtcctgtcaccctgtgattcaaaatctccattccaccatagcctgtgaagctgtatcatcctgcatcactcctccgagacaaagtagacaaagtacaacaaggtcggagtcaacaaaatgccagccacgaagacacctcgcatcattgtcgtcaccggcgccacgggaaaccagggcgggggcgtcgtccgcgccctgctagcctccgatcagggctggcacgtccgagcctcgacacaagatgtgacttcgtctagggccaaagcactcatcgacgaatgttccccgtacgtcgacgcaggccgcctcaccctcgtccggggccacgtctatgacccgagtagcctgcagtcggcattttctggggcgtatggcgtcttcgccatcacctctcatggccgcgctggtacagtcttggttgacgaggccgagatggctcacgagatcgaggcgggtcgcaacatggtcatggctgccaaggaatgtggtgtcgaacactttgtcttcagcagcctgcctgatatggtgaaggccactgccgggcagtttcccaagatttatcatatgaacaacaagcatgccgtcgagcagattgcaaaggagcacttgcgcggcgtgacttgtcttattcccggtttcttttacacgaacctaaggtggcctcagtacagccaacgccagtgtaagtgattatgttctgcccatctcccggtggctatttatggcaaggtgcgtcgccgactggcatgctcactcttgatcagcgaacggtgtggtccggttctgtatccctattcctagcaaacaagtcgcgcaatggaccgacccaagctacgacatgggcagctttgccgcaaaggtgtttgagctaggcgtcgaaaagactgcgggtaaaacatatcccgtcttgagctcatctatcacccccgaccaaatggtcgagacgttcacgagagtcaccggccagcccgcggttcacgatcccataacccccgaagagtttggcgagatgacagctgctgcagaaaccggccctgccttcaaattagatgcgcagcagatgatggaatgggcctcggtgactccagcggacaagatatgctttggagccatggaatcgcacgaggatggttcgttcaaggacctagggcttaaggcgagcacctttgaggattggattcggcgtagcgggtggacgggacctgagtgaggtttcgaatggtctggaagggaagaggttcatattatactatgactagtggtagagtacacggaggagagaaagatcttacgtcattgattgattgattgacagcatttcatggtcatttatatattgtgtcaatgaaatttgtactgtcgaagaccttatcgttgatggtgcatctgcgta

SEQ ID NO: 16607 - DNA, 1455 bp, Muscodor strobelii
  misc_feature: SGI cDNA ID NO. 565531
  misc_feature: Elevated expression when VOC is produced
  misc_feature: Encodes the peptide sequence at SEQ ID NO 16608
atggatcacgacagcgagaagggccggttgggcgaaacttctcatgatgaagaccgcagtttaagccaatatgaggattatgatgccaaggaggcgcggcgcgtcatttggcggattgaccgccgtctcgtcacaacggttggcgcgatgtactgcgtcagtctaatggacagaaccaaccttgcagcggccgtcatcgcaggaatggcgacagagctcaaactcatcggcgaacgctatagtatcattacactattgttcttcgtcacatatgtcctcttccaaccaccgtcgaccgtactgtgtcgaaagataggcccgcgaattcatttgtcgatcatcacagtatcgtggggtgtggttatgatcggatttggctttgtgaagaattgggaaaccctcgcgggcttacgactcgttcttggcgtttttgaagctggcttcttcccaagcgctgtctacctattatccacctggtacacccgatacgaggtcgggaagcggtactcgttcttctacatcattggatgtgtcgcgtctgcgttctctggtatccttgcgttcggcctcatgcagctgggtggaagggagggcataagtggctggagatggattttcatcattgaaggagcactcacagctgcgcttggtgtgtcaggctactggctgctagttgactttccggattctaagcgccaatcctgggatttcctcgacgagaaggatcgtcagtgggttgtccgacgagtgaatgcggaccgaggcgacgtagtcacgcagaagttcaacttgctcaaatttttaggcgctggaaccgacatcaagatctgggcctacgccatgatcttcttcggctcgaccacgatcacctactcattagcgtacttcctgcctatcatcctacacgacaacctcggatttaccgtcgccgagtctcaatgcctcgtcgctcccccatatgcctttgctggtatcgtcatgtacgccaccggatgggcgggcgataaatatcgcatccgcggccctatcatcatcttcaacatggtgctctgcctgatcggcctgcccattcttggctggcattcgaattacaaggttcgctatctcggcgcgttcttgatcacggctggcgcgaattcgaatgttccggccacattagcgtatcaggcgaacaacattcgaggtcaatggaagcgagcatttgccagtgcaacactcgtgggcttcggtggtatcggcggtatcgcgggaagtcttgtcttcaggtctcaagataaagcgacgggcttcaagcctggcctttatgcctgcattgctgttagcttgttgaacataatccttgtctgcctctgcgatctggctttcttgtactacaataagaaggcagaccgcggagagaaagagctggaagtttctgatgaagctgcacagcccggattccggtacacgtactaa

SEQ ID NO: 16608 - protein, 484 aa, Muscodor strobelii
  misc_feature: SGI Peptide ID NO. 565531
  misc_feature (47)..(418): Pfam Id: PF07690 Pfam Desc: Major Facilitator Superfamily
  misc_feature (26)..(484): NCBI GI: 85092685 Blast Desc: NCU02238 [Neurospora crassa OR74A] gi|28920931|gb|EAA30261.1| NCU02238 [Neurospora crassa OR74A]
  misc_feature (4)..(484): NCBI GI: 46110377 Blast Desc: FG02070.1 [Gibberella zeae PH-1]
  misc_feature (1)..(484): NCBI GI: 171679529 Blast Desc: protein product [Podospora anserina] gi|170939390|emb|CAP64618.1| protein product [Podospora anserina]
  misc_feature (1)..(484): NCBI GI: 256728761 Blast Desc: [Nectria haematococca mpVI 77-13-4]
  misc_feature (14)..(484): NCBI GI: 39942436 Blast Desc: MGG_03298 [Magnaporthe grisea 70-15] gi|145015697|gb|EDK00187.1| MGG_03298 [Magnaporthe grisea 70-15]
  misc_feature (3)..(484): NCBI GI: 189196945 Blast Desc: conserved [Pyrenophora tritici-repentis Pt-1C-BFP] gi|187980758|gb|EDU47384.1| conserved [Pyrenophora tritici-repentis Pt-1C-BFP]
  misc_feature (3)..(484): NCBI GI: 169616610 Blast Desc: SNOG_11478 [Phaeosphaeria nodorum SN15] gi|160703221|gb|EAT81186.2| SNOG_11478 [Phaeosphaeria nodorum SN15]
  misc_feature (5)..(483): NCBI GI: 119487152 Blast Desc: phthalate transporter, [Neosartorya fischeri NRRL 181] gi|119410588|gb|EAW20534.1| phthalate transporter, [Neosartorya fischeri NRRL 181]
  misc_feature (2)..(470): NCBI GI: 255938530 Blast Desc: Pc14g00400 [Penicillium chrysogenum Wisconsin 54-1255] gi|211584656|emb|CAP74181.1| Pc14g00400 [Penicillium chrysogenum Wisconsin 54-1255]
  misc_feature (14)..(483): NCBI GI: 154277218 Blast Desc: conserved [Ajellomyces capsulatus NAm1] gi|150413035|gb|EDN08418.1| conserved [Ajellomyces capsulatus NAm1]
  misc_feature: Useful for introducing or modulating the production of volatile compounds
MDHDSEKGRLGETSHDEDRSLSQYEDYDAKEARRVIWRIDRRLVTTVGAMYCVSLMDRTNLAAAVIAGMATELKLIGERYSIITLLFFVTYVLFQPPSTVLCRKIGPRIHLSIITVSWGVVMIGFGFVKNWETLAGLRLVLGVFEAGFFPSAVYLLSTWYTRYEVGKRYSFFYIIGCVASAFSGILAFGLMQLGGREGISGWRWIFIIEGALTAALGVSGYWLLVDFPDSKRQSWDFLDEKDRQWVVRRVNADRGDVVTQKFNLLKFLGAGTDIKIWAYAMIFFGSTTITYSLAYFLPIILHDNLGFTVAESQCLVAPPYAFAGIVMYATGWAGDKYRIRGPIIIFNMVLCLIGLPILGWHSNYKVRYLGAFLITAGANSNVPATLAYQANNIRGQWKRAFASATLVGFGGIGGIAGSLVFRSQDKATGFKPGLYACIAVSLLNIILVCLCDLAFLYYNKKADRGEKELEVSDEAAQPGFRYTY

SEQ ID NO: 16609 - DNA, 2826 bp, Muscodor strobelii
  misc_feature: SGI EST ID NO. CUFF.39322.1
  misc_feature: Variant of the nucleotide sequence at SEQ ID NO 16607
agccaagaacattcgatacataatcattctatgcagagattcgtttatctttgttccggtaaagcattgcattgttgttgaagatgcgattggccactatgtagacaacttcctctcacaccgatatcagccacttagtaggctattcaattccaagcacacgccatgagcggtcagcttgcccaacgaggtaagcggccgtccaagagcggggaagtagaagtctatgatcttacgcatgatatgacgttgaagatagtggttggctgcattaccccagattcccttcctctactcttctccgcaccttggctatggggtggttggggctcggcacctccgcacagtaggggttgctttccacatagacgatggtgtagacttggcgagcttggtaacaggggtgggaaacgaaagacctgtctaggcctacgtgatgatgtcctcggttttgcattgctgtcgagtagataaagtagagcgcgtccgtcgtgccacgtgcattccgtaatctcacttggacagtacccattctctggctcttgtgtaaactcaattcatgatggatcacgacagcgagaagggccggttgggcgaaacttctcatgatgaagaccgcagtttaagccaatatgaggattatgatgccaaggaggcgcggcgcgtcatttggcggattgaccgccgtctcgtcacaacggttggcgcgatgtactgcgtcagtctaatggacagaaccaaccttgcagcggccgtcatcgcaggaatggcgacagagctcaaactcatcggcgaacgctatagtatcattacactattgttcttcgtcacatatgtcctcttccaaccaccgtcgaccgtactgtgtcgaaagataggcccgcgaattcatttgtcgatcatcacagtatcgtggggtgtggttatgatcggatttggctttgtgaagaattgggaaaccctcgcgggcttacgactcgttcttggcgtttttgaagctggcttcttcccaagcgctgtctacctattatccacctggtacacccgatacgaggtcgggaagcggtactcgttcttctacatcattggatgtgtcgcgtctgcgttctctggtatccttgcgttcggcctcatgcagctgggtggaagggagggcataagtggctggagatggattttcatcattgaaggagcactcacagctgcgcttggtgtgtcaggctactggctgctagttgactttccggattctaagcgccaatcctgggatttcctcgacgagaaggatcgtcagtgggttgtccgacgagtgaatgcggaccgaggcgacgtagtcacgcagaagttcaacttgctcaaatttttaggcgctggaaccgacatcaagatctgggcctacgccatgatcttcttcggctcgaccacgatcacctactcattagcgtacttcctgcctatcatcctacacgacaacctcggatttaccgtcgccgagtctcaatgcctcgtcgctcccccatatgcctttgctggtatcgtcatgtacgccaccggatgggcgggcgataaatatcgcatccgcggccctatcatcatcttcaacatggtgctctgcctgatcggcctgcccattcttggctggcattcgaattacaaggttcgctatctcggcgcgttcttgatcacggctggcgcgaattcgaatgttccggccacattagcgtatcaggcgaacaacattcgaggtcaatggaagcgagcatttgccagtgcaacactcgtgggcttcggtggtatcggcggtatcgcgggaagtcttgtcttcaggtctcaagataaagcgacgggcttcaagcctggcctttatgcctgcattgctgttagcttgttgaacataatccttgtctgcctctgcgatctggctttcttgtactacaataagaaggcagaccgcggagagaaagagctggaagtttctgatgaagctgcacagcccggattccggtacacgtactaaacagatacgcaatgtattacatatggctagtttcgctgttgcatactcaatgaaattctcatgtgtacatattttgcgccaacacgtagtcctgtgtaccacagaagtaatctcgatatgacaggacttgcagacagtgcgtgcatatgaacttcgtggcttagagtggttgagtaaagagttcacgtttagtagcaacactccgtagaccttcaatgacatcgactcgcatcatgatggaagagcatcgcgaatccctcccctacgatcttccttcacaatattatcgcaacaaagccaacccaagtccaaaagacagtgcagcaacaggtaaatggttttccagcccgcctccaatgagcttgtagctcacagcaccgtcgatagtcggaaagacactcaacagaatcatcgataacccttgcaattttctctcgcctttgtaccaaatagcaagacataacaagctaataactgtagtacgccctcccatcaattgcgtgagcgcatcggtgagctgctgcgcgtctgttgatacgggtgcgggaaagccgacttgtgctaggacctcgcggggttgtagaagactttttatgccgatgaagaatgggattgagctgaggacagcggcggcattcgataccgatactaatgaagaggaagacatggttacggtctggagatgactgatgaattccaagctgacttgatctcaattctggaatagattcgatgagacaaaattaaatctgctagatttctacgggcgcgcgtggcttttaacatgtcgcgtcagtttaagtgctgac

SEQ ID NO: 16610 - DNA, 384 bp, Muscodor strobelii
  misc_feature: SGI cDNA ID NO. 565532
  misc_feature: Encodes the peptide sequence at SEQ ID NO 16611
atgtcttcctcttcattagtatcggtatcgaatgccgccgctgtcctcagctcaatcccattcttcatcggcataaaaagtcttctacaaccccgcgaggtcctagcacaagtcggctttcccgcacccgtatcaacagacgcgcagcagctcaccgatgcgctcacgcaattgatgggagggcgtactacagttattagcttgttatgtcttgctatttggtacaaaggcgagagaaaattgcaagggttatcgatgattctgttgagtgtctttccgactatcgacggtgctgtgagctacaagctcattggaggcgggctggaaaaccatttacctgttgctgcactgtcttttggacttgggttggctttgttgcgataa

SEQ ID NO: 16611 - protein, 127 aa, Muscodor strobelii
  misc_feature: SGI Peptide ID NO. 565532
  misc_feature (1)..(114): NCBI GI: 256724369 Blast Desc: NECHADRAFT_54666 [Nectria haematococca mpVI 77-13-4]
  misc_feature (1)..(121): NCBI GI: 70985512 Blast Desc: integral membrane protein [Aspergillus fumigatus Af293] gi|66845890|gb|EAL86224.1| integral membrane protein, [Aspergillus fumigatus Af293] gi|159125807|gb|EDP50923.1| A1163]
  misc_feature (8)..(121): NCBI GI: 119499405 Blast Desc: integral membrane protein, [Neosartorya fischeri NRRL 181] gi|119414624|gb|EAW24563.1| integral membrane protein, [Neosartorya fischeri NRRL 181]
  misc_feature (29)..(106): NCBI GI: 46109748 Blast Desc: FG01756.1 [Gibberella zeae PH-1]
MSSSSLVSVSNAAAVLSSIPFFIGIKSLLQPREVLAQVGFPAPVSTDAQQLTDALTQLMGGRTTVISLLCLAIWYKGERKLQGLSMILLSVFPTIDGAVSYKLIGGGLENHLPVAALSFGLGLALLR

SEQ ID NO: 16612 - DNA, 1203 bp, Muscodor strobelii
  misc_feature: SGI cDNA ID NO. 565533
  misc_feature: Encodes the peptide sequence at SEQ ID NO 16613
atgccccaattcgagatccctgcatccgccacaggccttcgtgttgtgccagactcacaactagaccttcgacctgaagcagaaatcgtcgacgaactaaagtcatttcgctctgttaactcagaaaagaatgtatgggccttctgggacaagggatttgattcgatatatcccagctacagacatacagtcctcaattgggtgcgcaagcttggaccgtcctggaccgtccgcattctagatttcgtcgatggatctcccaataacgtctataacttcgttggcgaggagtggtttcccgaaagcttagtaaatcggacaatggatggacgtcacgctgcacagcatgcggcagatcttcttcgcctgccgcttcttttcgtccatggtggggtctggatggatgtcggtaacatgctccacacccatttggacactttgttctgggaccacctcactgcttcagacgcgccatatgagatggcagtctgggttattaccggtcagatcaggacgcaatggggaagctttgggaactacatgctcgcggcgcggaaagaatgtgttttcatcaagaattggcacaattgttggaaagagctctggagaggccgcaccaacgttgacggctttcataaactccctcttgtgcaagacataggactcgcagaggggatgagagatgaaaacgtgccggaacaggtttacttcatgagcgactacgtggcgcacatgctgattggtgatcgcacgcggaacctgctcgatgtgagcaccggctggaatggtcgcgagttctacgagaacaaagtctttcatgtcgaaggcatctacaatggcatcttaggcgctttgcggacgaacctggacgggtataagcaagttgagttgttcacgacacgactcgatgatctcgacgaggcgaagaggaaggcagctgaagccttcattgtggagatgattgagaagagccacatgtacaaggtgtatcacaactccgtaaactcgttgcctgcgctcggcgacattgtcaaaaaggatgggttcaaagacgcgtgtcataggcctggcacttacggcgagatgtatcggtatggaacggttcactgggagtcgacgcgtgctgtcgagcgcatgcttccacagccaagcggagagccgttaataagagcgacgcccacgactccaaggcaacaagattaa

SEQ ID NO: 16613 - protein, 400 aa, Muscodor strobelii
  misc_feature: SGI Peptide ID NO. 565533
  misc_feature (3)..(399): NCBI GI: 256724493 Blast Desc: NECHADRAFT_106564 [Nectria haematococca mpVI 77-13-4]
  misc_feature (4)..(394): NCBI GI: 46127047 Blast Desc: FG07901.1 [Gibberella zeae PH-1]
  misc_feature (10)..(384): NCBI GI: 242804552 Blast Desc: capsule polysaccharide biosynthesis protein, [Talaromyces stipitatus ATCC 10500] gi|218717743|gb|EED17164.1| capsule polysaccharide biosynthesis protein, [Talaromyces ATCC
  misc_feature (12)..(376): NCBI GI: 212539426 Blast Desc: conserved [Penicillium marneffei ATCC 18224] gi|210067167|gb|EEA21259.1| conserved [Penicillium marneffei ATCC 18224]
  misc_feature (26)..(394): NCBI GI: 70985642 Blast Desc: capsule polysaccharide biosynthesis protein [Aspergillus fumigatus Af293] gi|66845955|gb|EAL86289.1| capsule polysaccharide biosynthesis protein, [Aspergillus fumigatus
  misc_feature (26)..(376): NCBI GI: 121701753 Blast Desc: conserved [Aspergillus clavatus NRRL 1] gi|119397284|gb|EAW07715.1| conserved [Aspergillus clavatus NRRL 1]
  misc_feature (22)..(376): NCBI GI: 212538985 Blast Desc: capsule polysaccharide biosynthesis protein, [Penicillium marneffei ATCC 18224] gi|210069390|gb|EEA23481.1| capsule polysaccharide biosynthesis protein, [Penicillium ATCC
  misc_feature (2)..(375): NCBI GI: 242779945 Blast Desc: conserved [Talaromyces stipitatus ATCC 10500] gi|218719639|gb|EED19058.1| conserved [Talaromyces stipitatus ATCC 10500]
  misc_feature (21)..(380): NCBI GI: 67538582 Blast Desc: AN5461.2 [Aspergillus nidulans FGSC A4] gi|40743431|gb|EAA62621.1| [Aspergillus nidulans FGSC A4] gi|259485092|tpe|CBF81870.1| TPA: capsule polysaccharide protein,
  misc_feature (2)..(374): NCBI GI: 225683496 Blast Desc: conserved [Paracoccidioides brasiliensis Pb03]
MPQFEIPASATGLRVVPDSQLDLRPEAEIVDELKSFRSVNSEKNVWAFWDKGFDSIYPSYRHTVLNWVRKLGPSWTVRILDFVDGSPNNVYNFVGEEWFPESLVNRTMDGRHAAQHAADLLRLPLLFVHGGVWMDVGNMLHTHLDTLFWDHLTASDAPYEMAVWVITGQIRTQWGSFGNYMLAARKECVFIKNWHNCWKELWRGRTNVDGFHKLPLVQDIGLAEGMRDENVPEQVYFMSDYVAHMLIGDRTRNLLDVSTGWNGREFYENKVFHVEGIYNGILGALRTNLDGYKQVELFTTRLDDLDEAKRKAAEAFIVEMIEKSHMYKVYHNSVNSLPALGDIVKKDGFKDACHRPGTYGEMYRYGTVHWESTRAVERMLPQPSGEPLIRATPTTPRQQD

SEQ ID NO: 16614 - DNA, 1804 bp, Muscodor strobelii
  misc_feature: SGI EST ID NO. CUFF.39276.0
  misc_feature: Variant of the nucleotide sequence at SEQ ID NO 16612
gtgtaatgatatccattgcccatactgcttaccgtcgtgttcgcatactgatgctctagttggaggcaatgacagggtaaggcgagtcagcacagttgcagatagggggcttgggcggattttcaggcgtctcattatgaatcattcctcagcctcaacccttcccccacctgttcattgagctatggtgctcaattggcgctcaattggcctattgaatggccgcgccccatgaactcatctatcattcatttcttctaatgcgctaatgagtgaaccatatcaatgatgaaccaagttttcattcggctatgctctgaattgactaggtatggaatggcgagcggacaggccggcgagatgcatgagccatagttgacgctgtgcgacatggtggctttttgcagaagaaatatatagaatcggcatcgcaagtgactcggcgaagaataatcacaattggcaacatcagtttcctcacccgaagcccattatatttatcaagggtcctcacttgatgcttcccgcattaacaggcgtcgcagcgcaatccccgtcagtcgcgatgccccaattcgagatccctgcatccgccacaggccttcgtgttgtgccagactcacaactagaccttcgacctgaagcagaaatcgtcgacgaactaaagtcatttcgctctgttaactcagaaaagaatgtatgggccttctgggacaagggatttgattcgatatatcccagctacagacatacagtcctcaattgggtgcgcaagcttggaccgtcctggaccgtccgcattctagatttcgtcgatggatctcccaataacgtctataacttcgttggcgaggagtggtttcccgaaagcttagtaaatcggacaatggatggacgtcacgctgcacagcatgcggcagatcttcttcgcctgccgcttcttttcgtccatggtggggtctggatggatgtcggtaacatgctccacacccatttggacactttgttctgggaccacctcactgcttcagacgcgccatatgagatggcagtctgggttattaccggtcagatcaggacgcaatggggaagctttgggaactacatgctcgcggcgcggaaagaatgtgttttcatcaagaattggcacaattgttggaaagagctctggagaggccgcaccaacgttgacggctttcataaactccctcttgtgcaagacataggactcgcagaggggatgagagatgaaaacgtgccggaacaggtttacttcatgagcgactacgtggcgcacatgctgattggtgatcgcacgcggaacctgctcgatgtgagcaccggctggaatggtcgcgagttctacgagaacaaagtctttcatgtcgaaggcatctacaatggcatcttaggcgctttgcggacgaacctggacgggtataagcaagttgagttgttcacgacacgactcgatgatctcgacgaggcgaagaggaaggcagctgaagccttcattgtggagatgattgagaagagccacatgtacaaggtgtatcacaactccgtaaactcgttgcctgcgctcggcgacattgtcaaaaaggatgggttcaaagacgcgtgtcataggcctggcacttacggcgagatgtatcggtatggaacggttcactgggagtcgacgcgtgctgtcgagcgcatgcttccacagccaagcggagagccgttaataagagcgacgcccacgactccaaggcaacaagattaattgcagtattagagtatgtagagatggagatagaga

SEQ ID NO: 16615 - DNA, 1047 bp, Muscodor strobelii
  misc_feature: SGI cDNA ID NO. 565534
  misc_feature: Encodes the peptide sequence at SEQ ID NO 16616
atgcctcccgtaaaagactatgtccagtgggcagatctctctccgaacttcaaaccatttcccaaatatggccattattccgagttgacatcaggatgggtagccattgcctcatcagtgcgtgctggcatggatcaaatgtggtccatacctgactgggcgacggcacgcaaacttatcggtgacccagacgctgccatgcctccaggtggtccggacagatacaaggaggcgaacacggagattatacattttccggctcgagacggtcattcaattgaattgaagatatataggtcgccaaatgttaagcctgatgcgacttgtgtatatcgtatgcatggtgggggttatgttattgggagtcatgaagtagatggcaccgaaaacgtctatgcggctttgaatcacaatatcgtcgtcatcagcgtcgactaccgactagcgcccgaaaacccattccccacacctgtgcatgatgcgtacgatggcttaatatgggtcaaacaaaatgcaactgatctaggcgtgaacccagaaaagatcatactcgccggtagcagcgcaggagcgaacttagcctccgtactatcaataatggctagagaaaacggcataaccggcatcatcgctcaagttctgcatttccctccgacctgccatcccaagttttcgccccgagacaaatacgagttcggtagtataacccaaaatgccgataatgatgttttgaccacccctcgctacgaggcattctgtgatgctcacatgccggatgctgagcctgattggaggcactcgccgctgcttgcttcttcacacaagaatcttccgccgacatttattcaaagtgcaggtctcgacgtgtttcgtgatgatgcattcgcttatgcggaggcgctccgtgagtctggggttgatttggaaattcacgcgtataagggagtcggacattgtttccctgctcttgggccgacactgcctgagacgcctgttttctatgagaggtatatggacttcttgaagaagcatgcgggtgagtattga

SEQ ID NO: 16616 - protein, 348 aa, Muscodor strobelii
  misc_feature: SGI Peptide ID NO. 565534
  misc_feature (109)..(322): Pfam Id: PF07859 Pfam Desc: alpha/beta hydrolase fold
  misc_feature (9)..(345): NCBI GI: 256729339 Blast Desc: NECHADRAFT_84185 [Nectria haematococca mpVI 77-13-4]
  misc_feature (1)..(345): NCBI GI: 46110673 Blast Desc: FG02218.1 [Gibberella zeae PH-1]
  misc_feature (1)..(343): NCBI GI: 261352108 Blast Desc: esterase/lipase/thioesterase [Verticillium albo-atrum VaMs.102]
  misc_feature (13)..(342): NCBI GI: 225683572 Blast Desc: alpha/beta hydrolase fold-3 domain-containing protein [Paracoccidioides brasiliensis Pb03]
  misc_feature (13)..(342): NCBI GI: 226287193 Blast Desc: lipase/esterase [Paracoccidioides brasiliensis Pb18]
  misc_feature (13)..(342): NCBI GI: 226277674 Blast Desc: lipase/esterase [Paracoccidioides brasiliensis Pb01]
  misc_feature (22)..(320): NCBI GI: 240277652 Blast Desc: lipase [Ajellomyces capsulatus H143]
  misc_feature (22)..(341): NCBI GI: 154285402 Blast Desc: [Ajellomyces capsulatus NAm1] gi|150407137|gb|EDN02678.1| [Ajellomyces capsulatus NAm1]
  misc_feature (22)..(341): NCBI GI: 225557107 Blast Desc: alpha/beta hydrolase fold-3 domain-containing protein [Ajellomyces capsulatus G186AR]
  misc_feature (22)..(342): NCBI GI: 239612279 Blast Desc: lipase/esterase [Ajellomyces dermatitidis ER-3]
  misc_feature (89)..(320): SWISSPROT Homolog: EC 3.1.1.3 Triacylglycerol lipase
MPPVKDYVQWADLSPNFKPFPKYGHYSELTSGWVAIASSVRAGMDQMWSIPDWATARKLIGDPDAAMPPGGPDRYKEANTEIIHFPARDGHSIELKIYRSPNVKPDATCVYRMHGGGYVIGSHEVDGTENVYAALNHNIVVISVDYRLAPENPFPTPVHDAYDGLIWVKQNATDLGVNPEKIILAGSSAGANLASVLSIMARENGITGIIAQVLHFPPTCHPKFSPRDKYEFGSITQNADNDVLTTPRYEAFCDAHMPDAEPDWRHSPLLASSHKNLPPTFIQSAGLDVFRDDAFAYAEALRESGVDLEIHAYKGVGHCFPALGPTLPETPVFYERYMDFLKKHAGEY

SEQ ID NO: 16617 - DNA, 2120 bp, Muscodor strobelii
  misc_feature: SGI EST ID NO. CUFF.39279.0
  misc_feature: Variant of the nucleotide sequence at SEQ ID NO 16615
ccgcaactcaatgcgctggtgtttccaaagcacactccgaatttcgtcatctataacggattctttgataccattaccaggttaccactttgatcaataatgcctcccgtaaaagactatgtccagtgggcagatctctctccgaacttcaaaccatttcccaaatatggccattattccgagttgacatcaggatgggtagccattgcctcatcagtgcgtgctggcatggatcaaatgtggtccatacctgactgggcgacggcacgcaaacttatcggtgacccagacgctgccatgcctccaggtggtccggacagatacaaggaggcgaacacggagattatacattttccggctcgagacggtcattcaattgaattgaagatatataggtcgccaaatgttaagcctgatgcgacttgtgtatatcgtatgcatggtgggggttatgttattgggagtcatgaagtagatggcaccgaaaacgtctatgcggctttgaatcacaatatcgtcgtcatcagcgtcgactaccgactagcgcccgaaaacccattccccacacctgtgcatgatgcgtacgatggcttaatatgggtcaaacaaaatgcaactgatctaggcgtgaacccagaaaagatcatactcgccggtagcagcgcaggagcgaacttagcctccgtactatcaataatggctagagaaaacggcataaccggcatcatcgctcaagttctgcatttccctccgacctgccatcccaagttttcgccccgagacaaatacgagttcggtagtataacccaaaatgccgataatgatgttttgaccacccctcgctacgaggcattctgtgatgctcacatgccggatgctgagcctgattggaggcactcgccgctgcttgcttcttcacacaagaatcttccgccgacatttattcaaagtgcaggtctcgacgtgtttcgtgatgatgcattcgcttatgcggaggcgctccgtgagtctggggttgatttggaaattcacgcgtataagggagtcggacattgtttccctgctcttgggccgacactgcctgagacgcctgttttctatgagaggtatatggacttcttgaagaagcatgcgggtgagtattgaaacaggttgggaaactcactgtacatagacgatcatgtaattattgggtattgagtacgtcaccgtgctagtatgatgcactctcgtttctcaaacttctatctcggcaattggcagatgatgtctttgagaaataaaacagtaaatcaacggagactactttgaaactcgaattattcgttgttgcttgtatatacgacgtttatcgtcgagcttgctgtcctgatgtgaaaccgcagaattgaaatcctcctccacacttgcaatcacaaagaatctctcaacgccgctatcctagccgtagaggcttgaaacgaatcactatccaaagtcccatcatcaacagcatcaaccaacgcatcaacaacagcctggccctgcgtctcatccctcgccgcagcaagtatgatatccacgcccgcagacatagcaagaacagacctctgcccaggatcagaaccaaacgcattcaaaccacccgcctcaatcgcatccgtgataataacaccctcaaacccaagacgcgagcgcaactcaccctgcaaccacttcctactcaatccactcggatacgtatcgtcgagcgcggaatacagcgcccagctcggcatgatcatcttaacaccagcctgtatcgcagcagtgtacggcgcctcatcaacagcgcgaatatggtccaagctagtattaatagtgacgggcttctcatccgtattctcatctgcatcagcagagccaagaccggggaaatgcttcgctgtcgcaataacgcctttcccttgctgcgctttgatgaatgccgcgccacattcggcgactacgctcgagtcgttgctataggagcgctcgtactggtcttcgaaatcacccggctcatgaaatacatcgagaaccggcgcgagattgccgttatgcgagtacgcttgaagcgcatatgctgcttggataccagctgaattgccagcagctgtcag

SEQ ID NO: 16618 - DNA, 1059 bp, Muscodor strobelii
  misc_feature: SGI cDNA ID NO. 565535
  misc_feature: Encodes the peptide sequence at SEQ ID NO 16619
atgactttcttccgactcctcataggcacatccttcatcagtgcagtcacagcagcaatcaccgctgcagatgtcgcaccgcacgtcatattctcctacgcgggaacctcgccgccatcgagtctaaccactctagccaagacatgcggactcggcggtctgataatcttcggcgataacgtgaactcaggcctcccctcgttcatcgacggcttgcaaagcgactatgcatctgcgggctgtgcagtcaagggtccacttctgatcctcacggaccaagaaggcggacaagtaaagcgtctgcccggcggtccgacactgtccgagaagcaagtcggcgagcaaggcgatctgacagctgctggcaattcagctggtatccaagcagcatatgcgcttcaagcgtactcgcataacggcaatctcgcgccggttctcgatgtatttcatgagccgggtgatttcgaagaccagtacgagcgctcctatagcaacgactcgagcgtagtcgccgaatgtggcgcggcattcatcaaagcgcagcaagggaaaggcgttattgcgacagcgaagcatttccccggtcttggctctgctgatgcagatgagaatacggatgagaagcccgtcactattaatactagcttggaccatattcgcgctgttgatgaggcgccgtacactgctgcgatacaggctggtgttaagatgatcatgccgagctgggcgctgtattccgcgctcgacgatacgtatccgagtggattgagtaggaagtggttgcagggtgagttgcgctcgcgtcttgggtttgagggtgttattatcacggatgcgattgaggcgggtggtttgaatgcgtttggttctgatcctgggcagaggtctgttcttgctatgtctgcgggcgtggatatcatacttgctgcggcgagggatgagacgcagggccaggctgttgttgatgcgttggttgatgctgttgatgatgggactttggatagtgattcgtttcaagcctctacggctaggatagcggcgttgagagattctttgtga

SEQ ID NO: 16619 - protein, 352 aa, Muscodor strobelii
  misc_feature: SGI Peptide ID NO. 565535
  misc_feature (82)..(309): Pfam Id: PF00933 Pfam Desc: Glycosyl hydrolase family 3 N terminal domain
  misc_feature (160)..(309): Pfam Id: PF00933 Pfam Desc: Glycosyl hydrolase family 3 N terminal domain
  misc_feature (28)..(352): NCBI GI: 212541580 Blast Desc: glycosyl hydrolase, [Penicillium marneffei ATCC 18224] gi|210068244|gb|EEA22336.1| glycosyl hydrolase, [Penicillium marneffei ATCC 18224]
  misc_feature (25)..(351): NCBI GI: 242798296 Blast Desc: glycosyl hydrolase, [Talaromyces stipitatus ATCC 10500] gi|218716485|gb|EED15906.1| glycosyl hydrolase, [Talaromyces stipitatus ATCC 10500]
  misc_feature (20)..(349): NCBI GI: 121708730 Blast Desc: glycosyl hydrolase, [Aspergillus clavatus NRRL 1] gi|119400377|gb|EAW10803.1| glycosyl hydrolase, [Aspergillus clavatus NRRL 1]
  misc_feature (28)..(352): NCBI GI: 119499830 Blast Desc: glycosyl hydrolase, [Neosartorya fischeri NRRL 181] gi|119414837|gb|EAW24775.1| glycosyl hydrolase, [Neosartorya fischeri NRRL 181]
  misc_feature (28)..(352): NCBI GI: 70993214 Blast Desc: glycosyl hydrolase [Aspergillus fumigatus Af293] gi|66849088|gb|EAL89416.1| glycosyl hydrolase, [Aspergillus fumigatus Af293] gi|159125614|gb|EDP50731.1| glycosyl hydrolase,
  misc_feature (23)..(352): NCBI GI: 255931085 Blast Desc: Pc12g02050 [Penicillium chrysogenum Wisconsin 54-1255] gi|211581718|emb|CAP79832.1| Pc12g02050 [Penicillium chrysogenum Wisconsin 54-1255]
  misc_feature (21)..(352): NCBI GI: 67525805 Blast Desc: AN3360.2 [Aspergillus nidulans FGSC A4] gi|40744148|gb|EAA63328.1| AN3360.2 [Aspergillus nidulans FGSC A4] gi|259485659|tpe|CBF82868.1| TPA: glycosyl hydrolase, FGSC
  misc_feature (13)..(352): NCBI GI: 238845339 Blast Desc: glycosyl hydrolase family 3 N terminal domain-containing protein [Microsporum canis CBS 113480]
  misc_feature (20)..(352): NCBI GI: 115397099 Blast Desc: conserved [Aspergillus terreus NIH2624] gi|114192332|gb|EAU34032.1| conserved [Aspergillus terreus NIH2624]
  misc_feature (6)..(352): NCBI GI: 256671861 Blast Desc: glycoside hydrolase family 3 protein [Streptomyces sp. AA4]
  misc_feature (51)..(310): SWISSPROT Homolog: EC 3.2.1.52 Beta-N-acetylhexosaminidase
MTFFRLLIGTSFISAVTAAITAADVAPHVIFSYAGTSPPSSLTTLAKTCGLGGLIIFGDNVNSGLPSFIDGLQSDYASAGCAVKGPLLILTDQEGGQVKRLPGGPTLSEKQVGEQGDLTAAGNSAGIQAAYALQAYSHNGNLAPVLDVFHEPGDFEDQYERSYSNDSSVVAECGAAFIKAQQGKGVIATAKHFPGLGSADADENTDEKPVTINTSLDHIRAVDEAPYTAAIQAGVKMIMPSWALYSALDDTYPSGLSRKWLQGELRSRLGFEGVIITDAIEAGGLNAFGSDPGQRSVLAMSAGVDIILAAARDETQGQAVVDALVDAVDDGTLDSDSFQASTARIAALRDSL

SEQ ID NO: 16620 - DNA, 436 bp, Muscodor strobelii
  misc_feature: SGI EST ID NO. CUFF.39282.0
  misc_feature: Variant of the nucleotide sequence at SEQ ID NO 16618
ttgaccttccgtagtggtcaaagtgacttgctcaacatctgcaacgccgcccttcaaacaactcgagacacagccctattgcagcatgaccttccgtaattggctgatcttgtagctatctgccgccgtcgacagtatccgaaactctcagctagatacagatcatgtttcgctctgctgggctgggcgatggacattcccacaaaactagggagataggagcgtgatagctcgccaccaaaaagtagaatactaataggtagcggtttggcactgaatgctgaagcagaattgtgtcgccttcgcaatcaactgtgcaggcacgatgactttcttccgactcctcataggcacatccttcatcagtgcagtcacagcagcaatcaccgctgcagatgtcgcaccgcacgtcatattctcctacgcgggaacctcg

SEQ ID NO: 16621 - DNA, 180 bp, Muscodor strobelii
  misc_feature: SGI cDNA ID NO. 565536
  misc_feature: Reduced expression when VOC is produced
  misc_feature: Encodes the peptide sequence at SEQ ID NO 16622
atggactcgatggatctagaccacgacatggacgtcgacgtcgacctggtgcccgacgagcccatcgtagccgagcccgacagggaggaccgctctgacggcgaggtcgacgacgacccggacgctcgcgcgcccaccaaggtccacattagcggcctcgacgcgatgaaccccggcgac

SEQ ID NO: 16622 - protein, 60 aa, Muscodor strobelii
  misc_feature: SGI Peptide ID NO. 565536
  misc_feature: Useful for introducing or modulating the production of volatile compounds
MDSMDLDHDMDVDVDLVPDEPIVAEPDREDRSDGEVDDDPDARAPTKVHISGLDAMNPGD

SEQ ID NO: 16623 - DNA, 766 bp, Muscodor strobelii
  misc_feature: SGI EST ID NO. CUFF.39419.0
  misc_feature: Variant of the nucleotide sequence at SEQ ID NO 16621
cttcctccaccccatcttgattgtcagggcaagaggcacggtggcacggtagcacggtgtaggacttatcgataaaagcatgcgatgacctccaacccaccctcgatgctcatcaccttggtggttcatcttccttccaccagcatgatcgcaatttcgcattgcaactccccatagcaactcttcctctgaggaatgacttaatagaagcatcgatttctctgccttaggtaccttgtgcaagacacatagcatataccaaaatctcatcactcatacaaactttcgatagtcacttgacggatcccaccttgctcgcctcgccgcttcatcaccacactcttacagacgaagcgccctcactattcccccgccctcttcagatccaatcgcgtcttcgatcaggtcttcaaccaggtctccaactaagtcactagtccggtctcgcgtgcgacctgtccgctagacacaccttccgcccatcttcctctcctcctccttctttccctccttctgcgccacagcctcgcctgcatcgctgccctctccgagccgcgccgcgcgcccctcgcgcctgcttgcccgccatggactcgatggatctagaccacgacatggacgtcgacgtcgacctggtgcccgacgagcccatcgtagccgagcccgacagggaggaccgctctgacggcgaggtcgacgacgacccggacgctcgcgcgcccaccaaggtccacattagcggcctcgacgcgatgaaccccggcga
